(19) United States
(12) Patent Application Publication
(10) Pub. No.: US 2023/0416736 A1
(43) Pub. Date: Dec. 28, 2023

(54) MUCIN 5B (MUC5B) IRNA COMPOSITIONS AND METHODS OF USE THEREOF

(71) Applicant: Alnylam Pharmaceuticals, Inc., Cambridge, MA (US)

(72) Inventors: Leila Noetzli, Boston, MA (US); Margaret Parker, Cambridge, MA (US); James D. McIninch, Burlington, MA (US); Mark K. Schlegel, Boston, MA (US); Adam Castoreno, Framingham, MA (US); Jeffrey Zuber, Somerville, MA (US)

(21) Appl. No.: 18/136,386

(22) Filed: Apr. 19, 2023

Related U.S. Application Data
(63) Continuation of application No. PCT/US2021/056131, filed on Oct. 22, 2021.
(60) Provisional application No. 63/104,557, filed on Oct. 23, 2020.

(51) Int. Cl. C12N 15/113; A61P 11/00

(52) U.S. Cl. CPC C12N 15/113; A61P 11/00; C12N 2310/11; C12N 2310/315

(57) ABSTRACT

The present invention relates to RNAi agents, e.g., dsRNA agents, targeting the mucin 5B (MUC5B) gene. The invention also relates to methods of using such RNAi agents to inhibit expression of a MUC5B gene and to methods of treating or preventing a MUC5B-associated disease, such as a lung disease, e.g., cystic fibrosis, chronic obstructive pulmonary disease (COPD), and/or pulmonary fibrosis, e.g., idiopathic pulmonary fibrosis (IPF), in a subject.

### RELATED APPLICATIONS

[0001] This application is a 35 § U.S.C. 111(a) continuation application which claims the benefit of priority to PCT/US2021/056131, filed on Oct. 22, 2021, which, in turn, claims the benefit of priority to U.S. Provisional Application No. 63/104,557, filed on Oct. 23, 2020. The entire contents of each of the foregoing applications are incorporated herein by reference.

### SEQUENCE LISTING

[0002] The instant application contains a Sequence Listing which has been submitted electronically in XML file format and is hereby incorporated by reference in its entirety. Said XML copy, created on Sep. 8, 2023, is named 121301_13102_SL.xml and is 25,830,600 bytes bytes in size.

### BACKGROUND OF THE INVENTION

[0003] Mucin 5B (MUC5B) is a member of the mucin family of proteins, which are highly glycosylated macromolecular components of mucus secretions. This family member is expressed in club cells in normal lung epithelium. The MUC5B protein is the major gel-forming mucin in mucus which is secreted by submucosal glands, salivary glands, nasal mucosa, gallbladder, submucosal glands in trachea and esophagus. It is a major contributor to the lubricating and viscoelastic properties of whole saliva, normal lung mucus and cervical mucus and, in the lung, the MUC5B protein plays a key role in mucociliary transport and mucociliary clearance (MCC) and host defense responsible for trapping and clearing inhaled particles.

[0004] Increased expression of MUC5B is associated with the development of lung diseases, e.g., pulmonary fibrosis, cystic fibrosis, and/or chronic obstructive pulmonary disease (COPD). For example, mice overexpressing Muc5b exhibit increased mucosal depth, reduced ciliary beat frequency, and reduced mucociliary transport rate and bleomycin-treated mice overexpressing Muc5b in distal airways and alveoli have decreased survival and increased lung fibrosis. Furthermore, increased MUC5B expression has been onserved in the distal airways of subjects having idiopathic pulmonary fibrosis (IPF).

[0005] IPF is the result of repeated injury to the alveolar epithelium in the lung resulting in a pro-inflammatory and fibroproliferative response. IPF, affecting 5 million subjects worldwide, is a progressive lung disease characterized by a pattern of heterogeneous, subpleural patches of fibrotic, remodeled lung and honeycomb cysts. Once diagnosed with IPF, a subject has a median survival of 3-5 years. Excess production of MUC5B disrupts the normal reparative mechanisms and decreases mucociliary clearance which leads to retention of damaging particles and, thus, repeated injury, pro-inflammatory and fibroproliferative responses, and ultimately to IPF.

[0006] IPF is a complex disease caused by both genetic and environmental factors. Risk factors include male gender, age, smoking status, and certain occupational exposures (e g, mining, farming, construction). However, the strongest risk factor for IPF, genetic or otherwise, is a pathogenic gain-of-function variant (rs35705950) in the promoter of the MUC5B gene, resulting in increased expression of MUC5B, and accounting for ˜30% of total risk. Heterozygosity for rs35705950 is associated with a 6-fold increase in IPF and homozygosity is associated with a 20-fold increase in IPF. Importantly, increased MUC5B expression in distal airways and in type 2 alveolar epithelial cells and columnar epithelial cells lining honeycomb cysts has been observed in IPF subjects that do not carry the rs35705950 variant.

[0007] Current therapies (e.g., Pirfenidone, Nintedanib) are mainly supportive and may slow the progression of disease but have little impact on overall survival.

[0008] Accordingly, there exists an unmet need for effective treatments for lung diseases, e.g., pulmonary fibrosis, e.g., IPF; cystic fibrosis, and/or chronic obstructive pulmonary disease (COPD), such as an agent that can selectively and efficiently silence the MUC5B gene using the cell's own RNAi machinery that has both high biological activity and in vivo stability, and that can effectively inhibit expression of a target MUC5B gene.

### BRIEF SUMMARY OF THE INVENTION

[0009] The present disclosure provides RNAi agent compositions which effect the RNA-induced silencing complex (RISC)-mediated cleavage of RNA transcipts of a gene encoding Mucin 5B (MUC5B). The MUC5B gene may be within a cell, e.g., a cell within a subject, such as a human. The present disclosure also provides methods of using the RNAi agent compositions of the disclosure for inhibiting the expression of a MUC5B gene or for treating a subject who would benefit from inhibiting or reducing the expression of a MUC5B gene, e.g., a subject having a MUC5B-associated disorder, e.g., a subject having a lung disease, e.g., pulmonary fibrosis, e.g., idiopathic pulmonary fibrosis (IPF); cystic fibrosis, and/or chronic obstructive pulmonary disease (COPD), or a subject at risk of developing a lung disease, e.g., cystic fibrosis, chronic obstructive pulmonary disease (COPD), and/or pulmonary fibrosis, e.g., idiopathic pulmonary fibrosis, e.g., a subject carrying the rs35705950 variant (GT or TT).

[0010] Accordingly, in one aspect, the instant disclosure provides a double stranded ribonucleic acid (dsRNA) agent for inhibiting expression of a Mucin 5B (MUC5B) gene, wherein the dsRNA agent comprises a sense strand and an antisense strand forming a double stranded region, wherein the sense strand comprises a nucleotide sequence comprising at least 15 contiguous nucleotides, with 0, 1, 2, or 3 mismatches, of a portion of the nucleotide sequence of SEQ ID NO:1, or a nucleotide sequence having at least 90% nucleotide sequence identity to a portion of the nucleotide sequence of SEQ ID NO:1, and the antisense strand comprises a nucleotide sequence comprising at least 15 contiguous nucleotides, with 0, 1, 2, or 3 mismatches, of the corresponding portion of the nucleotide sequence of SEQ ID NO:6, or a nucleotide sequence having at least 90% nucleotide sequence identity to a portion of the nucleotide sequence of SEQ ID NO:6; and wherein the sense strand or the antisense strand is conjugated to one or more lipophilic moieties.

[0011] In one aspect, the present invention provides a double stranded ribonucleic acid (dsRNA) agent for inhibiting expression of a MUC5B gene in a cell, comprising a sense strand and an antisense strand forming a double stranded region, wherein the antisense strand comprises a region complementary to part of an mRNA encoding a MUC5B gene (SEQ ID NO:1), wherein each strand independently is 14 to 30 nucleotides in length; and wherein the sense strand or the antisense strand is conjugated to one or more lipophilic moieties.

[0012] In yet another aspect, the present invention provides a double stranded RNAi agent for inhibiting expression of a a MUC5B gene in a cell, comprising a sense strand and an antisense strand forming a double stranded region, wherein the antisense strand comprises at least 15 contiguous nucleotides differing by no more than 3 nucleotides from any one of the antisense nucleotide sequences in any one of Tables 2-7, 9, and 10, wherein each strand independently is 14 to 30 nucleotides in length; and wherein the sense strand or the antisense strand is conjugated to one or more lipophilic moieties.

[0013] In one embodiment, the sense strand or the antisense strand is a sense strand or an antisense strand selected from the group consisting of any of the sense strands and antisense strands in any one of Tables 2-7, 9, and 10.

[0014] In one embodiment, the antisense strand and/or the sense strand comprises at least 15 contiguous nucleotides differing by no more than three nucleotides from the antisense strand and/or the sense strand nucleotide sequences of a duplex selected from the group consisting of AD-1318337, AD-1318338, AD-1314054, AD-1317692, and AD-1318239.

[0015] In one embodiment, both the sense strand and the antisense strand is conjugated to one or more lipophilic moieties.

[0016] In one embodiment, lipophilicity of the lipophilic moiety, measured by log Kow, exceeds 0.

[0017] In one embodiment, the hydrophobicity of the double-stranded RNAi agent, measured by the unbound fraction in a plasma protein binding assay of the double-stranded RNAi agent, exceeds 0.2.

[0018] In one embodiment, the plasma protein binding assay is an electrophoretic mobility shift assay using human serum albumin protein.

[0019] In one embodiment, the dsRNA agent comprises at least one modified nucleotide.

[0020] In some embodiments, substantially all of the nucleotides of the antisense strand are modified nucleotides.

[0021] In another embodiment, all of the nucleotides of the sense strand and all of the nucleotides of the antisense strand comprise a modification.

[0022] In one embodiment, at least one of the modified nucleotides is selected from the group a deoxy-nucleotide, a 3′-terminal deoxy-thymine (dT) nucleotide, a 2′-O-methyl modified nucleotide, a 2′-fluoro modified nucleotide, a 2′-deoxy-modified nucleotide, a locked nucleotide, an unlocked nucleotide, a conformationally restricted nucleotide, a constrained ethyl nucleotide, an abasic nucleotide, a 2′-amino-modified nucleotide, a 2′-O-allyl-modified nucleotide, 2′-C-alkyl-modified nucleotide, a 2′-hydroxyl-modified nucleotide, a 2′-methoxyethyl modified nucleotide, a 2′-O-alkyl-modified nucleotide, a morpholino nucleotide, a phosphoramidate, a non-natural base comprising nucleotide, a tetrahydropyran modified nucleotide, a 1,5-anhydrohexitol modified nucleotide, a cyclohexenyl modified nucleotide, a nucleotide comprising a 5′-phosphorothioate group, a nucleotide comprising a 5′-methylphosphonate group, a nucleotide comprising a 5′ phosphate or 5′ phosphate mimic, a nucleotide comprising vinyl phosphonate, a nucleotide comprising adenosine-glycol nucleic acid (GNA), a nucleotide comprising thymidine-glycol nucleic acid (GNA)S-Isomer, a nucleotide comprising 2-hydroxymethyl-tetrahydrofurane-5-phosphate, a nucleotide comprising 2′-deoxythymidine-3′phosphate, a nucleotide comprising 2′-deoxyguanosine-3′-phosphate, a 2′-O hexadecyl nucleotide, a nucleotide comprising a 2′-phosphate, a cytidine-2′-phosphate nucleotide, a guanosine-2′-phosphate nucleotide, a 2′-O-hexadecyl-cytidine-3′-phosphate nucleotide, a 2′-O-hexadecyl-adenosine-3′-phosphate nucleotide, a 2′-O-hexadecyl-guanosine-3′-phosphate nucleotide, a 2′-O-hexadecyl-uridine-3′-phosphate nucleotide, a a 5′-vinyl phosphonate (VP), a 2′-deoxyadenosine-3′-phosphate nucleotide, a 2′-deoxycytidine-3′-phosphate nucleotide, a 2′-deoxyguanosine-3′-phosphate nucleotide, a 2′-deoxythymidine-3′-phosphate nucleotide, a 2′-deoxyuridine nucleotide, and a terminal nucleotide linked to a cholesteryl derivative and a dodecanoic acid bisdecylamide group; and combinations thereof.

[0023] In another embodiment, modified nucleotide is selected from the group consisting of a 2′-deoxy-2′-fluoro modified nucleotide, a 2′-deoxy-modified nucleotide, 3′-terminal deoxy-thymine nucleotides (dT), a locked nucleotide, an abasic nucleotide, a 2′-amino-modified nucleotide, a 2′-alkyl-modified nucleotide, a 2′-O-methyl modified nucleotide, a nucleotide comprising glycol nucleic acid (GNA), a morpholino nucleotide, a phosphoramidate, and a non-natural base comprising nucleotide.

[0024] In another embodiment, the modified nucleotide comprises a short sequence of 3′-terminal deoxy-thymine nucleotides (dT).

[0025] In yet another embodiment, the modifications on the nucleotides are 2′-O-methyl modifications, 2′-deoxy-modifications, 2′fluoro modifications, 5′-vinyl phosphonate (VP) modification, and 2′-O hexadecyl nucleotide modifications.

[0026] In certain embodiments, the double stranded RNAi agent does not include an inverted abasic nucleotide.

[0027] In one embodiment, the dsRNA agent further comprises at least one phosphorothioate internucleotide linkage.

[0028] In one embodiment, the dsRNA agent comprises 6-8 phosphorothioate internucleotide linkages.

[0029] In one embodiment, each strand is no more than 30 nucleotides in length.

[0030] In one embodiment, at least one strand comprises a 3′ overhang of at least 1 nucleotide.

[0031] In another embodiment, at least one strand comprises a 3′ overhang of at least 2 nucleotides.

[0032] The double stranded region may be 15-30 nucleotide pairs in length; 17-23 nucleotide pairs in length; 17-25 nucleotide pairs in length; 23-27 nucleotide pairs in length; 19-21 nucleotide pairs in length; or 21-23 nucleotide pairs in length.

[0033] Each strand of the dsRNA agent may be 15-30, 17-20, 19-30 nucleotides in length; 19-23 nucleotides in length; or 21-23 nucleotides in length, e.g., 15, 16, 17, 18, 19, 20, 21, 22, 23, 24, 25, 26, 27, 28, 29, or 30 nucleotides in length.

[0034] In certain embodiments, the double stranded RNAi agent further includes a lipophilic ligand, e.g., a C16 ligand, conjugated to the 3′ end of the sense strand through a monovalent or branched bivalent or trivalent linker.

[0035] In one embodiment, the ligand is

[chemical structure]

[0036] where B is a nucleotide base or a nucleotide base analog, optionally where B is adenine, guanine, cytosine, thymine or uracil.

[0037] In other embodiments, the agent further comprises a targeting ligand that targets a liver tissue, e.g., one or more GalNAc derivatives, conjugated to the double stranded RNAi agent via a linker or carrier.

[0038] In yet other embodiments, the agents further comprise a lipophilic ligand, e.g., a C16 ligand, conjugated to the 3′ end of the sense strand through a monovalent or branched bivalent or trivalent linker and a targeting ligand that targets a liver tissue, e.g., one or more GalNAc derivatives conjugated to the 3′ end of the sense strand through a monovalent or branched bivalent or trivalent linker.

[0039] In one embodiment, one or more lipophilic moieties are conjugated to one or more internal positions on at least one strand.

[0040] In one embodiment, the one or more lipophilic moieties are conjugated to one or more internal positions on at least one strand via a linker or carrier.

[0041] In certain embodiments, the lipophilic moiety is not a cholesterol moiety.

[0042] In certain embodiments, the agent further comprises a targeting ligand that targets a liver tissue, e.g., one or more GalNAc derivatives, optionally conjugated to the double stranded RNAi agent via a linker or carrier.

[0043] In yet other embodiments, the agents further comprise one or more lipophilic moieties conjugated to one or more internal nucleotide positions, optionally via a linker or carrier and a targeting ligand that targets a liver tissue, e.g., one or more GalNAc derivatives, optionally conjugated to the double stranded RNAi agent via a linker or carrier.

[0044] In one embodiment, the internal positions include all positions except the terminal two positions from each end of the at least one strand.

[0045] In another embodiment, the internal positions include all positions except the terminal three positions from each end of the at least one strand.

[0046] In another embodiment, the internal positions exclude a cleavage site region of the sense strand.

[0047] In yet another embodiment, the internal positions include all positions except positions 9-12, counting from the 5′-end of the sense strand. In certain embodiments, the sense strand is 21 nucleotides in length.

[0048] In one embodiment, the internal positions include all positions except positions 11-13, counting from the 3′-end of the sense strand. Optionally, the internal positions exclude the cleavage site region of the antisense strand. In certain embodiments, the sense strand is 21 nucleotides in length.

[0049] In one embodiment, the internal positions exclude a cleavage site region of the antisense strand.

[0050] In one embodiment, the internal positions include all positions except positions 12-14, counting from the 5′-end of the antisense strand. In certain embodiments, the antisense strand is 23 nucleotides in length.

[0051] In one embodiment, the internal positions include all positions except positions 11-13 on the sense strand, counting from the 3′-end, and positions 12-14 on the antisense strand, counting from the 5′-end. In certain embodiments, the sense strand is 21 nucleotides in length and the antisense strand is 23 nucleotides in length.

[0052] In one embodiment, the one or more lipophilic moieties are conjugated to one or more of the internal positions selected from the group consisting of positions 4-8 and 13-18 on the sense strand, and positions 6-10 and 15-18 on the antisense strand, counting from the 5′ end of each strand.

[0053] In one embodiment, the one or more lipophilic moieties are conjugated to one or more of the internal positions selected from the group consisting of positions 5, 6, 7, 15, and 17 on the sense strand, and positions 15 and 17 on the antisense strand, counting from the 5′-end of each strand. In certain embodiments, the sense strand is 21 nucleotides in length and the antisense strand is 23 nucleotides in length.

[0054] In one embodiment, the positions in the double stranded region exclude a cleavage site region of the sense strand.

[0055] In one embodiment, the sense strand is 21 nucleotides in length, the antisense strand is 23 nucleotides in length, and the lipophilic moiety is conjugated to position 21, position 20, position 15, position 1, position 7, position 6, or position 2 of the sense strand or position 16 of the antisense strand.

[0056] In one embodiment, the lipophilic moiety is conjugated to position 21, position 20, position position 1, or position 7 of the sense strand.

[0057] In one embodiment, the lipophilic moiety is conjugated to position 21, position 20, or position of the sense strand.

[0058] In one embodiment, the lipophilic moiety is conjugated to position 20 or position 15 of the sense strand.

[0059] In one embodiment, the lipophilic moiety is conjugated to position 16 of the antisense strand.

[0060] In one embodiment, the lipophilic moiety is an aliphatic, alicyclic, or polyalicyclic compound.

[0061] In one embodiment, the lipophilic moiety is selected from the group consisting of lipid, cholesterol, retinoic acid, cholic acid, adamantane acetic acid, 1-pyrene butyric acid, dihydrotestosterone, 1,3-bis-O(hexadecyl)glycerol, geranyloxyhexyanol, hexadecylglycerol, borneol, menthol, 1,3-propanediol, heptadecyl group, palmitic acid, myristic acid, O3-(oleoyl)lithocholic acid, O3-(oleoyl)cholenic acid, dimethoxytrityl, or phenoxazine. In certain embodiments, the lipophilic moiety is not cholesterol.

[0062] In one embodiment, the lipophilic moiety contains a saturated or unsaturated C4-C30 hydrocarbon chain, and an optional functional group selected from the group consisting of hydroxyl, amine, carboxylic acid, sulfonate, phosphate, thiol, azide, and alkyne.

[0063] In one embodiment, the lipophilic moiety contains a saturated or unsaturated C6-C18 hydrocarbon chain.

[0064] In one embodiment, the lipophilic moiety contains a saturated or unsaturated C16 hydrocarbon chain.

[0065] In one embodiment, the saturated or unsaturated C16 hydrocarbon chain is conjugated to position 6, counting from the 5′-end of the strand.

[0066] In one embodiment, the lipophilic moiety is conjugated via a carrier that replaces one or more nucleotide(s) in the internal position(s) or the double stranded region.

[0067] In one embodiment, the carrier is a cyclic group selected from the group consisting of pyrrolidinyl, pyrazolinyl, pyrazolidinyl, imidazolinyl, imidazolidinyl, piperidinyl, piperazinyl, [1,3]dioxolanyl, oxazolidinyl, isoxazolidinyl, morpholinyl, thiazolidinyl, isothiazolidinyl, quinoxalinyl, pyridazinonyl, tetrahydrofuranyl, and decalinyl; or is an acyclic moiety based on a serinol backbone or a diethanolamine backbone.

[0068] In one embodiment, the lipophilic moiety is conjugated to the double-stranded iRNA agent via a linker containing an ether, thioether, urea, carbonate, amine, amide, maleimide-thioether, disulfide, phosphodiester, sulfonamide linkage, a product of a click reaction, or carbamate.

[0069] In one embodiment, the lipophilic moiety is conjugated to a nucleobase, sugar moiety, or internucleosidic linkage.

[0070] In one embodiment, the double-stranded RNAi agent further includes a phosphate or phosphate mimic at the 5′-end of the antisense strand. Optionally, the phosphate mimic is a 5′-vinyl phosphonate (VP). When the phosphate mimic is a 5′-vinyl phosphonate (VP), the 5′-terminal nucleotide may have the following structure,

[chemical structure]

[0071] wherein X is O or S;
[0072] R is hydrogen, hydroxy, fluoro, or C₁₋₂₀ alkoxy (e.g., methoxy or n-hexadecyloxy);
[0073] R^{5′} is ═C(H)—P(O)(OH)₂ and the double bond between the C5′ carbon and R5′ is in the E or Z orientation (e.g., E orientation); and
[0074] B is a nucleobase or a modified nucleobase, optionally where B is adenine, guanine, cytosine, thymine, or uracil.

[0075] In certain embodiments, the RNAi agent does not include an inverted abasic nucleotide.

[0076] In certain embodiments, the double-stranded RNAi agent does not include a targeting ligand.

[0077] In certain embodiments, the double-stranded RNAi agent further includes a targeting ligand that targets a receptor which mediates delivery to a respiratory system tissue, e.g., a lipophilic ligand. In certain embodiments, the targeting ligand is a C16 ligand. In certain embodiments, the lipophilic ligand is not a cholesterol moiety.

[0078] In certain embodiments, the RNAi agent is taken up in one or more tissues or cell types including, but not limited to, bronchus, bronchiole, alveoli, epithelium including nasal and respiratory epithelium, ciliated epitheilium, and goblet cells; pneumocytes, both type I and type II, macrophages, peritubular interstitium, mediastinal adipose tissue, pulmonary neuronal plexus, In certain embodiments, cell types include club cells, clara cells, and neutrophils and macrophages, both resident and transient.

[0079] In one embodiment, the lipophilic moiety or a targeting ligand is conjugated via a bio-clevable linker selected from the group consisting of DNA, RNA, disulfide, amide, funtionalized monosaccharides or oligosaccharides of galactosamine, glucosamine, glucose, galactose, mannose, and combinations thereof.

[0080] In one embodiment, the 3′ end of the sense strand is protected via an end cap which is a cyclic group having an amine, said cyclic group being selected from the group consisting of pyrrolidinyl, pyrazolinyl, pyrazolidinyl, imidazolinyl, imidazolidinyl, piperidinyl, piperazinyl, [1,3]dioxolanyl, oxazolidinyl, isoxazolidinyl, morpholinyl, thiazolidinyl, isothiazolidinyl, quinoxalinyl, pyridazinonyl, tetrahydrofuranyl, and decalinyl.

[0081] In one embodiment, the dsRNA agent further comprises a targeting ligand that targets a liver tissue.

[0082] In one embodiment, the targeting ligand is a GalNAc conjugate.

[0083] In one embodiment, the dsRNA agent further comprises a terminal, chiral modification occurring at the first internucleotide linkage at the 3′ end of the antisense strand, having the linkage phosphorus atom in Sp configuration, a terminal, chiral modification occurring at the first internucleotide linkage at the 5′ end of the antisense strand, having the linkage phosphorus atom in Rp configuration, and a terminal, chiral modification occurring at the first internucleotide linkage at the 5′ end of the sense strand, having the linkage phosphorus atom in either Rp configuration or Sp configuration.

[0084] In one embodiment, the dsRNA agent further comprises a terminal, chiral modification occurring at the first and second internucleotide linkages at the 3′ end of the antisense strand, having the linkage phosphorus atom in Sp configuration, a terminal, chiral modification occurring at the first internucleotide linkage at the 5′ end of the antisense strand, having the linkage phosphorus atom in Rp configuration, and a terminal, chiral modification occurring at the first internucleotide linkage at the 5′ end of the sense strand, having the linkage phosphorus atom in either Rp or Sp configuration.

[0085] In one embodiment, the dsRNA agent further comprises a terminal, chiral modification occurring at the first, second and third internucleotide linkages at the 3′ end of the antisense strand, having the linkage phosphorus atom in Sp configuration, a terminal, chiral modification occurring at the first internucleotide linkage at the 5′ end of the antisense strand, having the linkage phosphorus atom in Rp configuration, and a terminal, chiral modification occurring at the first internucleotide linkage at the 5′ end of the sense strand, having the linkage phosphorus atom in either Rp or Sp configuration.

[0086] In one embodiment, the dsRNA agent further comprises a terminal, chiral modification occurring at the first, and second internucleotide linkages at the 3′ end of the antisense strand, having the linkage phosphorus atom in Sp configuration, a terminal, chiral modification occurring at the third internucleotide linkages at the 3′ end of the antisense strand, having the linkage phosphorus atom in Rp configuration, a terminal, chiral modification occurring at the first internucleotide linkage at the 5′ end of the antisense strand, having the linkage phosphorus atom in Rp configuration, and a terminal, chiral modification occurring at the first internucleotide linkage at the 5′ end of the sense strand, having the linkage phosphorus atom in either Rp or Sp configuration.

[0087] In one embodiment, the dsRNA agent further comprises a terminal, chiral modification occurring at the first, and second internucleotide linkages at the 3′ end of the antisense strand, having the linkage phosphorus atom in Sp configuration, a terminal, chiral modification occurring at the first, and second internucleotide linkages at the 5′ end of the antisense strand, having the linkage phosphorus atom in Rp configuration, and a terminal, chiral modification occurring at the first internucleotide linkage at the 5′ end of the sense strand, having the linkage phosphorus atom in either Rp or Sp configuration.

[0088] In one embodiment, the dsRNA agent further comprises a phosphate or phosphate mimic at the 5′-end of the antisense strand.

[0089] In one embodiment, the phosphate mimic is a 5′-vinyl phosphonate (VP).

[0090] In one embodiment, the base pair at the 1 position of the 5′-end of the antisense strand of the duplex is an AU base pair.

[0091] In one embodiment, the sense strand has a total of 21 nucleotides and the antisense strand has a total of 23 nucleotides.

[0092] The present invention further provides cells, pharmaceutical compositions for inhibiting expression of a MUC5B gene, and pharmaceutical composition comprising a lipid formulation. comprising the dsRNA agent of the invention.

[0093] In one aspect, the present invention provides a method of inhibiting expression of a MUC5B gene in a cell. The method includes contacting the cell with the dsRNA agent of the invention, or the pharmaceutical composition of the invention; and maintaining the cell produced in step (a) for a time sufficient to obtain degradation of the mRNA transcript of a MUC5B gene, thereby inhibiting expression of the MUC5B gene in the cell.

[0094] In one embodiment, the cell is within a subject.

[0095] In one embodiment, the subject is a human.

[0096] In one embodiment, the expression of the MUC5B gene is inhibited by at least 50%.

[0097] In one aspect, the present invention provides a method of treating a MUC5B-associate disorder, e.g., a subject having a lung disease, e.g., pulmonary fibrosis, e.g., idiopathic pulmonary fibrosis (IPF), cystic fibrosis, and/or chronic obstructive pulmonary disease (COPD), or a subject at risk of developing a lung disease, e.g., cystic fibrosis, chronic obstructive pulmonary disease (COPD), and/or pulmonary fibrosis, e.g., idiopathic pulmonary fibrosis, e.g., a subject carrying the carry the rs35705950 variant. The method includes administering to the subject a therapeutically effective amount of the dsRNA agent of the invention, or the pharmaceutical composition of the invention, thereby treating the subject.

[0098] In one embodiment, the subject is a human.

[0099] In one embodiment, treating comprises amelioration of at least on sign or symptom of the disease.

[0100] In one embodiment, the dsRNA agent is administered to the subject at a dose of about 0.01 mg/kg to about 50 mg/kg.

[0101] In one embodiment, the administration of the dsRNA is pulmonary system administration.

[0102] In some embodiments, the double stranded RNAi agent is administered to the subject intranasally, intratracheally, or by inhalation through the mouth. Certain devices are designed for delivery simultaneously through the mouth and nose. In some embodiments, the RNAi agent is administered to promote deposition substantially in the nasal cavity. In some embodiments, the RNAi agent is administered to promote deposition substantially in the lungs. In some embodiments, the RNAi agent is administered to promote deposition in the mouth or throat. In some embodiments, the RNAi agent is administered to promote deposition in both the nasal cavity and the lungs.

[0103] In certain embodiments, the RNAi agent is taken up in one or more tissues or cell types in the respiratory system including, but not limited to, bronchus, bronchiole, alveoli, epithelium including nasal and respiratory epithelium, ciliated epitheilium, and goblet cells; pneumocytes, both type I and type II, macrophages, peritubular interstitium, macrophages, adipose tissue, e.g., mediastinal adipose tissue, pulmonary neuronal cells, e.g., in the pulmonary neuroal plexus, club cells, clara cells, neutrophils, both resident and transient, and oral mucosa.

[0104] In certain embodiments, the RNAi agent is taken up on one or more tissue or cell types outside of the respiratory system, e.g., liver, kidney.

[0105] In one embodiment, the pulmonary system administration is oral inhalation or intranasally.

[0106] In one embodiment, the method reduces the expression of an MUC5B gene in a pulmonary system tissue, e.g., a nasopharynx tissue, an oropharynx tissue, a laryngopharynx tissue, a larynx tissue, a trachea tissue, a carina tissue, a bronchi tissue, a bronchiole tissue, or an alveoli tissue.

[0107] In one embodiment, the dsRNA agent is administered to the subject subcutaneously.

[0108] In one embodiment, the method further comprises administering to the subject an additional agent or a therapy suitable for treatment or prevention of a MUC5B-associated disorder.

[0109] In one embodiment, the additional therapeutic agent is selected from the group consisting of an anti-inflammatory agents (e.g., a systemic corticosteroid (e.g., prednisone), an immune modulator (e.g., an immunosuppressant agents (e.g., azathioprine, cyclophosphamide), a phosphodiesterase-5 inhibitor, a tyrosine kinase inhibitor (e.g., nintedanib), an antifibrotic agent (e.g., pirfenidone), and a combination of any of the foregoing.

[0110] The present invention is further illustrated by the following detailed description.

### DETAILED DESCRIPTION OF THE DRAWINGS

[0111] FIG. 1 is a graph depicting mouse MUC5B mRNA levels COS7 cells 24 hours after transfection with the indicated duplexes at 10 nM, 1.0 nM, 0.1 nM. The level of mRNA is shown relative to the level of mouse MUC5B in COS7 cell transfected with a non-targeting siRNA.

[0112] FIG. 2 is a graph depicting the level of mouse MUC5B mRNA at Day 10 post-dose in whole lung lysates from mice administered a single 10 mg/kg dose of AD-1318337, AD-1318338, AD-1314054. AD-1317692, or AD-1318239, or saline control by orotracheal application on Day 0.

### DETAILED DESCRIPTION OF THE INVENTION

[0113] The present invention provides iRNA compositions which effect the RNA-induced silencing complex (RISC)-mediated cleavage of RNA transcripts of a MUC5B gene. The MUC5B gene may be within a cell, e.g., a cell within a subject, such as a human. The use of these iRNAs enables the targeted degradation of mRNAs of the corresponding gene (a MUC5B gene) in mammals. The present disclosure also provides methods of using the RNAi compositions of the disclosure for inhibiting the expression of a MUC5B gene for treating a subject having a disorder that would benefit from inhibiting or reducing the expression of a MUC5B gene, e.g., a MUC5B-associated disorder, e.g., a lung disease, e.g., cystic fibrosis, chronic obstructive pulmonary disease (COPD), and/or pulmonary fibrosis, e.g., idiopathic pulmonary fibrosis (IPF), e.g., a subject having IPF, or a subject at risk of IPF, e.g., a subject carrying the rs35705950 variant.

[0114] The iRNAs of the invention include an RNA strand (the antisense strand) having a region which is up to about 30 nucleotides or less in length, e.g., 15-30, 15-29, 15-28, 15-27, 15-26, 15-25, 15-24, 15-23, 15-22, 15-21, 15-20, 15-19, 15-18, 15-17, 18-30, 18-29, 18-28, 18-27, 18-26, 18-25, 18-24, 18-23, 18-22, 18-21, 18-20, 19-30, 19-29, 19-28, 19-27, 19-26, 19-25, 19-24, 19-23, 19-22, 19-21, 19-20, 20-30, 20-29, 20-28, 20-27, 20-26, 20-25, 20-24,20-23, 20-22, 20-21, 21-30, 21-29, 21-28, 21-27, 21-26, 21-25, 21-24, 21-23, or 21-22 nucleotides in length, which region is substantially complementary to at least part of an mRNA transcript of a MUC5B gene. In certain embodiments, the RNAi agents of the disclosure include an RNA strand (the antisense strand) having a region which is about 21-23 nucleotides in length, which region is substantially complementary to at least part of an mRNA transcript of a MUC5B gene.

[0115] In certain embodiments, one or both of the strands of the double stranded RNAi agents of the invention is up to 66 nucleotides in length, e.g., 36-66, 26-36, 25-36, 31-60, 22-43, 27-53 nucleotides in length, with a region of at least 19 contiguous nucleotides that is substantially complementary to at least a part of an mRNA of a MUC5B gene. In some embodiments, such iRNA agents having longer length antisense strands preferably may include a second RNA strand (the sense strand) of 20-60 nucleotides in length wherein the sense and antisense strands form a duplex of 18-30 contiguous nucleotides.

[0116] The use of iRNAs of the invention enables the targeted degradation of the MUC5B mRNAs in mammals Thus, methods and compositions including these iRNAs are useful for treating a subject having a MUC5B-associated disorder, e.g., IPF, e.g., a subject having IPF, e.g., or treating a subject at risk of a IPF, e.g., a subject carrying the rs35705950 variant.

[0117] In certain embodiments, the administration of the dsRNA to a subject results in an improvement in lung function, or a stoppage or reduction of the rate of loss of lung function, or survival.

[0118] The following detailed description discloses how to make and use compositions containing iRNAs to inhibit the expression of a MUC5B gene s as well as compositions, uses, and methods for treating subjects that would benefit from inhibition and/or reduction of the expression of a MUC5B gene, e.g., subjects susceptible to or diagnosed with a MUC5B-associated disorder.

### I. Definitions

[0119] In order that the present invention may be more readily understood, certain terms are first defined. In addition, it should be noted that whenever a value or range of values of a parameter are recited, it is intended that values and ranges intermediate to the recited values are also intended to be part of this invention.

[0120] The articles “a” and “an” are used herein to refer to one or to more than one (i.e., to at least one) of the grammatical object of the article. By way of example, “an element” means one element or more than one element, e.g., a plurality of elements.

[0121] The term “including” is used herein to mean, and is used interchangeably with, the phrase “including but not limited to”.

[0122] The term “or” is used herein to mean, and is used interchangeably with, the term “and/or,” unless context clearly indicates otherwise.

[0123] The term “about” is used herein to mean within the typical ranges of tolerances in the art. For example, “about” can be understood as about 2 standard deviations from the mean. In certain embodiments, about means±10%. In certain embodiments, about means±5%. When about is present before a series of numbers or a range, it is understood that “about” can modify each of the numbers in the series or range.

[0124] The term “at least” prior to a number or series of numbers is understood to include the number adjacent to the term “at least”, and all subsequent numbers or integers that could logically be included, as clear from context. For example, the number of nucleotides in a nucleic acid molecule must be an integer. For example, “at least 18 nucleotides of a 21 nucleotide nucleic acid molecule” means that 18, 19, 20, or 21 nucleotides have the indicated property. When at least is present before a series of numbers or a range, it is understood that “at least” can modify each of the numbers in the series or range.

[0125] As used herein, “no more than” or “less than” is understood as the value adjacent to the phrase and logical lower values or integers, as logical from context, to zero. For example, a duplex with an overhang of “no more than 2 nucleotides” has a 2, 1, or 0 nucleotide overhang. When “no more than” is present before a series of numbers or a range, it is understood that “no more than” can modify each of the numbers in the series or range. As used herein, ranges include both the upper and lower limit.

[0126] As used herein, methods of detection can include determination that the amount of analyte present is below the level of detection of the method.

[0127] In the event of a conflict between an indicated target site and the nucleotide sequence for a sense or antisense strand, the indicated sequence takes precedence.

[0128] In the event of a conflict between a sequence and its indicated site on a transcript or other sequence, the nucleotide sequence recited in the specification takes precedence.

[0129] As used herein, the term “Mucin 5B” (“MUC5B”) refers to the well-known gene and polypeptide, also known in the art as also referred to as “Mucin 5B, Oligomeric Mucus/Gel-Forming,” “High Molecular Weight Salivary Mucin MG1,” “Mucin 5, Subtype B, Tracheobronchial,” “Sublingual Gland Mucin,” “Mucin-5B,” “MUC-5B,” “MUC5,” “MG1,” “Mucin-5 Subtype B, Tracheobronchial,” “Cervical Mucin MUC5B,” “Cervical Mucin,” or “MUC9.” The term “MUC5B” includes human MUC5B, the amino acid and nucleotide sequences of which may be found in, for example, GenBank Accession No. NM_002458.3 (GI: 1519244536; SEQ ID NO:1); mouse MUC5B, the amino acid and nucleotide sequence of which may be found in, for example, GenBank Accession No. NM_028801.2 (GI: 147905739, SEQ ID NO: 2); and rat MUC5B, the amino acid and nucleotide sequence of which may be found in, for example, GenBank Accession No.: XM_006230608.2 (GI: 672039062; SEQ ID NO: 3).

[0130] The term “MUC5B” also includes Macaca mulatta MUC5B, the amino acid and nucleotide sequence of which may be found in, for example, GenBank Accession No. XM_028833012.1 (GI: 1622861542; SEQ ID NO:4) and Macaca fascicularis MUC5B, the amino acid and nucleotide sequence of which may be found in, for example, GenBank Accession No. XM_015435240.1 (GI: 982295518; SEQ ID NO:5).

[0131] Additional examples of MUC5B mRNA sequences are readily available using, e.g., GenBank, UniProt, OMIM, and the Macaca genome project web site.

[0132] Exemplary MUC5B nucleotide sequences may also be found in SEQ ID NOs:1-10. SEQ ID NOs:6-10 are the reverse complement sequences of SEQ ID NOs:1-5, respectively.

[0133] Further information on MUC5B is provided, for example in the NCBI Gene database at https://www.ncbi.nlm nih.gov/gene/727897.

[0134] The entire contents of each of the foregoing GenBank Accession numbers and the Gene database numbers are incorporated herein by reference as of the date of filing this application.

[0135] The terms “Mucin 5B” and “MUC5B,” as used herein, also refers to naturally occurring DNA sequence variations of the MUC5B gene. Numerous sequence variations within the MUC5B gene have been identified and may be found at, for example, NCBI dbSNP and UniProt (see, e.g., https://www.ncbi.nlm nih.gov/snp/?term=muc5b), the entire contents of which is incorporated herein by reference as of the date of filing this application.

[0136] Th term “rs35705950 variant” refers to the well-known promotor variant of a MUC5B gene significantly associated with both familial and sporadic idiopathic pulmonary fibrosis (IPF) and with increased MUC5B expression in lung tissue of unaffected subjects. Heterozygosity for rs35705950 (GT) is associated with a 6-fold increase in IPF and homozygosity (TT) is associated with a 20-fold increase in IPF.

[0137] As used herein, “target sequence” refers to a contiguous portion of the nucleotide sequence of an mRNA molecule formed during the transcription of a MUC5B gene, including mRNA that is a product of RNA processing of a primary transcription product. In one embodiment, the target portion of the sequence will be at least long enough to serve as a substrate for RNAi-directed cleavage at or near that portion of the nucleotide sequence of an mRNA molecule formed during the transcription of a MUC5B gene. In one embodiment, the target sequence is within the protein coding region of the MUC5B gene. In another embodiment, the target sequence is within the 3′ UTR of the MUC5B gene.

[0138] The target sequence may be from about 9-36 nucleotides in length, e.g., preferably about 15-30 nucleotides in length. For example, the target sequence can be about 15-30 nucleotides, 15-29, 15-28, 15-27, 15-26, 15-25, 15-24, 15-23, 15-22, 15-21, 15-20, 15-19, 15-18, 15-17, 18-30, 18-29, 18-28, 18-27, 18-26, 18-25, 18-24, 18-23, 18-22, 18-21, 18-20, 19-30, 19-29, 19-28, 19-27, 19-26, 19-25, 19-24, 19-23, 19-22, 19-21, 19-20, 20-30, 20-29, 20-28, 20-27, 20-26, 20-25, 20-24, 20-23, 20-22, 20-21, 21-30, 21-29, 21-28, 21-27, 21-26, 21-25, 21-24, 21-23, or 21-22 nucleotides in length. In some embodiments, the target sequence is about 19 to about 30 nucleotides in length. In other embodiments, the target sequence is about 19 to about 25 nucleotides in length. In still other embodiments, the target sequence is about 19 to about 23 nucleotides in length. In some embodiments, the target sequence is about 21 to about 23 nucleotides in length. Ranges and lengths intermediate to the above recited ranges and lengths are also contemplated to be part of the invention.

[0139] As used herein, the term “strand comprising a sequence” refers to an oligonucleotide comprising a chain of nucleotides that is described by the sequence referred to using the standard nucleotide nomenclature.

[0140] “G,” “C,” “A,” “T,” and “U” each generally stand for a nucleotide that contains guanine, cytosine, adenine, thymidine, and uracil as a base, respectively. However, it will be understood that the term “ribonucleotide” or “nucleotide” can also refer to a modified nucleotide, as further detailed below, or a surrogate replacement moiety (see, e.g., Table 1). The skilled person is well aware that guanine, cytosine, adenine, and uracil can be replaced by other moieties without substantially altering the base pairing properties of an oligonucleotide comprising a nucleotide bearing such replacement moiety. It is understood that when a cDNA sequence is provided, the corresponding mRNA or RNAi agent would include a U in place of a T. For example, without limitation, a nucleotide comprising inosine as its base can base pair with nucleotides containing adenine, cytosine, or uracil. Hence, nucleotides containing uracil, guanine, or adenine can be replaced in the nucleotide sequences of dsRNA featured in the invention by a nucleotide containing, for example, inosine. In another example, adenine and cytosine anywhere in the oligonucleotide can be replaced with guanine and uracil, respectively to form G-U Wobble base pairing with the target mRNA. Sequences containing such replacement moieties are suitable for the compositions and methods featured in the invention. Further, one of skill in the art that a T is a target gene sequence, or reverse complement thereof, would often be replaced by a U in an RNAi agent of the invention.

[0141] The terms “iRNA”, “RNAi agent,” “iRNA agent,” “RNA interference agent” as used interchangeably herein, refer to an agent that contains RNA as that term is defined herein, and which mediates the targeted cleavage of an RNA transcript via an RNA-induced silencing complex (RISC) pathway. RNA interference (RNAi) is a process that directs the sequence-specific degradation of mRNA. RNAi modulates, e.g., inhibits, the expression of a MUC5B gene in a cell, e.g., a cell within a subject, such as a mammalian subject.

[0142] In one embodiment, an RNAi agent of the disclosure includes a single stranded RNAi that interacts with a target RNA sequence, e.g., a MUC5B mRNA sequence, to direct the cleavage of the target RNA. Without wishing to be bound by theory it is believed that long double stranded RNA introduced into cells is broken down into double-stranded short interfering RNAs (siRNAs) comprising a sense strand and an antisense strand by a Type III endonuclease known as Dicer (Sharp et al. (2001) Genes Dev. 15:485). Dicer, a ribonuclease-III-like enzyme, processes these dsRNA into 19-23 base pair short interfering RNAs with characteristic two base 3′ overhangs (Bernstein, et al., (2001) Nature 409:363). These siRNAs are then incorporated into an RNA-induced silencing complex (RISC) where one or more helicases unwind the siRNA duplex, enabling the complementary antisense strand to guide target recognition (Nykanen, et al., (2001) Cell 107:309). Upon binding to the appropriate target mRNA, one or more endonucleases within the RISC cleave the target to induce silencing (Elbashir, et al., (2001) Genes Dev. 15:188). Thus, in one aspect the disclosure relates to a single stranded RNA (ssRNA) (the antisense strand of a siRNA duplex) generated within a cell and which promotes the formation of a RISC complex to effect silencing of the target gene. Accordingly, the term “siRNA” is also used herein to refer to an RNAi as described above.

[0143] In another embodiment, the RNAi agent may be a single-stranded RNA that is introduced into a cell or organism to inhibit a target mRNA. Single-stranded RNAi agents bind to the RISC endonuclease, Argonaute 2, which then cleaves the target mRNA. The single-stranded siRNAs are generally 15-30 nucleotides and are chemically modified. The design and testing of single-stranded RNAs are described in U.S. Pat. No. 8,101,348 and in Lima et al., (2012) Cell 150:883-894, the entire contents of each of which are hereby incorporated herein by reference. Any of the antisense nucleotide sequences described herein may be used as a single-stranded siRNA as described herein or as chemically modified by the methods described in Lima et al., (2012) Cell 150:883-894.

[0144] In another embodiment, a “RNAi agent” for use in the compositions and methods of the disclosure is a double stranded RNA and is referred to herein as a “double stranded RNAi agent,” “double stranded RNA (dsRNA) molecule,” “dsRNA agent,” or “dsRNA”. The term “dsRNA” refers to a complex of ribonucleic acid molecules, having a duplex structure comprising two anti-parallel and substantially complementary nucleic acid strands, referred to as having “sense” and “antisense” orientations with respect to a target RNA, i.e., a MUC5B mRNA sequence. In some embodiments of the disclosure, a double stranded RNA (dsRNA) triggers the degradation of a target RNA, e.g., an mRNA, through a post-transcriptional gene-silencing mechanism referred to herein as RNA interference or RNAi.

[0145] In general, a dsRNA molecule can include ribonucleotides, but as described in detail herein, each or both strands can also include one or more non-ribonucleotides, e.g., a deoxyribonucleotide, a modified nucleotide. In addition, as used in this specification, an “RNAi agent” may include ribonucleotides with chemical modifications; an RNAi agent may include substantial modifications at multiple nucleotides.

[0146] As used herein, the term “modified nucleotide” refers to a nucleotide having, independently, a modified sugar moiety, a modified internucleotide linkage, or a modified nucleobase. Thus, the term modified nucleotide encompasses substitutions, additions or removal of, e.g., a functional group or atom, to internucleoside linkages, sugar moieties, or nucleobases. The modifications suitable for use in the agents of the disclosure include all types of modifications disclosed herein or known in the art. Any such modifications, as used in a siRNA type molecule, are encompassed by “RNAi agent” for the purposes of this specification and claims.

[0147] In certain embodiments of the instant disclosure, inclusion of a deoxy-nucleotide—which is acknowledged as a naturally occurring form of nucleotide—if present within a RNAi agent can be considered to constitute a modified nucleotide.

[0148] The duplex region may be of any length that permits specific degradation of a desired target RNA through a RISC pathway, and may range from about 9 to 36 base pairs in length, e.g., about 15-30 base pairs in length, for example, about 9, 10, 11, 12, 13, 14, 15, 16, 17, 18, 19, 20, 21, 22, 23, 24, 26, 27, 28, 29, 30, 31, 32, 33, 34, 35, or 36 base pairs in length, such as about 15-30, 15-29, 15-28, 15-26, 15-25, 15-24, 15-23, 15-22, 15-21, 15-20, 15-19, 15-18, 15-17, 18-30, 18-29, 18-28, 18-27, 18-26, 18-25, 18-24, 18-23, 18-22, 18-21, 18-20, 19-30, 19-29, 19-28, 19-27, 19-26, 19-25, 19-24, 19-23, 19-22, 19-21, 19-20, 20-30, 20-29, 20-28, 20-27, 20-26, 20-25, 20-24,20-23, 20-22, 20-21, 21-21-29, 21-28, 21-27, 21-26, 21-25, 21-24, 21-23, or 21-22 base pairs in length. Ranges and lengths intermediate to the above recited ranges and lengths are also contemplated to be part of the invention.

[0149] The two strands forming the duplex structure may be different portions of one larger RNA molecule, or they may be separate RNA molecules. Where the two strands are part of one larger molecule, and therefore are connected by an uninterrupted chain of nucleotides between the 3′-end of one strand and the 5′-end of the respective other strand forming the duplex structure, the connecting RNA chain is referred to as a “hairpin loop.” A hairpin loop can comprise at least one unpaired nucleotide. In some embodiments, the hairpin loop can comprise at at least 4, at least 5, at least 6, at least 7, at least 8, at least 9, at least 10, at least 20, at least 23 or more unpaired nucleotides or nucleotides not directed to the target site of the dsRNA. In some embodiments, the hairpin loop can be or fewer nucleotides. In some embodiments, the hairpin loop can be 8 or fewer unpaired nucleotides. In some embodiments, the hairpin loop can be 4-10 unpaired nucleotides. In some embodiments, the hairpin loop can be 4-8 nucleotides.

[0150] In certain embodiment, the two strands of double-stranded oligomeric compound can be linked together. The two strands can be linked to each other at both ends, or at one end only. By linking at one end is meant that 5′-end of first strand is linked to the 3′-end of the second strand or 3′-end of first strand is linked to 5′-end of the second strand. When the two strands are linked to each other at both ends, 5′-end of first strand is linked to 3′-end of second strand and 3′-end of first strand is linked to 5′-end of second strand. The two strands can be linked together by an oligonucleotide linker including, but not limited to, (N)n; wherein N is independently a modified or unmodified nucleotide and n is 3-23. In some embodiments, n is 3-10, e.g., 3, 4, 5, 6, 7, 8, 9, or 10. In some embodiments, the oligonucleotide linker is selected from the group consisting of GNRA, (G)4, (U)4, and (dT)4, wherein N is a modified or unmodified nucleotide and R is a modified or unmodified purine nucleotide. Some of the nucleotides in the linker can be involved in base-pair interactions with other nucleotides in the linker. The two strands can also be linked together by a non-nucleosidic linker, e.g. a linker described herein. It will be appreciated by one of skill in the art that any oligonucleotide chemical modifications or variations describe herein can be used in the oligonucleotide linker.

[0151] Hairpin and dumbbell type oligomeric compounds will have a duplex region equal to or at least 14, 15, 15, 16, 17, 18, 19, 29, 21, 22, 23, 24, or 25 nucleotide pairs. The duplex region can be equal to or less than 200, 100, or 50, in length. In some embodiments, ranges for the duplex region are 15-30, 17 to 23, 19 to 23, and 19 to 21 nucleotides pairs in length.

[0152] The hairpin oligomeric compounds can have a single strand overhang or terminal unpaired region, in some embodiments at the 3′, and in some embodiments on the antisense side of the hairpin. In some embodiments, the overhangs are 1-4, more generally 2-3 nucleotides in length. The hairpin oligomeric compounds that can induce RNA interference are also referred to as “shRNA” herein.

[0153] Where the two substantially complementary strands of a dsRNA are comprised by separate RNA molecules, those molecules need not, but can be covalently connected. Where the two strands are connected covalently by means other than an uninterrupted chain of nucleotides between the 3′-end of one strand and the 5′-end of the respective other strand forming the duplex structure, the connecting structure is referred to as a “linker.” The RNA strands may have the same or a different number of nucleotides. The maximum number of base pairs is the number of nucleotides in the shortest strand of the dsRNA minus any overhangs that are present in the duplex. In addition to the duplex structure, an RNAi may comprise one or more nucleotide overhangs.

[0154] In one embodiment, an RNAi agent of the invention is a dsRNA, each strand of which is 24-30 nucleotides in length, that interacts with a target RNA sequence, e.g., a MUC5B mRNA sequence, to direct the cleavage of the target RNA. Without wishing to be bound by theory, long double stranded RNA introduced into cells is broken down into siRNA by a Type III endonuclease known as Dicer (Sharp et al. (2001) Genes Dev. 15:485). Dicer, a ribonuclease-III-like enzyme, processes the dsRNA into 19-23 base pair short interfering RNAs with characteristic two base 3′ overhangs (Bernstein, et al., (2001) Nature 409:363). The siRNAs are then incorporated into an RNA-induced silencing complex (RISC) where one or more helicases unwind the siRNA duplex, enabling the complementary antisense strand to guide target recognition (Nykanen, et al., (2001) Cell 107:309). Upon binding to the appropriate target mRNA, one or more endonucleases within the RISC cleave the target to induce silencing (Elbashir, et al., (2001) Genes Dev. 15:188).

[0155] In one embodiment, an RNAi agent of the invention is a dsRNA agent, each strand of which comprises 19-23 nucleotides that interacts with a MUC5B mRNA sequence to direct the cleavage of the target RNA. Without wishing to be bound by theory, long double stranded RNA introduced into cells is broken down into siRNA by a Type III endonuclease known as Dicer (Sharp et al. (2001) Genes Dev. 15:485). Dicer, a ribonuclease-III-like enzyme, processes the dsRNA into 19-23 base pair short interfering RNAs with characteristic two base 3′ overhangs (Bernstein, et al., (2001) Nature 409:363). The siRNAs are then incorporated into an RNA-induced silencing complex (RISC) where one or more helicases unwind the siRNA duplex, enabling the complementary antisense strand to guide target recognition (Nykanen, et al., (2001) Cell 107:309). Upon binding to the appropriate target mRNA, one or more endonucleases within the RISC cleave the target to induce silencing (Elbashir, et al., (2001) Genes Dev. 15:188). In one embodiment, an RNAi agent of the invention is a dsRNA of 24-30 nucleotides that interacts with a MUC5B mRNA sequence to direct the cleavage of the target RNA.

[0156] As used herein, the term “nucleotide overhang” refers to at least one unpaired nucleotide that protrudes from the duplex structure of a RNAi agent, e.g., a dsRNA. For example, when a 3′-end of one strand of a dsRNA extends beyond the 5′-end of the other strand, or vice versa, there is a nucleotide overhang. A dsRNA can comprise an overhang of at least one nucleotide; alternatively, the overhang can comprise at least two nucleotides, at least three nucleotides, at least four nucleotides, at least five nucleotides or more. A nucleotide overhang can comprise or consist of a nucleotide/nucleoside analog, including a deoxynucleotide/nucleoside. The overhang(s) can be on the sense strand, the antisense strand or any combination thereof. Furthermore, the nucleotide(s) of an overhang can be present on the 5′-end, 3′-end or both ends of either an antisense or sense strand of a dsRNA.

[0157] In one embodiment of the dsRNA, at least one strand comprises a 3′ overhang of at least 1 nucleotide. In another embodiment, at least one strand comprises a 3′ overhang of at least 2 nucleotides, e.g., 2, 3, 4, 5, 6, 7, 9, 10, 11, 12, 13, 14, or 15 nucleotides. In other embodiments, at least one strand of the RNAi agent comprises a 5′ overhang of at least 1 nucleotide. In certain embodiments, at least one strand comprises a 5′ overhang of at least 2 nucleotides, e.g., 2, 3, 4, 5, 6, 7, 9, 10, 11, 12, 13, 14, or 15 nucleotides. In still other embodiments, both the 3′ and the 5′ end of one strand of the RNAi agent comprise an overhang of at least 1 nucleotide.

[0158] In one embodiment, the antisense strand of a dsRNA has a 1-10 nucleotide, e.g., 0-3, 1-3, 2-4, 2-5, 4-10, 5-10, e.g., a 1, 2, 3, 4, 5, 6, 7, 8, 9, or 10 nucleotide, overhang at the 3′-end or the 5′-end. In one embodiment, the sense strand of a dsRNA has a 1-10 nucleotide, e.g., a 1, 2, 3, 4, 5, 6, 7, 8, 9, or 10 nucleotide, overhang at the 3′-end or the 5′-end. In another embodiment, one or more of the nucleotides in the overhang is replaced with a nucleoside thiophosphate.

[0159] In certain embodiments, the overhang on the sense strand or the antisense strand, or both, can include extended lengths longer than 10 nucleotides, e.g., 1-30 nucleotides, 2-30 nucleotides, 10-30 nucleotides, or 10-15 nucleotides in length. In certain embodiments, an extended overhang is on the sense strand of the duplex. In certain embodiments, an extended overhang is present on the 3′end of the sense strand of the duplex. In certain embodiments, an extended overhang is present on the 5′end of the sense strand of the duplex. In certain embodiments, an extended overhang is on the antisense strand of the duplex. In certain embodiments, an extended overhang is present on the 3′end of the antisense strand of the duplex. In certain embodiments, an extended overhang is present on the 5′end of the antisense strand of the duplex. In certain embodiments, one or more of the nucleotides in the overhang is replaced with a nucleoside thiophosphate. In certain embodiments, the overhang includes a self-complementary portion such that the overhang is capable of forming a hairpin structure that is stable under physiological conditions.

[0160] The terms “blunt” or “blunt ended” as used herein in reference to a dsRNA mean that there are no unpaired nucleotides or nucleotide analogs at a given terminal end of a dsRNA, i.e., no nucleotide overhang. One or both ends of a dsRNA can be blunt. Where both ends of a dsRNA are blunt, the dsRNA is said to be blunt ended. To be clear, a “blunt ended” dsRNA is a dsRNA that is blunt at both ends, i.e., no nucleotide overhang at either end of the molecule. Most often such a molecule will be double stranded over its entire length.

[0161] The term “antisense strand” or “guide strand” refers to the strand of an iRNA, e.g., a dsRNA, which includes a region that is substantially complementary to a target sequence, e.g., a MUC5B mRNA sequence.

[0162] As used herein, the term “region of complementarity” refers to the region on the antisense strand that is substantially complementary to a sequence, for example a target sequence, e.g., a MUC5B nucleotide sequence, as defined herein. Where the region of complementarity is not fully complementary to the target sequence, the mismatches can be in the internal or terminal regions of the molecule. Generally, the most tolerated mismatches are in the terminal regions, e.g., within 5, 4, 3, or 2 nucleotides of the 5′- or 3′-terminus of the RNAi agent.

[0163] In some embodiments, a double stranded RNA agent of the invention includes a nucleotide mismatch in the antisense strand. In some embodiments, the antisense strand of the double stranded RNA agent of the invention includes no more than 4 mismatches with the target mRNA, e.g., the antisense strand includes 4, 3, 2, 1, or 0 mismatches with the target mRNA. In some embodiments, the antisense strand double stranded RNA agent of the invention includes no more than 4 mismatches with the sense strand, e.g., the antisense strand includes 4, 3, 2, 1, or 0 mismatches with the sense strand. In some embodiments, a double stranded RNA agent of the invention includes a nucleotide mismatch in the sense strand. In some embodiments, the sense strand of the double stranded RNA agent of the invention includes no more than 4 mismatches with the antisense strand, e.g., the sense strand includes 4, 3, 2, 1, or 0 mismatches with the antisense strand. In some embodiments, the nucleotide mismatch is, for example, within 5, 4, 3 nucleotides from the 3′-end of the iRNA. In another embodiment, the nucleotide mismatch is, for example, in the 3′-terminal nucleotide of the iRNA agent. In some embodiments, the mismatch(s) is not in the seed region.

[0164] Thus, an RNAi agent as described herein can contain one or more mismatches to the target sequence. In one embodiment, a RNAi agent as described herein contains no more than 3 mismatches (i.e., 3, 2, 1, or 0 mismatches). In one embodiment, an RNAi agent as described herein contains no more than 2 mismatches. In one embodiment, an RNAi agent as described herein contains no more than 1 mismatch. In one embodiment, an RNAi agent as described herein contains 0 mismatches. In certain embodiments, if the antisense strand of the RNAi agent contains mismatches to the target sequence, the mismatch can optionally be restricted to be within the last 5 nucleotides from either the 5′- or 3′-end of the region of complementarity. For example, in such embodiments, for a 23 nucleotide RNAi agent, the strand which is complementary to a region of a MUC5B gene, generally does not contain any mismatch within the central 13 nucleotides. The methods described herein or methods known in the art can be used to determine whether an RNAi agent containing a mismatch to a target sequence is effective in inhibiting the expression of a MUC5B gene. Consideration of the efficacy of RNAi agents with mismatches in inhibiting expression of a MUC5B gene is important, especially if the particular region of complementarity in a MUC5B gene is known to vary.

[0165] The term “sense strand” or “passenger strand” as used herein, refers to the strand of a RNAi agent that includes a region that is substantially complementary to a region of the antisense strand as that term is defined herein.

[0166] As used herein, “substantially all of the nucleotides are modified” are largely but not wholly modified and can include not more than 5, 4, 3, 2, or 1 unmodified nucleotides.

[0167] As used herein, the term “cleavage region” refers to a region that is located immediately adjacent to the cleavage site. The cleavage site is the site on the target at which cleavage occurs. In some embodiments, the cleavage region comprises three bases on either end of, and immediately adjacent to, the cleavage site. In some embodiments, the cleavage region comprises two bases on either end of, and immediately adjacent to, the cleavage site. In some embodiments, the cleavage site specifically occurs at the site bound by nucleotides 10 and 11 of the antisense strand, and the cleavage region comprises nucleotides 11, 12 and 13.

[0168] As used herein, and unless otherwise indicated, the term “complementary,” when used to describe a first nucleotide sequence in relation to a second nucleotide sequence, refers to the ability of an oligonucleotide or polynucleotide comprising the first nucleotide sequence to hybridize and form a duplex structure under certain conditions with an oligonucleotide or polynucleotide comprising the second nucleotide sequence, as will be understood by the skilled person. Conditions, such as physiologically relevant conditions as can be encountered inside an organism, can apply. The skilled person will be able to determine the set of conditions most appropriate for a test of complementarity of two sequences in accordance with the ultimate application of the hybridized nucleotides.

[0169] Complementary sequences within a RNAi agent, e.g., within a dsRNA as described herein, include base-pairing of the oligonucleotide or polynucleotide comprising a first nucleotide sequence to an oligonucleotide or polynucleotide comprising a second nucleotide sequence over the entire length of one or both nucleotide sequences. Such sequences can be referred to as “fully complementary” with respect to each other herein. However, where a first sequence is referred to as “substantially complementary” with respect to a second sequence herein, the two sequences can be fully complementary, or they can form one or more, but generally not more than 5, 4, 3, or 2 mismatched base pairs upon hybridization for a duplex up to 30 base pairs, while retaining the ability to hybridize under the conditions most relevant to their ultimate application, e.g., inhibition of gene expression via a RISC pathway. However, where two oligonucleotides are designed to form, upon hybridization, one or more single stranded overhangs, such overhangs shall not be regarded as mismatches with regard to the determination of complementarity. For example, a dsRNA comprising one oligonucleotide 21 nucleotides in length and another oligonucleotide 23 nucleotides in length, wherein the longer oligonucleotide comprises a sequence of 21 nucleotides that is fully complementary to the shorter oligonucleotide, can yet be referred to as “fully complementary” for the purposes described herein.

[0170] “Complementary” sequences, as used herein, can also include, or be formed entirely from, non-Watson-Crick base pairs or base pairs formed from non-natural and modified nucleotides, in so far as the above requirements with respect to their ability to hybridize are fulfilled. Such non-Watson-Crick base pairs include, but are not limited to, G:U Wobble or Hoogstein base pairing.

[0171] The terms “complementary,” “fully complementary” and “substantially complementary” herein can be used with respect to the base matching between the sense strand and the antisense strand of a dsRNA, or between the antisense strand of a RNAi agent and a target sequence, as will be understood from the context of their use.

[0172] As used herein, a polynucleotide that is “substantially complementary to at least part of” a messenger RNA (mRNA) or target sequence refers to a polynucleotide that is substantially complementary to a contiguous portion of the mRNA of interest or target sequence (e.g., an mRNA encoding MUC5B). For example, a polynucleotide is complementary to at least a part of a MUC5B RNA if the sequence is substantially complementary to a non-interrupted portion of an mRNA encoding MUC5B.

[0173] Accordingly, in some embodiments, the antisense strand polynucleotides disclosed herein are fully complementary to the target MUC5B sequence.

[0174] In other embodiments, the antisense strand polynucleotides disclosed herein are substantially complementary to the target MUC5B sequence and comprise a contiguous nucleotide sequence which is at least about 80% complementary over its entire length to the equivalent region of the nucleotide sequence of SEQ ID NOs: 1-5 for MUC5B, or a fragment of SEQ ID Nos: 1-5, such as about 85%, 86%, 87%, 88%, 89%, 90%, 91%, 92%, 93%, 94%, 95%, 96%, 97%, 98%, or about 99% complementary.

[0175] In other embodiments, the antisense polynucleotides disclosed herein are substantially complementary to the target MUC5B sequence and comprise a contiguous nucleotide sequence which is at least about 80% complementary over its entire length to any one of the sense strand nucleotide sequences in any one of Tables 2-7, 9, and 10, or a fragment of any one of the sense strand nucleotide sequences in any one of Tables 2-7, 9, and 10, such as about 85%, 86%, 87%, 88%, 89%, 90%, 91%, 92%, 93%, 94%, 95%, 96%, 97%, 98%, or about 99% complementary.

[0176] In one embodiment, an RNAi agent of the disclosure includes a sense strand that is substantially complementary to an antisense polynucleotide which, in turn, is the same as a target MUC5B sequence, and wherein the sense strand polynucleotide comprises a contiguous nucleotide sequence which is at least about 80% complementary over its entire length to the equivalent region of the nucleotide sequence of SEQ ID NOs: 6-10, or a fragment of any one of SEQ ID NOs: 6-10, such as about 86%, 87%, 88%, 89%, 90%, 91%, 92%, 93%, 94%, 95%, 96%, 97%, 98%, or about 99% complementary.

[0177] In some embodiments, an iRNA of the invention includes a sense strand that is substantially complementary to an antisense polynucleotide which, in turn, is complementary to a target MUC5B sequence, and wherein the sense strand polynucleotide comprises a contiguous nucleotide sequence which is at least about 80% complementary over its entire length to any one of the antisense strand nucleotide sequences in any one of any one of Tables 2-7, 9, and 10, or a fragment of any one of the antisense strand nucleotide sequences in any one of Tables 2-7, 9, and 10, such as about 86%, 87%, 88%, 89%, 90%, 91%, 92%, 93%, 94%, 95%, 96%, 97%, 98%, or about 99% complementary.

[0178] In some embodiments, the double-stranded region of a double-stranded iRNA agent is equal to or at least, 10, 11, 12, 13, 14, 15, 16, 17, 18, 19, 20, 21, 22, 23, 23, 24, 25, 26, 27, 28, 29, 30 or more nucleotide pairs in length.

[0179] In some embodiments, the antisense strand of a double-stranded iRNA agent is equal to or at least 14, 15, 16, 17, 18, 19, 20, 21, 22, 23, 23, 24, 25, 26, 27, 28, 29, or 30 nucleotides in length.

[0180] In some embodiments, the sense strand of a double-stranded iRNA agent is equal to or at least 11, 12, 13, 14, 15, 16, 17, 18, 19, 20, 21, 22, 23, 23, 24, 25, 26, 27, 28, 29, or 30 nucleotides in length.

[0181] In one embodiment, the sense and antisense strands of the double-stranded iRNA agent are each independently 15 to 30 nucleotides in length.

[0182] In one embodiment, the sense and antisense strands of the double-stranded iRNA agent are each independently 19 to 25 nucleotides in length.

[0183] In one embodiment, the sense and antisense strands of the double-stranded iRNA agent are each independently 21 to 23 nucleotides in length.

[0184] In one embodiment, the sense strand of the iRNA agent is 21-nucleotides in length, and the antisense strand is 23-nucleotides in length, wherein the strands form a double-stranded region of 21 consecutive base pairs having a 2-nucleotide long single stranded overhangs at the 3′-end.

[0185] In one aspect of the invention, an agent for use in the methods and compositions of the invention is a single-stranded antisense nucleic acid molecule that inhibits a target mRNA via an antisense inhibition mechanism. The single-stranded antisense RNA molecule is complementary to a sequence within the target mRNA. The single-stranded antisense oligonucleotides can inhibit translation in a stoichiometric manner by base pairing to the mRNA and physically obstructing the translation machinery, see Dias, N. et al., (2002) Mol Cancer Ther 1:347-355. The single-stranded antisense RNA molecule may be about 15 to about 30 nucleotides in length and have a sequence that is complementary to a target sequence. For example, the single-stranded antisense RNA molecule may comprise a sequence that is at least about 15, 16, 17, 18, 19, 20, or more contiguous nucleotides from any one of the antisense sequences described herein.

[0186] In one embodiment, at least partial suppression of the expression of a MUC5B gene, is assessed by a reduction of the amount of MUC5B mRNA which can be isolated from or detected in a first cell or group of cells in which a MUC5B gene is transcribed and which has or have been treated such that the expression of a MUC5B gene is inhibited, as compared to a second cell or group of cells substantially identical to the first cell or group of cells but which has or have not been so treated (control cells). The degree of inhibition may be expressed in terms of:

$$\frac{( mRNA in control cells ) - ( mRNA in treated cells )}{( mRNA in control cells )} \cdot 100 \%$$

[0187] In one embodiment, inhibition of expression is determined by the dual luciferase method wherein the RNAi agent is present at 10 nM.

[0188] The phrase “contacting a cell with an RNAi agent,” such as a dsRNA, as used herein, includes contacting a cell by any possible means. Contacting a cell with an RNAi agent includes contacting a cell in vitro with the RNAi agent or contacting a cell in vivo with the RNAi agent. The contacting may be done directly or indirectly. Thus, for example, the RNAi agent may be put into physical contact with the cell by the individual performing the method, or alternatively, the RNAi agent may be put into a situation that will permit or cause it to subsequently come into contact with the cell.

[0189] Contacting a cell in vitro may be done, for example, by incubating the cell with the RNAi agent. Contacting a cell in vivo may be done, for example, via inhalation, intranasal administration, or intratracheal administration, by injecting the RNAi agent into or near the tissue where the cell is located, e.g., the pulmonary system, or by injecting the RNAi agent into another area, or to the bloodstream or the subcutaneous space, such that the agent will subsequently reach the tissue where the cell to be contacted is located. For example, the RNAi agent may contain or be coupled to a ligand, e.g., a lipophilic moiety or moieties as described below and further detailed, e.g., in PCT Publication No. WO 2019/217459, the entire contents of which is incorporated herein by reference, that directs or otherwise stabilizes the RNAi agent at a site of interest, e.g., the pulmonary system. In some embodiments, the RNAi agent may contain or be coupled to a ligand, e.g., one or more GalNAc derivatives as described below, that directs or otherwise stabilizes the RNAi agent at a site of interest, e.g., the liver. In other embodiments, the RNAi agent may contain or be coupled to a lipophilic moiety or moieties and one or more GalNAc derivatives. Combinations of in vitro and in vivo methods of contacting are also possible. For example, a cell may also be contacted in vitro with an RNAi agent and subsequently transplanted into a subject.

[0190] In one embodiment, contacting a cell with an RNAi agent includes “introducing” or “delivering the RNAi agent into the cell” by facilitating or effecting uptake or absorption into the cell. Absorption or uptake of a RNAi agent can occur through unaided diffusive or active cellular processes, or by auxiliary agents or devices. Introducing a RNAi agent into a cell may be in vitro or in vivo. For example, for in vivo introduction, a RNAi agent can be injected into a tissue site or administered systemically. In vitro introduction into a cell includes methods known in the art such as electroporation and lipofection. Further approaches are described herein below or are known in the art.

[0191] The term “lipophile” or “lipophilic moiety” broadly refers to any compound or chemical moiety having an affinity for lipids. One way to characterize the lipophilicity of the lipophilic moiety is by the octanol-water partition coefficient, log K_{ow}, where K_{ow} is the ratio of a chemical's concentration in the octanol-phase to its concentration in the aqueous phase of a two-phase system at equilibrium. The octanol-water partition coefficient is a laboratory-measured property of a substance. However, it may also be predicted by using coefficients attributed to the structural components of a chemical which are calculated using first-principle or empirical methods (see, for example, Tetko et al., J. Chem. Inf. Comput. Sci. 41:1407-21 (2001), which is incorporated herein by reference in its entirety). It provides a thermodynamic measure of the tendency of the substance to prefer a non-aqueous or oily milieu rather than water (i.e. its hydrophilic/lipophilic balance). In principle, a chemical substance is lipophilic in character when its log K_{ow} exceeds 0. Typically, the lipophilic moiety possesses a log K_{ow} exceeding 1, exceeding 1.5, exceeding 2, exceeding 3, exceeding 4, exceeding 5, or exceeding 10. For instance, the log K_{ow} of 6-amino hexanol, for instance, is predicted to be approximately 0.7. Using the same method, the log K_{ow} of cholesteryl N-(hexan-6-ol) carbamate is predicted to be 10.7.

[0192] The lipophilicity of a molecule can change with respect to the functional group it carries. For instance, adding a hydroxyl group or amine group to the end of a lipophilic moiety can increase or decrease the partition coefficient (e.g., log K_{ow}) value of the lipophilic moiety.

[0193] Alternatively, the hydrophobicity of the double-stranded RNAi agent, conjugated to one or more lipophilic moieties, can be measured by its protein binding characteristics. For instance, in certain embodiments, the unbound fraction in the plasma protein binding assay of the double-stranded RNAi agent could be determined to positively correlate to the relative hydrophobicity of the double-stranded RNAi agent, which could then positively correlate to the silencing activity of the double-stranded RNAi agent.

[0194] In one embodiment, the plasma protein binding assay determined is an electrophoretic mobility shift assay (EMSA) using human serum albumin protein. An exemplary protocol of this binding assay is illustrated in detail in, e.g., PCT Publication No. WO 2019/217459. The hydrophobicity of the double-stranded RNAi agent, measured by fraction of unbound siRNA in the binding assay, exceeds 0.15, exceeds 0.2, exceeds 0.25, exceeds 0.3, exceeds 0.35, exceeds 0.4, exceeds 0.45, or exceeds 0.5 for an enhanced in vivo delivery of siRNA.

[0195] Accordingly, conjugating the lipophilic moieties to the internal position(s) of the double-stranded RNAi agent provides optimal hydrophobicity for the enhanced in vivo delivery of siRNA.

[0196] The term “lipid nanoparticle” or “LNP” is a vesicle comprising a lipid layer encapsulating a pharmaceutically active molecule, such as a nucleic acid molecule, e.g., an RNAi agent or a plasmid from which a RNAi agent is transcribed. LNPs are described in, for example, U.S. Pat. Nos. 6,858,225, 6,815,432, 8,158,601, and 8,058,069, the entire contents of which are hereby incorporated herein by reference.

[0197] As used herein, a “subject” is an animal, such as a mammal, including a primate (such as a human, a non-human primate, e.g., a monkey, and a chimpanzee), or a non-primate (such as a a cow, a pig, a horse, a goat, a rabbit, a sheep, a hamster, a guinea pig, a cat, a dog, a rat, or a mouse), or a bird that expresses the target gene, either endogenously or heterologously. In a preferred embodiment, the subject is a human, such as a human being treated or assessed for a disease, disorder, or condition that would benefit from reduction in MUC5B expression; a human at risk for a disease, disorder, or condition that would benefit from reduction in MUC5B expression; a human having a disease, disorder, or condition that would benefit from reduction in MUC5B expression; or human being treated for a disease, disorder, or condition that would benefit from reduction in MUC5B expression as described herein. In some embodiments, the subject is a female human. In other embodiments, the subject is a male human. In one embodiment, the subject is an adult subject. In another embodiment, the subject is a pediatric subject.

[0198] As used herein, the terms “treating” or “treatment” refer to a beneficial or desired result including, but not limited to, alleviation or amelioration of one or more signs or symptoms associated with MUC5B expression or MUC5B protein production, e.g., a MUC5B-associated disease, e.g., a lung disease, e.g., cystic fibrosis, chronic obstructive pulmonary disease (COPD), and/or pulmonary fibrosis, e.g., idiopathic pulmonary fibrosis (IPF) or symptoms associated with unwanted MUC5B expression; diminishing the extent of unwanted MUC5B activation or stabilization; amelioration or palliation of unwanted MUC5B activation or stabilization. “Treatment” can also mean prolonging survival as compared to expected survival in the absence of treatment.

[0199] The term “lower” in the context of the level of MUC5B in a subject or a disease marker or symptom refers to a statistically significant decrease in such level. The decrease can be, for example, at least 10%, 15%, 20%, 25%, 30%, %, 40%, 45%, 50%, 55%, 60%, 65%, 70%, 75%, 80%, 85%, 90%, 95%, or more. In certain embodiments, a decrease is at least 20%. In certain embodiments, the decrease is at least 50% in a disease marker, e.g., protein or gene expression level. “Lower” in the context of the level of MUC5B in a subject is preferably down to a level accepted as within the range of normal for an individual without such disorder. In certain embodiments, the expression of the target is normalized, i.e., decreased towards or to a level accepted as within the range of normal for an individual without such disorder, e.g., blood oxygen level, white blood cell count, kidney function, liver function. As used here, “lower” in a subject can refer to lowering of gene expression or protein production in a cell in a subject does not require lowering of expression in all cells or tissues of a subject. For example, as used herein, lowering in a subject can include lowering of gene expression or protein production in a subject.

[0200] The term “lower” can also be used in association with normalizing a symptom of a disease or condition, i.e. decreasing the difference between a level in a subject suffering from a MUC5B-associated disease towards or to a level in a normal subject not suffering from a MUC5B-associated disease. As used herein, if a disease is associated with an elevated value for a symptom, “normal” is considered to be the upper limit of normal. If a disease is associated with a decreased value for a symptom, “normal” is considered to be the lower limit of normal.

[0201] As used herein, “prevention” or “preventing,” when used in reference to a disease, disorder, or condition thereof, that would benefit from a reduction in expression of a MUC5B gene or production of a MUC5B protein, refers to a reduction in the likelihood that a subject will develop a symptom associated with such a disease, disorder, or condition, e.g., a symptom of a MUC5B-associated disease, e.g., cystic fibrosis, chronic obstructive pulmonary disease (COPD), and/or pulmonary fibrosis, e.g., IPF. The failure to develop a disease, disorder, or condition, or the reduction in the development of a symptom associated with such a disease, disorder, or condition (e.g., by at least about 10% on a clinically accepted scale for that disease or disorder), or the exhibition of delayed symptoms delayed (e.g., by days, weeks, months or years) is considered effective prevention.

[0202] As used herein, the term “MUC5B-associated disease,” is a disease or disorder that would benefit from reduction in the expression or activity of MUC5B. Such MUC5B-associated diseases include a MUC5B-associated disease.

[0203] The term “MUC5B-associated disease,” is a disease or disorder that is caused by, or associated with MUC5B expression or MUC5B protein production. The term “MUC5B-associated disease” includes a disease, disorder or condition that would benefit from a decrease in MUC5B expression or MUC5B protein activity. Non-limiting examples of MUC5B-associated diseases include, for example, lung diseases, e.g., cystic fibrosis, chronic obstructive pulmonary disease (COPD), and/or pulmonary fibrosis, e.g., idiopathic pulmonary fibrosis (IPF).

[0204] As used herein, the term “pulmonary fibrosis” refers to a condition of the lungs in which the tissue thickens and becomes scarred. This thickened, stiff tissue makes it more difficult for the lungs to work properly. As pulmonary fibrosis worsens, people become progressively more short of breath. In some embodiments, the cause of pulmonary fibrosis is unknown. In those instances, the pulmonary fibrosis is referred to as “idiopathic pulmonary fibrosis (IPF)”.

[0205] As used herein, the term “chronic obstructive pulmonary disease (COPD)” refers to a disease of the lung characterized by chronic obstruction of airflow. In COPD, the damage accrued by the lungs over time leads to a loss in elasticity of the lung tissue that is responsible for proper exhalation. When this elasticity is lost, some waste carbon dioxide is left in the lungs at the end of exhalation, leading to carbon dioxide buildup in the body. COPD leads to emphysema, which is the destruction of the alveoli, and chronic bronchitis, which is inflammation of the airway tubes in the lungs.

[0206] As used herein, the term “cystic fibrosis” refers to a genetic disorder that results in thickening tissue and buildup of mucus in the lungs, pancreas, liver, kidneys and intestines. Individuals with cystic fibrosis develop a thick mucus that can block the airways in the lungs. This mucus buildup results in troubled breathing and an increased susceptibility to respiratory infections, as mucus traps the bacteria and is unable to be removed efficiently. This condition also has severely debilitating effects on the digestive system, resulting in stunted growth and weight.

[0207] The symptoms for a MUC5B-associated disease include, for example, exertional dyspnea, a nonproductive cough, weight loss, low-grade fevers, fatigue, arthralgias, fine bibasilar inspiratory crackles (Velcro crackles), digital clubbing, pulmonary hypertension at rest, loud P2 component of the second heart sound, a fixed split S2, a holosystolic tricuspid regurgitation murmur, pedal edema, histopathologic and/or radiologic pattern of usual interstitial pneumonia (UIP), mucus buildup in the airways, troubled breathing, an increased susceptibility to respiratory infections, stunted growth and weight, a loss in elasticity of the lung tissue, carbon dioxide buildup in the body, emphysema, chronic bronchitis, shortness of breath, a chronic cough and excessive mucus, wheezing, a tight feeling in the chest, blue lips and nail beds, and uncontrollable weight loss.

[0208] Further details regarding signs and symptoms of the various diseases or conditions are provided herein and are well known in the art.

[0209] “Therapeutically effective amount,” as used herein, is intended to include the amount of an RNAi agent that, when administered to a subject having a MUC5B-associated disease, is sufficient to effect treatment of the disease (e.g., by diminishing, ameliorating, or maintaining the existing disease or one or more symptoms of disease). The “therapeutically effective amount” may vary depending on the RNAi agent, how the agent is administered, the disease and its severity and the history, age, weight, family history, genetic makeup, the types of preceding or concomitant treatments, if any, and other individual characteristics of the subject to be treated.

[0210] “Prophylactically effective amount,” as used herein, is intended to include the amount of a RNAi agent that, when administered to a subject having a MUC5B-associated disorder, e.g., a lung disease, e.g., cystic fibrosis, chronic obstructive pulmonary disease (COPD), and/or pulmonary fibrosis, such as IPF, is sufficient to prevent or ameliorate the disease or one or more symptoms of the disease. Ameliorating the disease includes slowing the course of the disease or reducing the severity of later-developing disease. The “prophylactically effective amount” may vary depending on the RNAi agent, how the agent is administered, the degree of risk of disease, and the history, age, weight, family history, genetic makeup, the types of preceding or concomitant treatments, if any, and other individual characteristics of the patient to be treated.

[0211] A “therapeutically-effective amount” or “prophylacticaly effective amount” also includes an amount of a RNAi agent that produces some desired local or systemic effect at a reasonable benefit/risk ratio applicable to any treatment. A RNAi agent employed in the methods of the present disclosure may be administered in a sufficient amount to produce a reasonable benefit/risk ratio applicable to such treatment.

[0212] The phrase “pharmaceutically acceptable” is employed herein to refer to those compounds, materials, compositions, or dosage forms which are, within the scope of sound medical judgment, suitable for use in contact with the tissues of human subjects and animal subjects without excessive toxicity, irritation, allergic response, or other problem or complication, commensurate with a reasonable benefit/risk ratio.

[0213] The phrase “pharmaceutically-acceptable carrier” as used herein means a pharmaceutically-acceptable material, composition or vehicle, such as a liquid or solid filler, diluent, excipient, manufacturing aid (e.g., lubricant, talc magnesium, calcium or zinc stearate, or steric acid), or solvent encapsulating material, involved in carrying or transporting the subject compound from one organ, or portion of the body, to another organ, or portion of the body. Each carrier must be “acceptable” in the sense of being compatible with the other ingredients of the formulation and not injurious to the subject being treated. Some examples of materials which can serve as pharmaceutically-acceptable carriers include: (1) sugars, such as lactose, glucose and sucrose; (2) starches, such as corn starch and potato starch; (3) cellulose, and its derivatives, such as sodium carboxymethyl cellulose, ethyl cellulose and cellulose acetate; (4) powdered tragacanth; (5) malt; (6) gelatin; (7) lubricating agents, such as magnesium state, sodium lauryl sulfate and talc; (8) excipients, such as cocoa butter and suppository waxes; (9) oils, such as peanut oil, cottonseed oil, safflower oil, sesame oil, olive oil, corn oil and soybean oil; (10) glycols, such as propylene glycol; (11) polyols, such as glycerin, sorbitol, mannitol and polyethylene glycol; (12) esters, such as ethyl oleate and ethyl laurate; (13) agar; (14) buffering agents, such as magnesium hydroxide and aluminum hydroxide; (15) alginic acid; (16) pyrogen-free water; (17) isotonic saline; (18) Ringer's solution; (19) ethyl alcohol; (20) pH buffered solutions; (21) polyesters, polycarbonates or polyanhydrides; (22) bulking agents, such as polypeptides and amino acids (23) serum component, such as serum albumin, HDL and LDL; and (22) other non-toxic compatible substances employed in pharmaceutical formulations. Pharmaceutically acceptable carriers for pulmonary delivery are known in the art and will vary depending on the desired location for deposition of the agent, e.g., upper or lower respiratory system, and the type of device to be used for delivery, e.g., sprayer, nebulizer, dry powder inhaler.

[0214] As used herein, “respiratory system” is understood as the structures through which air moves from outside the body into the lungs and back out, e.g., the mouth, nose and nasal cavity, sinus, trachea, pharynyx, larynx, bronchial tubes/bronchi, bronchioles, alveoli, and vasculature, e.g., capillaries, hematopoietic cells, lymphatics, and lungs, and the cells, tissues, and fluids present therein.

[0215] As used herein, “delivery by inhalation” and the like include delivery by inhalation through the nose or mouth, including intratracheal administration. Delivery by inhalation typically is performed using a device, e.g., inhaler, sprayer, nebulizer, that is selected, in part, based on the location that the agent is to be delivered, e.g., nose, mouth, lungs, and the type of material to be delivered, e. g., drops, mist, dry powder.

[0216] The term “sample,” as used herein, includes a collection of similar fluids, cells, or tissues isolated from a subject, as well as fluids, cells, or tissues present within a subject. Examples of biological fluids include blood, serum and serosal fluids, plasma, bronchial fluids, sputum, cerebrospinal fluid, ocular fluids, lymph, urine, saliva, sputum, and the like. Tissue samples may include samples from tissues, organs or localized regions. For example, samples may be derived from particular organs, parts of organs, or fluids or cells within those organs. In certain embodiments, samples may be derived from a nasal swab. In certain embodiments, samples may be derived from a throat swab. In certain embodiments, samples may be derived from the lung, or certain types of cells in the lung. In some embodiments, the samples may be derived from the bronchioles. In some embodiments, the samples may be derived from the bronchus. In some embodiments, the samples may be derived from the alveoli. In other embodiments, a “sample derived from a subject” refers to liver tissue (or subcomponents thereof) derived from the subject. In some embodiments, a “sample derived from a subject” refers to blood drawn from the subject or plasma or serum derived therefrom. In further embodiments, a “sample derived from a subject” refers to pulmonary tissue (or subcomponents thereof) derived from the subject.

### II. RNAi Agents of the Disclosure

[0217] Described herein are RNAi agents which inhibit the expression of a MUC5B gene. In one embodiment, the RNAi agent includes double stranded ribonucleic acid (dsRNA) molecules for inhibiting the expression of a MUC5B gene in a cell, such as a cell within a subject, e.g., a mammal, such as a human, e.g., a subject having a MUC5B-associated disorder, e.g., a lung disease, e.g., cystic fibrosis, chronic obstructive pulmonary disease (COPD), and/or pulmonary fibrosis, e.g., IPF, or a subject at risk of a MUC5B-associated disease, such as IPF, e.g., a subject carrying an rs35705950 variant.

[0218] The dsRNA includes an antisense strand having a region of complementarity which is complementary to at least a part of a target RNA, e.g., an mRNA formed in the expression of a MUC5B gene. The region of complementarity is about 15-30 nucleotides or less in length. Upon contact with a cell expressing the MUC5B gene, the RNAi agent inhibits the expression of the MUC5B gene (e.g., a human gene, a primate gene, a non-primate gene) by at least 50% as assayed by, for example, a PCR or branched DNA (bDNA)-based method, or by a protein-based method, such as by immunofluorescence analysis, using, for example, western blotting or flow cytometric techniques. In preferred embodiments, inhibition of expression is by at least 50% as assayed by the Dual-Glo lucifierase assay in Example 1 where the siRNA is at a 10 nM concentration.

[0219] A dsRNA includes two RNA strands that are complementary and hybridize to form a duplex structure under conditions in which the dsRNA will be used. One strand of a dsRNA (the antisense strand) includes a region of complementarity that is substantially complementary, and generally fully complementary, to a target sequence. For example, the target sequence can be derived from the sequence of an mRNA formed during the expression of a MUC5B gene. The other strand (the sense strand) includes a region that is complementary to the antisense strand, such that the two strands hybridize and form a duplex structure when combined under suitable conditions. As described elsewhere herein and as known in the art, the complementary sequences of a dsRNA can also be contained as self-complementary regions of a single nucleic acid molecule, as opposed to being on separate oligonucleotides.

[0220] Generally, the duplex structure is 15 to 30 base pairs in length, e.g., 15-29, 15-28, 15-27, 15-26, 15-25, 15-24, 15-23, 15-22, 15-21, 15-20, 15-19, 15-18, 15-17, 18-30, 18-29, 18-28, 18-27, 18-26, 18-25, 18-24, 18-23, 18-22, 18-21, 18-20, 19-30, 19-29, 19-28, 19-27, 19-26, 19-25, 19-24, 19-23, 19-22, 19-21, 19-20, 20-30, 20-29, 20-28, 20-27, 20-26, 20-25, 20-24,20-23, 20-22, 20-21, 21-30, 21-29, 21-28, 21-27, 21-26, 21-25, 21-24, 21-23, or 21-22 base pairs in length. In certain preferred embodiments, the duplex structure is 18 to 25 base pairs in length, e.g., 18-25, 18-24, 18-23, 18-22, 18-21, 18-20, 19-25, 19-24, 19-23, 19-22, 19-21, 19-20, 20-25, 20-24,20-23, 20-22, 20-21, 21-25, 21-24, 21-23, 21-22, 22-25, 22-24, 22-23, 23-25, 23-24 or 24-25 base pairs in length, for example, 19-21 basepairs in length. Ranges and lengths intermediate to the above recited ranges and lengths are also contemplated to be part of the disclosure.

[0221] Similarly, the region of complementarity to the target sequence is 15 to 30 nucleotides in length, e.g., 15-29, 15-28, 15-27, 15-26, 15-25, 15-24, 15-23, 15-22, 15-21, 15-20, 15-19, 15-18, 15-17, 18-30, 18-29, 18-28, 18-27, 18-26, 18-25, 18-24, 18-23, 18-22, 18-21, 18-20, 19-30, 19-29, 19-28, 19-27, 19-26, 19-25, 19-24, 19-23, 19-22, 19-21, 19-20, 20-30, 20-29, 20-28, 20-27, 20-26, 20-25, 20-24,20-23, 20-22, 20-21, 21-30, 21-29, 21-28, 21-27, 21-26, 21-25, 21-24, 21-23, or 21-22 nucleotides in length, for example 19-23 nucleotides in length or 21-23 nucleotides in length. Ranges and lengths intermediate to the above recited ranges and lengths are also contemplated to be part of the disclosure.

[0222] In some embodiments, the dsRNA is 15 to 23 nucleotides in length, or 25 to 30 nucleotides in length. In general, the dsRNA is long enough to serve as a substrate for the Dicer enzyme. For example, it is well known in the art that dsRNAs longer than about 21-23 nucleotides can serve as substrates for Dicer. As the ordinarily skilled person will also recognize, the region of an RNA targeted for cleavage will most often be part of a larger RNA molecule, often an mRNA molecule. Where relevant, a “part” of an mRNA target is a contiguous sequence of an mRNA target of sufficient length to allow it to be a substrate for RNAi-directed cleavage (i.e., cleavage through a RISC pathway).

[0223] One of skill in the art will also recognize that the duplex region is a primary functional portion of a dsRNA, e.g., a duplex region of about 15 to 36 base pairs, e.g., 15-36, 15-35, 15-34, 15-33, 15-32, 15-31, 15-30, 15-29, 15-28, 15-27, 15-26, 15-25, 15-24, 15-23, 15-22, 15-21, 15-20, 15-19, 15-17, 18-30, 18-29, 18-28, 18-27, 18-26, 18-25, 18-24, 18-23, 18-22, 18-21, 18-20, 19-30, 19-29, 19-28, 19-27, 19-26, 19-25, 19-24, 19-23, 19-22, 19-21, 19-20, 20-30, 20-29, 20-28, 20-27, 20-26, 20-24,20-23, 20-22, 20-21, 21-30, 21-29, 21-28, 21-27, 21-26, 21-25, 21-24, 21-23, or 21-22 base pairs, for example, 19-21 base pairs. Thus, in one embodiment, to the extent that it becomes processed to a functional duplex, of e.g., 15-30 base pairs, that targets a desired RNA for cleavage, an RNA molecule or complex of RNA molecules having a duplex region greater than 30 base pairs is a dsRNA. Thus, an ordinarily skilled artisan will recognize that in one embodiment, a miRNA is a dsRNA. In another embodiment, a dsRNA is not a naturally occurring miRNA. In another embodiment, a RNAi agent useful to target MUC5B expression is not generated in the target cell by cleavage of a larger dsRNA.

[0224] A dsRNA as described herein can further include one or more single-stranded nucleotide overhangs e.g., 1, 2, 3, or 4 nucleotides. A nucleotide overhang can comprise or consist of a nucleotide/nucleoside analog, including a deoxynucleotide/nucleoside. The overhang(s) can be on the sense strand, the antisense strand or any combination thereof. Furthermore, the nucleotide(s) of an overhang can be present on the 5′-end, 3′-end or both ends of either an antisense or sense strand of a dsRNA. In certain embodiments, longer, extended overhangs are possible.

[0225] A dsRNA can be synthesized by standard methods known in the art as further discussed below, e.g., by use of an automated DNA synthesizer, such as are commercially available from, for example, Biosearch, Applied Biosystems, Inc.

[0226] iRNA compounds of the invention may be prepared using a two-step procedure. First, the individual strands of the double stranded RNA molecule are prepared separately. Then, the component strands are annealed. The individual strands of the siRNA compound can be prepared using solution-phase or solid-phase organic synthesis or both. Organic synthesis offers the advantage that the oligonucleotide strands comprising unnatural or modified nucleotides can be easily prepared. Single-stranded oligonucleotides of the invention can be prepared using solution-phase or solid-phase organic synthesis or both.

[0227] An siRNA can be produced, e.g., in bulk, by a variety of methods. Exemplary methods include: organic synthesis and RNA cleavage, e.g., in vitro cleavage.

[0228] An siRNA can be made by separately synthesizing a single stranded RNA molecule, or each respective strand of a double-stranded RNA molecule, after which the component strands can then be annealed.

[0229] A large bioreactor, e.g., the OligoPilot II from Pharmacia Biotec AB (Uppsala Sweden), can be used to produce a large amount of a particular RNA strand for a given siRNA. The OligoPilotII reactor can efficiently couple a nucleotide using only a 1.5 molar excess of a phosphoramidite nucleotide. To make an RNA strand, ribonucleotides amidites are used. Standard cycles of monomer addition can be used to synthesize the 21 to 23 nucleotide strand for the siRNA. Typically, the two complementary strands are produced separately and then annealed, e.g., after release from the solid support and deprotection.

[0230] Organic synthesis can be used to produce a discrete siRNA species. The complementary of the species to a MUC5B gene can be precisely specified. For example, the species may be complementary to a region that includes a polymorphism, e.g., a single nucleotide polymorphism. Further the location of the polymorphism can be precisely defined. In some embodiments, the polymorphism is located in an internal region, e.g., at least 4, 5, 7, or 9 nucleotides from one or both of the termini.

[0231] In one embodiment, RNA generated is carefully purified to remove endsiRNA is cleaved in vitro into siRNAs, for example, using a Dicer or comparable RNAse III-based activity. For example, the dsiRNA can be incubated in an in vitro extract from Drosophila or using purified components, e.g., a purified RNAse or RISC complex (RNA-induced silencing complex). See, e.g., Ketting et al. Genes Dev 2001 Oct. 15; 15(20):2654-9 and Hammond Science 2001 Aug. 10; 293(5532):1146-50.

[0232] dsiRNA cleavage generally produces a plurality of siRNA species, each being a particular 21 to 23 nucleotide fragment of a source dsiRNA molecule. For example, siRNAs that include sequences complementary to overlapping regions and adjacent regions of a source dsiRNA molecule may be present.

[0233] Regardless of the method of synthesis, the siRNA preparation can be prepared in a solution (e.g., an aqueous or organic solution) that is appropriate for formulation. For example, the siRNA preparation can be precipitated and redissolved in pure double-distilled water, and lyophilized. The dried siRNA can then be resuspended in a solution appropriate for the intended formulation process.

[0234] In one aspect, a dsRNA of the disclosure includes at least two nucleotide sequences, a sense sequence and an antisense sequence. The sense strand sequence for MUC5B may be selected from the group of sequences provided in any one of Tables 2-7, 9, and 10, and the corresponding nucleotide sequence of the antisense strand of the sense strand may be selected from the group of sequences of any one of Tables 2-7, 9, and 10. In this aspect, one of the two sequences is complementary to the other of the two sequences, with one of the sequences being substantially complementary to a sequence of an mRNA generated in the expression of a MUC5B gene. As such, in this aspect, a dsRNA will include two oligonucleotides, where one oligonucleotide is described as the sense strand (passenger strand) in any one of Tables 2-7, 9, and 10, and the second oligonucleotide is described as the corresponding antisense strand (guide strand) of the sense strand in any one of Tables 2-7, 9, and for MUC5B.

[0235] In one embodiment, the substantially complementary sequences of the dsRNA are contained on separate oligonucleotides. In another embodiment, the substantially complementary sequences of the dsRNA are contained on a single oligonucleotide.

[0236] It will be understood that, although the sequences provided herein are described as modified or conjugated sequences, the RNA of the RNAi agent of the disclosure e.g., a dsRNA of the disclosure, may comprise any one of the sequences set forth in any one of Tables 2-7, 9, and 10 that is un-modified, un-conjugated, or modified or conjugated differently than described therein. One or more lipophilic ligands or one or more GalNAc ligands can be included in any of the positions of the RNAi agents provided in the instant application.

[0237] The skilled person is well aware that dsRNAs having a duplex structure of about 20 to 23 base pairs, e.g., 21, base pairs have been hailed as particularly effective in inducing RNA interference (Elbashir et al., (2001) EMBO J., 20:6877-6888). However, others have found that shorter or longer RNA duplex structures can also be effective (Chu and Rana (2007) RNA 14:1714-1719; Kim et al. (2005) Nat Biotech 23:222-226). In the embodiments described above, by virtue of the nature of the oligonucleotide sequences provided herein, dsRNAs described herein can include at least one strand of a length of minimally 21 nucleotides. It can be reasonably expected that shorter duplexes minus only a few nucleotides on one or both ends can be similarly effective as compared to the dsRNAs described above. Hence, dsRNAs having a sequence of at least 15, 16, 17, 18, 19, 20, or more contiguous nucleotides derived from one of the sequences provided herein, and differing in their ability to inhibit the expression of a MUC5B gene by not more than 10, 15, 20, 25, or 30% inhibition from a dsRNA comprising the full sequence using the in vitro assay with Cos7 and a 10 nM concentration of the RNA agent and the PCR assay as provided in the examples herein, are contemplated to be within the scope of the present disclosure.

[0238] In addition, the RNAs described herein identify a site(s) in a MUC5B transcript that is susceptible to RISC-mediated cleavage. As such, the present disclosure further features RNAi agents that target within this site(s). As used herein, a RNAi agent is said to target within a particular site of an RNA transcript if the RNAi agent promotes cleavage of the transcript anywhere within that particular site. Such a RNAi agent will generally include at least about 15 contiguous nucleotides, preferably at least 19 nucleotides, from one of the sequences provided herein coupled to additional nucleotide sequences taken from the region contiguous to the selected sequence in a MUC5B gene.

[0239] An RNAi agent as described herein can contain one or more mismatches to the target sequence. In one embodiment, an RNAi agent as described herein contains no more than 3 mismatches (i.e., 3, 2, 1, or 0 mismatches). In one embodiment, an RNAi agent as described herein contains no more than 2 mismatches. In one embodiment, an RNAi agent as described herein contains no more than 1 mismatch. In one embodiment, an RNAi agent as described herein contains 0 mismatches. In certain embodiments, if the antisense strand of the RNAi agent contains mismatches to the target sequence, the mismatch can optionally be restricted to be within the last 5 nucleotides from either the 5′- or 3′-end of the region of complementarity. For example, in such embodiments, for a 23 nucleotide RNAi agent, the strand which is complementary to a region of a MUC5B gene generally does not contain any mismatch within the central 13 nucleotides. The methods described herein or methods known in the art can be used to determine whether an RNAi agent containing a mismatch to a target sequence is effective in inhibiting the expression of a MUC5B gene. Consideration of the efficacy of RNAi agents with mismatches in inhibiting expression of a MUC5B gene is important, especially if the particular region of complementarity in a MUC5B gene is known to mutate.

### III. Modified RNAi Agents of the Disclosure

[0240] In one embodiment, the RNA of the RNAi agent of the disclosure e.g., a dsRNA, is un-modified, and does not comprise, e.g., chemical modifications or conjugations known in the art and described herein. In preferred embodiments, the RNA of an RNAi agent of the disclosure, e.g., a dsRNA, is chemically modified to enhance stability or other beneficial characteristics. In certain embodiments of the disclosure, substantially all of the nucleotides of an RNAi agent of the disclosure are modified. In other embodiments of the disclosure, all of the nucleotides of an RNAi agent of the disclosure are modified. RNAi agents of the disclosure in which “substantially all of the nucleotides are modified” are largely but not wholly modified and can include not more than 5, 4, 3, 2, or 1 unmodified nucleotides. In still other embodiments of the disclosure, RNAi agents of the disclosure can include not more than 5, 4, 3, 2 or 1 modified nucleotides.

[0241] The nucleic acids featured in the disclosure can be synthesized or modified by methods well established in the art, such as those described in “Current protocols in nucleic acid chemistry,” Beaucage, S. L. et al. (Edrs.), John Wiley & Sons, Inc., New York, NY, USA, which is hereby incorporated herein by reference. Modifications include, for example, end modifications, e.g., 5′-end modifications (phosphorylation, conjugation, inverted linkages) or 3′-end modifications (conjugation, DNA nucleotides, inverted linkages, etc.); base modifications, e.g., replacement with stabilizing bases, destabilizing bases, or bases that base pair with an expanded repertoire of partners, removal of bases (abasic nucleotides), or conjugated bases; sugar modifications (e.g., at the 2′-position or 4′-position) or replacement of the sugar; or backbone modifications, including modification or replacement of the phosphodiester linkages. Specific examples of RNAi agents useful in the embodiments described herein include, but are not limited to, RNAs containing modified backbones or no natural internucleoside linkages. RNAs having modified backbones include, among others, those that do not have a phosphorus atom in the backbone. For the purposes of this specification, and as sometimes referenced in the art, modified RNAs that do not have a phosphorus atom in their internucleoside backbone can also be considered to be oligonucleosides. In some embodiments, a modified RNAi agent will have a phosphorus atom in its internucleoside backbone.

[0242] Modified RNA backbones include, for example, phosphorothioates, chiral phosphorothioates, phosphorodithioates, phosphotriesters, aminoalkylphosphotriesters, methyl and other alkyl phosphonates including 3′-alkylene phosphonates and chiral phosphonates, phosphinates, phosphoramidates including 3′-amino phosphoramidate and aminoalkylphosphoramidates, thionophosphoramidates, thionoalkylphosphonates, thionoalkylphosphotriesters, and boranophosphates having normal 3′-5′ linkages, 2′-5′-linked analogs of these, and those having inverted polarity wherein the adjacent pairs of nucleoside units are linked 3′-5′ to 5′-3′ or 2′-5′ to 5′-2′. Various salts, e.g., sodium salts, mixed salts and free acid forms are also included.

[0243] Representative U.S. patents that teach the preparation of the above phosphorus-containing linkages include, but are not limited to, U.S. Pat. Nos. 3,687,808; 4,469,863; 4,476,301; 5,023,243; 5,188,897; 5,264,423; 5,276,019; 5,278,302; 5,286,717; 5,321,131; 5,399,676; 5,405,939; 5,455,233; 5,466,677; 5,476,925; 5,519,126; 5,536,821; 5,541,316; 5,550,111; 5,563,253; 5,587,361; 5,625,050; 6,028,188; 6,124,445; 6,160,109; 6,169,170; 6,172,209; 6,239,265; 6,277,603; 6,326,199; 6,346,614; 6,444,423; 6,531,590; 6,534,639; 6,608,035; 6,683,167; 6,858,715; 6,867,294; 6,878,805; 7,015,315; 7,041,816; 7,273,933; 7,321,029; and U.S. Pat. RE39464, the entire contents of each of which are hereby incorporated herein by reference.

[0244] Modified RNA backbones that do not include a phosphorus atom therein have backbones that are formed by short chain alkyl or cycloalkyl internucleoside linkages, mixed heteroatoms and alkyl or cycloalkyl internucleoside linkages, or one or more short chain heteroatomic or heterocyclic internucleoside linkages. These include those having morpholino linkages (formed in part from the sugar portion of a nucleoside); siloxane backbones; sulfide, sulfoxide and sulfone backbones; formacetyl and thioformacetyl backbones; methylene formacetyl and thioformacetyl backbones; alkene containing backbones; sulfamate backbones; methyleneimino and methylenehydrazino backbones; sulfonate and sulfonamide backbones; amide backbones; and others having mixed N, O, S and CH₂ component parts.

[0245] Representative U.S. patents that teach the preparation of the above oligonucleosides include, but are not limited to, U.S. Pat. Nos. 5,034,506; 5,166,315; 5,185,444; 5,214,134; 5,216,141; 5,235,033; 5,64,562; 5,264,564; 5,405,938; 5,434,257; 5,466,677; 5,470,967; 5,489,677; 5,541,307; 5,561,225; 5,596,086; 5,602,240; 5,608,046; 5,610,289; 5,618,704; 5,623,070; 5,663,312; 5,633,360; 5,677,437; and, 5,677,439, the entire contents of each of which are hereby incorporated herein by reference.

[0246] In other embodiments, suitable RNA mimetics are contemplated for use in RNAi agents, in which both the sugar and the internucleoside linkage, i.e., the backbone, of the nucleotide units are replaced with novel groups. The base units are maintained for hybridization with an appropriate nucleic acid target compound. One such oligomeric compound, an RNA mimetic that has been shown to have excellent hybridization properties, is referred to as a peptide nucleic acid (PNA). In PNA compounds, the sugar backbone of an RNA is replaced with an amide containing backbone, in particular an aminoethylglycine backbone. The nucleobases are retained and are bound directly or indirectly to aza nitrogen atoms of the amide portion of the backbone. Representative U.S. patents that teach the preparation of PNA compounds include, but are not limited to, U.S. Pat. Nos. 5,539,082; 5,714,331; and 5,719,262, the entire contents of each of which are hereby incorporated herein by reference. Additional PNA compounds suitable for use in the RNAi agents of the disclosure are described in, for example, in Nielsen et al., Science, 1991, 254, 1497-1500.

[0247] Some embodiments featured in the disclosure include RNAs with phosphorothioate backbones and oligonucleosides with heteroatom backbones, and in particular —CH₂—NH—CH₂—, —CH₂—N(CH₃)—O—CH₂— [known as a methylene (methylimino) or MMI backbone], —CH₂—O—N(CH₃)—CH₂—, —CH₂—N(CH₃)—N(CH₃)—CH₂— and —N(CH₃)—CH₂—CH₂— [wherein the native phosphodiester backbone is represented as —O—P—O—CH₂—] of the above-referenced U.S. Pat. No. 5,489,677, and the amide backbones of the above-referenced U.S. Pat. No. 5,602,240. In some embodiments, the RNAs featured herein have morpholino backbone structures of the above-referenced U.S. Pat. No. 5,034,506.

[0248] Modified RNAs can also contain one or more substituted sugar moieties. The RNAi agents, e.g., dsRNAs, featured herein can include one of the following at the 2′-position: OH; F; O-, S-, or N-alkyl; O-, S-, or N-alkenyl; O-, S- or N-alkynyl; or O-alkyl-O-alkyl, wherein the alkyl, alkenyl and alkynyl can be substituted or unsubstituted C₁ to C₁₀ alkyl or C₂ to C₁₀ alkenyl and alkynyl. Exemplary suitable modifications include O[(CH₂)ₙO]ₘCH₃, O(CH₂)₋ₙOCH₃, O(CH₂)ₙNH₂, O(CH₂)ₙCH₃, O(CH₂)ₙONH₂, and O(CH₂)ₙON[(CH₂)ₙCH₃)]₂, where n and m are from 1 to about 10. In other embodiments, dsRNAs include one of the following at the 2′ position: C₁ to C₁₀ lower alkyl, substituted lower alkyl, alkaryl, aralkyl, O-alkaryl or O-aralkyl, SH, SCH₃, OCN, Cl, Br, CN, CF₃, OCF₃, SOCH₃, SO₂CH₃, ONO₂, NO₂, N₃, NH₂, heterocycloalkyl, heterocycloalkaryl, aminoalkylamino, polyalkylamino, substituted silyl, an RNA cleaving group, a reporter group, an intercalator, a group for improving the pharmacokinetic properties of a RNAi agent, or a group for improving the pharmacodynamic properties of a RNAi agent, and other substituents having similar properties. In some embodiments, the modification includes a 2′-methoxyethoxy (2′-O—CH₂CH₂OCH₃, also known as 2′-O-(2-methoxyethyl) or 2′-MOE) (Martin et al., Helv. Chim. Acta, 1995, 78:486-504) i.e., an alkoxy-alkoxy group. Another exemplary modification is 2′-dimethylaminooxyethoxy, i.e., a O(CH₂)₂ON(CH₃)₂ group, also known as 2′-DMAOE, as described in examples herein below, and 2′-dimethylaminoethoxyethoxy (also known in the art as 2′-O-dimethylaminoethoxyethyl or 2′-DMAEOE), i.e., 2′-O—CH₂—O—CH₂—N(CH₂)₂. Further exemplary modifications include: 5′-Me-2′-F nucleotides, 5′-Me-2′-OMe nucleotides, 5′-Me-2′-deoxynucleotides, (both R and S isomers in these three families); 2′-alkoxyalkyl; and 2′-NMA (N-methylacetamide).

[0249] Other modifications include 2′-methoxy (2′-OCH 3), 2′-aminopropoxy (2′-OCH₂CH₂CH₂NH₂), 2′-O-hexadecyl, and 2′-fluoro (2′-F). Similar modifications can also be made at other positions on the RNA of a RNAi agent, particularly the 3′ position of the sugar on the 3′ terminal nucleotide or in 2′-5′ linked dsRNAs and the 5′ position of 5′ terminal nucleotide. RNAi agents can also have sugar mimetics such as cyclobutyl moieties in place of the pentofuranosyl sugar. Representative U.S. patents that teach the preparation of such modified sugar structures include, but are not limited to, U.S. Pat. Nos. 4,981,957; 5,118,800; 5,319,080; 5,359,044; 5,393,878; 5,446,137; 5,466,786; 5,514,785; 5,519,134; 5,567,811; 5,576,427; 5,591,722; 5,597,909; 5,610,300; 5,627,053; 5,639,873; 5,646,265; 5,658,873; 5,670,633; and 5,700,920, certain of which are commonly owned with the instant application. The entire contents of each of the foregoing are hereby incorporated herein by reference.

[0250] An RNAi agent of the disclosure can also include nucleobase (often referred to in the art simply as “base”) modifications or substitutions. As used herein, “unmodified” or “natural” nucleobases include the purine bases adenine (A) and guanine (G), and the pyrimidine bases thymine (T), cytosine (C) and uracil (U). Modified nucleobases include other synthetic and natural nucleobases such as 5-methylcytosine (5-me-C), 5-hydroxymethyl cytosine, xanthine, hypoxanthine, 2-aminoadenine, 6-methyl and other alkyl derivatives of adenine and guanine, 2-propyl and other alkyl derivatives of adenine and guanine, 2-thiouracil, 2-thiothymine and 2-thiocytosine, 5-halouracil and cytosine, 5-propynyl uracil and cytosine, 6-azo uracil, cytosine and thymine, 5-uracil (pseudouracil), 4-thiouracil, 8-halo, 8-amino, 8-thiol, 8-thioalkyl, 8-hydroxyl anal other 8-substituted adenines and guanines, 5-halo, particularly 5-bromo, 5-trifluoromethyl and other 5-substituted uracils and cytosines, 7-methylguanine and 7-methyladenine, 8-azaguanine and 8-azaadenine, 7-deazaguanine and 7-daazaadenine and 3-deazaguanine and 3-deazaadenine. Further nucleobases include those disclosed in U.S. Pat. No. 3,687,808, those disclosed in Modified Nucleosides in Biochemistry, Biotechnology and Medicine, Herdewijn, P. ed. Wiley-VCH, 2008; those disclosed in The Concise Encyclopedia Of Polymer Science And Engineering, pages 858-859, Kroschwitz, J. L, ed. John Wiley & Sons, 1990, these disclosed by Englisch et al., (1991) Angewandte Chemie, International Edition, and those disclosed by Sanghvi, Y S., Chapter 15, dsRNA Research and Applications, pages 289-302, Crooke, S. T. and Lebleu, B., Ed., CRC Press, 1993. Certain of these nucleobases are particularly useful for increasing the binding affinity of the oligomeric compounds featured in the disclosure. These include 5-substituted pyrimidines, 6-azapyrimidines and N-2, N-6 and 0-6 substituted purines, including 2-aminopropyladenine, 5-propynyluracil and 5-propynylcytosine. 5-methylcytosine substitutions have been shown to increase nucleic acid duplex stability by 0.6-1.2° C. (Sanghvi, Y. S., Crooke, S. T. and Lebleu, B., Eds., dsRNA Research and Applications, CRC Press, Boca Raton, 1993, pp. 276-278) and are exemplary base substitutions, even more particularly when combined with 2′-O-methoxyethyl sugar modifications.

[0251] Representative U.S. patents that teach the preparation of certain of the above noted modified nucleobases as well as other modified nucleobases include, but are not limited to, the above noted U.S. Pat. Nos. 3,687,808, 4,845,205; 5,130,30; 5,134,066; 5,175,273; 5,367,066; 5,432,272; 5,459,255; 5,484,908; 5,502,177; 5,525,711; 5,552,540; 5,587,469; 5,594,121, 5,596,091; 5,681,941; 5,750,692; 6,015,886; 6,147,200; 6,166,197; 6,222,025; 6,235,887; 6,380,368; 6,528,640; 6,639,062; 6,617,438; 7,045,610; 7,427,672; and 7,495,088, the entire contents of each of which are hereby incorporated herein by reference.

[0252] An RNAi agent of the disclosure can also be modified to include one or more locked nucleic acids (LNA). A locked nucleic acid is a nucleotide having a modified ribose moiety in which the ribose moiety comprises an extra bridge connecting the 2′ and 4′ carbons. This structure effectively “locks” the ribose in the 3′-endo structural conformation. The addition of locked nucleic acids to siRNAs has been shown to increase siRNA stability in serum, and to reduce off-target effects (Elmen, J. et al., (2005) Nucleic Acids Research 33(1):439-447; Mook, O R. et al., (2007) Mol Canc Ther 6(3):833-843; Grunweller, A. et al., (2003) Nucleic Acids Research 31(12):3185-3193).

[0253] An RNAi agent of the disclosure can also be modified to include one or more bicyclic sugar moities. A “bicyclic sugar” is a furanosyl ring modified by the bridging of two atoms. A “bicyclic nucleoside” (“BNA”) is a nucleoside having a sugar moiety comprising a bridge connecting two carbon atoms of the sugar ring, thereby forming a bicyclic ring system. In certain embodiments, the bridge connects the 4′-carbon and the 2′-carbon of the sugar ring. Thus, in some embodiments an agent of the disclosure may include one or more locked nucleic acids (LNA). A locked nucleic acid is a nucleotide having a modified ribose moiety in which the ribose moiety comprises an extra bridge connecting the 2′ and 4′ carbons. In other words, an LNA is a nucleotide comprising a bicyclic sugar moiety comprising a 4′-CH2-O-2′ bridge. This structure effectively “locks” the ribose in the 3′-endo structural conformation. The addition of locked nucleic acids to siRNAs has been shown to increase siRNA stability in serum, and to reduce off-target effects (Elmen, J. et al., (2005) Nucleic Acids Research 33(1):439-447; Mook, O R. et al., (2007) Mol Canc Ther 6(3):833-843; Grunweller, A. et al., (2003) Nucleic Acids Research 31(12):3185-3193). Examples of bicyclic nucleosides for use in the polynucleotides of the disclosure include without limitation nucleosides comprising a bridge between the 4′ and the 2′ ribosyl ring atoms. In certain embodiments, the antisense polynucleotide agents of the disclosure include one or more bicyclic nucleosides comprising a 4′ to 2′ bridge. Examples of such 4′ to 2′ bridged bicyclic nucleosides, include but are not limited to 4′-(CH2)-O-2′ (LNA); 4′-(CH2)-S-2′; 4′-(CH2)2-O-2′ (ENA); 4′-CH(CH3)-O-2′ (also referred to as “constrained ethyl” or “cEt”) and 4′-CH(CH2OCH3)-O-2′ (and analogs thereof; see, e.g., U.S. Pat. No. 7,399,845); 4′-C(CH3)(CH3)-O-2′ (and analogs thereof; see e.g., U.S. Pat. No. 8,278,283); 4′-CH2-N(OCH3)-2′ (and analogs thereof; see e.g., U.S. Pat. No. 8,278,425); 4′-CH2-O—N(CH3)-2′ (see, e.g., U.S. Patent Publication No. 2004/0171570); 4′-CH2-N(R)—O-2′, wherein R is H, C1-C12 alkyl, or a protecting group (see, e.g., U.S. Pat. No. 7,427,672); 4′-CH2-C(H)(CH3)-2′ (see, e.g., Chattopadhyaya et al., J. Org. Chem., 2009, 74, 118-134); and 4′-CH2-C(═CH2)-2′ (and analogs thereof; see, e.g., U.S. Pat. No. 8,278,426). The entire contents of each of the foregoing are hereby incorporated herein by reference.

[0254] Additional representative US patents and US patent Publications that teach the preparation of locked nucleic acid nucleotides include, but are not limited to, the following: U.S. Pat. Nos. 6,268,490; 6,525,191; 6,670,461; 6,770,748; 6,794,499; 6,998,484; 7,053,207; 7,034,133; 7,084,125; 7,399,845; 7,427,672; 7,569,686; 7,741,457; 8,022,193; 8,030,467; 8,278,425; 8,278,426; 8,278,283; US 2008/0039618; and US 2009/0012281, the entire contents of each of which are hereby incorporated herein by reference.

[0255] Any of the foregoing bicyclic nucleosides can be prepared having one or more stereochemical sugar configurations including for example α-L-ribofuranose and β-D-ribofuranose (see WO 99/14226).

[0256] An RNAi agent of the disclosure can also be modified to include one or more constrained ethyl nucleotides. As used herein, a “constrained ethyl nucleotide” or “cEt” is a locked nucleic acid comprising a bicyclic sugar moiety comprising a 4′-CH(CH3)-O-2′ bridge. In one embodiment, a constrained ethyl nucleotide is in the S conformation referred to herein as “S-cEt.”

[0257] An RNAi agent of the disclosure may also include one or more “conformationally restricted nucleotides” (“CRN”). CRN are nucleotide analogs with a linker connecting the C2′ and C4′ carbons of ribose or the —C3′ and —C5′ carbons of ribose. CRN lock the ribose ring into a stable conformation and increase the hybridization affinity to mRNA. The linker is of sufficient length to place the oxygen in an optimal position for stability and affinity resulting in less ribose ring puckering.

[0258] Representative publications that teach the preparation of certain of the above noted CRN include, but are not limited to, US 2013/0190383; and WO 2013/036868, the entire contents of each of which are hereby incorporated herein by reference.

[0259] In some embodiments, a RNAi agent of the disclosure comprises one or more monomers that are UNA (unlocked nucleic acid) nucleotides. UNA is unlocked acyclic nucleic acid, wherein any of the bonds of the sugar has been removed, forming an unlocked “sugar” residue. In one example, UNA also encompasses monomer with bonds between C1′-C4′ have been removed (i.e. the covalent carbon-oxygen-carbon bond between the C1′ and C4′ carbons). In another example, the C2′-C3′ bond (i.e. the covalent carbon-carbon bond between the C2′ and C3′ carbons) of the sugar has been removed (see Nuc. Acids Symp. Series, 52, 133-134 (2008) and Fluiter et al., Mol. Biosyst., 2009, 10, 1039 hereby incorporated by reference).

[0260] Representative U.S. publications that teach the preparation of UNA include, but are not limited to, U.S. Pat. No. 8,314,227; and US Patent Publication Nos. 2013/0096289; 2013/0011922; and 2011/0313020, the entire contents of each of which are hereby incorporated herein by reference.

[0261] Potentially stabilizing modifications to the ends of RNA molecules can include N-(acetylaminocaproyl)-4-hydroxyprolinol (Hyp-C6-NHAc), N-(caproyl-4-hydroxyprolinol (Hyp-C6), N-(acetyl-4-hydroxyprolinol (Hyp-NHAc), thymidine-2′-O-deoxythymidine (ether), N-(aminocaproyl)-4-hydroxyprolinol (Hyp-C6-amino), 2-docosanoyl-uridine-3″-phosphate, inverted base dT(idT) and others. Disclosure of this modification can be found in WO 2011/005861.

[0262] Other modifications of a RNAi agent of the disclosure include a 5′ phosphate or 5′ phosphate mimic, e.g., a 5′-terminal phosphate or phosphate mimic on the antisense strand of a RNAi agent. Suitable phosphate mimics are disclosed in, for example US 2012/0157511, the entire contents of which are incorporated herein by reference.

### A. Modified RNAi Agents Comprising Motifs of the Disclosure

[0263] In certain aspects of the disclosure, the double-stranded RNAi agents of the disclosure include agents with chemical modifications as disclosed, for example, in WO 2013/075035, the entire contents of which are incorporated herein by reference. As shown herein and in WO 2013/075035, a superior result may be obtained by introducing one or more motifs of three identical modifications on three consecutive nucleotides into a sense strand or antisense strand of an RNAi agent, particularly at or near the cleavage site. In some embodiments, the sense strand and antisense strand of the RNAi agent may otherwise be completely modified. The introduction of these motifs interrupts the modification pattern, if present, of the sense or antisense strand. The RNAi agent may be optionally conjugated with a lipophilic ligand, e.g., a C16 ligand, for instance on the sense strand. The RNAi agent may be optionally modified with a (S)-glycol nucleic acid (GNA) modification, for instance on one or more residues of the antisense strand. The resulting RNAi agents present superior gene silencing activity.

[0264] Accordingly, the disclosure provides double stranded RNAi agents capable of inhibiting the expression of a targetgenome or gene (i.e., a MUC5B gene) in vivo. The RNAi agent comprises a sense strand and an antisense strand. Each strand of the RNAi agent may be 15-30 nucleotides in length. For example, each strand may be 16-30 nucleotides in length, 17-30 nucleotides in length, 25-30 nucleotides in length, 27-30 nucleotides in length, 17-23 nucleotides in length, 17-21 nucleotides in length, 17-19 nucleotides in length, 19-25 nucleotides in length, 19-23 nucleotides in length, 19-21 nucleotides in length, 21-25 nucleotides in length, or 21-23 nucleotides in length. In certain embodiments, each strand is 19-23 nucleotides in length.

[0265] The sense strand and antisense strand typically form a duplex double stranded RNA (“dsRNA”), also referred to herein as an “RNAi agent.” The duplex region of an RNAi agent may be 15-30 nucleotide pairs in length. For example, the duplex region can be 16-30 nucleotide pairs in length, 17-30 nucleotide pairs in length, 27-30 nucleotide pairs in length, 17-23 nucleotide pairs in length, 17-21 nucleotide pairs in length, 17-19 nucleotide pairs in length, 19-25 nucleotide pairs in length, 19-23 nucleotide pairs in length, 19-21 nucleotide pairs in length, 21-25 nucleotide pairs in length, or 21-23 nucleotide pairs in length. In another example, the duplex region is selected from 15, 16, 17, 18, 19, 20, 21, 22, 23, 24, 25, 26, and 27 nucleotides in length. In preferred embodiments, the duplex region is 19-21 nucleotide pairs in length.

[0266] In one embodiment, the RNAi agent may contain one or more overhang regions or capping groups at the 3′-end, 5′-end, or both ends of one or both strands. The overhang can be 1-6 nucleotides in length, for instance 2-6 nucleotides in length, 1-5 nucleotides in length, 2-5 nucleotides in length, 1-4 nucleotides in length, 2-4 nucleotides in length, 1-3 nucleotides in length, 2-3 nucleotides in length, or 1-2 nucleotides in length. In preferred embodiments, the nucleotide overhang region is 2 nucleotides in length. The overhangs can be the result of one strand being longer than the other, or the result of two strands of the same length being staggered. The overhang can form a mismatch with the target mRNA or it can be complementary to the gene sequences being targeted or can be another sequence. The first and second strands can also be joined, e.g., by additional bases to form a hairpin, or by other non-base linkers.

[0267] In one embodiment, the nucleotides in the overhang region of the RNAi agent can each independently be a modified or unmodified nucleotide including, but no limited to 2′-sugar modified, such as, 2-F, 2′-O-methyl, thymidine (T), and any combinations thereof.

[0268] For example, TT can be an overhang sequence for either end on either strand. The overhang can form a mismatch with the target mRNA or it can be complementary to the gene sequences being targeted or can be another sequence.

[0269] The 5′- or 3′-overhangs at the sense strand, antisense strand or both strands of the RNAi agent may be phosphorylated. In some embodiments, the overhang region(s) contains two nucleotides having a phosphorothioate between the two nucleotides, where the two nucleotides can be the same or different. In one embodiment, the overhang is present at the 3′-end of the sense strand, antisense strand, or both strands. In one embodiment, this 3′-overhang is present in the antisense strand. In one embodiment, this 3′-overhang is present in the sense strand.

[0270] The RNAi agent may contain only a single overhang, which can strengthen the interference activity of the RNAi, without affecting its overall stability. For example, the single-stranded overhang may be located at the 3′-terminal end of the sense strand or, alternatively, at the 3′-terminal end of the antisense strand. The RNAi may also have a blunt end, located at the 5′-end of the antisense strand (or the 3′-end of the sense strand) or vice versa. Generally, the antisense strand of the RNAi has a nucleotide overhang at the 3′-end, and the 5′-end is blunt. While not wishing to be bound by theory, the asymmetric blunt end at the 5′-end of the antisense strand and 3′-end overhang of the antisense strand favor the guide strand loading into RISC process.

[0271] In one embodiment, the RNAi agent is a double ended bluntmer of 19 nucleotides in length, wherein the sense strand contains at least one motif of three 2′-F modifications on three consecutive nucleotides at positions 7, 8, 9 from the 5′end. The antisense strand contains at least one motif of three 2′-O-methyl modifications on three consecutive nucleotides at positions 11, 12, 13 from the 5′end.

[0272] In another embodiment, the RNAi agent is a double ended bluntmer of 20 nucleotides in length, wherein the sense strand contains at least one motif of three 2′-F modifications on three consecutive nucleotides at positions 8, 9, 10 from the 5′ end. The antisense strand contains at least one motif of three 2′-O-methyl modifications on three consecutive nucleotides at positions 11, 12, 13 from the 5′end.

[0273] In yet another embodiment, the RNAi agent is a double ended bluntmer of 21 nucleotides in length, wherein the sense strand contains at least one motif of three 2′-F modifications on three consecutive nucleotides at positions 9, 10, 11 from the 5′ end. The antisense strand contains at least one motif of three 2′-O-methyl modifications on three consecutive nucleotides at positions 11, 12, 13 from the 5′end.

[0274] In one embodiment, the RNAi agent comprises a 21 nucleotide sense strand and a 23 nucleotide antisense strand, wherein the sense strand contains at least one motif of three 2′-F modifications on three consecutive nucleotides at positions 9, 10, 11 from the 5′ end; the antisense strand contains at least one motif of three 2′-O-methyl modifications on three consecutive nucleotides at positions 11, 12, 13 from the 5′end, wherein one end of the RNAi agent is blunt, while the other end comprises a 2 nucleotide overhang. Preferably, the 2 nucleotide overhang is at the 3′-end of the antisense strand. When the 2 nucleotide overhang is at the 3′-end of the antisense strand, there may be two phosphorothioate internucleotide linkages between the terminal three nucleotides, wherein two of the three nucleotides are the overhang nucleotides, and the third nucleotide is a paired nucleotide next to the overhang nucleotide. In one embodiment, the RNAi agent additionally has two phosphorothioate internucleotide linkages between the terminal three nucleotides at both the 5′-end of the sense strand and at the 5′-end of the antisense strand. In one embodiment, every nucleotide in the sense strand and the antisense strand of the RNAi agent, including the nucleotides that are part of the motifs are modified nucleotides. In one embodiment each residue is independently modified with a 2′-O-methyl or 3′-fluoro, e.g., in an alternating motif. Optionally, the RNAi agent further comprises a ligand (e.g., a lipophilic ligand, optionally a C16 ligand).

[0275] In one embodiment, the RNAi agent comprises a sense and an antisense strand, wherein the sense strand is 25-30 nucleotide residues in length, wherein starting from the 5′ terminal nucleotide (position 1) positions 1 to 23 of the first strand comprise at least 8 ribonucleotides; the antisense strand is 36-66 nucleotide residues in length and, starting from the 3′ terminal nucleotide, comprises at least 8 ribonucleotides in the positions paired with positions 1-23 of sense strand to form a duplex; wherein at least the 3 ‘ terminal nucleotide of antisense strand is unpaired with sense strand, and up to 6 consecutive 3’ terminal nucleotides are unpaired with sense strand, thereby forming a 3′ single stranded overhang of 1-6 nucleotides; wherein the 5′ terminus of antisense strand comprises from 10-30 consecutive nucleotides which are unpaired with sense strand, thereby forming a 10-30 nucleotide single stranded 5′ overhang; wherein at least the sense strand 5′ terminal and 3′ terminal nucleotides are base paired with nucleotides of antisense strand when sense and antisense strands are aligned for maximum complementarity, thereby forming a substantially duplexed region between sense and antisense strands; and antisense strand is sufficiently complementary to a target RNA along at least 19 ribonucleotides of antisense strand length to reduce target gene expression when the double stranded nucleic acid is introduced into a mammalian cell; and wherein the sense strand contains at least one motif of three 2′-F modifications on three consecutive nucleotides, where at least one of the motifs occurs at or near the cleavage site. The antisense strand contains at least one motif of three 2′-O-methyl modifications on three consecutive nucleotides at or near the cleavage site.

[0276] In one embodiment, the RNAi agent comprises sense and antisense strands, wherein the RNAi agent comprises a first strand having a length which is at least 25 and at most 29 nucleotides and a second strand having a length which is at most 30 nucleotides with at least one motif of three 2′-O-methyl modifications on three consecutive nucleotides at position 11, 12, 13 from the 5′ end; wherein the 3′ end of the first strand and the 5′ end of the second strand form a blunt end and the second strand is 1˜4 nucleotides longer at its 3′ end than the first strand, wherein the duplex region region which is at least 25 nucleotides in length, and the second strand is sufficiently complemenatary to a target mRNA along at least 19 nucleotide of the second strand length to reduce target gene expression when the RNAi agent is introduced into a mammalian cell, and wherein dicer cleavage of the RNAi agent preferentially results in an siRNA comprising the 3′ end of the second strand, thereby reducing expression of the target gene in the mammal. Optionally, the RNAi agent further comprises a ligand.

[0277] In one embodiment, the sense strand of the RNAi agent contains at least one motif of three identical modifications on three consecutive nucleotides, where one of the motifs occurs at the cleavage site in the sense strand.

[0278] In one embodiment, the antisense strand of the RNAi agent can also contain at least one motif of three identical modifications on three consecutive nucleotides, where one of the motifs occurs at or near the cleavage site in the antisense strand.

[0279] For an RNAi agent having a duplex region of 17-23 nucleotide in length, the cleavage site of the antisense strand is typically around the 10, 11 and 12 positions from the 5′-end. Thus the motifs of three identical modifications may occur at the 9, 10, 11 positions; 10, 11, 12 positions; 11, 12, 13 positions; 12, 13, 14 positions; or 13, 14, 15 positions of the antisense strand, the count starting from the 1″ nucleotide from the 5′-end of the antisense strand, or, the count starting from the 1″ paired nucleotide within the duplex region from the 5′-end of the antisense strand. The cleavage site in the antisense strand may also change according to the length of the duplex region of the RNAi from the 5′-end.

[0280] The sense strand of the RNAi agent may contain at least one motif of three identical modifications on three consecutive nucleotides at the cleavage site of the strand; and the antisense strand may have at least one motif of three identical modifications on three consecutive nucleotides at or near the cleavage site of the strand. When the sense strand and the antisense strand form a dsRNA duplex, the sense strand and the antisense strand can be so aligned that one motif of the three nucleotides on the sense strand and one motif of the three nucleotides on the antisense strand have at least one nucleotide overlap, i.e., at least one of the three nucleotides of the motif in the sense strand forms a base pair with at least one of the three nucleotides of the motif in the antisense strand. Alternatively, at least two nucleotides may overlap, or all three nucleotides may overlap.

[0281] In one embodiment, the sense strand of the RNAi agent may contain more than one motif of three identical modifications on three consecutive nucleotides. The first motif may occur at or near the cleavage site of the strand and the other motifs may be a wing modification. The term “wing modification” herein refers to a motif occurring at another portion of the strand that is separated from the motif at or near the cleavage site of the same strand. The wing modification is either adjacent to the first motif or is separated by at least one or more nucleotides. When the motifs are immediately adjacent to each other then the chemistry of the motifs are distinct from each other and when the motifs are separated by one or more nucleotide than the chemistries can be the same or different. Two or more wing modifications may be present. For instance, when two wing modifications are present, each wing modification may occur at one end relative to the first motif which is at or near cleavage site or on either side of the lead motif.

[0282] Like the sense strand, the antisense strand of the RNAi agent may contain more than one motif of three identical modifications on three consecutive nucleotides, with at least one of the motifs occurring at or near the cleavage site of the strand. This antisense strand may also contain one or more wing modifications in an alignment similar to the wing modifications that may be present on the sense strand.

[0283] In one embodiment, the wing modification on the sense strand or antisense strand of the RNAi agent typically does not include the first one or two terminal nucleotides at the 3′-end, 5′-end or both ends of the strand.

[0284] In another embodiment, the wing modification on the sense strand or antisense strand of the RNAi agent typically does not include the first one or two paired nucleotides within the duplex region at the 3′-end, 5′-end or both ends of the strand.

[0285] When the sense strand and the antisense strand of the RNAi agent each contain at least one wing modification, the wing modifications may fall on the same end of the duplex region, and have an overlap of one, two or three nucleotides.

[0286] When the sense strand and the antisense strand of the RNAi agent each contain at least two wing modifications, the sense strand and the antisense strand can be so aligned that two modifications each from one strand fall on one end of the duplex region, having an overlap of one, two or three nucleotides; two modifications each from one strand fall on the other end of the duplex region, having an overlap of one, two or three nucleotides; two modifications one strand fall on each side of the lead motif, having an overlap of one, two, or three nucleotides in the duplex region.

[0287] In one embodiment, the RNAi agent comprises mismatch(es) with the target, within the duplex, or combinations thereof. The mismatch may occur in the overhang region or the duplex region. The base pair may be ranked on the basis of their propensity to promote dissociation or melting (e.g., on the free energy of association or dissociation of a particular pairing, the simplest approach is to examine the pairs on an individual pair basis, though next neighbor or similar analysis can also be used). In terms of promoting dissociation: A:U is preferred over G:C; G:U is preferred over G:C; and I:C is preferred over G:C (I=inosine). Mismatches, e.g., non-canonical or other than canonical pairings (as described elsewhere herein) are preferred over canonical (A:T, A:U, G:C) pairings; and pairings which include a universal base are preferred over canonical pairings.

[0288] In one embodiment, the RNAi agent comprises at least one of the first 1, 2, 3, 4, or 5 base pairs within the duplex regions from the 5′-end of the antisense strand independently selected from the group of: A:U, G:U, I:C, and mismatched pairs, e.g., non-canonical or other than canonical pairings or pairings which include a universal base, to promote the dissociation of the antisense strand at the 5′-end of the duplex.

[0289] In one embodiment, the nucleotide at the 1 position within the duplex region from the 5′-end in the antisense strand is selected from the group consisting of A, dA, dU, U, and dT. Alternatively, at least one of the first 1, 2 or 3 base pair within the duplex region from the 5′-end of the antisense strand is an AU base pair. For example, the first base pair within the duplex region from the 5′-end of the antisense strand is an AU base pair.

[0290] In another embodiment, the nucleotide at the 3′-end of the sense strand is deoxy-thymine (dT). In another embodiment, the nucleotide at the 3′-end of the antisense strand is deoxy-thymine (dT). In one embodiment, there is a short sequence of deoxy-thymine nucleotides, for example, two dT nucleotides on the 3′-end of the sense or antisense strand.

[0291] In one embodiment, the sense strand sequence may be represented by formula (I):

5′nₚ-Nₐ—(X X X)ᵢ-N_{b}-Y Y Y-N_{b}—(Z Z Z)ⱼNₐ-n_{q}3′ (I)
[0292] wherein:
[0293] i and j are each independently 0 or 1;
[0294] p and q are each independently 0-6;
[0295] each Nₐ independently represents an oligonucleotide sequence comprising 0-25 modified nucleotides, each sequence comprising at least two differently modified nucleotides;
[0296] each N_{b} independently represents an oligonucleotide sequence comprising 0-10 modified nucleotides;
[0297] each n p and n q independently represent an overhang nucleotide;
[0298] wherein N_{b} and Y do not have the same modification; and
[0299] XXX, YYY and ZZZ each independently represent one motif of three identical modifications on three consecutive nucleotides. Preferably YYY is all 2′-F modified nucleotides.

[0300] In one embodiment, the Nₐ or N_{b} comprise modifications of alternating pattern.

[0301] In one embodiment, the YYY motif occurs at or near the cleavage site of the sense strand. For example, when the RNAi agent has a duplex region of 17-23 nucleotides in length, the YYY motif can occur at or the vicinity of the cleavage site (e.g.: can occur at positions 6, 7, 8, 7, 8, 9, 8, 9, 10, 9, 11, 10, 11,12 or 11, 12, 13) of—the sense strand, the count starting from the 1″ nucleotide, from the 5′-end; or optionally, the count starting at the 1″ paired nucleotide within the duplex region, from the 5′-end.

[0302] In one embodiment, i is 1 and j is 0, or i is 0 and j is 1, or both i and j are 1. The sense strand can therefore be represented by the following formulas:

5′nₚ-Nₐ-YYY-N_{b}-ZZZ-Nₐ-n_{q}3′ (Ib);

5′nₚ-Nₐ-XXX-N_{b}-YYY-Nₐ-n_{q}3′ (Ic); or

5′nₚ-Nₐ-XXX-N_{b}-YYY-N_{b}-ZZZ-Nₐ-n_{q}3′ (Id).

[0303] When the sense strand is represented by formula (Ib), N_{b} represents an oligonucleotide sequence comprising 0-10, 0-7, 0-5, 0-4, 0-2 or 0 modified nucleotides.

[0304] Each N a independently can represent an oligonucleotide sequence comprising 2-20, 2-15, or 2-10 modified nucleotides.

[0305] When the sense strand is represented as formula (Ic), N_{b} represents an oligonucleotide sequence comprising 0-10, 0-7, 0-10, 0-7, 0-5, 0-4, 0-2 or 0 modified nucleotides. Each N a can independently represent an oligonucleotide sequence comprising 2-20, 2-15, or 2-10 modified nucleotides.

[0306] When the sense strand is represented as formula (Id), each N_{b} independently represents an oligonucleotide sequence comprising 0-10, 0-7, 0-5, 0-4, 0-2 or 0 modified nucleotides. Preferably, N_{b} is 0, 1, 2, 3, 4, 5 or 6. Each N a can independently represent an oligonucleotide sequence comprising 2-20, 2-15, or 2-10 modified nucleotides.

[0307] Each of X, Y and Z may be the same or different from each other.

[0308] In other embodiments, i is 0 and j is 0, and the sense strand may be represented by the formula:

5′nₚ-Nₐ-YYY-Nₐ-n_{q}3′ (Ia).

[0309] When the sense strand is represented by formula (Ia), each N a independently can represent an oligonucleotide sequence comprising 2-20, 2-15, or 2-10 modified nucleotides.

[0310] In one embodiment, the antisense strand sequence of the RNAi may be represented by formula (II):

5′n_{q′}-Nₐ′-(Z′Z′Z′)ₖ-N_{b}′-Y′Y′Y′-N_{b}′-(X′X′X′)ₗ-N′ₐ-nₚ′3′ (II)
[0311] wherein:
[0312] k and l are each independently 0 or 1;
[0313] p′ and q′ are each independently 0-6;
   each Nₐ′ independently represents an oligonucleotide sequence comprising 0-25 modified nucleotides, each sequence comprising at least two differently modified nucleotides;
   each N_{b}′ independently represents an oligonucleotide sequence comprising 0-10 modified nucleotides;
   each nₚ′ and n_{q}′ independently represent an overhang nucleotide;
   wherein N_{b}′ and Y′ do not have the same modification; and
   X′X′X′, Y′Y′Y′ and Z′Z′Z′ each independently represent one motif of three identical modifications on three consecutive nucleotides.

[0314] In one embodiment, the Nₐ′ or N_{b}′ comprise modifications of alternating pattern.

[0315] The Y′Y′Y′ motif occurs at or near the cleavage site of the antisense strand. For example, when the RNAi agent has a duplex region of 17-23 nucleotide in length, the Y′Y′Y′ motif can occur at positions 9, 10, 11; 10, 11, 12; 11, 12, 13; 12, 13, 14; or 13, 14, 15 of the antisense strand, with the count starting from the 1″ nucleotide, from the 5′-end; or optionally, the count starting at the 1″ paired nucleotide within the duplex region, from the 5′-end. Preferably, the Y′Y′Y′ motif occurs at positions 11, 12, 13.

[0316] In one embodiment, Y′Y′Y′ motif is all 2′-OMe modified nucleotides.

[0317] In one embodiment, k is 1 and 1 is 0, or k is 0 and l is 1, or both k and l are 1.

[0318] The antisense strand can therefore be represented by the following formulas:

5′n_{q′}-Nₐ′-Z′Z′Z′-N_{b}′-Y′Y′Y′-Nₐ′-n_{p′}3′ (IIb);

5′n_{q′}-Nₐ′-Y′Y′Y′-N_{b}′-X′X′X′-n_{p′}3′ (IIc); or

5′n_{q′}-Nₐ′-Z′Z′Z′-N_{b}′-Y′Y′Y′-N_{b}′-X′X′X′-Nₐ′-n_{p′}3′ (IId).

[0319] When the antisense strand is represented by formula (IIb), N_{b}′ represents an oligonucleotide sequence comprising 0-10, 0-7, 0-10, 0-7, 0-5, 0-4, 0-2 or 0 modified nucleotides. Each Nₐ′ independently represents an oligonucleotide sequence comprising 2-20, 2-15, or 2-10 modified nucleotides.

[0320] When the antisense strand is represented as formula (IIe), N_{b}′ represents an oligonucleotide sequence comprising 0-10, 0-7, 0-10, 0-7, 0-5, 0-4, 0-2 or 0 modified nucleotides. Each Nₐ′ independently represents an oligonucleotide sequence comprising 2-20, 2-15, or 2-10 modified nucleotides.

[0321] When the antisense strand is represented as formula (IId), each N_{b}′ independently represents an oligonucleotide sequence comprising 0-10, 0-7, 0-10, 0-7, 0-5, 0-4, 0-2 or 0 modified nucleotides. Each Nₐ′ independently represents an oligonucleotide sequence comprising 2-20, 2-15, or 2-10 modified nucleotides. Preferably, N_{b} is 0, 1, 2, 3, 4, 5 or 6.

[0322] In other embodiments, k is 0 and l is 0 and the antisense strand may be represented by the formula:

5′n_{p′}-Nₐ′-Y′Y′Y′-N_{a′}-n_{q′}3′ (Ia).

[0323] When the antisense strand is represented as formula (Ha), each Nₐ′ independently represents an oligonucleotide sequence comprising 2-20, 2-15, or 2-10 modified nucleotides.

[0324] Each of X′, Y′ and Z′ may be the same or different from each other.

[0325] Each nucleotide of the sense strand and antisense strand may be independently modified with LNA, HNA, CeNA, 2′-methoxyethyl, 2′-O-methyl, 2′-O-allyl, 2′-C-allyl, 2′-hydroxyl, or 2′-fluoro. For example, each nucleotide of the sense strand and antisense strand is independently modified with 2′-O-methyl or 2′-fluoro. Each X, Y, Z, X′, Y′ and Z′, in particular, may represent a 2′-O-methyl modification or a 2′-fluoro modification.

[0326] In one embodiment, the sense strand of the RNAi agent may contain YYY motif occurring at 9, 10 and 11 positions of the strand when the duplex region is 21 nt, the count starting from the 1^{st} nucleotide from the 5′-end, or optionally, the count starting at the 1^{st} paired nucleotide within the duplex region, from the 5′-end; and Y represents 2′-F modification. The sense strand may additionally contain XXX motif or ZZZ motifs as wing modifications at the opposite end of the duplex region; and XXX and ZZZ each independently represents a 2′-OMe modification or 2′-F modification.

[0327] In one embodiment the antisense strand may contain Y′Y′Y′ motif occurring at positions 11, 12, 13 of the strand, the count starting from the 1^{st} nucleotide from the 5′-end, or optionally, the count starting at the 1^{st} paired nucleotide within the duplex region, from the 5′-end; and Y′ represents 2′-O-methyl modification. The antisense strand may additionally contain X′X′X′ motif or Z′Z′Z′ motifs as wing modifications at the opposite end of the duplex region; and X′X′X′ and Z′Z′Z′ each independently represents a 2′-OMe modification or 2′-F modification.

[0328] The sense strand represented by any one of the above formulas (Ia), (Ib), (Ic), and (Id) forms a duplex with a antisense strand being represented by any one of formulas (IIa), (IIb), (IIc), and (IId), respectively.

[0329] Accordingly, the RNAi agents for use in the methods of the disclosure may comprise a sense strand and an antisense strand, each strand having 14 to 30 nucleotides, the RNAi duplex represented by formula (III):

sense: 5′nₚ-Nₐ-(X X X)ᵢ-N_{b}-Y Y Y-N_{b}-(Z Z Z)ⱼ-Nₐ-n_{q}3′

antisense: 3′nₚ′-Nₐ′-(X′X′X′)ₖ-N_{b}′-Y′Y′Y′-N_{b}′-(Z′Z′Z′)ₗ-Nₐ′-n_{q}′5′ (III)
[0330] wherein:
[0331] j, k, and l are each independently 0 or 1;
[0332] p, p′, q, and q′ are each independently 0-6;
[0333] each Nₐ and Nₐ′ independently represents an oligonucleotide sequence comprising 0-25 modified nucleotides, each sequence comprising at least two differently modified nucleotides;
[0334] each N_{b} and N_{b}′ independently represents an oligonucleotide sequence comprising 0-10 modified nucleotides;
[0335] wherein
[0336] each nₚ′, nₚ, n_{q}′, and n_{q}, each of which may or may not be present, independently represents an overhang nucleotide; and
[0337] XXX, YYY, ZZZ, X′X′X′, Y′Y′Y′, and Z′Z′Z′ each independently represent one motif of three identical modifications on three consecutive nucleotides.

[0338] In one embodiment, i is 0 and j is 0; or i is 1 and j is 0; or i is 0 and j is 1; or both i and j are 0; or both i and j are 1. In another embodiment, k is 0 and l is 0; or k is 1 and l is 0; k is 0 and l is 1; or both k and l are 0; or both k and l are 1.

[0339] Exemplary combinations of the sense strand and antisense strand forming a RNAi duplex include the formulas below:

5′nₚ-Nₐ-Y Y Y-Nₐ-n_{q}3′

3′nₚ′-Nₐ′-Y′Y′Y′-Nₐ′n_{q}′5′ (IIIa)

5′nₚ-Nₐ-Y Y Y-N_{b}-Z Z Z-Nₐ-n_{q}3′

3′nₚ′-Nₐ′-Y′Y′Y′-N_{b}′-Z′Z′Z′-Nₐ′n_{q}′5′ (IIIb)

5′nₚ-Nₐ-X X X-N_{b}-Y Y Y-Nₐ-n_{q}3′

3′nₚ′-Nₐ′-X′X′X′-N_{b}′-Y′Y′Y′-Nₐ′-n_{q}′5′ (IIc)

5′nₚ-Nₐ-X X X-N_{b}-Y Y Y-N_{b}—ZZZ-Nₐ-n_{q}3′

3′nₚ′-Nₐ′-X′X′X′-N_{b}′-Y′Y′Y′-N_{b}′-Z′Z′Z′-Nₐ-n_{q}′5′ (IIId)

[0340] When the RNAi agent is represented by formula (IIIa), each Nₐ independently represents an oligonucleotide sequence comprising 2-20, 2-15, or 2-10 modified nucleotides.

[0341] When the RNAi agent is represented by formula (IIb), each N_{b} independently represents an oligonucleotide sequence comprising 1-10, 1-7, 1-5 or 1-4 modified nucleotides. Each Nₐ independently represents an oligonucleotide sequence comprising 2-20, 2-15, or 2-10 modified nucleotides.

[0342] When the RNAi agent is represented as formula (IIc), each N_{b}, N_{b}′ independently represents an oligonucleotide sequence comprising 0-10, 0-7, 0-10, 0-7, 0-5, 0-4, 0-2 or 0 modified nucleotides. Each Nₐ independently represents an oligonucleotide sequence comprising 2-20, 2-15, or 2-10 modified nucleotides.

[0343] When the RNAi agent is represented as formula (IIId), each N_{b}, N_{b}′ independently represents an oligonucleotide sequence comprising 0-10, 0-7, 0-10, 0-7, 0-5, 0-4, 0-2 or 0 modified nucleotides. Each Nₐ, Nₐ′ independently represents an oligonucleotide sequence comprising 2-20, 2-15, or 2-10 modified nucleotides. Each of Nₐ, Nₐ′, N_{b} and N_{b}′; independently comprises modifications of alternating pattern.

[0344] In one embodiment, when the RNAi agent is represented by formula (IIId), the Nₐ modifications are 2′-O-methyl or 2′-fluoro modifications. In another embodiment, when the RNAi agent is represented by formula (IIId), the Nₐ modifications are 2′-O-methyl or 2′-fluoro modifications and nₚ′>0 and at least one nₚ′ is linked to a neighboring nucleotide a via phosphorothioate linkage. In yet another embodiment, when the RNAi agent is represented by formula (IIId), the Nₐ modifications are 2′-O-methyl or 2′-fluoro modifications, nₚ ′>0 and at least one nₚ′ is linked to a neighboring nucleotide via phosphorothioate linkage, and the sense strand is conjugated to one or more C16 (or related) moieties attached through a bivalent or trivalent branched linker (described below). In another embodiment, when the RNAi agent is represented by formula (IIId), the Nₐ modifications are 2′-O-methyl or 2′-fluoro modifications, nₚ ′>0 and at least one nₚ′ is linked to a neighboring nucleotide via phosphorothioate linkage, the sense strand comprises at least one phosphorothioate linkage, and the sense strand is conjugated to one or more lipophilic, e.g., C16 (or related) moieties, optionally attached through a bivalent or trivalent branched linker.

[0345] In one embodiment, when the RNAi agent is represented by formula (IIIa), the Nₐ modifications are 2′-O-methyl or 2′-fluoro modifications, nₚ ′>0 and at least one nₚ′ is linked to a neighboring nucleotide via phosphorothioate linkage, the sense strand comprises at least one phosphorothioate linkage, and the sense strand is conjugated to one or more lipophilic, e.g., C16 (or related) moieties attached through a bivalent or trivalent branched linker.

[0346] In one embodiment, the RNAi agent is a multimer containing at least two duplexes represented by formula (III), (IIIa), (IIIb), (IIIc), and (IIId), wherein the duplexes are connected by a linker. The linker can be cleavable or non-cleavable. Optionally, the multimer further comprises a ligand. Each of the duplexes can target the same gene or two different genes; or each of the duplexes can target same gene at two different target sites.

[0347] In one embodiment, the RNAi agent is a multimer containing three, four, five, six or more duplexes represented by formula (III), (IIIa), (IIIb), (IIIc), and (IIId), wherein the duplexes are connected by a linker. The linker can be cleavable or non-cleavable. Optionally, the multimer further comprises a ligand. Each of the duplexes can target the same gene or two different genes; or each of the duplexes can target same gene at two different target sites.

[0348] In one embodiment, two RNAi agents represented by formula (III), (IIIa), (IIIb), (IIIc), and (IIId) are linked to each other at the 5′ end, and one or both of the 3′ ends and are optionally conjugated to to a ligand. Each of the agents can target the same gene or two different genes; or each of the agents can target same gene at two different target sites.

[0349] Various publications describe multimeric RNAi agents that can be used in the methods of the disclosure. Such publications include WO2007/091269, WO2010/141511, WO2007/117686, WO2009/014887, and WO2011/031520; and U.S. Pat. No. 7,858,769, the entire contents of each of which are hereby incorporated herein by reference.

[0350] In certain embodiments, the compositions and methods of the disclosure include a vinyl phosphonate (VP) modification of an RNAi agent as described herein. In exemplary embodiments, a vinyl phosphonate of the disclosure has the following structure:

[chemical structure]

A vinyl phosphonate of the instant disclosure may be attached to either the antisense or the sense strand of a dsRNA of the disclosure. In certain preferred embodiments, a vinyl phosphonate of the instant disclosure is attached to the antisense strand of a dsRNA, optionally at the 5′ end of the antisense strand of the dsRNA.

[0351] Vinyl phosphate modifications are also contemplated for the compositions and methods of the instant disclosure. An exemplary vinyl phosphate structure is:

[chemical structure]

### E. Thermally Destabilizing Modifications

[0352] In certain embodiments, a dsRNA molecule can be optimized for RNA interference by incorporating thermally destabilizing modifications in the seed region of the antisense strand (i.e., at positions 2-9 of the 5′-end of the antisense strand) to reduce or inhibit off-target gene silencing. It has been discovered that dsRNAs with an antisense strand comprising at least one thermally destabilizing modification of the duplex within the first 9 nucleotide positions, counting from the 5′ end, of the antisense strand have reduced off-target gene silencing activity. Accordingly, in some embodiments, the antisense strand comprises at least one (e.g., one, two, three, four, five or more) thermally destabilizing modification of the duplex within the first 9 nucleotide positions of the 5′ region of the antisense strand. In some embodiments, one or more thermally destabilizing modification(s) of the duplex is/are located in positions 2-9, or preferably positions 4-8, from the 5′-end of the antisense strand. In some further embodiments, the thermally destabilizing modification(s) of the duplex is/are located at position 6, 7 or 8 from the 5′-end of the antisense strand. In still some further embodiments, the thermally destabilizing modification of the duplex is located at position 7 from the 5′-end of the antisense strand. The term “thermally destabilizing modification(s)” includes modification(s) that would result with a dsRNA with a lower overall melting temperature (Tm) (preferably a Tm with one, two, three or four degrees lower than the Tm of the dsRNA without having such modification(s). In some embodiments, the thermally destabilizing modification of the duplex is located at position 2, 3, 4, 5 or 9 from the 5′-end of the antisense strand.

[0353] The thermally destabilizing modifications can include, but are not limited to, abasic modification; mismatch with the opposing nucleotide in the opposing strand; and sugar modification such as 2′-deoxy modification or acyclic nucleotide, e.g., unlocked nucleic acids (UNA) or glycol nucleic acid (GNA).

[0354] Exemplified abasic modifications include, but are not limited to the following:

[chemical structure]

### Wherein R═H, Me, Et or OMe; R′═H, Me, Et or OMe; R″═H, Me, Et or OMe

[chemical structure]

wherein B is a modified or unmodified nucleobase.

[0356] Exemplified sugar modifications include, but are not limited to the following:

[chemical structure]

wherein B is a modified or unmodified nucleobase.

[0357] In some embodiments the thermally destabilizing modification of the duplex is selected from the group consisting of:

[chemical structure]

wherein B is a modified or unmodified nucleobase and the asterisk on each structure represents either R, S or racemic.

[0358] The term “acyclic nucleotide” refers to any nucleotide having an acyclic ribose sugar, for example, where any of bonds between the ribose carbons (e.g., C1′-C2′, C2′-C3′, C3′-C4′, C4′-O4′, or C1′-O4′) is absent or at least one of ribose carbons or oxygen (e.g., C1′, C2′, C3′, C4′, or O4′) are independently or in combination absent from the nucleotide. In some embodiments, acyclic nucleotide is

[chemical structure]

wherein B is a modified or unmodified nucleobase, R¹ and R² independently are H, halogen, OR₃, or alkyl; and R₃ is H, alkyl, cycloalkyl, aryl, aralkyl, heteroaryl or sugar). The term “UNA” refers to unlocked acyclic nucleic acid, wherein any of the bonds of the sugar has been removed, forming an unlocked “sugar” residue. In one example, UNA also encompasses monomers with bonds between C1′-C4′ being removed (i.e. the covalent carbon-oxygen-carbon bond between the C1′ and C4′ carbons). In another example, the C2′-C3′ bond (i.e. the covalent carbon-carbon bond between the C2′ and C3′ carbons) of the sugar is removed (see Mikhailov et. al., Tetrahedron Letters, 26 (17): 2059 (1985); and Fluiter et al., Mol. Biosyst., 10: 1039 (2009), which are hereby incorporated by reference in their entirety). The acyclic derivative provides greater backbone flexibility without affecting the Watson-Crick pairings. The acyclic nucleotide can be linked via 2′-5′ or 3′-5′ linkage.

[0359] The term ‘GNA’ refers to glycol nucleic acid which is a polymer similar to DNA or RNA but differing in the composition of its “backbone” in that is composed of repeating glycerol units linked by phosphodiester bonds:

[chemical structure]

[0360] The thermally destabilizing modification of the duplex can be mismatches (i.e., noncomplementary base pairs) between the thermally destabilizing nucleotide and the opposing nucleotide in the opposite strand within the dsRNA duplex. Exemplary mismatch base pairs include G:G, G:A, G:U, G:T, A:A, A:C, C:C, C:U, C:T, U:U, T:T, U:T, or a combination thereof. Other mismatch base pairings known in the art are also amenable to the present invention. A mismatch can occur between nucleotides that are either naturally occurring nucleotides or modified nucleotides, i.e., the mismatch base pairing can occur between the nucleobases from respective nucleotides independent of the modifications on the ribose sugars of the nucleotides. In certain embodiments, the dsRNA molecule contains at least one nucleobase in the mismatch pairing that is a 2′-deoxy nucleobase; e.g., the 2′-deoxy nucleobase is in the sense strand.

[0361] In some embodiments, the thermally destabilizing modification of the duplex in the seed region of the antisense strand includes nucleotides with impaired W-C H-bonding to complementary base on the target mRNA, such as:

[chemical structure]

[0362] More examples of abasic nucleotide, acyclic nucleotide modifications (including UNA and GNA), and mismatch modifications have been described in detail in WO 2011/133876, which is herein incorporated by reference in its entirety.

The thermally destabilizing modifications may also include universal base with reduced or abolished capability to form hydrogen bonds with the opposing bases, and phosphate modifications.

[0363] In some embodiments, the thermally destabilizing modification of the duplex includes nucleotides with non-canonical bases such as, but not limited to, nucleobase modifications with impaired or completely abolished capability to form hydrogen bonds with bases in the opposite strand. These nucleobase modifications have been evaluated for destabilization of the central region of the dsRNA duplex as described in WO 2010/0011895, which is herein incorporated by reference in its entirety. Exemplary nucleobase modifications are:

[chemical structure]

[0364] In some embodiments, the thermally destabilizing modification of the duplex in the seed region of the antisense strand includes one or more a-nucleotide complementary to the base on the target mRNA, such as:

[chemical structure]

wherein R is H, OH, OCH₃, F, NH₂, NHMe, NMe₂ or O-alkyl.

[0365] Exemplary phosphate modifications known to decrease the thermal stability of dsRNA duplexes compared to natural phosphodiester linkages are:

[chemical structure]

R=alkyl

[0366] The alkyl for the R group can be a C₁-C₆ alkyl. Specific alkyls for the R group include, but are not limited to methyl, ethyl, propyl, isopropyl, butyl, pentyl and hexyl.

[0367] As the skilled artisan will recognize, in view of the functional role of nucleobases is defining specificity of a RNAi agent of the disclosure, while nucleobase modifications can be performed in the various manners as described herein, e.g., to introduce destabilizing modifications into a RNAi agent of the disclosure, e.g., for purpose of enhancing on-target effect relative to off-target effect, the range of modifications available and, in general, present upon RNAi agents of the disclosure tends to be much greater for non-nucleobase modifications, e.g., modifications to sugar groups or phosphate backbones of polyribonucleotides. Such modifications are described in greater detail in other sections of the instant disclosure and are expressly contemplated for RNAi agents of the disclosure, either possessing native nucleobases or modified nucleobases as described above or elsewhere herein.

[0368] In addition to the antisense strand comprising a thermally destabilizing modification, the dsRNA can also comprise one or more stabilizing modifications. For example, the dsRNA can comprise at least two (e.g., two, three, four, five, six, seven, eight, nine, ten or more) stabilizing modifications. Without limitations, the stabilizing modifications all can be present in one strand. In some embodiments, both the sense and the antisense strands comprise at least two stabilizing modifications. The stabilizing modification can occur on any nucleotide of the sense strand or antisense strand. For instance, the stabilizing modification can occur on every nucleotide on the sense strand or antisense strand; each stabilizing modification can occur in an alternating pattern on the sense strand or antisense strand; or the sense strand or antisense strand comprises both stabilizing modification in an alternating pattern. The alternating pattern of the stabilizing modifications on the sense strand may be the same or different from the antisense strand, and the alternating pattern of the stabilizing modifications on the sense strand can have a shift relative to the alternating pattern of the stabilizing modifications on the antisense strand.

[0369] In some embodiments, the antisense strand comprises at least two (e.g., two, three, four, five, six, seven, eight, nine, ten or more) stabilizing modifications. Without limitations, a stabilizing modification in the antisense strand can be present at any positions. In some embodiments, the antisense comprises stabilizing modifications at positions 2, 6, 8, 9, 14, and 16 from the 5′-end. In some other embodiments, the antisense comprises stabilizing modifications at positions 2, 6, 14, and 16 from the 5′-end. In still some other embodiments, the antisense comprises stabilizing modifications at positions 2, 14, and 16 from the 5′-end.

[0370] In some embodiments, the antisense strand comprises at least one stabilizing modification adjacent to the destabilizing modification. For example, the stabilizing modification can be the nucleotide at the 5′-end or the 3′-end of the destabilizing modification, i.e., at position −1 or +1 from the position of the destabilizing modification. In some embodiments, the antisense strand comprises a stabilizing modification at each of the 5′-end and the 3′-end of the destabilizing modification, i.e., positions −1 and +1 from the position of the destabilizing modification.

[0371] In some embodiments, the antisense strand comprises at least two stabilizing modifications at the 3′-end of the destabilizing modification, i.e., at positions +1 and +2 from the position of the destabilizing modification.

[0372] In some embodiments, the sense strand comprises at least two (e.g., two, three, four, five, six, seven, eight, nine, ten or more) stabilizing modifications. Without limitations, a stabilizing modification in the sense strand can be present at any positions. In some embodiments, the sense strand comprises stabilizing modifications at positions 7, 10, and 11 from the 5′-end. In some other embodiments, the sense strand comprises stabilizing modifications at positions 7, 9, 10, and 11 from the 5′-end. In some embodiments, the sense strand comprises stabilizing modifications at positions opposite or complimentary to positions 11, 12, and 15 of the antisense strand, counting from the 5′-end of the antisense strand. In some other embodiments, the sense strand comprises stabilizing modifications at positions opposite or complimentary to positions 11, 12, 13, and 15 of the antisense strand, counting from the 5′-end of the antisense strand. In some embodiments, the sense strand comprises a block of two, three, or four stabilizing modifications.

[0373] In some embodiments, the sense strand does not comprise a stabilizing modification in position opposite or complimentary to the thermally destabilizing modification of the duplex in the antisense strand.

[0374] Exemplary thermally stabilizing modifications include, but are not limited to, 2′-fluoro modifications. Other thermally stabilizing modifications include, but are not limited to, LNA.

[0375] In some embodiments, the dsRNA of the disclosure comprises at least four (e.g., four, five, six, seven, eight, nine, ten, or more) 2′-fluoro nucleotides. Without limitations, the 2′-fluoro nucleotides all can be present in one strand. In some embodiments, both the sense and the antisense strands comprise at least two 2′-fluoro nucleotides. The 2′-fluoro modification can occur on any nucleotide of the sense strand or antisense strand. For instance, the 2′-fluoro modification can occur on every nucleotide on the sense strand or antisense strand; each 2′-fluoro modification can occur in an alternating pattern on the sense strand or antisense strand; or the sense strand or antisense strand comprises both 2′-fluoro modifications in an alternating pattern. The alternating pattern of the 2′-fluoro modifications on the sense strand may be the same or different from the antisense strand, and the alternating pattern of the 2′-fluoro modifications on the sense strand can have a shift relative to the alternating pattern of the 2′-fluoro modifications on the antisense strand.

[0376] In some embodiments, the antisense strand comprises at least two (e.g., two, three, four, five, six, seven, eight, nine, ten, or more) 2′-fluoro nucleotides. Without limitations, a 2′-fluoro modification in the antisense strand can be present at any positions. In some embodiments, the antisense comprises 2′-fluoro nucleotides at positions 2, 6, 8, 9, 14, and 16 from the 5′-end. In some other embodiments, the antisense comprises 2′-fluoro nucleotides at positions 2, 6, 14, and 16 from the 5′-end. In still some other embodiments, the antisense comprises 2′-fluoro nucleotides at positions 2, 14, and 16 from the 5′-end.

[0377] In some embodiments, the antisense strand comprises at least one 2′-fluoro nucleotide adjacent to the destabilizing modification. For example, the 2′-fluoro nucleotide can be the nucleotide at the 5′-end or the 3′-end of the destabilizing modification, i.e., at position −1 or +1 from the position of the destabilizing modification. In some embodiments, the antisense strand comprises a 2′-fluoro nucleotide at each of the 5′-end and the 3′-end of the destabilizing modification, i.e., positions −1 and +1 from the position of the destabilizing modification.

[0378] In some embodiments, the antisense strand comprises at least two 2′-fluoro nucleotides at the 3′-end of the destabilizing modification, i.e., at positions +1 and +2 from the position of the destabilizing modification.

[0379] In some embodiments, the sense strand comprises at least two (e.g., two, three, four, five, six, seven, eight, nine, ten, or more) 2′-fluoro nucleotides. Without limitations, a 2′-fluoro modification in the sense strand can be present at any positions. In some embodiments, the antisense comprises 2′-fluoro nucleotides at positions 7, 10, and 11 from the 5′-end. In some other embodiments, the sense strand comprises 2′-fluoro nucleotides at positions 7, 9, 10, and 11 from the 5′-end. In some embodiments, the sense strand comprises 2′-fluoro nucleotides at positions opposite or complimentary to positions 11, 12, and 15 of the antisense strand, counting from the 5′-end of the antisense strand. In some other embodiments, the sense strand comprises 2′-fluoro nucleotides at positions opposite or complimentary to positions 11, 12, 13, and 15 of the antisense strand, counting from the 5′-end of the antisense strand. In some embodiments, the sense strand comprises a block of two, three or four 2′-fluoro nucleotides.

[0380] In some embodiments, the sense strand does not comprise a 2′-fluoro nucleotide in position opposite or complimentary to the thermally destabilizing modification of the duplex in the antisense strand.

[0381] In some embodiments, the dsRNA molecule of the disclosure comprises a 21 nucleotides (nt) sense strand and a 23 nucleotides (nt) antisense, wherein the antisense strand contains at least one thermally destabilizing nucleotide, where the at least one thermally destabilizing nucleotide occurs in the seed region of the antisense strand (i.e., at position 2-9 of the 5′-end of the antisense strand), wherein one end of the dsRNA is blunt, while the other end is comprises a 2 nt overhang, and wherein the dsRNA optionally further has at least one (e.g., one, two, three, four, five, six or all seven) of the following characteristics: (i) the antisense comprises 2, 3, 4, 5, or 6 2′-fluoro modifications; (ii) the antisense comprises 1, 2, 3, 4, or 5 phosphorothioate internucleotide linkages; (iii) the sense strand is conjugated with a ligand; (iv) the sense strand comprises 2, 3, 4, or 5 2′-fluoro modifications; (v) the sense strand comprises 1, 2, 3, 4, or 5 phosphorothioate internucleotide linkages; (vi) the dsRNA comprises at least four 2′-fluoro modifications; and (vii) the dsRNA comprises a blunt end at 5′-end of the antisense strand. Preferably, the 2 nt overhang is at the 3′-end of the antisense.

[0382] In some embodiments, the dsRNA molecule of the disclosure comprising a sense and antisense strands, wherein: the sense strand is 25-30 nucleotide residues in length, wherein starting from the 5′ terminal nucleotide (position 1), positions 1 to 23 of said sense strand comprise at least 8 ribonucleotides; antisense strand is 36-66 nucleotide residues in length and, starting from the 3′ terminal nucleotide, at least 8 ribonucleotides in the positions paired with positions 1-23 of sense strand to form a duplex; wherein at least the 3 ‘ terminal nucleotide of antisense strand is unpaired with sense strand, and up to 6 consecutive 3’ terminal nucleotides are unpaired with sense strand, thereby forming a 3′ single stranded overhang of 1-6 nucleotides; wherein the 5′ terminus of antisense strand comprises from 10-30 consecutive nucleotides which are unpaired with sense strand, thereby forming a 10-30 nucleotide single stranded 5′ overhang; wherein at least the sense strand 5′ terminal and 3′ terminal nucleotides are base paired with nucleotides of antisense strand when sense and antisense strands are aligned for maximum complementarity, thereby forming a substantially duplexed region between sense and antisense strands; and antisense strand is sufficiently complementary to a target RNA along at least 19 ribonucleotides of antisense strand length to reduce target gene expression when said double stranded nucleic acid is introduced into a mammalian cell; and wherein the antisense strand contains at least one thermally destabilizing nucleotide, where at least one thermally destabilizing nucleotide is in the seed region of the antisense strand (i.e. at position 2-9 of the 5′-end of the antisense strand). For example, the thermally destabilizing nucleotide occurs between positions opposite or complimentary to positions 14-17 of the 5′-end of the sense strand, and wherein the dsRNA optionally further has at least one (e.g., one, two, three, four, five, six or all seven) of the following characteristics: (i) the antisense comprises 2, 3, 4, 5, or 6 2′-fluoro modifications; (ii) the antisense comprises 1, 2, 3, 4, or 5 phosphorothioate internucleotide linkages; (iii) the sense strand is conjugated with a ligand; (iv) the sense strand comprises 2, 3, 4, or 5 2′-fluoro modifications; (v) the sense strand comprises 1, 2, 3, 4, or 5 phosphorothioate internucleotide linkages; and (vi) the dsRNA comprises at least four 2′-fluoro modifications; and (vii) the dsRNA comprises a duplex region of 12-30 nucleotide pairs in length.

[0383] In some embodiments, the dsRNA molecule of the disclosure comprises a sense and antisense strands, wherein said dsRNA molecule comprises a sense strand having a length which is at least 25 and at most 29 nucleotides and an antisense strand having a length which is at most 30 nucleotides with the sense strand comprises a modified nucleotide that is susceptible to enzymatic degradation at position 11 from the 5′end, wherein the 3′ end of said sense strand and the 5′ end of said antisense strand form a blunt end and said antisense strand is 1˜4 nucleotides longer at its 3′ end than the sense strand, wherein the duplex region which is at least 25 nucleotides in length, and said antisense strand is sufficiently complementary to a target mRNA along at least 19 nt of said antisense strand length to reduce target gene expression when said dsRNA molecule is introduced into a mammalian cell, and wherein dicer cleavage of said dsRNA preferentially results in an siRNA comprising said 3′ end of said antisense strand, thereby reducing expression of the target gene in the mammal, wherein the antisense strand contains at least one thermally destabilizing nucleotide, where the at least one thermally destabilizing nucleotide is in the seed region of the antisense strand (i.e. at position 2-9 of the 5′-end of the antisense strand), and wherein the dsRNA optionally further has at least one (e.g., one, two, three, four, five, six or all seven) of the following characteristics: (i) the antisense comprises 2, 3, 4, 5, or 6 2′-fluoro modifications; (ii) the antisense comprises 1, 2, 3, 4, or 5 phosphorothioate internucleotide linkages; (iii) the sense strand is conjugated with a ligand; (iv) the sense strand comprises 2, 3, 4, or 5 2′-fluoro modifications; (v) the sense strand comprises 1, 2, 3, 4, or 5 phosphorothioate internucleotide linkages; and (vi) the dsRNA comprises at least four 2′-fluoro modifications; and (vii) the dsRNA has a duplex region of 12-29 nucleotide pairs in length.

[0384] In some embodiments, every nucleotide in the sense strand and antisense strand of the dsRNA molecule may be modified. Each nucleotide may be modified with the same or different modification which can include one or more alteration of one or both of the non-linking phosphate oxygens or of one or more of the linking phosphate oxygens; alteration of a constituent of the ribose sugar, e.g., of the 2′ hydroxyl on the ribose sugar; wholesale replacement of the phosphate moiety with “dephospho” linkers; modification or replacement of a naturally occurring base; and replacement or modification of the ribose-phosphate backbone.

[0385] As nucleic acids are polymers of subunits, many of the modifications occur at a position which is repeated within a nucleic acid, e.g., a modification of a base, or a phosphate moiety, or a non-linking 0 of a phosphate moiety. In some cases, the modification will occur at all of the subject positions in the nucleic acid but in many cases it will not. By way of example, a modification may only occur at a 3′ or 5′ terminal position, may only occur in a terminal region, e.g., at a position on a terminal nucleotide or in the last 2, 3, 4, 5, or 10 nucleotides of a strand. A modification may occur in a double strand region, a single strand region, or in both. A modification may occur only in the double strand region of an RNA or may only occur in a single strand region of an RNA. e.g., a phosphorothioate modification at a non-linking 0 position may only occur at one or both termini, may only occur in a terminal region, e.g., at a position on a terminal nucleotide or in the last 2, 3, 4, 5, or 10 nucleotides of a strand, or may occur in double strand and single strand regions, particularly at termini. The 5′ end or ends can be phosphorylated.

[0386] It may be possible, e.g., to enhance stability, to include particular bases in overhangs, or to include modified nucleotides or nucleotide surrogates, in single strand overhangs, e.g., in a 5′ or 3′ overhang, or in both. E.g., it can be desirable to include purine nucleotides in overhangs. In some embodiments all or some of the bases in a 3′ or 5′ overhang may be modified, e.g., with a modification described herein. Modifications can include, e.g., the use of modifications at the 2′ position of the ribose sugar with modifications that are known in the art, e.g., the use of deoxyribonucleotides, 2′-deoxy-2′-fluoro (2′-F) or 2′-O-methyl modified instead of the ribosugar of the nucleobase, and modifications in the phosphate group, e.g., phosphorothioate modifications. Overhangs need not be homologous with the target sequence.

[0387] In some embodiments, each residue of the sense strand and antisense strand is independently modified with LNA, HNA, CeNA, 2′-methoxyethyl, 2′-O-methyl, 2′-O-allyl, 2′-C-allyl, 2′-deoxy, or 2′-fluoro. The strands can contain more than one modification. In some embodiments, each residue of the sense strand and antisense strand is independently modified with 2′-O-methyl or 2′-fluoro. It is to be understood that these modifications are in addition to the at least one thermally destabilizing modification of the duplex present in the antisense strand.

[0388] At least two different modifications are typically present on the sense strand and antisense strand. Those two modifications may be the 2′-deoxy, 2′-O-methyl or 2′-fluoro modifications, acyclic nucleotides or others. In some embodiments, the sense strand and antisense strand each comprises two differently modified nucleotides selected from 2′-O-methyl or 2′-deoxy. In some embodiments, each residue of the sense strand and antisense strand is independently modified with 2′-O-methyl nucleotide, 2′-deoxy nucleotide, 2′-deoxy-2′-fluoro nucleotide, 2′-O-N-methylacetamido (2′-O-NMA) nucleotide, a 2′-O-dimethylaminoethoxyethyl (2′-O-DMAEOE) nucleotide, 2′-O-aminopropyl (2′-O-AP) nucleotide, or 2′-ara-F nucleotide. Again, it is to be understood that these modifications are in addition to the at least one thermally destabilizing modification of the duplex present in the antisense strand.

[0389] In some embodiments, the dsRNA molecule of the disclosure comprises modifications of an alternating pattern, particular in the B1, B2, B3, B1′, B2′, B3′, B4′ regions. The term “alternating motif” or “alternative pattern” as used herein refers to a motif having one or more modifications, each modification occurring on alternating nucleotides of one strand. The alternating nucleotide may refer to one per every other nucleotide or one per every three nucleotides, or a similar pattern. For example, if A, B and C each represent one type of modification to the nucleotide, the alternating motif can be “ABABABABABAB . . . ,” “AABBAABBAABB . . . ,” “AABAABAABAAB . . . ,” “AAABAAABAAAB . . . ,” “AAABBBAAABBB . . . ,” or “ABCABCABCABC . . . ,” etc. The type of modifications contained in the alternating motif may be the same or different. For example, if A, B, C, D each represent one type of modification on the nucleotide, the alternating pattern, i.e., modifications on every other nucleotide, may be the same, but each of the sense strand or antisense strand can be selected from several possibilities of modifications within the alternating motif such as “ABABAB . . . ”, “ACACAC . . . ” “BDBDBD . . . ” or “CDCDCD . . . ,” etc.

[0390] In some embodiments, the dsRNA molecule of the disclosure comprises the modification pattern for the alternating motif on the sense strand relative to the modification pattern for the alternating motif on the antisense strand is shifted. The shift may be such that the modified group of nucleotides of the sense strand corresponds to a differently modified group of nucleotides of the antisense strand and vice versa. For example, the sense strand when paired with the antisense strand in the dsRNA duplex, the alternating motif in the sense strand may start with “ABABAB” from 5′-3′ of the strand and the alternating motif in the antisense strand may start with “BABABA” from 3′-5′ of the strand within the duplex region. As another example, the alternating motif in the sense strand may start with “AABBAABB” from 5′-3′ of the strand and the alternating motif in the antisense strand may start with “BBAABBAA” from 3′-5′ of the strand within the duplex region, so that there is a complete or partial shift of the modification patterns between the sense strand and the antisense strand.

[0391] The dsRNA molecule of the disclosure may further comprise at least one phosphorothioate or methylphosphonate internucleotide linkage. The phosphorothioate or methylphosphonate internucleotide linkage modification may occur on any nucleotide of the sense strand or antisense strand or both in any position of the strand. For instance, the internucleotide linkage modification may occur on every nucleotide on the sense strand or antisense strand; each internucleotide linkage modification may occur in an alternating pattern on the sense strand or antisense strand; or the sense strand or antisense strand comprises both internucleotide linkage modifications in an alternating pattern. The alternating pattern of the internucleotide linkage modification on the sense strand may be the same or different from the antisense strand, and the alternating pattern of the internucleotide linkage modification on the sense strand may have a shift relative to the alternating pattern of the internucleotide linkage modification on the antisense strand.

[0392] In some embodiments, the dsRNA molecule comprises the phosphorothioate or methylphosphonate internucleotide linkage modification in the overhang region. For example, the overhang region comprises two nucleotides having a phosphorothioate or methylphosphonate internucleotide linkage between the two nucleotides. Internucleotide linkage modifications also may be made to link the overhang nucleotides with the terminal paired nucleotides within duplex region. For example, at least 2, 3, 4, or all the overhang nucleotides may be linked through phosphorothioate or methylphosphonate internucleotide linkage, and optionally, there may be additional phosphorothioate or methylphosphonate internucleotide linkages linking the overhang nucleotide with a paired nucleotide that is next to the overhang nucleotide. For instance, there may be at least two phosphorothioate internucleotide linkages between the terminal three nucleotides, in which two of the three nucleotides are overhang nucleotides, and the third is a paired nucleotide next to the overhang nucleotide. Preferably, these terminal three nucleotides may be at the 3′-end of the antisense strand.

[0393] In some embodiments, the sense strand of the dsRNA molecule comprises 1-10 blocks of two to ten phosphorothioate or methylphosphonate internucleotide linkages separated by 1, 2, 3, 4, 5, 6, 7, 8, 9, 10, 11, 12, 13, 14, 15, or 16 phosphate internucleotide linkages, wherein one of the phosphorothioate or methylphosphonate internucleotide linkages is placed at any position in the oligonucleotide sequence and the said sense strand is paired with an antisense strand comprising any combination of phosphorothioate, methylphosphonate and phosphate internucleotide linkages or an antisense strand comprising either phosphorothioate or methylphosphonate or phosphate linkage.

[0394] In some embodiments, the antisense strand of the dsRNA molecule comprises two blocks of two phosphorothioate or methylphosphonate internucleotide linkages separated by 1, 2, 3, 4, 5, 6, 7, 8, 9, 10, 11, 12, 13, 14, 15, 16, 17, or 18 phosphate internucleotide linkages, wherein one of the phosphorothioate or methylphosphonate internucleotide linkages is placed at any position in the oligonucleotide sequence and the said antisense strand is paired with a sense strand comprising any combination of phosphorothioate, methylphosphonate and phosphate internucleotide linkages or an antisense strand comprising either phosphorothioate or methylphosphonate or phosphate linkage.

[0395] In some embodiments, the antisense strand of the dsRNA molecule comprises two blocks of three phosphorothioate or methylphosphonate internucleotide linkages separated by 1, 2, 3, 4, 5, 6, 7, 8, 9, 10, 11, 12, 13, 14, 15, or 16 phosphate internucleotide linkages, wherein one of the phosphorothioate or methylphosphonate internucleotide linkages is placed at any position in the oligonucleotide sequence and the said antisense strand is paired with a sense strand comprising any combination of phosphorothioate, methylphosphonate and phosphate internucleotide linkages or an antisense strand comprising either phosphorothioate or methylphosphonate or phosphate linkage.

[0396] In some embodiments, the antisense strand of the dsRNA molecule comprises two blocks of four phosphorothioate or methylphosphonate internucleotide linkages separated by 1, 2, 3, 4, 5, 6, 7, 8, 9, 10, 11, 12, 13, or 14 phosphate internucleotide linkages, wherein one of the phosphorothioate or methylphosphonate internucleotide linkages is placed at any position in the oligonucleotide sequence and the said antisense strand is paired with a sense strand comprising any combination of phosphorothioate, methylphosphonate and phosphate internucleotide linkages or an antisense strand comprising either phosphorothioate or methylphosphonate or phosphate linkage.

[0397] In some embodiments, the antisense strand of the dsRNA molecule comprises two blocks of five phosphorothioate or methylphosphonate internucleotide linkages separated by 1, 2, 3, 4, 5, 6, 7, 8, 9, 10, 11, or 12 phosphate internucleotide linkages, wherein one of the phosphorothioate or methylphosphonate internucleotide linkages is placed at any position in the oligonucleotide sequence and the said antisense strand is paired with a sense strand comprising any combination of phosphorothioate, methylphosphonate and phosphate internucleotide linkages or an antisense strand comprising either phosphorothioate or methylphosphonate or phosphate linkage.

[0398] In some embodiments, the antisense strand of the dsRNA molecule comprises two blocks of six phosphorothioate or methylphosphonate internucleotide linkages separated by 1, 2, 3, 4, 5, 6, 7, 8, 9, or 10 phosphate internucleotide linkages, wherein one of the phosphorothioate or methylphosphonate internucleotide linkages is placed at any position in the oligonucleotide sequence and the said antisense strand is paired with a sense strand comprising any combination of phosphorothioate, methylphosphonate and phosphate internucleotide linkages or an antisense strand comprising either phosphorothioate or methylphosphonate or phosphate linkage.

[0399] In some embodiments, the antisense strand of the dsRNA molecule comprises two blocks of seven phosphorothioate or methylphosphonate internucleotide linkages separated by 1, 2, 3, 4, 5, 6, 7, or 8 phosphate internucleotide linkages, wherein one of the phosphorothioate or methylphosphonate internucleotide linkages is placed at any position in the oligonucleotide sequence and the said antisense strand is paired with a sense strand comprising any combination of phosphorothioate, methylphosphonate and phosphate internucleotide linkages or an antisense strand comprising either phosphorothioate or methylphosphonate or phosphate linkage.

[0400] In some embodiments, the antisense strand of the dsRNA molecule comprises two blocks of eight phosphorothioate or methylphosphonate internucleotide linkages separated by 1, 2, 3, 4, 5, or 6 phosphate internucleotide linkages, wherein one of the phosphorothioate or methylphosphonate internucleotide linkages is placed at any position in the oligonucleotide sequence and the said antisense strand is paired with a sense strand comprising any combination of phosphorothioate, methylphosphonate and phosphate internucleotide linkages or an antisense strand comprising either phosphorothioate or methylphosphonate or phosphate linkage.

[0401] In some embodiments, the antisense strand of the dsRNA molecule comprises two blocks of nine phosphorothioate or methylphosphonate internucleotide linkages separated by 1, 2, 3, or 4 phosphate internucleotide linkages, wherein one of the phosphorothioate or methylphosphonate internucleotide linkages is placed at any position in the oligonucleotide sequence and the said antisense strand is paired with a sense strand comprising any combination of phosphorothioate, methylphosphonate and phosphate internucleotide linkages or an antisense strand comprising either phosphorothioate or methylphosphonate or phosphate linkage.

[0402] In some embodiments, the dsRNA molecule of the disclosure further comprises one or more phosphorothioate or methylphosphonate internucleotide linkage modification within 1-10 of the termini position(s) of the sense or antisense strand. For example, at least 2, 3, 4, 5, 6, 7, 8, 9, or 10 nucleotides may be linked through phosphorothioate or methylphosphonate internucleotide linkage at one end or both ends of the sense or antisense strand.

[0403] In some embodiments, the dsRNA molecule of the disclosure further comprises one or more phosphorothioate or methylphosphonate internucleotide linkage modification within 1-10 of the internal region of the duplex of each of the sense or antisense strand. For example, at least 2, 3, 4, 5, 6, 7, 8, 9, or 10 nucleotides may be linked through phosphorothioate methylphosphonate internucleotide linkage at position 8-16 of the duplex region counting from the 5′-end of the sense strand; the dsRNA molecule can optionally further comprise one or more phosphorothioate or methylphosphonate internucleotide linkage modification within 1-10 of the termini position(s).

[0404] In some embodiments, the dsRNA molecule of the disclosure further comprises one to five phosphorothioate or methylphosphonate internucleotide linkage modification(s) within position 1-5 and one to five phosphorothioate or methylphosphonate internucleotide linkage modification(s) within position 18-23 of the sense strand (counting from the 5′-end), and one to five phosphorothioate or methylphosphonate internucleotide linkage modification at positions 1 and 2 and one to five within positions 18-23 of the antisense strand (counting from the 5′-end).

[0405] In some embodiments, the dsRNA molecule of the disclosure further comprises one phosphorothioate internucleotide linkage modification within position 1-5 and one phosphorothioate or methylphosphonate internucleotide linkage modification within position 18-23 of the sense strand (counting from the 5′-end), and one phosphorothioate internucleotide linkage modification at positions 1 and 2 and two phosphorothioate or methylphosphonate internucleotide linkage modifications within positions 18-23 of the antisense strand (counting from the 5′-end).

[0406] In some embodiments, the dsRNA molecule of the disclosure further comprises two phosphorothioate internucleotide linkage modifications within position 1-5 and one phosphorothioate internucleotide linkage modification within position 18-23 of the sense strand (counting from the 5′-end), and one phosphorothioate internucleotide linkage modification at positions 1 and 2 and two phosphorothioate internucleotide linkage modifications within positions 18-23 of the antisense strand (counting from the 5′-end).

[0407] In some embodiments, the dsRNA molecule of the disclosure further comprises two phosphorothioate internucleotide linkage modifications within position 1-5 and two phosphorothioate internucleotide linkage modifications within position 18-23 of the sense strand (counting from the 5′-end), and one phosphorothioate internucleotide linkage modification at positions 1 and 2 and two phosphorothioate internucleotide linkage modifications within positions 18-23 of the antisense strand (counting from the 5′-end).

[0408] In some embodiments, the dsRNA molecule of the disclosure further comprises two phosphorothioate internucleotide linkage modifications within position 1-5 and two phosphorothioate internucleotide linkage modifications within position 18-23 of the sense strand (counting from the 5′-end), and one phosphorothioate internucleotide linkage modification at positions 1 and 2 and one phosphorothioate internucleotide linkage modification within positions 18-23 of the antisense strand (counting from the 5′-end).

[0409] In some embodiments, the dsRNA molecule of the disclosure further comprises one phosphorothioate internucleotide linkage modification within position 1-5 and one phosphorothioate internucleotide linkage modification within position 18-23 of the sense strand (counting from the 5′-end), and two phosphorothioate internucleotide linkage modifications at positions 1 and 2 and two phosphorothioate internucleotide linkage modifications within positions 18-23 of the antisense strand (counting from the 5′-end).

[0410] In some embodiments, the dsRNA molecule of the disclosure further comprises one phosphorothioate internucleotide linkage modification within position 1-5 and one within position 18-23 of the sense strand (counting from the 5′-end), and two phosphorothioate internucleotide linkage modification at positions 1 and 2 and one phosphorothioate internucleotide linkage modification within positions 18-23 of the antisense strand (counting from the 5′-end).

[0411] In some embodiments, the dsRNA molecule of the disclosure further comprises one phosphorothioate internucleotide linkage modification within position 1-5 (counting from the 5′-end) of the sense strand, and two phosphorothioate internucleotide linkage modifications at positions 1 and 2 and one phosphorothioate internucleotide linkage modification within positions 18-23 of the antisense strand (counting from the 5′-end).

[0412] In some embodiments, the dsRNA molecule of the disclosure further comprises two phosphorothioate internucleotide linkage modifications within position 1-5 (counting from the 5′-end) of the sense strand, and one phosphorothioate internucleotide linkage modification at positions 1 and 2 and two phosphorothioate internucleotide linkage modifications within positions 18-23 of the antisense strand (counting from the 5′-end).

[0413] In some embodiments, the dsRNA molecule of the disclosure further comprises two phosphorothioate internucleotide linkage modifications within position 1-5 and one within position 18-23 of the sense strand (counting from the 5′-end), and two phosphorothioate internucleotide linkage modifications at positions 1 and 2 and one phosphorothioate internucleotide linkage modification within positions 18-23 of the antisense strand (counting from the 5′-end).

[0414] In some embodiments, the dsRNA molecule of the disclosure further comprises two phosphorothioate internucleotide linkage modifications within position 1-5 and one phosphorothioate internucleotide linkage modification within position 18-23 of the sense strand (counting from the 5′-end), and two phosphorothioate internucleotide linkage modifications at positions 1 and 2 and two phosphorothioate internucleotide linkage modifications within positions 18-23 of the antisense strand (counting from the 5′-end).

[0415] In some embodiments, the dsRNA molecule of the disclosure further comprises two phosphorothioate internucleotide linkage modifications within position 1-5 and one phosphorothioate internucleotide linkage modification within position 18-23 of the sense strand (counting from the 5′-end), and one phosphorothioate internucleotide linkage modification at positions 1 and 2 and two phosphorothioate internucleotide linkage modifications within positions 18-23 of the antisense strand (counting from the 5′-end).

[0416] In some embodiments, the dsRNA molecule of the disclosure further comprises two phosphorothioate internucleotide linkage modifications at position 1 and 2, and two phosphorothioate internucleotide linkage modifications at position 20 and 21 of the sense strand (counting from the 5′-end), and one phosphorothioate internucleotide linkage modification at positions 1 and one at position 21 of the antisense strand (counting from the 5′-end).

[0417] In some embodiments, the dsRNA molecule of the disclosure further comprises one phosphorothioate internucleotide linkage modification at position 1, and one phosphorothioate internucleotide linkage modification at position 21 of the sense strand (counting from the 5′-end), and two phosphorothioate internucleotide linkage modifications at positions 1 and 2 and two phosphorothioate internucleotide linkage modifications at positions 20 and 21 the antisense strand (counting from the 5′-end).

[0418] In some embodiments, the dsRNA molecule of the disclosure further comprises two phosphorothioate internucleotide linkage modifications at position 1 and 2, and two phosphorothioate internucleotide linkage modifications at position 21 and 22 of the sense strand (counting from the 5′-end), and one phosphorothioate internucleotide linkage modification at positions 1 and one phosphorothioate internucleotide linkage modification at position 21 of the antisense strand (counting from the 5′-end).

[0419] In some embodiments, the dsRNA molecule of the disclosure further comprises one phosphorothioate internucleotide linkage modification at position 1, and one phosphorothioate internucleotide linkage modification at position 21 of the sense strand (counting from the 5′-end), and two phosphorothioate internucleotide linkage modifications at positions 1 and 2 and two phosphorothioate internucleotide linkage modifications at positions 21 and 22 the antisense strand (counting from the 5′-end).

[0420] In some embodiments, the dsRNA molecule of the disclosure further comprises two phosphorothioate internucleotide linkage modifications at position 1 and 2, and two phosphorothioate internucleotide linkage modifications at position 22 and 23 of the sense strand (counting from the 5′-end), and one phosphorothioate internucleotide linkage modification at positions 1 and one phosphorothioate internucleotide linkage modification at position 21 of the antisense strand (counting from the 5′-end).

[0421] In some embodiments, the dsRNA molecule of the disclosure further comprises one phosphorothioate internucleotide linkage modification at position 1, and one phosphorothioate internucleotide linkage modification at position 21 of the sense strand (counting from the 5′-end), and two phosphorothioate internucleotide linkage modifications at positions 1 and 2 and two phosphorothioate internucleotide linkage modifications at positions 23 and 23 the antisense strand (counting from the 5′-end).

[0422] In some embodiments, compound of the disclosure comprises a pattern of backbone chiral centers. In some embodiments, a common pattern of backbone chiral centers comprises at least 5 internucleotidic linkages in the Sp configuration. In some embodiments, a common pattern of backbone chiral centers comprises at least 6 internucleotidic linkages in the Sp configuration. In some embodiments, a common pattern of backbone chiral centers comprises at least 7 internucleotidic linkages in the Sp configuration. In some embodiments, a common pattern of backbone chiral centers comprises at least 8 internucleotidic linkages in the Sp configuration. In some embodiments, a common pattern of backbone chiral centers comprises at least 9 internucleotidic linkages in the Sp configuration. In some embodiments, a common pattern of backbone chiral centers comprises at least 10 internucleotidic linkages in the Sp configuration. In some embodiments, a common pattern of backbone chiral centers comprises at least 11 internucleotidic linkages in the Sp configuration. In some embodiments, a common pattern of backbone chiral centers comprises at least 12 internucleotidic linkages in the Sp configuration. In some embodiments, a common pattern of backbone chiral centers comprises at least 13 internucleotidic linkages in the Sp configuration. In some embodiments, a common pattern of backbone chiral centers comprises at least 14 internucleotidic linkages in the Sp configuration. In some embodiments, a common pattern of backbone chiral centers comprises at least 15 internucleotidic linkages in the Sp configuration. In some embodiments, a common pattern of backbone chiral centers comprises at least 16 internucleotidic linkages in the Sp configuration. In some embodiments, a common pattern of backbone chiral centers comprises at least 17 internucleotidic linkages in the Sp configuration. In some embodiments, a common pattern of backbone chiral centers comprises at least 18 internucleotidic linkages in the Sp configuration. In some embodiments, a common pattern of backbone chiral centers comprises at least 19 internucleotidic linkages in the Sp configuration. In some embodiments, a common pattern of backbone chiral centers comprises no more than 8 internucleotidic linkages in the Rp configuration. In some embodiments, a common pattern of backbone chiral centers comprises no more than 7 internucleotidic linkages in the Rp configuration. In some embodiments, a common pattern of backbone chiral centers comprises no more than 6 internucleotidic linkages in the Rp configuration. In some embodiments, a common pattern of backbone chiral centers comprises no more than 5 internucleotidic linkages in the Rp configuration. In some embodiments, a common pattern of backbone chiral centers comprises no more than 4 internucleotidic linkages in the Rp configuration. In some embodiments, a common pattern of backbone chiral centers comprises no more than 3 internucleotidic linkages in the Rp configuration. In some embodiments, a common pattern of backbone chiral centers comprises no more than 2 internucleotidic linkages in the Rp configuration. In some embodiments, a common pattern of backbone chiral centers comprises no more than 1 internucleotidic linkages in the Rp configuration. In some embodiments, a common pattern of backbone chiral centers comprises no more than 8 internucleotidic linkages which are not chiral (as a non-limiting example, a phosphodiester). In some embodiments, a common pattern of backbone chiral centers comprises no more than 7 internucleotidic linkages which are not chiral. In some embodiments, a common pattern of backbone chiral centers comprises no more than 6 internucleotidic linkages which are not chiral. In some embodiments, a common pattern of backbone chiral centers comprises no more than 5 internucleotidic linkages which are not chiral. In some embodiments, a common pattern of backbone chiral centers comprises no more than 4 internucleotidic linkages which are not chiral. In some embodiments, a common pattern of backbone chiral centers comprises no more than 3 internucleotidic linkages which are not chiral. In some embodiments, a common pattern of backbone chiral centers comprises no more than 2 internucleotidic linkages which are not chiral. In some embodiments, a common pattern of backbone chiral centers comprises no more than 1 internucleotidic linkages which are not chiral. In some embodiments, a common pattern of backbone chiral centers comprises at least 10 internucleotidic linkages in the Sp configuration, and no more than 8 internucleotidic linkages which are not chiral. In some embodiments, a common pattern of backbone chiral centers comprises at least 11 internucleotidic linkages in the Sp configuration, and no more than 7 internucleotidic linkages which are not chiral. In some embodiments, a common pattern of backbone chiral centers comprises at least 12 internucleotidic linkages in the Sp configuration, and no more than 6 internucleotidic linkages which are not chiral. In some embodiments, a common pattern of backbone chiral centers comprises at least 13 internucleotidic linkages in the Sp configuration, and no more than 6 internucleotidic linkages which are not chiral. In some embodiments, a common pattern of backbone chiral centers comprises at least 14 internucleotidic linkages in the Sp configuration, and no more than 5 internucleotidic linkages which are not chiral. In some embodiments, a common pattern of backbone chiral centers comprises at least 15 internucleotidic linkages in the Sp configuration, and no more than 4 internucleotidic linkages which are not chiral. In some embodiments, the internucleotidic linkages in the Sp configuration are optionally contiguous or not contiguous. In some embodiments, the internucleotidic linkages in the Rp configuration are optionally contiguous or not contiguous. In some embodiments, the internucleotidic linkages which are not chiral are optionally contiguous or not contiguous.

[0423] In some embodiments, compound of the disclosure comprises a block is a stereochemistry block. In some embodiments, a block is an Rp block in that each internucleotidic linkage of the block is Rp. In some embodiments, a 5′-block is an Rp block. In some embodiments, a 3′-block is an Rp block. In some embodiments, a block is an Sp block in that each internucleotidic linkage of the block is Sp. In some embodiments, a 5′-block is an Sp block. In some embodiments, a 3′-block is an Sp block. In some embodiments, provided oligonucleotides comprise both Rp and Sp blocks. In some embodiments, provided oligonucleotides comprise one or more Rp but no Sp blocks. In some embodiments, provided oligonucleotides comprise one or more Sp but no Rp blocks. In some embodiments, provided oligonucleotides comprise one or more PO blocks wherein each internucleotidic linkage in a natural phosphate linkage.

[0424] In some embodiments, compound of the disclosure comprises a 5′-block is an Sp block wherein each sugar moiety comprises a 2′-F modification. In some embodiments, a 5′-block is an Sp block wherein each of internucleotidic linkage is a modified internucleotidic linkage and each sugar moiety comprises a 2′-F modification. In some embodiments, a 5′-block is an Sp block wherein each of internucleotidic linkage is a phosphorothioate linkage and each sugar moiety comprises a 2′-F modification. In some embodiments, a 5′-block comprises 4 or more nucleoside units. In some embodiments, a 5′-block comprises 5 or more nucleoside units. In some embodiments, a 5′-block comprises 6 or more nucleoside units. In some embodiments, a 5′-block comprises 7 or more nucleoside units. In some embodiments, a 3′-block is an Sp block wherein each sugar moiety comprises a 2′-F modification. In some embodiments, a 3′-block is an Sp block wherein each of internucleotidic linkage is a modified internucleotidic linkage and each sugar moiety comprises a 2′-F modification. In some embodiments, a 3′-block is an Sp block wherein each of internucleotidic linkage is a phosphorothioate linkage and each sugar moiety comprises a 2′-F modification. In some embodiments, a 3′-block comprises 4 or more nucleoside units. In some embodiments, a 3′-block comprises 5 or more nucleoside units. In some embodiments, a 3′-block comprises 6 or more nucleoside units. In some embodiments, a 3′-block comprises 7 or more nucleoside units.

[0425] In some embodiments, compound of the disclosure comprises a type of nucleoside in a region or an oligonucleotide is followed by a specific type of internucleotidic linkage, e.g., natural phosphate linkage, modified internucleotidic linkage, Rp chiral internucleotidic linkage, Sp chiral internucleotidic linkage, etc. In some embodiments, A is followed by Sp. In some embodiments, A is followed by Rp. In some embodiments, A is followed by natural phosphate linkage (PO). In some embodiments, U is followed by Sp. In some embodiments, U is followed by Rp. In some embodiments, U is followed by natural phosphate linkage (PO). In some embodiments, C is followed by Sp. In some embodiments, C is followed by Rp. In some embodiments, C is followed by natural phosphate linkage (PO). In some embodiments, G is followed by Sp. In some embodiments, G is followed by Rp. In some embodiments, G is followed by natural phosphate linkage (PO). In some embodiments, C and U are followed by Sp. In some embodiments, C and U are followed by Rp. In some embodiments, C and U are followed by natural phosphate linkage (PO). In some embodiments, A and G are followed by Sp. In some embodiments, A and G are followed by Rp.

[0426] In some embodiments, the antisense strand comprises phosphorothioate internucleotide linkages between nucleotide positions 21 and 22, and between nucleotide positions 22 and 23, wherein the antisense strand contains at least one thermally destabilizing modification of the duplex located in the seed region of the antisense strand (i.e., at position 2-9 of the 5′-end of the antisense strand), and wherein the dsRNA optionally further has at least one (e.g., one, two, three, four, five, six, seven or all eight) of the following characteristics: (i) the antisense comprises 2, 3, 4, 5, or 6 2′-fluoro modifications; (ii) the antisense comprises 3, 4, or 5 phosphorothioate internucleotide linkages; (iii) the sense strand is conjugated with a ligand; (iv) the sense strand comprises 2, 3, 4 or 5 2′-fluoro modifications; (v) the sense strand comprises 1, 2, 3, 4, or 5 phosphorothioate internucleotide linkages; (vi) the dsRNA comprises at least four 2′-fluoro modifications; (vii) the dsRNA comprises a duplex region of 12-40 nucleotide pairs in length; and (viii) the dsRNA has a blunt end at 5′-end of the antisense strand.

In some embodiments, the antisense strand comprises phosphorothioate internucleotide linkages between nucleotide positions 1 and 2, between nucleotide positions 2 and 3, between nucleotide positions 21 and 22, and between nucleotide positions 22 and 23, wherein the antisense strand contains at least one thermally destabilizing modification of the duplex located in the seed region of the antisense strand (i.e., at position 2-9 of the 5′-end of the antisense strand), and wherein the dsRNA optionally further has at least one (e.g., one, two, three, four, five, six, seven or all eight) of the following characteristics: (i) the antisense comprises 2, 3, 4, 5, or 6 2′-fluoro modifications; (ii) the sense strand is conjugated with a ligand; (iii) the sense strand comprises 2, 3, 4 or 5 2′-fluoro modifications; (iv) the sense strand comprises 1, 2, 3, 4, or 5 phosphorothioate internucleotide linkages; (v) the dsRNA comprises at least four 2′-fluoro modifications; (vi) the dsRNA comprises a duplex region of 12-40 nucleotide pairs in length; (vii) the dsRNA comprises a duplex region of 12-40 nucleotide pairs in length; and (viii) the dsRNA has a blunt end at 5′-end of the antisense strand.

[0427] In some embodiments, the sense strand comprises phosphorothioate internucleotide linkages between nucleotide positions 1 and 2, and between nucleotide positions 2 and 3, wherein the antisense strand contains at least one thermally destabilizing modification of the duplex located in the seed region of the antisense strand (i.e., at position 2-9 of the 5′-end of the antisense strand), and wherein the dsRNA optionally further has at least one (e.g., one, two, three, four, five, six, seven or all eight) of the following characteristics: (i) the antisense comprises 2, 3, 4, 5, or 6 2′-fluoro modifications; (ii) the antisense comprises 1, 2, 3, 4, or 5 phosphorothioate internucleotide linkages; (iii) the sense strand is conjugated with a ligand; (iv) the sense strand comprises 2, 3, 4 or 5 2′-fluoro modifications; (v) the sense strand comprises 3, 4 or 5 phosphorothioate internucleotide linkages; (vi) the dsRNA comprises at least four 2′-fluoro modifications; (vii) the dsRNA comprises a duplex region of 12-40 nucleotide pairs in length; and (viii) the dsRNA has a blunt end at 5′-end of the antisense strand.

[0428] In some embodiments, the sense strand comprises phosphorothioate internucleotide linkages between nucleotide positions 1 and 2, and between nucleotide positions 2 and 3, the antisense strand comprises phosphorothioate internucleotide linkages between nucleotide positions 1 and 2, between nucleotide positions 2 and 3, between nucleotide positions 21 and 22, and between nucleotide positions 22 and 23, wherein the antisense strand contains at least one thermally destabilizing modification of the duplex located in the seed region of the antisense strand (i.e., at position 2-9 of the 5′-end of the antisense strand), and wherein the dsRNA optionally further has at least one (e.g., one, two, three, four, five, six or all seven) of the following characteristics: (i) the antisense comprises 2, 3, 4, 5 or 6 2′-fluoro modifications; (ii) the sense strand is conjugated with a ligand; (iii) the sense strand comprises 2, 3, 4 or 5 2′-fluoro modifications; (iv) the sense strand comprises 3, 4 or 5 phosphorothioate internucleotide linkages; (v) the dsRNA comprises at least four 2′-fluoro modifications; (vi) the dsRNA comprises a duplex region of 12-40 nucleotide pairs in length; and (vii) the dsRNA has a blunt end at 5′-end of the antisense strand.

[0429] In some embodiments, the dsRNA molecule of the disclosure comprises mismatch(es) with the target, within the duplex, or combinations thereof. The mismatch can occur in the overhang region or the duplex region. The base pair can be ranked on the basis of their propensity to promote dissociation or melting (e.g., on the free energy of association or dissociation of a particular pairing, the simplest approach is to examine the pairs on an individual pair basis, though next neighbor or similar analysis can also be used). In terms of promoting dissociation: A:U is preferred over G:C; G:U is preferred over G:C; and I:C is preferred over G:C (I=inosine). Mismatches, e.g., non-canonical or other than canonical pairings (as described elsewhere herein) are preferred over canonical (A:T, A:U, G:C) pairings; and pairings which include a universal base are preferred over canonical pairings.

[0430] In some embodiments, the dsRNA molecule of the disclosure comprises at least one of the first 1, 2, 3, 4, or 5 base pairs within the duplex regions from the 5′-end of the antisense strand can be chosen independently from the group of: A:U, G:U, I:C, and mismatched pairs, e.g., non-canonical or other than canonical pairings or pairings which include a universal base, to promote the dissociation of the antisense strand at the 5′-end of the duplex.

[0431] In some embodiments, the nucleotide at the 1 position within the duplex region from the 5′-end in the antisense strand is selected from the group consisting of A, dA, dU, U, and dT. Alternatively, at least one of the first 1, 2 or 3 base pair within the duplex region from the 5′-end of the antisense strand is an AU base pair. For example, the first base pair within the duplex region from the 5′-end of the antisense strand is an AU base pair.

[0432] It was found that introducing 4′-modified or 5′-modified nucleotide to the 3′-end of a phosphodiester (PO), phosphorothioate (PS), or phosphorodithioate (PS2) linkage of a dinucleotide at any position of single stranded or double stranded oligonucleotide can exert steric effect to the internucleotide linkage and, hence, protecting or stabilizing it against nucleases.

[0433] In some embodiments, 5′-modified nucleoside is introduced at the 3′-end of a dinucleotide at any position of single stranded or double stranded siRNA. For instance, a 5′-alkylated nucleoside may be introduced at the 3′-end of a dinucleotide at any position of single stranded or double stranded siRNA. The alkyl group at the 5′ position of the ribose sugar can be racemic or chirally pure R or S isomer. An exemplary 5′-alkylated nucleoside is 5′-methyl nucleoside. The 5′-methyl can be either racemic or chirally pure R or S isomer.

[0434] In some embodiments, 4′-modified nucleoside is introduced at the 3′-end of a dinucleotide at any position of single stranded or double stranded siRNA. For instance, a 4′-alkylated nucleoside may be introduced at the 3′-end of a dinucleotide at any position of single stranded or double stranded siRNA. The alkyl group at the 4′ position of the ribose sugar can be racemic or chirally pure R or S isomer. An exemplary 4′-alkylated nucleoside is 4′-methyl nucleoside. The 4′-methyl can be either racemic or chirally pure R or S isomer. Alternatively, a 4′-O-alkylated nucleoside may be introduced at the 3′-end of a dinucleotide at any position of single stranded or double stranded siRNA. The 4′-O-alkyl of the ribose sugar can be racemic or chirally pure R or S isomer. An exemplary 4′-O-alkylated nucleoside is 4′-O-methyl nucleoside. The 4′-O-methyl can be either racemic or chirally pure R or S isomer.

[0435] In some embodiments, 5′-alkylated nucleoside is introduced at any position on the sense strand or antisense strand of a dsRNA, and such modification maintains or improves potency of the dsRNA. The 5′-alkyl can be either racemic or chirally pure R or S isomer. An exemplary 5′-alkylated nucleoside is 5′-methyl nucleoside. The 5′-methyl can be either racemic or chirally pure R or S isomer.

[0436] In some embodiments, 4′-alkylated nucleoside is introduced at any position on the sense strand or antisense strand of a dsRNA, and such modification maintains or improves potency of the dsRNA. The 4′-alkyl can be either racemic or chirally pure R or S isomer. An exemplary 4′-alkylated nucleoside is 4′-methyl nucleoside. The 4′-methyl can be either racemic or chirally pure R or S isomer.

[0437] In some embodiments, 4′-O-alkylated nucleoside is introduced at any position on the sense strand or antisense strand of a dsRNA, and such modification maintains or improves potency of the dsRNA. The 5′-alkyl can be either racemic or chirally pure R or S isomer. An exemplary 4′-O-alkylated nucleoside is 4′-O-methyl nucleoside. The 4′-O-methyl can be either racemic or chirally pure R or S isomer.

[0438] In some embodiments, the dsRNA molecule of the disclosure can comprise 2′-5′ linkages (with 2′-H, 2′-OH and 2′-OMe and with P═O or P═S). For example, the 2′-5′ linkages modifications can be used to promote nuclease resistance or to inhibit binding of the sense to the antisense strand, or can be used at the 5′ end of the sense strand to avoid sense strand activation by RISC.

[0439] In another embodiment, the dsRNA molecule of the disclosure can comprise L sugars (e.g., L ribose, L-arabinose with 2′-H, 2′-OH and 2′-OMe). For example, these L sugars modifications can be used to promote nuclease resistance or to inhibit binding of the sense to the antisense strand, or can be used at the 5′ end of the sense strand to avoid sense strand activation by RISC.

[0440] Various publications describe multimeric siRNA which can all be used with the dsRNA of the disclosure. Such publications include WO2007/091269, U.S. Pat. No. 7,858,769, WO2010/141511, WO2007/117686, WO2009/014887, and WO2011/031520 which are hereby incorporated by their entirely.

[0441] As described in more detail below, the RNAi agent that contains conjugations of one or more carbohydrate moieties to an RNAi agent can optimize one or more properties of the RNAi agent. In many cases, the carbohydrate moiety will be attached to a modified subunit of the RNAi agent. For example, the ribose sugar of one or more ribonucleotide subunits of a dsRNA agent can be replaced with another moiety, e.g., a non-carbohydrate (preferably cyclic) carrier to which is attached a carbohydrate ligand. A ribonucleotide subunit in which the ribose sugar of the subunit has been so replaced is referred to herein as a ribose replacement modification subunit (RRMS). A cyclic carrier may be a carbocyclic ring system, i.e., all ring atoms are carbon atoms, or a heterocyclic ring system, i.e., one or more ring atoms may be a heteroatom, e.g., nitrogen, oxygen, sulfur. The cyclic carrier may be a monocyclic ring system, or may contain two or more rings, e.g. fused rings. The cyclic carrier may be a fully saturated ring system, or it may contain one or more double bonds.

[0442] The ligand may be attached to the polynucleotide via a carrier. The carriers include (i) at least one “backbone attachment point,” preferably two “backbone attachment points” and (ii) at least one “tethering attachment point.” A “backbone attachment point” as used herein refers to a functional group, e.g. a hydroxyl group, or generally, a bond available for, and that is suitable for incorporation of the carrier into the backbone, e.g., the phosphate, or modified phosphate, e.g., sulfur containing, backbone, of a ribonucleic acid. A “tethering attachment point” (TAP) in some embodiments refers to a constituent ring atom of the cyclic carrier, e.g., a carbon atom or a heteroatom (distinct from an atom which provides a backbone attachment point), that connects a selected moiety. The moiety can be, e.g., a carbohydrate, e.g. monosaccharide, disaccharide, trisaccharide, tetrasaccharide, oligosaccharide and polysaccharide. Optionally, the selected moiety is connected by an intervening tether to the cyclic carrier. Thus, the cyclic carrier will often include a functional group, e.g., an amino group, or generally, provide a bond, that is suitable for incorporation or tethering of another chemical entity, e.g., a ligand to the constituent ring.

[0443] The RNAi agents may be conjugated to a ligand via a carrier, wherein the carrier can be cyclic group or acyclic group; preferably, the cyclic group is selected from pyrrolidinyl, pyrazolinyl, pyrazolidinyl, imidazolinyl, imidazolidinyl, piperidinyl, piperazinyl, [1,3]dioxolane, oxazolidinyl, isoxazolidinyl, morpholinyl, thiazolidinyl, isothiazolidinyl, quinoxalinyl, pyridazinonyl, tetrahydrofuryl and and decalin; preferably, the acyclic group is selected from serinol backbone or diethanolamine backbone.

[0444] In certain specific embodiments, the RNAi agent for use in the methods of the disclosure is an agent selected from the group of agents listed in any one of Tables 2-7, 9, and 10. These agents may further comprise a ligand, such as one or more lipophilic moieties, one or more GalNAc derivatives, or both of one of more lipophilic moieties and one or more GalNAc derivatives.

### IV. iRNAs Conjugated to Ligands

[0445] Another modification of the RNA of an iRNA of the invention involves chemically linking to the iRNA one or more ligands, moieties or conjugates that enhance the activity, cellular distribution or cellular uptake of the iRNA, e.g., into a cell. Such moieties include but are not limited to lipid moieties such as a cholesterol moiety (Letsinger et al., Proc. Natl. Acid. Sci. USA, 1989, 86: 6553-6556), cholic acid (Manoharan et al., Biorg. Med. Chem. Let., 1994, 4:1053-1060), a thioether, e.g., beryl-S-tritylthiol (Manoharan et al., Ann. N.Y. Acad. Sci., 1992, 660:306-309; Manoharan et al., Biorg. Med. Chem. Let., 1993, 3:2765-2770), a thiocholesterol (Oberhauser et al., Nucl. Acids Res., 1992, 20:533-538), an aliphatic chain, e.g., dodecandiol or undecyl residues (Saison-Behmoaras et al., EMBO J, 1991, 10:1111-1118; Kabanov et al., FEBS Lett., 1990, 259:327-330; Svinarchuk et al., Biochimie, 1993, 75:49-54), a phospholipid, e.g., di-hexadecyl-rac-glycerol or triethyl-ammonium 1,2-di-O-hexadecyl-rac-glycero-3-phosphonate (Manoharan et al., Tetrahedron Lett., 1995, 36:3651-3654; Shea et al., Nucl. Acids Res., 1990, 18:3777-3783), a polyamine or a polyethylene glycol chain (Manoharan et al., Nucleosides & Nucleotides, 1995, 14:969-973), or adamantane acetic acid (Manoharan et al., Tetrahedron Lett., 1995, 36:3651-3654), a palmityl moiety (Mishra et al., Biochim. Biophys. Acta, 1995, 1264:229-237), or an octadecylamine or hexylamino-carbonyloxycholesterol moiety (Crooke et al., J. Pharmacol. Exp. Ther., 1996, 277:923-937).

[0446] In certain embodiments, a ligand alters the distribution, targeting or lifetime of an iRNA agent into which it is incorporated. In some embodiments, a ligand provides an enhanced affinity for a selected target, e.g., molecule, cell or cell type, compartment, e.g., a cellular or organ compartment, tissue, organ or region of the body, as, e.g., compared to a species absent such a ligand. Typical ligands will not take part in duplex pairing in a duplexed nucleic acid.

[0447] Ligands can include a naturally occurring substance, such as a protein (e.g., human serum albumin (HSA), low-density lipoprotein (LDL), or globulin); carbohydrate (e.g., a dextran, pullulan, chitin, chitosan, inulin, cyclodextrin or hyaluronic acid); or a lipid. The ligand may also be a recombinant or synthetic molecule, such as a synthetic polymer, e.g., a synthetic polyamino acid. Examples of polyamino acids include polyamino acid is a polylysine (PLL), poly L-aspartic acid, poly L-glutamic acid, styrene-maleic acid anhydride copolymer, poly(L-lactide-co-glycolied) copolymer, divinyl ether-maleic anhydride copolymer, N-(2-hydroxypropyl)methacrylamide copolymer (HMPA), polyethylene glycol (PEG), polyvinyl alcohol (PVA), polyurethane, poly(2-ethylacryllic acid), N-isopropylacrylamide polymers, or polyphosphazine. Example of polyamines include: polyethylenimine, polylysine (PLL), spermine, spermidine, polyamine, pseudopeptide-polyamine, peptidomimetic polyamine, dendrimer polyamine, arginine, amidine, protamine, cationic lipid, cationic porphyrin, quaternary salt of a polyamine, or an a helical peptide.

[0448] Ligands can also include targeting groups, e.g., a cell or tissue targeting agent, e.g., a lectin, glycoprotein, lipid or protein, e.g., an antibody, that binds to a specified cell type such as a kidney cell. A targeting group can be a thyrotropin, melanotropin, lectin, glycoprotein, surfactant protein A, Mucin carbohydrate, multivalent lactose, multivalent galactose, N-acetyl-galactosamine, N-acetyl-glucosamine multivalent mannose, multivalent fucose, glycosylated polyaminoacids, multivalent galactose, transferrin, bisphosphonate, polyglutamate, polyaspartate, a lipid, cholesterol, a steroid, bile acid, folate, vitamin B12, biotin, or an RGD peptide or RGD peptide mimetic. In certain embodiments, the ligand is a multivalent galactose, e.g., an N-acetyl-galactosamine.

[0449] Other examples of ligands include dyes, intercalating agents (e.g. acridines), cross-linkers (e.g. psoralene, mitomycin C), porphyrins (TPPC4, texaphyrin, Sapphyrin), polycyclic aromatic hydrocarbons (e.g., phenazine, dihydrophenazine), artificial endonucleases (e.g. EDTA), lipophilic molecules, e.g., cholesterol, cholic acid, adamantane acetic acid, 1-pyrene butyric acid, dihydrotestosterone, 1,3-Bis-O(hexadecyl)glycerol, geranyloxyhexyl group, hexadecylglycerol, borneol, menthol, 1,3-propanediol, heptadecyl group, palmitic acid, myristic acid, O3-(oleoyl)lithocholic acid, O3-(oleoyl)cholenic acid, dimethoxytrityl, or phenoxazine) and peptide conjugates (e.g., antennapedia peptide, Tat peptide), alkylating agents, phosphate, amino, mercapto, PEG (e.g., PEG-40K), MPEG, [MPEG]₂, polyamino, alkyl, substituted alkyl, radiolabeled markers, enzymes, haptens (e.g. biotin), transport/absorption facilitators (e.g., aspirin, vitamin E, folic acid), synthetic ribonucleases (e.g., imidazole, bisimidazole, histamine, imidazole clusters, acridine-imidazole conjugates, Eu3+ complexes of tetraazamacrocycles), dinitrophenyl, HRP, or AP.

[0450] Ligands can be proteins, e.g., glycoproteins, or peptides, e.g., molecules having a specific affinity for a co-ligand, or antibodies e.g., an antibody, that binds to a specified cell type such as a cancer cell, endothelial cell, or bone cell. Ligands may also include hormones and hormone receptors. They can also include non-peptidic species, such as lipids, lectins, carbohydrates, vitamins, cofactors, multivalent lactose, multivalent galactose, N-acetyl-galactosamine, N-acetyl-glucosamine multivalent mannose, or multivalent fucose. The ligand can be, for example, a lipopolysaccharide, an activator of p38 MAP kinase, or an activator of NF-κB.

[0451] The ligand can be a substance, e.g., a drug, which can increase the uptake of the iRNA agent into the cell, for example, by disrupting the cell's cytoskeleton, e.g., by disrupting the cell's microtubules, microfilaments, or intermediate filaments. The drug can be, for example, taxon, vincristine, vinblastine, cytochalasin, nocodazole, japlakinolide, latrunculin A, phalloidin, swinholide A, indanocine, or myoservin.

[0452] In some embodiments, a ligand attached to an iRNA as described herein acts as a pharmacokinetic modulator (PK modulator). PK modulators include lipophiles, bile acids, steroids, phospholipid analogues, peptides, protein binding agents, PEG, vitamins etc. Exemplary PK modulators include, but are not limited to, cholesterol, fatty acids, cholic acid, lithocholic acid, dialkylglycerides, diacylglyceride, phospholipids, sphingolipids, naproxen, ibuprofen, vitamin E, biotin etc. Oligonucleotides that comprise a number of phosphorothioate linkages are also known to bind to serum protein, thus short oligonucleotides, e.g., oligonucleotides of about 5 bases, 10 bases, 15 bases or 20 bases, comprising multiple of phosphorothioate linkages in the backbone are also amenable to the present invention as ligands (e.g. as PK modulating ligands). In addition, aptamers that bind serum components (e.g. serum proteins) are also suitable for use as PK modulating ligands in the embodiments described herein.

[0453] Ligand-conjugated iRNAs of the invention may be synthesized by the use of an oligonucleotide that bears a pendant reactive functionality, such as that derived from the attachment of a linking molecule onto the oligonucleotide (described below). This reactive oligonucleotide may be reacted directly with commercially-available ligands, ligands that are synthesized bearing any of a variety of protecting groups, or ligands that have a linking moiety attached thereto.

[0454] The oligonucleotides used in the conjugates of the present invention may be conveniently and routinely made through the well-known technique of solid-phase synthesis. Equipment for such synthesis is sold by several vendors including, for example, Applied Biosystems® (Foster City, Calif.). Any other means for such synthesis known in the art may additionally or alternatively be employed. It is also known to use similar techniques to prepare other oligonucleotides, such as the phosphorothioates and alkylated derivatives.

[0455] In the ligand-conjugated oligonucleotides and ligand-molecule bearing sequence-specific linked nucleosides of the present invention, the oligonucleotides and oligonucleosides may be assembled on a suitable DNA synthesizer utilizing standard nucleotide or nucleoside precursors, or nucleotide or nucleoside conjugate precursors that already bear the linking moiety, ligand-nucleotide or nucleoside-conjugate precursors that already bear the ligand molecule, or non-nucleoside ligand-bearing building blocks.

[0456] When using nucleotide-conjugate precursors that already bear a linking moiety, the synthesis of the sequence-specific linked nucleosides is typically completed, and the ligand molecule is then reacted with the linking moiety to form the ligand-conjugated oligonucleotide. In some embodiments, the oligonucleotides or linked nucleosides of the present invention are synthesized by an automated synthesizer using phosphoramidites derived from ligand-nucleoside conjugates in addition to the standard phosphoramidites and non-standard phosphoramidites that are commercially available and routinely used in oligonucleotide synthesis.

[0457] A. Lipid Conjugates

[0458] In certain embodiments, the ligand or conjugate is a lipid or lipid-based molecule. Such a lipid or lipid-based molecule can typically bind a serum protein, such as human serum albumin (HSA). An HSA binding ligand allows for distribution of the conjugate to a target tissue, e.g., a non-kidney target tissue of the body. For example, the target tissue can be the liver, including parenchymal cells of the liver. Other molecules that can bind HSA can also be used as ligands. For example, naproxen or aspirin can be used. A lipid or lipid-based ligand can (a) increase resistance to degradation of the conjugate, (b) increase targeting or transport into a target cell or cell membrane, or (c) can be used to adjust binding to a serum protein, e.g., HSA.

[0459] A lipid-based ligand can be used to modulate, e.g., control (e.g., inhibit) the binding of the conjugate to a target tissue. For example, a lipid or lipid-based ligand that binds to HSA more strongly will be less likely to be targeted to the kidney and therefore less likely to be cleared from the body. A lipid or lipid-based ligand that binds to HSA less strongly can be used to target the conjugate to the kidney.

[0460] In certain embodiments, the lipid-based ligand binds HSA. For example, the ligand can bind HSA with a sufficient affinity such that distribution of the conjugate to a non-kidney tissue is enhanced. However, the affinity is typically not so strong that the HSA-ligand binding cannot be reversed.

[0461] In certain embodiments, the lipid-based ligand binds HSA weakly or not at all, such that distribution of the conjugate to the kidney is enhanced. Other moieties that target to kidney cells can also be used in place of or in addition to the lipid-based ligand.

[0462] In another aspect, the ligand is a moiety, e.g., a vitamin, which is taken up by a target cell, e.g., a proliferating cell. These are particularly useful for treating disorders characterized by unwanted cell proliferation, e.g., of the malignant or non-malignant type, e.g., cancer cells. Exemplary vitamins include vitamin A, E, and K. Other exemplary vitamins include are B vitamin, e.g., folic acid, B12, riboflavin, biotin, pyridoxal or other vitamins or nutrients taken up by cancer cells. Also included are HSA and low density lipoprotein (LDL).

[0463] B. Cell Permeation Agents

[0464] In another aspect, the ligand is a cell-permeation agent, such as a helical cell-permeation agent. In certain embodiments, the agent is amphipathic. An exemplary agent is a peptide such as tat or antennopedia. If the agent is a peptide, it can be modified, including a peptidylmimetic, invertomers, non-peptide or pseudo-peptide linkages, and use of D-amino acids. The helical agent is typically an α-helical agent and can have a lipophilic and a lipophobic phase.

[0465] The ligand can be a peptide or peptidomimetic. A peptidomimetic (also referred to herein as an oligopeptidomimetic) is a molecule capable of folding into a defined three-dimensional structure similar to a natural peptide. The attachment of peptide and peptidomimetics to iRNA agents can affect pharmacokinetic distribution of the iRNA, such as by enhancing cellular recognition and absorption. The peptide or peptidomimetic moiety can be about 5-50 amino acids long, e.g., about 5, 10, 15, 20, 25, 30, 35, 40, 45, or 50 amino acids long.

[0466] A peptide or peptidomimetic can be, for example, a cell permeation peptide, cationic peptide, amphipathic peptide, or hydrophobic peptide (e.g., consisting primarily of Tyr, Trp, or Phe). The peptide moiety can be a dendrimer peptide, constrained peptide or crosslinked peptide. In another alternative, the peptide moiety can include a hydrophobic membrane translocation sequence (MTS). An exemplary hydrophobic MTS-containing peptide is RFGF having the amino acid sequence AAVALLPAVLLALLAP (SEQ ID NO: 11). An RFGF analogue (e.g., amino acid sequence AALLPVLLAAP (SEQ ID NO: 12)) containing a hydrophobic MTS can also be a targeting moiety. The peptide moiety can be a “delivery” peptide, which can carry large polar molecules including peptides, oligonucleotides, and protein across cell membranes. For example, sequences from the HIV Tat protein (GRKKRRQRRRPPQ (SEQ ID NO: 13)) and the Drosophila Antennapedia protein (RQIKIWFQNRRMKWKK (SEQ ID NO: 14)) have been found to be capable of functioning as delivery peptides. A peptide or peptidomimetic can be encoded by a random sequence of DNA, such as a peptide identified from a phage-display library, or one-bead-one-compound (OB OC) combinatorial library (Lam et al., Nature, 354:82-84, 1991). Typically, the peptide or peptidomimetic tethered to a dsRNA agent via an incorporated monomer unit is a cell targeting peptide such as an arginine-glycine-aspartic acid (RGD)-peptide, or RGD mimic A peptide moiety can range in length from about 5 amino acids to about 40 amino acids. The peptide moieties can have a structural modification, such as to increase stability or direct conformational properties. Any of the structural modifications described below can be utilized.

[0467] An RGD peptide for use in the compositions and methods of the invention may be linear or cyclic, and may be modified, e.g., glycosylated or methylated, to facilitate targeting to a specific tissue(s). RGD-containing peptides and peptidiomimemtics may include D-amino acids, as well as synthetic RGD mimics. In addition to RGD, one can use other moieties that target the integrin ligand. Preferred conjugates of this ligand target PECAM-1 or VEGF.

[0468] An RGD peptide moiety can be used to target a particular cell type, e.g., a tumor cell, such as an endothelial tumor cell or a breast cancer tumor cell (Zitzmann et al., Cancer Res., 62:5139-43, 2002). An RGD peptide can facilitate targeting of an dsRNA agent to tumors of a variety of other tissues, including the lung, kidney, spleen, or liver (Aoki et al., Cancer Gene Therapy 8:783-787, 2001). Typically, the RGD peptide will facilitate targeting of an iRNA agent to the kidney. The RGD peptide can be linear or cyclic, and can be modified, e.g., glycosylated or methylated to facilitate targeting to specific tissues. For example, a glycosylated RGD peptide can deliver an iRNA agent to a tumor cell expressing αᵥβ₃ (Haubner et al., Jour. Nucl. Med., 42:326-336, 2001).

[0469] A “cell permeation peptide” is capable of permeating a cell, e.g., a microbial cell, such as a bacterial or fungal cell, or a mammalian cell, such as a human cell. A microbial cell-permeating peptide can be, for example, an a-helical linear peptide (e.g., LL-37 or Ceropin P1), a disulfide bond-containing peptide (e.g., α-defensin, β-defensin or bactenecin), or a peptide containing only one or two dominating amino acids (e.g., PR-39 or indolicidin). A cell permeation peptide can also include a nuclear localization signal (NLS). For example, a cell permeation peptide can be a bipartite amphipathic peptide, such as MPG, which is derived from the fusion peptide domain of HIV-1 gp41 and the NLS of SV40 large T antigen (Simeoni et al., Nucl. Acids Res. 31:2717-2724, 2003).

[0470] C. Carbohydrate Conjugates

[0471] In some embodiments of the compositions and methods of the invention, an iRNA further comprises a carbohydrate. The carbohydrate conjugated iRNA are advantageous for the in vivo delivery of nucleic acids, as well as compositions suitable for in vivo therapeutic use, as described herein. As used herein, “carbohydrate” refers to a compound which is either a carbohydrate per se made up of one or more monosaccharide units having at least 6 carbon atoms (which can be linear, branched or cyclic) with an oxygen, nitrogen or sulfur atom bonded to each carbon atom; or a compound having as a part thereof a carbohydrate moiety made up of one or more monosaccharide units each having at least six carbon atoms (which can be linear, branched or cyclic), with an oxygen, nitrogen or sulfur atom bonded to each carbon atom. Representative carbohydrates include the sugars (mono-, di-, tri- and oligosaccharides containing from about 4, 5, 6, 7, 8, or 9 monosaccharide units), and polysaccharides such as starches, glycogen, cellulose and polysaccharide gums Specific monosaccharides include C5 and above (e.g., C5, C6, C7, or C8) sugars; di- and tri-saccharides include sugars having two or three monosaccharide units (e.g., C5, C6, C7, or C8).

[0472] In certain embodiments, a carbohydrate conjugate comprises a monosaccharide.

[0473] In certain embodiments, the monosaccharide is an N-acetylgalactosamine (GalNAc). GalNAc conjugates, which comprise one or more N-acetylgalactosamine (GalNAc) derivatives, are described, for example, in U.S. Pat. No. 8,106,022, the entire content of which is hereby incorporated herein by reference. In some embodiments, the GalNAc conjugate serves as a ligand that targets the iRNA to particular cells. In some embodiments, the GalNAc conjugate targets the iRNA to liver cells, e.g., by serving as a ligand for the asialoglycoprotein receptor of liver cells (e.g., hepatocytes).

[0474] In some embodiments, the carbohydrate conjugate comprises one or more GalNAc derivatives. The GalNAc derivatives may be attached via a linker, e.g., a bivalent or trivalent branched linker. In some embodiments the GalNAc conjugate is conjugated to the 3′ end of the sense strand. In some embodiments, the GalNAc conjugate is conjugated to the iRNA agent (e.g., to the 3′ end of the sense strand) via a linker, e.g., a linker as described herein. In some embodiments the GalNAc conjugate is conjugated to the 5′ end of the sense strand. In some embodiments, the GalNAc conjugate is conjugated to the iRNA agent (e.g., to the 5′ end of the sense strand) via a linker, e.g., a linker as described herein.

[0475] In certain embodiments of the invention, the GalNAc or GalNAc derivative is attached to an iRNA agent of the invention via a monovalent linker. In some embodiments, the GalNAc or GalNAc derivative is attached to an iRNA agent of the invention via a bivalent linker. In yet other embodiments of the invention, the GalNAc or GalNAc derivative is attached to an iRNA agent of the invention via a trivalent linker. In other embodiments of the invention, the GalNAc or GalNAc derivative is attached to an iRNA agent of the invention via a tetravalent linker.

[0476] In certain embodiments, the double stranded RNAi agents of the invention comprise one GalNAc or GalNAc derivative attached to the iRNA agent. In certain embodiments, the double stranded RNAi agents of the invention comprise a plurality (e.g., 2, 3, 4, 5, or 6) GalNAc or GalNAc derivatives, each independently attached to a plurality of nucleotides of the double stranded RNAi agent through a plurality of monovalent linkers.

[0477] In some embodiments, for example, when the two strands of an iRNA agent of the invention are part of one larger molecule connected by an uninterrupted chain of nucleotides between the 3′-end of one strand and the 5′-end of the respective other strand forming a hairpin loop comprising, a plurality of unpaired nucleotides, each unpaired nucleotide within the hairpin loop may independently comprise a GalNAc or GalNAc derivative attached via a monovalent linker. The hairpin loop may also be formed by an extended overhang in one strand of the duplex.

[0478] In some embodiments, for example, when the two strands of an iRNA agent of the invention are part of one larger molecule connected by an uninterrupted chain of nucleotides between the 3′-end of one strand and the 5′-end of the respective other strand forming a hairpin loop comprising, a plurality of unpaired nucleotides, each unpaired nucleotide within the hairpin loop may independently comprise a GalNAc or GalNAc derivative attached via a monovalent linker. The hairpin loop may also be formed by an extended overhang in one strand of the duplex.

[0479] In some embodiments, the GalNAc conjugate is

[chemical structure]

[0480] In some embodiments, the RNAi agent is attached to the carbohydrate conjugate via a linker as shown in the following schematic, wherein X is O or S

[chemical structure]

[0481] In some embodiments, the RNAi agent is conjugated to L96 as defined in Table 1 and shown below:

[chemical structure]

[0482] In certain embodiments, a carbohydrate conjugate for use in the compositions and methods of the invention is selected from the group consisting of:

[chemical structure]

[chemical structure]

[chemical structure]

[chemical structure]

[chemical structure]

[chemical structure]

[chemical structure]

[chemical structure]

[chemical structure]

[0483] In certain embodiments, a carbohydrate conjugate for use in the compositions and methods of the invention is a monosaccharide. In certain embodiments, the monosaccharide is an N-acetylgalactosamine, such as

[chemical structure]

[0484] Another representative carbohydrate conjugate for use in the embodiments described herein includes, but is not limited to,

[chemical structure]

[0485] when one of X or Y is an oligonucleotide, the other is a hydrogen.

[0486] In some embodiments, a suitable ligand is a ligand disclosed in WO 2019/055633, the entire contents of which are incorporated herein by reference. In one embodiment the ligand comprises the structure below:

[chemical structure]

[0487] In certain embodiments, the RNAi agents of the disclosure may include GalNAc ligands, even if such GalNAc ligands are currently projected to be of limited value for the preferred pulmonary system delivery route(s) of the instant disclosure.

[0488] In certain embodiments of the invention, the GalNAc or GalNAc derivative is attached to an iRNA agent of the invention via a monovalent linker. In some embodiments, the GalNAc or GalNAc derivative is attached to an iRNA agent of the invention via a bivalent linker. In yet other embodiments of the invention, the GalNAc or GalNAc derivative is attached to an iRNA agent of the invention via a trivalent linker. In other embodiments of the invention, the GalNAc or GalNAc derivative is attached to an iRNA agent of the invention via a tetravalent linker.

[0489] In certain embodiments, the double stranded RNAi agents of the invention comprise one GalNAc or GalNAc derivative attached to the iRNA agent, e.g., the 5′ end of the sense strand of a dsRNA agent, or the 5′ end of one or both sense strands of a dual targeting RNAi agent as described herein. In certain embodiments, the double stranded RNAi agents of the invention comprise a plurality (e.g., 2, 3, 4, 5, or 6) GalNAc or GalNAc derivatives, each independently attached to a plurality of nucleotides of the double stranded RNAi agent through a plurality of monovalent linkers.

[0490] In some embodiments, for example, when the two strands of an iRNA agent of the invention are part of one larger molecule connected by an uninterrupted chain of nucleotides between the 3′-end of one strand and the 5′-end of the respective other strand forming a hairpin loop comprising, a plurality of unpaired nucleotides, each unpaired nucleotide within the hairpin loop may independently comprise a GalNAc or GalNAc derivative attached via a monovalent linker.

[0491] In some embodiments, the carbohydrate conjugate further comprises one or more additional ligands as described above, such as, but not limited to, a PK modulator or a cell permeation peptide.

[0492] Additional carbohydrate conjugates and linkers suitable for use in the present invention include those described in WO 2014/179620 and WO 2014/179627, the entire contents of each of which are incorporated herein by reference.

[0493] D. Linkers

[0494] In some embodiments, the conjugate or ligand described herein can be attached to an iRNA oligonucleotide with various linkers that can be cleavable or non-cleavable.

[0495] The term “linker” or “linking group” means an organic moiety that connects two parts of a compound, e.g., covalently attaches two parts of a compound. Linkers typically comprise a direct bond or an atom such as oxygen or sulfur, a unit such as NR8, C(O), C(O)NH, SO, SO₂, SO₂NH or a chain of atoms, such as, but not limited to, substituted or unsubstituted alkyl, substituted or unsubstituted alkenyl, substituted or unsubstituted alkynyl, arylalkyl, arylalkenyl, arylalkynyl, heteroarylalkyl, heteroarylalkenyl, heteroarylalkynyl, heterocyclylalkyl, heterocyclylalkenyl, heterocyclylalkynyl, aryl, heteroaryl, heterocyclyl, cycloalkyl, cycloalkenyl, alkylarylalkyl, alkylarylalkenyl, alkylarylalkynyl, alkenylarylalkyl, alkenylarylalkenyl, alkenylarylalkynyl, alkynylarylalkyl, alkynylarylalkenyl, alkynylarylalkynyl, alkylheteroarylalkyl, alkylheteroarylalkenyl, alkylheteroarylalkynyl, alkenylheteroarylalkyl, alkenylheteroarylalkenyl, alkenylheteroarylalkynyl, alkynylheteroarylalkyl, alkynylheteroarylalkenyl, alkynylheteroarylalkynyl, alkylheterocyclylalkyl, alkylheterocyclylalkenyl, alkylhererocyclylalkynyl, alkenylheterocyclylalkyl, alkenylheterocyclylalkenyl, alkenylheterocyclylalkynyl, alkynylheterocyclylalkyl, alkynylheterocyclylalkenyl, alkynylheterocyclylalkynyl, alkylaryl, alkenylaryl, alkynylaryl, alkylheteroaryl, alkenylheteroaryl, alkynylhereroaryl, which one or more methylenes can be interrupted or terminated by O, S, S(O), SO₂, N(R8), C(O), substituted or unsubstituted aryl, substituted or unsubstituted heteroaryl, substituted or unsubstituted heterocyclic; where R8 is hydrogen, acyl, aliphatic or substituted aliphatic. In certain embodiments, the linker is between about 1-24 atoms, 2-24, 3-24, 4-24, 5-24, 6-24, 6-18, 7-18, 8-18 atoms, 7-17, 8-17, 6-16, 7-16, or 8-16 atoms.

[0496] A cleavable linking group is one which is sufficiently stable outside the cell, but which upon entry into a target cell is cleaved to release the two parts the linker is holding together. In a preferred embodiment, the cleavable linking group is cleaved at least about 10 times, 20, times, 30 times, 40 times, 50 times, 60 times, 70 times, 80 times, 90 times or more, or at least about 100 times faster in a target cell or under a first reference condition (which can, e.g., be selected to mimic or represent intracellular conditions) than in the blood of a subject, or under a second reference condition (which can, e.g., be selected to mimic or represent conditions found in the blood or serum).

[0497] Cleavable linking groups are susceptible to cleavage agents, e.g., pH, redox potential or the presence of degradative molecules. Generally, cleavage agents are more prevalent or found at higher levels or activities inside cells than in serum or blood. Examples of such degradative agents include: redox agents which are selected for particular substrates or which have no substrate specificity, including, e.g., oxidative or reductive enzymes or reductive agents such as mercaptans, present in cells, that can degrade a redox cleavable linking group by reduction; esterases; endosomes or agents that can create an acidic environment, e.g., those that result in a pH of five or lower; enzymes that can hydrolyze or degrade an acid cleavable linking group by acting as a general acid, peptidases (which can be substrate specific), and phosphatases.

[0498] A cleavable linkage group, such as a disulfide bond can be susceptible to pH. The pH of human serum is 7.4, while the average intracellular pH is slightly lower, ranging from about 7.1-7.3. Endosomes have a more acidic pH, in the range of 5.5-6.0, and lysosomes have an even more acidic pH at around 5.0. Some linkers will have a cleavable linking group that is cleaved at a preferred pH, thereby releasing a cationic lipid from the ligand inside the cell, or into the desired compartment of the cell.

[0499] A linker can include a cleavable linking group that is cleavable by a particular enzyme. The type of cleavable linking group incorporated into a linker can depend on the cell to be targeted. For example, a liver-targeting ligand can be linked to a cationic lipid through a linker that includes an ester group. Liver cells are rich in esterases, and therefore the linker will be cleaved more efficiently in liver cells than in cell types that are not esterase-rich. Other cell-types rich in esterases include cells of the lung, renal cortex, and testis.

[0500] Linkers that contain peptide bonds can be used when targeting cell types rich in peptidases, such as liver cells and synoviocytes.

[0501] In general, the suitability of a candidate cleavable linking group can be evaluated by testing the ability of a degradative agent (or condition) to cleave the candidate linking group. It will also be desirable to also test the candidate cleavable linking group for the ability to resist cleavage in the blood or when in contact with other non-target tissue. Thus, one can determine the relative susceptibility to cleavage between a first and a second condition, where the first is selected to be indicative of cleavage in a target cell and the second is selected to be indicative of cleavage in other tissues or biological fluids, e.g., blood or serum. The evaluations can be carried out in cell free systems, in cells, in cell culture, in organ or tissue culture, or in whole animals. It can be useful to make initial evaluations in cell-free or culture conditions and to confirm by further evaluations in whole animals. In preferred embodiments, useful candidate compounds are cleaved at least about 2, 4, 10, 20, 30, 40, 50, 60, 70, 80, 90, or about 100 times faster in the cell (or under in vitro conditions selected to mimic intracellular conditions) as compared to blood or serum (or under in vitro conditions selected to mimic extracellular conditions).

[0502] i. Redox Cleavable Linking Groups

[0503] In certain embodiments, a cleavable linking group is a redox cleavable linking group that is cleaved upon reduction or oxidation. An example of reductively cleavable linking group is a disulphide linking group (—S—S—). To determine if a candidate cleavable linking group is a suitable “reductively cleavable linking group,” or for example is suitable for use with a particular iRNA moiety and particular targeting agent one can look to methods described herein. For example, a candidate can be evaluated by incubation with dithiothreitol (DTT), or other reducing agent using reagents know in the art, which mimic the rate of cleavage which would be observed in a cell, e.g., a target cell. The candidates can also be evaluated under conditions which are selected to mimic blood or serum conditions. In one, candidate compounds are cleaved by at most about 10% in the blood. In other embodiments, useful candidate compounds are degraded at least about 2, 4, 10, 20, 30, 40, 50, 60, 70, 80, 90, or about 100 times faster in the cell (or under in vitro conditions selected to mimic intracellular conditions) as compared to blood (or under in vitro conditions selected to mimic extracellular conditions). The rate of cleavage of candidate compounds can be determined using standard enzyme kinetics assays under conditions chosen to mimic intracellular media and compared to conditions chosen to mimic extracellular media.

[0504] ii. Phosphate-Based Cleavable Linking Groups

[0505] In certain embodiments, a cleavable linker comprises a phosphate-based cleavable linking group. A phosphate-based cleavable linking group is cleaved by agents that degrade or hydrolyze the phosphate group. An example of an agent that cleaves phosphate groups in cells are enzymes such as phosphatases in cells. Examples of phosphate-based linking groups are —O—P(O)(ORk)-O—, —O—P(S)(ORk)-O—, —O—P(S)(SRk)-O—, —S—P(O)(ORk)-O—, —O—P(O)(ORk)-S—, —S—P(O)(ORk)-S—, —O—P(S)(ORk)-S—, —S—P(S)(ORk)-O—, —O—P(O)(Rk)-O—, —O—P(S)(Rk)-O—, —S—P(O)(Rk)-O—, —S—P(S)(Rk)-O—, —S—P(O)(Rk)-S—, —O—P(S)(Rk)-S. Preferred embodiments are —O—P(O)(OH)—O—, —O—P(S)(OH)—O—, —O—P(S)(SH)—O—, —S—P(O)(OH)—O—, —O—P(O)(OH)—S—, —S—P(O)(OH)—S—, —O—P(S)(OH)—S—, —S—P(S)(OH)—O—, —O—P(O)(H)—O—, —O—P(S)(H)—O—, —S—P(O)(H)—O, —S—P(S)(H)—O—, —S—P(O)(H)—S—, —O—P(S)(H)—S—. A preferred embodiment is —O—P(O)(OH)—O—. These candidates can be evaluated using methods analogous to those described above.

[0506] iii. Acid Cleavable Linking Groups

[0507] In certain embodiments, a cleavable linker comprises an acid cleavable linking group. An acid cleavable linking group is a linking group that is cleaved under acidic conditions. In preferred embodiments acid cleavable linking groups are cleaved in an acidic environment with a pH of about 6.5 or lower (e.g., about 6.0, 5.75, 5.5, 5.25, 5.0, or lower), or by agents such as enzymes that can act as a general acid. In a cell, specific low pH organelles, such as endosomes and lysosomes can provide a cleaving environment for acid cleavable linking groups. Examples of acid cleavable linking groups include but are not limited to hydrazones, esters, and esters of amino acids. Acid cleavable groups can have the general formula —C═NN—, C(O)O, or —OC(O). A preferred embodiment is when the carbon attached to the oxygen of the ester (the alkoxy group) is an aryl group, substituted alkyl group, or tertiary alkyl group such as dimethyl pentyl or t-butyl. These candidates can be evaluated using methods analogous to those described above.

[0508] iv. Ester-Based Cleavable Linking Groups

[0509] In certain embodiments, a cleavable linker comprises an ester-based cleavable linking group. An ester-based cleavable linking group is cleaved by enzymes such as esterases and amidases in cells. Examples of ester-based cleavable linking groups include but are not limited to esters of alkylene, alkenylene and alkynylene groups. Ester cleavable linking groups have the general formula —C(O)O—, or —OC(O)—. These candidates can be evaluated using methods analogous to those described above.

[0510] v. Peptide-Based Cleavable Linking Groups

[0511] In yet another embodiment, a cleavable linker comprises a peptide-based cleavable linking group. A peptide-based cleavable linking group is cleaved by enzymes such as peptidases and proteases in cells. Peptide-based cleavable linking groups are peptide bonds formed between amino acids to yield oligopeptides (e.g., dipeptides, tripeptides etc.) and polypeptides. Peptide-based cleavable groups do not include the amide group (—C(O)NH—). The amide group can be formed between any alkylene, alkenylene or alkynelene. A peptide bond is a special type of amide bond formed between amino acids to yield peptides and proteins. The peptide based cleavage group is generally limited to the peptide bond (i.e., the amide bond) formed between amino acids yielding peptides and proteins and does not include the entire amide functional group. Peptide-based cleavable linking groups have the general formula —NHCHRAC(O)NHCHRBC(O)—, where RA and RB are the R groups of the two adjacent amino acids. These candidates can be evaluated using methods analogous to those described above.

[0512] In some embodiments, an iRNA of the invention is conjugated to a carbohydrate through a linker. Non-limiting examples of iRNA carbohydrate conjugates with linkers of the compositions and methods of the invention include, but are not limited to,

[chemical structure]

[chemical structure]

[chemical structure]

when one of X or Y is an oligonucleotide, the other is a hydrogen.

[0513] In certain embodiments of the compositions and methods of the invention, a ligand is one or more “GalNAc” (N-acetylgalactosamine) derivatives attached through a bivalent or trivalent branched linker.

[0514] In certain embodiments, a dsRNA of the invention is conjugated to a bivalent or trivalent branched linker selected from the group of structures shown in any of formula (XLV)-(XLVI):

[chemical structure]

[0515] wherein:
[0516] q2A, q2B, q3A, q3B, q4A, q4B, q5A, q5B and q5C represent independently for each occurrence 0-20 and wherein the repeating unit can be the same or different;
[0517] P^{2A}, P^{2B}, P^{3A}, P^{3B}, P^{4A}, P^{4B}, P^{5A}, P^{5B}, P^{5C}, T^{2A}, T^{2B}, T^{3A}, T^{3B}, T^{4A}, T^{4B}, T^{4A}, T^{5B}, T^{5C} are each independently for each occurrence absent, CO, NH, O, S, OC(O), NHC(O), CH₂, CH₂NH or CH₂O;
[0518] Q^{2A}, Q^{2B}, Q^{3A}, Q^{3B}, Q^{4A}, Q^{4B}, Q^{5A}, Q^{5B}, Q^{5C} are independently for each occurrence absent, alkylene, substituted alkylene wherein one or more methylenes can be interrupted or terminated by one or more of O, S, S(O), SO₂, N(R N), C(R′)═C(R″), C≡C or C(O);
[0519] R^{2A}, R^{2B}, R^{3A}, R^{3B}, R^{4A}, R^{4B}, R^{5A}, R^{5B}, R^{5C} are each independently for each occurrence absent, NH, O, S, CH₂, C(O)O, C(O)NH, NHCH(R^{a})C(O), —C(O)—CH(R^{a})—NH—, CO, CH═N-O,

[chemical structure]

or heterocyclyl;
[0520] L^{2A}, L^{2B}, L^{3A}, L^{3B}, L^{4A}, L^{4B}, L^{5A}, L^{5B} and L^{5C} represent the ligand; i.e. each independently for each occurrence a monosaccharide (such as GalNAc), disaccharide, trisaccharide, tetrasaccharide, oligosaccharide, or polysaccharide; and R^{a} is H or amino acid side chain. Trivalent conjugating GalNAc derivatives are particularly useful for use with RNAi agents for inhibiting the expression of a target gene, such as those of formula (XLIX):

[chemical structure]

[0521] wherein L^{5A}, L^{5B} and L^{5C} represent a monosaccharide, such as GalNAc derivative.

[0522] Examples of suitable bivalent and trivalent branched linker groups conjugating GalNAc derivatives include, but are not limited to, the structures recited above as formulas II, VII, XI, X, and XIII.

[0523] Representative U.S. patents that teach the preparation of RNA conjugates include, but are not limited to, U.S. Pat. Nos. 4,828,979; 4,948,882; 5,218,105; 5,525,465; 5,541,313; 5,545,730; 5,552,538; 5,578,717, 5,580,731; 5,591,584; 5,109,124; 5,118,802; 5,138,045; 5,414,077; 5,486,603; 5,512,439; 5,578,718; 5,608,046; 4,587,044; 4,605,735; 4,667,025; 4,762,779; 4,789,737; 4,824,941; 4,835,263; 4,876,335; 4,904,582; 4,958,013; 5,082,830; 5,112,963; 5,214,136; 5,082,830; 5,112,963; 5,214,136; 5,245,022; 5,254,469; 5,258,506; 5,262,536; 5,272,250; 5,292,873; 5,317,098; 5,371,241, 5,391,723; 5,416,203, 5,451,463; 5,510,475; 5,512,667; 5,514,785; 5,565,552; 5,567,810; 5,574,142; 5,585,481; 5,587,371; 5,595,726; 5,597,696; 5,599,923; 5,599,928; 5,688,941; 6,294,664; 6,320,017; 6,576,752; 6,783,931; 6,900,297; 7,037,646; and 8,106,022, the entire contents of each of which are hereby incorporated herein by reference.

[0524] It is not necessary for all positions in a given compound to be uniformly modified, and in fact more than one of the aforementioned modifications can be incorporated in a single compound or even at a single nucleoside within an iRNA. The present invention also includes iRNA compounds that are chimeric compounds.

[0525] “Chimeric” iRNA compounds or “chimeras,” in the context of this invention, are iRNA compounds, preferably dsRNA agents, that contain two or more chemically distinct regions, each made up of at least one monomer unit, i.e., a nucleotide in the case of a dsRNA compound. These iRNAs typically contain at least one region wherein the RNA is modified so as to confer upon the iRNA increased resistance to nuclease degradation, increased cellular uptake, or increased binding affinity for the target nucleic acid. An additional region of the iRNA can serve as a substrate for enzymes capable of cleaving RNA:DNA or RNA:RNA hybrids. By way of example, RNase H is a cellular endonuclease which cleaves the RNA strand of an RNA:DNA duplex. Activation of RNase H, therefore, results in cleavage of the RNA target, thereby greatly enhancing the efficiency of iRNA inhibition of gene expression. Consequently, comparable results can often be obtained with shorter iRNAs when chimeric dsRNAs are used, compared to phosphorothioate deoxy dsRNAs hybridizing to the same target region. Cleavage of the RNA target can be routinely detected by gel electrophoresis and, if necessary, associated nucleic acid hybridization techniques known in the art.

[0526] In certain instances, the RNA of an iRNA can be modified by a non-ligand group. A number of non-ligand molecules have been conjugated to iRNAs in order to enhance the activity, cellular distribution or cellular uptake of the iRNA, and procedures for performing such conjugations are available in the scientific literature. Such non-ligand moieties have included lipid moieties, such as cholesterol (Kubo, T. et al., Biochem. Biophys. Res. Comm., 2007, 365(1):54-61; Letsinger et al., Proc. Natl. Acad. Sci. USA, 1989, 86:6553), cholic acid (Manoharan et al., Bioorg. Med. Chem. Lett., 1994, 4:1053), a thioether, e.g., hexyl-S-tritylthiol (Manoharan et al., Ann. N.Y. Acad. Sci., 1992, 660:306; Manoharan et al., Bioorg. Med. Chem. Let., 1993, 3:2765), a thiocholesterol (Oberhauser et al., Nucl. Acids Res., 1992, 20:533), an aliphatic chain, e.g., dodecandiol or undecyl residues (Saison-Behmoaras et al., EMBO J., 1991, 10:111; Kabanov et al., FEBS Lett., 1990, 259:327; Svinarchuk et al., Biochimie, 1993, 75:49), a phospholipid, e.g., di-hexadecyl-rac-glycerol or triethylammonium 1,2-di-O-hexadecyl-rac-glycero-3-H-phosphonate (Manoharan et al., Tetrahedron Lett., 1995, 36:3651; Shea et al., Nucl. Acids Res., 1990, 18:3777), a polyamine or a polyethylene glycol chain (Manoharan et al., Nucleosides & Nucleotides, 1995, 14:969), or adamantane acetic acid (Manoharan et al., Tetrahedron Lett., 1995, 36:3651), a palmityl moiety (Mishra et al., Biochim. Biophys. Acta, 1995, 1264:229), or an octadecylamine or hexylamino-carbonyl-oxycholesterol moiety (Crooke et al., J. Pharmacol. Exp. Ther., 1996, 277:923). Representative United States patents that teach the preparation of such RNA conjugates have been listed above. Typical conjugation protocols involve the synthesis of RNAs bearing an aminolinker at one or more positions of the sequence. The amino group is then reacted with the molecule being conjugated using appropriate coupling or activating reagents. The conjugation reaction can be performed either with the RNA still bound to the solid support or following cleavage of the RNA, in solution phase. Purification of the RNA conjugate by HPLC typically affords the pure conjugate.

### V. Delivery of an RNAi Agent of the Disclosure

[0527] The delivery of a RNAi agent of the disclosure to a cell e.g., a cell within a subject, such as a human subject (e.g., a subject in need thereof, such as a subject having a MUC5B-associated disorder, e.g., a lung disease, e.g., cystic fibrosis, chronic obstructive pulmonary disease (COPD), and/or pulmonary fibrosis, e.g., idiopathic pulmonary fibrosis (IPF), e.g., a subject having or at risk of developing or at risk of having a lung disease, e.g., cystic fibrosis, chronic obstructive pulmonary disease (COPD), and/or pulmonary fibrosis, e.g., idiopathic pulmonary fibrosis (IPF), can be achieved in a number of different ways. For example, delivery may be performed by contacting a cell with an RNAi agent of the disclosure either in vitro or in vivo. In vivo delivery may also be performed directly by administering a composition comprising an RNAi agent, e.g., a dsRNA, to a subject. Alternatively, in vivo delivery may be performed indirectly by administering one or more vectors that encode and direct the expression of the RNAi agent. These alternatives are discussed further below.

[0528] In general, any method of delivering a nucleic acid molecule (in vitro or in vivo) can be adapted for use with a RNAi agent of the disclosure (see e.g., Akhtar S. and Julian R L., (1992) Trends Cell. Biol. 2(5):139-144 and WO94/02595, which are incorporated herein by reference in their entireties). For in vivo delivery, factors to consider in order to deliver an RNAi agent include, for example, biological stability of the delivered agent, prevention of non-specific effects, and accumulation of the delivered agent in the target tissue. The non-specific effects of an RNAi agent can be minimized by local administration, for example, by direct injection or implantation into a tissue or topically administering the preparation. Local administration to a treatment site maximizes local concentration of the agent, limits the exposure of the agent to systemic tissues that can otherwise be harmed by the agent or that can degrade the agent, and permits a lower total dose of the RNAi agent to be administered. Several studies have shown successful knockdown of gene products when an RNAi agent is administered locally. For example, pulmonary delivery, e.g., inhalation, of a dsRNA, e.g., SOD1, has been shown to effectively knockdown gene and protein expression in lung tissue and that there is excellent uptake of the dsRNA by the bronchioles and alveoli of the lung. Intraocular delivery of a VEGF dsRNA by intravitreal injection in cynomolgus monkeys (Tolentino, M I et al., (2004) Retina 24:132-138) and subretinal injections in mice (Reich, S J. et al. (2003) Mol. Vis. 9:210-216) were also both shown to prevent neovascularization in an experimental model of age-related macular degeneration. In addition, direct intratumoral injection of a dsRNA in mice reduces tumor volume (Pille, J. et al. (2005) Mol. Ther. 11:267-274) and can prolong survival of tumor-bearing mice (Kim, W J. et al., (2006) Mol. Ther. 14:343-350; Li, S. et al., (2007) Mol. Ther. 15:515-523). RNA interference has also shown success with local delivery to the CNS by direct injection (Dorn, G. et al., (2004) Nucleic Acids 32:e49; Tan, P H. et al. (2005) Gene Ther. 12:59-66; Makimura, H. et al. (2002) BMC Neurosci. 3:18; Shishkina, G T., et al. (2004) Neuroscience 129:521-528; Thakker, E R., et al. (2004) Proc. Natl. Acad. Sci. U.S.A. 101:17270-17275; Akaneya, Y., et al. (2005) J. Neurophysiol. 93:594-602) and to the lungs by intranasal administration (Howard, K A. et al., (2006) Mol. Ther. 14:476-484; Zhang, X. et al., (2004) J. Biol. Chem. 279:10677-10684; Bitko, V. et al., (2005) Nat. Med. 11:50-55). For administering a RNAi agent systemically for the treatment of a disease, the RNA can be modified or alternatively delivered using a drug delivery system; both methods act to prevent the rapid degradation of the dsRNA by endo- and exo-nucleases in vivo. Modification of the RNA or the pharmaceutical carrier can also permit targeting of the RNAi agent to the target tissue and avoid undesirable off-target effects (e.g., without wishing to be bound by theory, use of GNAs as described herein has been identified to destabilize the seed region of a dsRNA, resulting in enhanced preference of such dsRNAs for on-target effectiveness, relative to off-target effects, as such off-target effects are significantly weakened by such seed region destabilization). RNAi agents can be modified by chemical conjugation to lipophilic groups such as cholesterol to enhance cellular uptake and prevent degradation. For example, a RNAi agent directed against ApoB conjugated to a lipophilic cholesterol moiety was injected systemically into mice and resulted in knockdown of apoB mRNA in both the liver and jejunum (Soutschek, J. et al., (2004) Nature 432:173-178). Conjugation of an RNAi agent to an aptamer has been shown to inhibit tumor growth and mediate tumor regression in a mouse model of prostate cancer (McNamara, J O. et al., (2006) Nat. Biotechnol. 24:1005-1015). In an alternative embodiment, the RNAi agent can be delivered using drug delivery systems such as a nanoparticle, a dendrimer, a polymer, liposomes, or a cationic delivery system. Positively charged cationic delivery systems facilitate binding of molecule RNAi agent (negatively charged) and also enhance interactions at the negatively charged cell membrane to permit efficient uptake of an RNAi agent by the cell. Cationic lipids, dendrimers, or polymers can either be bound to an RNAi agent, or induced to form a vesicle or micelle (see e.g., Kim S H. et al., (2008) Journal of Controlled Release 129(2):107-116) that encases an RNAi agent. The formation of vesicles or micelles further prevents degradation of the RNAi agent when administered systemically. Methods for making and administering cationic-RNAi agent complexes are well within the abilities of one skilled in the art (see e.g., Sorensen, D R., et al. (2003) J. Mol. Biol 327:761-766; Verma, U N. et al., (2003) Clin. Cancer Res. 9:1291-1300; Arnold, A S et al. (2007) J. Hypertens. 25:197-205, which are incorporated herein by reference in their entirety). Some non-limiting examples of drug delivery systems useful for systemic delivery of RNAi agents include DOTAP (Sorensen, D R., et al (2003), supra; Verma, U N. et al., (2003), supra), Oligofectamine, “solid nucleic acid lipid particles” (Zimmermann, T S. et al., (2006) Nature 441:111-114), cardiolipin (Chien, P Y. et al., (2005) Cancer Gene Ther. 12:321-328; Pal, A. et al., (2005) Int J. Oncol. 26:1087-1091), polyethyleneimine (Bonnet M E. et al., (2008) Pharm. Res. August 16 Epub ahead of print; Aigner, A. (2006) J. Biomed. Biotechnol. 71659), Arg-Gly-Asp (RGD) peptides (Liu, S. (2006) Mol. Pharm. 3:472-487), and polyamidoamines (Tomalia, D A. et al., (2007) Biochem. Soc. Trans. 35:61-67; Yoo, H. et al., (1999) Pharm. Res. 16:1799-1804). In some embodiments, a RNAi agent forms a complex with cyclodextrin for systemic administration. Methods for administration and pharmaceutical compositions of RNAi agents and cyclodextrins can be found in U.S. Pat. No. 7,427,605, which is herein incorporated by reference in its entirety.

[0529] Certain aspects of the instant disclosure relate to a method of reducing the expression of a MUC5B gene in a cell, comprising contacting said cell with the double-stranded RNAi agent of the disclosure. In one embodiment, the cell is a hepatic cell, optionally a hepatocyte. In one embodiment, the cell is an extrahepatic cell, optionally a pulmonary cell.

[0530] In one embodiment, the cell is present in an organ or tissues of the respiratory system, including, but not limited to, bronchus, bronchiole, alveoli, epithelium including nasal and respiratory epithelium, ciliated epithelium, and goblet cells; pneumocytes, both type I and type II, macrophages, peritubular interstitium, macrophages, adipose tissue, e.g., mediastinal adipose tissue, pulmonary cell. neuronal cells, e.g., in the pulmonary neuroal plexus, club cells, clara cells, neutrophils, both resident and transient, and oral mucosa.

[0531] In certain embodiments, the RNAi agent is taken up on one or more tissue or cell types present in organs outside of the respiratory system, e.g., liver, kidney.

[0532] Another aspect of the disclosure relates to a method of reducing the expression and/or activity of a MUC5B gene in a subject, comprising administering to the subject the double-stranded RNAi agent of the disclosure.

[0533] Another aspect of the disclosure relates to a method of treating a subject having a MUC5B-associated disorder or at risk of having or at risk of developing a MUC5B-associated disorder, comprising administering to the subject a therapeutically effective amount of the double-stranded RNAi agent of the disclosure, thereby treating the subject. In some embodiments, the MUC5B-associated disorder comprises a lung disease, e.g., cystic fibrosis, chronic obstructive pulmonary disease (COPD), and/or pulmonary fibrosis, e.g., idiopathic pulmonary fibrosis (IPF).

[0534] In one embodiment, the double-stranded RNAi agent is administered subcutaneously.

[0535] In one embodiment, the double-stranded RNAi agent is administered by pulmonary system administration, e.g., intranasal administration, or oral inhalative administration.

[0536] In one embodiment, the double-stranded RNAi agent is administered intranasally.

[0537] By pulmonary system administration, e.g., intranasal administration or oral inhalative administration, of the double-stranded RNAi agent, the method can reduce the expression of an MUC5B target gene in a pulmonary system tissue, e.g., a nasopharynx tissue, an oropharynx tissue, a laryngopharynx tissue, a larynx tissue, a trachea tissue, a carina tissue, a bronchi tissue, a bronchiole tissue, or an alveoli tissue.

[0538] For ease of exposition the formulations, compositions and methods in this section are discussed largely with regard to modified siRNA compounds. It may be understood, however, that these formulations, compositions and methods can be practiced with other siRNA compounds, e.g., unmodified siRNA compounds, and such practice is within the disclosure. A composition that includes a RNAi agent can be delivered to a subject by a variety of routes. Exemplary routes include pulmonary system, intravenous, intraventricular, topical, rectal, anal, vaginal, nasal, and ocular.

[0539] The RNAi agents of the disclosure can be incorporated into pharmaceutical compositions suitable for administration. Such compositions typically include one or more species of RNAi agent and a pharmaceutically acceptable carrier. As used herein the language “pharmaceutically acceptable carrier” is intended to include any and all solvents, dispersion media, coatings, antibacterial and antifungal agents, isotonic and absorption delaying agents, and the like, compatible with pharmaceutical administration. The use of such media and agents for pharmaceutically active substances is well known in the art. Except insofar as any conventional media or agent is incompatible with the active compound, use thereof in the compositions is contemplated. Supplementary active compounds can also be incorporated into the compositions.

[0540] The pharmaceutical compositions of the present disclosure may be administered in a number of ways depending upon whether local or systemic treatment is desired and upon the area to be treated. Administration may be pulmonary, e.g., by inhalation or insufflation of powders or aerosols, including by nebulizer; intratracheal, intranasal, topical (including ophthalmic, vaginal, rectal, intranasal, transdermal), oral, or parenteral. Parenteral administration includes intravenous drip, subcutaneous, intraperitoneal, or intramuscular injection, or intrathecal or intraventricular administration.

[0541] The route and site of administration may be chosen to enhance targeting. For example, to target muscle cells, intramuscular injection into the muscles of interest would be a logical choice. Lung cells might be targeted by administering the RNAi agent in powder or aerosol form. The vascular endothelial cells could be targeted by coating a balloon catheter with the RNAi agent and mechanically introducing the RNA.

[0542] Compositions for pulmonary system delivery may include aqueous solutions, e.g., for intranasal or oral inhalative administration, suitable carriers composed of, e.g., lipids (liposomes, niosomes, microemulsions, lipidic micelles, solid lipid nanoparticles) or polymers (polymer micelles, dendrimers, polymeric nanoparticles, nonogels, nanocapsules), adjuvant, e.g., for oral inhalative administration. Aqueous compositions may be sterile and may optionally contain buffers, diluents, absorbtion enhancers and other suitable additives.

[0543] Formulations for topical administration may include transdermal patches, ointments, lotions, creams, gels, drops, suppositories, sprays, liquids, and powders. Conventional pharmaceutical carriers, aqueous, powder or oily bases, thickeners and the like may be necessary or desirable. Coated condoms, gloves, and the like may also be useful.

[0544] Compositions for oral administration include powders or granules, suspensions or solutions in water, syrups, elixirs or non-aqueous media, tablets, capsules, lozenges, or troches. In the case of tablets, carriers that can be used include lactose, sodium citrate and salts of phosphoric acid. Various disintegrants such as starch, and lubricating agents such as magnesium stearate, sodium lauryl sulfate and talc, are commonly used in tablets. For oral administration in capsule form, useful diluents are lactose and high molecular weight polyethylene glycols. When aqueous suspensions are required for oral use, the nucleic acid compositions can be combined with emulsifying and suspending agents. If desired, certain sweetening or flavoring agents can be added.

[0545] Compositions for intrathecal or intraventricular administration may include sterile aqueous solutions which may also contain buffers, diluents, and other suitable additives.

[0546] Formulations for parenteral administration may include sterile aqueous solutions which may also contain buffers, diluents, and other suitable additives. Intraventricular injection may be facilitated by an intraventricular catheter, for example, attached to a reservoir. For intravenous use, the total concentration of solutes may be controlled to render the preparation isotonic.

[0547] In one embodiment, the administration of the siRNA compound, e.g., a double-stranded siRNA compound, or ssiRNA compound, composition is parenteral, e.g., intravenous (e.g., as a bolus or as a diffusible infusion), intradermal, intraperitoneal, intramuscular, intrathecal, intraventricular, intracranial, subcutaneous, transmucosal, buccal, sublingual, endoscopic, rectal, oral, vaginal, topical, pulmonary system, intranasal, urethral, or ocular. Administration can be provided by the subject or by another person, e.g., a health care provider. The medication can be provided in measured doses or in a dispenser which delivers a metered dose. Selected modes of delivery are discussed in more detail below.

[0548] Pulmonary System Administration

[0549] In one embodiment, the double-stranded RNAi agent is administered by pulmonary system administration. The pulmonary system includes the upper pulmonary system and the lower pulmonary system. The upper pulmonary system includes the nose and the pharynx. The pharynx includes the nasopharynx, oropharynx, and laryngopharynx. The lower pulmonary system includes the larynx, trachea, carina, bronchi, bronchioles, and alveoli.

[0550] Pulmonary system administration may be intranasal administration or oral inhalative administration. Such administration permits both systemic and local delivery of the double stranded RNAi agents of the invention.

[0551] Intranasal administration may include instilling or insufflating a double stranded RNAi agent into the nasal cavity with syringes or droppers by applying a few drops at a time or via atomization. Suitable dosage forms for intranasal administration include drops, powders, nebulized mists, and sprays. Nasal delivery devices include, but not limited to, vapor inhaler, nasal dropper, spray bottle, metered dose spray pump, gas driven spray atomizer, nebulizer, mechanical powder sprayer, breath actuated inhaler, and insufflator. Devices for delivery deeper into the respiratory system, e.g., into the lung, include nebulizer, pressured metered-dose inhaler, dry powder inhaler, and thermal vaporization aerosol device. Devices for delivery by inhalation are available from commercial suppliers. Devices can be fixed or variable dose, single or multidose, disposable or reusable depending on, for example, the disease or disorder to be prevented or treated, the volume of the agent to be delivered, the frequency of delivery of the agent, and other considerations in the art.

[0552] Oral inhalative administration may include use of device, e.g., a passive breath driven or active power driven single/-multiple dose dry powder inhaler (DPI), to deliver a double stranded RNAi agent to the pulmonary system. Suitable dosage forms for oral inhalative administration include powders and solutions. Suitable devices for oral inhalative administration include nebulizers, metered-dose inhalers, and dry powder inhalers. Dry powder inhalers are of the most popular devices used to deliver drugs, especially proteins to the lungs. Exemplary commercially available dry powder inhalers include Spinhaler (Fisons Pharmaceuticals, Rochester, NY) and Rotahaler (GSK, RTP, NC). Several types of nebulizers are available, namely jet nebulizers, ultrasonic nebulizers, vibrating mesh nebulizers. Jet nebulizers are driven by compressed air. Ultrasonic nebulizers use a piezoelectric transducer in order to create droplets from an open liquid reservoir. Vibrating mesh nebulizers use perforated membranes actuated by an annular piezoelement to vibrate in resonant bending mode. The holes in the membrane have a large cross-section size on the liquid supply side and a narrow cross-section size on the side from where the droplets emerge. Depending on the therapeutic application, the hole sizes and number of holes can be adjusted. Selection of a suitable device depends on parameters, such as nature of the drug and its formulation, the site of action, and pathophysiology of the lung. Aqueous suspensions and solutions are nebulized effectively. Aerosols based on mechanically generated vibration mesh technologies also have been used successfully to deliver proteins to lungs.

[0553] The amount of RNAi agent for pulmonary system administration may vary from one target gene to another target gene and the appropriate amount that has to be applied may have to be determined individually for each target gene. Typically, this amount ranges from 10 μg to 2 mg, preferably 50 μg to 1500 μg, more preferably 100 μg to 1000 μg.

[0554] Vector Encoded RNAi Agents of the Disclosure

[0555] RNAi agents targeting the MUC5B gene can be expressed from transcription units inserted into DNA or RNA vectors (see, e.g., Couture, A, et al., TIG. (1996), 12:5-10; WO 00/22113, WO 00/22114, and U.S. Pat. No. 6,054,299). Expression is preferably sustained (months or longer), depending upon the specific construct used and the target tissue or cell type. These transgenes can be introduced as a linear construct, a circular plasmid, or a viral vector, which can be an integrating or non-integrating vector. The transgene can also be constructed to permit it to be inherited as an extrachromosomal plasmid (Gassmann, et al., (1995) Proc. Natl. Acad. Sci. USA 92:1292).

[0556] The individual strand or strands of a RNAi agent can be transcribed from a promoter on an expression vector. Where two separate strands are to be expressed to generate, for example, a dsRNA, two separate expression vectors can be co-introduced (e.g., by transfection or infection) into a target cell. Alternatively, each individual strand of a dsRNA can be transcribed by promoters both of which are located on the same expression plasmid. In one embodiment, a dsRNA is expressed as inverted repeat polynucleotides joined by a linker polynucleotide sequence such that the dsRNA has a stem and loop structure.

[0557] RNAi agent expression vectors are generally DNA plasmids or viral vectors. Expression vectors compatible with eukaryotic cells, preferably those compatible with vertebrate cells, can be used to produce recombinant constructs for the expression of a RNAi agent as described herein. Delivery of RNAi agent expressing vectors can be systemic, such as by intravenous or intramuscular administration, by administration to target cells ex-planted from the patient followed by reintroduction into the patient, or by any other means that allows for introduction into a desired target cell.

[0558] Viral vector systems which can be utilized with the methods and compositions described herein include, but are not limited to, (a) adenovirus vectors; (b) retrovirus vectors, including but not limited to lentiviral vectors, moloney murine leukemia virus, etc.; (c) adeno-associated virus vectors; (d) herpes simplex virus vectors; (e) SV 40 vectors; (f) polyoma virus vectors; (g) papilloma virus vectors; (h) picornavirus vectors; (i) pox virus vectors such as an orthopox, e.g., vaccinia virus vectors or avipox, e.g. canary pox or fowl pox; and (j) a helper-dependent or gutless adenovirus. Replication-defective viruses can also be advantageous. Different vectors will or will not become incorporated into the cells' genome. The constructs can include viral sequences for transfection, if desired. Alternatively, the construct can be incorporated into vectors capable of episomal replication, e.g. EPV and EBV vectors. Constructs for the recombinant expression of a RNAi agent will generally require regulatory elements, e.g., promoters, enhancers, etc., to ensure the expression of the RNAi agent in target cells. Other aspects to consider for vectors and constructs are known in the art.

### VI. Pharmaceutical Compositions of the Invention

[0559] The present disclosure also includes pharmaceutical compositions and formulations which include the RNAi agents of the disclosure. In one embodiment, provided herein are pharmaceutical compositions containing an RNAi agent, as described herein, and a pharmaceutically acceptable carrier. The pharmaceutical compositions containing the RNAi agent are useful for treating a subject who would benefit from inhibiting or reducing the expression of a MUC5B gene, e.g., a subject having a MUC5B-associated disorder, e.g., a subject having or at risk of having or at risk of developing a lung disease, e.g., cystic fibrosis, chronic obstructive pulmonary disease (COPD), and/or pulmonary fibrosis, e.g., idiopathic pulmonary fibrosis (IPF). Such pharmaceutical compositions are formulated based on the mode of delivery. One example is compositions that are formulated for direct delivery into the pulmonary system by intranasal administration or oral inhalative administration, e.g., by inhalation or insufflation of powders or aerosols, including by nebulizer; intratracheal or intranasal delivery. Another example is compositions that are formulated for systemic administration via parenteral delivery, e.g., by intravenous (IV), intramuscular (IM), or for subcutaneous (subQ) delivery.

[0560] In some embodiments, the pharmaceutical compositions of the invention are pyrogen free or non-pyrogenic.

[0561] The pharmaceutical compositions of the disclosure may be administered in dosages sufficient to inhibit expression of a MUC5B gene. In general, a suitable dose of an RNAi agent of the disclosure will be a flat dose in the range of about 0.001 to about 200.0 mg about once per month to about once per year, typically about once per quarter (i.e., about once every three months) to about once per year, generally a flat dose in the range of about 1 to 50 mg about once per month to about once per year, typically about once per quarter to about once per year. In certain embodiments, the dose will be a fixed dose, e.g., a fixed dose of about 25 ug to about 5 mg.

[0562] A repeat-dose regimen may include administration of a therapeutic amount of a RNAi agent on a regular basis, such as monthly to once every six months. In certain embodiments, the RNAi agent is administered about once per quarter (i.e., about once every three months) to about twice per year, particularly for treatment of a chronic disease.

[0563] After an initial treatment regimen (e.g., loading dose), of once per day, twice per week, once per week, the treatments can be administered on a less frequent basis.

[0564] In other embodiments, a single dose of the pharmaceutical compositions can be long lasting, such that subsequent doses are administered at not more than 1, 2, 3, or 4 or more month intervals. In some embodiments of the disclosure, a single dose of the pharmaceutical compositions of the disclosure is administered once per month. In other embodiments of the disclosure, a single dose of the pharmaceutical compositions of the disclosure is administered once per quarter to twice per year.

[0565] The skilled artisan will appreciate that certain factors can influence the dosage and timing required to effectively treat a subject, including but not limited to the severity of the disease or disorder, previous treatments, the general health or age of the subject, and other diseases present. Moreover, treatment of a subject with a therapeutically effective amount of a composition can include a single treatment or a series of treatments.

[0566] Advances in mouse genetics have generated a number of mouse models for the study of various MUC5B-associated diseases that would benefit from reduction in the expression of MUC5B. Such models can be used for in vivo testing of RNAi agents, as well as for determining a therapeutically effective dose. Suitable mouse models are known in the art and include, for example, the mouse models described elsewhere herein.

[0567] The pharmaceutical compositions of the present disclosure can be administered in a number of ways depending upon whether local or systemic treatment is desired and upon the area to be treated. Administration can be topical (e.g., by a transdermal patch), pulmonary system administration by intranasal administration or oral inhalative administration, e.g., by inhalation or insufflation of powders or aerosols, including by nebulizer; intratracheal, epidermal and transdermal, oral or parenteral. Parenteral administration includes intravenous, intraarterial, subcutaneous, intraperitoneal or intramuscular injection or infusion; subdermal, e.g., via an implanted device; or intracranial, e.g., by intraparenchymal, intrathecal or intraventricular, administration.

[0568] The RNAi agents can be delivered in a manner to target a particular tissue, such as the liver, the lung (e.g., bronchioles, alveoli, or bronchus of the lung), or both the liver and lung.

[0569] Pharmaceutical compositions and formulations for topical administration can include transdermal patches, ointments, lotions, creams, gels, drops, suppositories, sprays, liquids and powders. Conventional pharmaceutical carriers, aqueous, powder or oily bases, thickeners and the like can be necessary or desirable. Coated condoms, gloves and the like can also be useful. Suitable topical formulations include those in which the RNAi agents featured in the disclosure are in admixture with a topical delivery agent such as lipids, liposomes, fatty acids, fatty acid esters, steroids, chelating agents and surfactants. Suitable lipids and liposomes include neutral (e.g., dioleoylphosphatidyl DOPE ethanolamine, dimyristoylphosphatidyl choline DMPC, distearolyphosphatidyl choline) negative (e.g., dimyristoylphosphatidyl glycerol DMPG) and cationic (e.g., dioleoyltetramethylaminopropyl DOTAP and dioleoylphosphatidyl ethanolamine DOTMA). RNAi agents featured in the disclosure can be encapsulated within liposomes or can form complexes thereto, in particular to cationic liposomes. Alternatively, RNAi agents can be complexed to lipids, in particular to cationic lipids. Suitable fatty acids and esters include but are not limited to arachidonic acid, oleic acid, eicosanoic acid, lauric acid, caprylic acid, capric acid, myristic acid, palmitic acid, stearic acid, linoleic acid, linolenic acid, dicaprate, tricaprate, monoolein, dilaurin, glyceryl 1-monocaprate, 1-dodecylazacycloheptan-2-one, an acylcarnitine, an acylcholine, or a C₁₋₂₀ alkyl ester (e.g., isopropylmyristate IPM), monoglyceride, diglyceride or pharmaceutically acceptable salt thereof. Topical formulations are described in detail in U.S. Pat. No. 6,747,014, which is incorporated herein by reference.

[0570] A. RNAi Agent Formulations Comprising Membranous Molecular Assemblies

[0571] A RNAi agent for use in the compositions and methods of the disclosure can be formulated for delivery in a membranous molecular assembly, e.g., a liposome or a micelle. As used herein, the term “liposome” refers to a vesicle composed of amphiphilic lipids arranged in at least one bilayer, e.g., one bilayer or a plurality of bilayers. Liposomes include unilamellar and multilamellar vesicles that have a membrane formed from a lipophilic material and an aqueous interior. The aqueous portion contains the RNAi agent composition. The lipophilic material isolates the aqueous interior from an aqueous exterior, which typically does not include the RNAi agent composition, although in some examples, it may. Liposomes are useful for the transfer and delivery of active ingredients to the site of action. Because the liposomal membrane is structurally similar to biological membranes, when liposomes are applied to a tissue, the liposomal bilayer fuses with bilayer of the cellular membranes. As the merging of the liposome and cell progresses, the internal aqueous contents that include the RNAi agent are delivered into the cell where the RNAi agent can specifically bind to a target RNA and can mediate RNAi. In some cases the liposomes are also specifically targeted, e.g., to direct the RNAi agent to particular cell types.

[0572] A liposome containing an RNAi agent can be prepared by a variety of methods. In one example, the lipid component of a liposome is dissolved in a detergent so that micelles are formed with the lipid component. For example, the lipid component can be an amphipathic cationic lipid or lipid conjugate. The detergent can have a high critical micelle concentration and may be nonionic. Exemplary detergents include cholate, CHAPS, octylglucoside, deoxycholate, and lauroyl sarcosine. The RNAi agent preparation is then added to the micelles that include the lipid component. The cationic groups on the lipid interact with the RNAi agent and condense around the RNAi agent to form a liposome. After condensation, the detergent is removed, e.g., by dialysis, to yield a liposomal preparation of RNAi agent.

[0573] If necessary a carrier compound that assists in condensation can be added during the condensation reaction, e.g., by controlled addition. For example, the carrier compound can be a polymer other than a nucleic acid (e.g., spermine or spermidine). pH can also adjusted to favor condensation.

[0574] Methods for producing stable polynucleotide delivery vehicles, which incorporate a polynucleotide/cationic lipid complex as structural components of the delivery vehicle, are further described in, e.g., WO 96/37194, the entire contents of which are incorporated herein by reference. Liposome formation can also include one or more aspects of exemplary methods described in Felgner, P. L. et al., (1987) Proc. Natl. Acad. Sci. USA 8:7413-7417; U.S. Pat. Nos. 4,897,355; 5,171,678; Bangham et al., (1965) M. Mol. Biol. 23:238; Olson et al., (1979) Biochim. Biophys. Acta 557:9; Szoka et al., (1978) Proc. Natl. Acad. Sci. 75: 4194; Mayhew et al., (1984) Biochim. Biophys. Acta 775:169; Kim et al., (1983) Biochim. Biophys. Acta 728:339; and Fukunaga et al., (1984) Endocrinol. 115:757. Commonly used techniques for preparing lipid aggregates of appropriate size for use as delivery vehicles include sonication and freeze-thaw plus extrusion (see, e.g., Mayer et al., (1986) Biochim. Biophys. Acta 858:161. Microfluidization can be used when consistently small (50 to 200 nm) and relatively uniform aggregates are desired (Mayhew et al., (1984) Biochim. Biophys. Acta 775:169. These methods are readily adapted to packaging RNAi agent preparations into liposomes.

[0575] Liposomes fall into two broad classes. Cationic liposomes are positively charged liposomes which interact with the negatively charged nucleic acid molecules to form a stable complex. The positively charged nucleic acid/liposome complex binds to the negatively charged cell surface and is internalized in an endosome. Due to the acidic pH within the endosome, the liposomes are ruptured, releasing their contents into the cell cytoplasm (Wang et al. (1987) Biochem. Biophys. Res. Commun., 147:980-985).

[0576] Liposomes, which are pH-sensitive or negatively charged, entrap nucleic acids rather than complex with them. Since both the nucleic acid and the lipid are similarly charged, repulsion rather than complex formation occurs. Nevertheless, some nucleic acid is entrapped within the aqueous interior of these liposomes. pH sensitive liposomes have been used to deliver nucleic acids encoding the thymidine kinase gene to cell monolayers in culture. Expression of the exogenous gene was detected in the target cells (Zhou et al. (1992) Journal of Controlled Release, 19:269-274).

[0577] One major type of liposomal composition includes phospholipids other than naturally-derived phosphatidylcholine. Neutral liposome compositions, for example, can be formed from dimyristoyl phosphatidylcholine (DMPC) or dipalmitoyl phosphatidylcholine (DPPC). Anionic liposome compositions generally are formed from dimyristoyl phosphatidylglycerol, while anionic fusogenic liposomes are formed primarily from dioleoyl phosphatidylethanolamine (DOPE). Another type of liposomal composition is formed from phosphatidylcholine (PC) such as, for example, soybean PC, and egg PC. Another type is formed from mixtures of phospholipid or phosphatidylcholine or cholesterol.

[0578] Examples of other methods to introduce liposomes into cells in vitro and in vivo include U.S. Pat. Nos. 5,283,185; 5,171,678; WO 94/00569; WO 93/24640; WO 91/16024; Felgner, (1994) J. Biol. Chem. 269:2550; Nabel, (1993) Proc. Natl. Acad. Sci. 90:11307; Nabel, (1992) Human Gene Ther. 3:649; Gershon, (1993) Biochem. 32:7143; and Strauss, (1992) EMBO J. 11:417.

[0579] Non-ionic liposomal systems have also been examined to determine their utility in the delivery of drugs to the skin, in particular systems comprising non-ionic surfactant and cholesterol. Non-ionic liposomal formulations comprising Novasome™ I (glyceryl dilaurate/cholesterol/polyoxyethylene-10-stearyl ether) and Novasome™ II (glyceryl distearate/cholesterol/polyoxyethylene-10-stearyl ether) were used to deliver cyclosporin-A into the dermis of mouse skin. Results indicated that such non-ionic liposomal systems were effective in facilitating the deposition of cyclosporine A into different layers of the skin (Hu et al., (1994) S.T.P. Pharma. Sci., 4(6):466).

[0580] Liposomes also include “sterically stabilized” liposomes, a term which, as used herein, refers to liposomes comprising one or more specialized lipids that, when incorporated into liposomes, result in enhanced circulation lifetimes relative to liposomes lacking such specialized lipids. Examples of sterically stabilized liposomes are those in which part of the vesicle-forming lipid portion of the liposome (A) comprises one or more glycolipids, such as monosialoganglioside G_{M1}, or (B) is derivatized with one or more hydrophilic polymers, such as a polyethylene glycol (PEG) moiety. While not wishing to be bound by any particular theory, it is thought in the art that, at least for sterically stabilized liposomes containing gangliosides, sphingomyelin, or PEG-derivatized lipids, the enhanced circulation half-life of these sterically stabilized liposomes derives from a reduced uptake into cells of the reticuloendothelial system (RES) (Allen et al., (1987) FEBS Letters, 223:42; Wu et al., (1993) Cancer Research, 53:3765).

[0581] Various liposomes comprising one or more glycolipids are known in the art. Papahadjopoulos et al. (Ann. N.Y. Acad. Sci., (1987), 507:64) reported the ability of monosialoganglioside G_{M1}, galactocerebroside sulfate and phosphatidylinositol to improve blood half-lives of liposomes. These findings were expounded upon by Gabizon et al. (Proc. Natl. Acad. Sci. U.S.A., (1988), 85:6949). U.S. Pat. No. 4,837,028 and WO 88/04924, both to Allen et al., disclose liposomes comprising (1) sphingomyelin and (2) the ganglioside G_{M1} or a galactocerebroside sulfate ester. U.S. Pat. No. 5,543,152 (Webb et al.) discloses liposomes comprising sphingomyelin. Liposomes comprising 1,2-sn-dimyristoylphosphatidylcholine are disclosed in WO 97/13499 (Lim et al).

[0582] In one embodiment, cationic liposomes are used. Cationic liposomes possess the advantage of being able to fuse to the cell membrane. Non-cationic liposomes, although not able to fuse as efficiently with the plasma membrane, are taken up by macrophages in vivo and can be used to deliver RNAi agents to macrophages.

[0583] Further advantages of liposomes include: liposomes obtained from natural phospholipids are biocompatible and biodegradable; liposomes can incorporate a wide range of water and lipid soluble drugs; liposomes can protect encapsulated RNAi agents in their internal compartments from metabolism and degradation (Rosoff, in “Pharmaceutical Dosage Forms,” Lieberman, Rieger and Banker (Eds.), 1988, volume 1, p. 245). Important considerations in the preparation of liposome formulations are the lipid surface charge, vesicle size and the aqueous volume of the liposomes.

[0584] A positively charged synthetic cationic lipid, N-[1-(2,3-dioleyloxy)propyl]-N,N,N-trimethylammonium chloride (DOTMA) can be used to form small liposomes that interact spontaneously with nucleic acid to form lipid-nucleic acid complexes which are capable of fusing with the negatively charged lipids of the cell membranes of tissue culture cells, resulting in delivery of RNAi agent (see, e.g., Felgner, P. L. et al., (1987) Proc. Natl. Acad. Sci. USA 8:7413-7417, and U.S. Pat. No. 4,897,355 for a description of DOTMA and its use with DNA).

[0585] A DOTMA analogue, 1,2-bis(oleoyloxy)-3-(trimethylammonia)propane (DOTAP) can be used in combination with a phospholipid to form DNA-complexing vesicles. Lipofectin™ Bethesda Research Laboratories, Gaithersburg, Md.) is an effective agent for the delivery of highly anionic nucleic acids into living tissue culture cells that comprise positively charged DOTMA liposomes which interact spontaneously with negatively charged polynucleotides to form complexes. When enough positively charged liposomes are used, the net charge on the resulting complexes is also positive. Positively charged complexes prepared in this way spontaneously attach to negatively charged cell surfaces, fuse with the plasma membrane, and efficiently deliver functional nucleic acids into, for example, tissue culture cells. Another commercially available cationic lipid, 1,2-bis(oleoyloxy)-3,3-(trimethylammonia)propane (“DOTAP”) (Boehringer Mannheim, Indianapolis, Indiana) differs from DOTMA in that the oleoyl moieties are linked by ester, rather than ether linkages.

[0586] Other reported cationic lipid compounds include those that have been conjugated to a variety of moieties including, for example, carboxyspermine which has been conjugated to one of two types of lipids and includes compounds such as 5-carboxyspermylglycine dioctaoleoylamide (“DOGS”) (Transfectam™, Promega, Madison, Wisconsin) and dipalmitoylphosphatidylethanolamine 5-carboxyspermyl-amide (“DPPES”) (see, e.g., U.S. Pat. No. 5,171,678).

[0587] Another cationic lipid conjugate includes derivatization of the lipid with cholesterol (“DC-Chol”) which has been formulated into liposomes in combination with DOPE (See, Gao, X. and Huang, L., (1991) Biochim. Biophys. Res. Commun. 179:280). Lipopolylysine, made by conjugating polylysine to DOPE, has been reported to be effective for transfection in the presence of serum (Zhou, X. et al., (1991) Biochim. Biophys. Acta 1065:8). For certain cell lines, these liposomes containing conjugated cationic lipids, are said to exhibit lower toxicity and provide more efficient transfection than the DOTMA-containing compositions. Other commercially available cationic lipid products include DMRIE and DMRIE-HP (Vical, La Jolla, California) and Lipofectamine (DOSPA) (Life Technology, Inc., Gaithersburg, Maryland). Other cationic lipids suitable for the delivery of oligonucleotides are described in WO 98/39359 and WO 96/37194.

[0588] Liposomal formulations are particularly suited for topical administration, liposomes present several advantages over other formulations. Such advantages include reduced side effects related to high systemic absorption of the administered drug, increased accumulation of the administered drug at the desired target, and the ability to administer RNAi agent into the skin. In some implementations, liposomes are used for delivering RNAi agent to epidermal cells and also to enhance the penetration of RNAi agent into dermal tissues, e.g., into skin. For example, the liposomes can be applied topically. Topical delivery of drugs formulated as liposomes to the skin has been documented (see, e.g., Weiner et al., (1992) Journal of Drug Targeting, vol. 2, 405-410 and du Plessis et al., (1992) Antiviral Research, 18:259-265; Mannino, R. J. and Fould-Fogerite, S., (1998) Biotechniques 6:682-690; Itani, T. et al., (1987) Gene 56:267-276; Nicolau, C. et al. (1987) Meth. Enzymol. 149:157-176; Straubinger, R. M. and Papahadjopoulos, D. (1983) Meth. Enzymol. 101:512-527; Wang, C. Y. and Huang, L., (1987) Proc. Natl. Acad. Sci. USA 84:7851-7855).

[0589] Non-ionic liposomal systems have also been examined to determine their utility in the delivery of drugs to the skin, in particular systems comprising non-ionic surfactant and cholesterol. Non-ionic liposomal formulations comprising Novasome I (glyceryl dilaurate/cholesterol/polyoxyethylene-10-stearyl ether) and Novasome II (glyceryl distearate/cholesterol/polyoxyethylene-10-stearyl ether) were used to deliver a drug into the dermis of mouse skin. Such formulations with RNAi agent are useful for treating a dermatological disorder.

[0590] Liposomes that include RNAi agents can be made highly deformable. Such deformability can enable the liposomes to penetrate through pore that are smaller than the average radius of the liposome. For example, transfersomes are a type of deformable liposomes. Transferosomes can be made by adding surface edge activators, usually surfactants, to a standard liposomal composition. Transfersomes that include RNAi agent can be delivered, for example, subcutaneously by infection in order to deliver RNAi agent to keratinocytes in the skin. In order to cross intact mammalian skin, lipid vesicles must pass through a series of fine pores, each with a diameter less than 50 nm, under the influence of a suitable transdermal gradient. In addition, due to the lipid properties, these transferosomes can be self-optimizing (adaptive to the shape of pores, e.g., in the skin), self-repairing, and can frequently reach their targets without fragmenting, and often self-loading.

[0591] Other formulations amenable to the present disclosure are described in U.S. provisional application Ser. No. 61/018,616, filed Jan. 2, 2008; 61/018,611, filed Jan. 2, 2008; 61/039,748, filed Mar. 26, 2008; 61/047,087, filed Apr. 22, 2008 and 61/051,528, filed May 8, 2008. PCT application number PCT/US2007/080331, filed Oct. 3, 2007, also describes formulations that are amenable to the present disclosure.

[0592] Transfersomes, yet another type of liposomes, are highly deformable lipid aggregates which are attractive candidates for drug delivery vehicles. Transfersomes can be described as lipid droplets which are so highly deformable that they are easily able to penetrate through pores which are smaller than the droplet. Transfersomes are adaptable to the environment in which they are used, e.g., they are self-optimizing (adaptive to the shape of pores in the skin), self-repairing, frequently reach their targets without fragmenting, and often self-loading. To make transfersomes it is possible to add surface edge-activators, usually surfactants, to a standard liposomal composition. Transfersomes have been used to deliver serum albumin to the skin. The transfersome-mediated delivery of serum albumin has been shown to be as effective as subcutaneous injection of a solution containing serum albumin.

[0593] Surfactants find wide application in formulations such as those described herein, particularlay in emulsions (including microemulsions) and liposomes. The most common way of classifying and ranking the properties of the many different types of surfactants, both natural and synthetic, is by the use of the hydrophile/lipophile balance (HLB). The nature of the hydrophilic group (also known as the “head”) provides the most useful means for categorizing the different surfactants used in formulations (Rieger, in Pharmaceutical Dosage Forms, Marcel Dekker, Inc., New York, N.Y., 1988, p. 285).

[0594] If the surfactant molecule is not ionized, it is classified as a nonionic surfactant. Nonionic surfactants find wide application in pharmaceutical and cosmetic products and are usable over a wide range of pH values. In general, their HLB values range from 2 to about 18 depending on their structure. Nonionic surfactants include nonionic esters such as ethylene glycol esters, propylene glycol esters, glyceryl esters, polyglyceryl esters, sorbitan esters, sucrose esters, and ethoxylated esters. Nonionic alkanolamides and ethers such as fatty alcohol ethoxylates, propoxylated alcohols, and ethoxylated/propoxylated block polymers are also included in this class. The polyoxyethylene surfactants are the most popular members of the nonionic surfactant class.

[0595] If the surfactant molecule carries a negative charge when it is dissolved or dispersed in water, the surfactant is classified as anionic. Anionic surfactants include carboxylates such as soaps, acyl lactylates, acyl amides of amino acids, esters of sulfuric acid such as alkyl sulfates and ethoxylated alkyl sulfates, sulfonates such as alkyl benzene sulfonates, acyl isethionates, acyl taurates and sulfosuccinates, and phosphates. The most important members of the anionic surfactant class are the alkyl sulfates and the soaps.

[0596] If the surfactant molecule carries a positive charge when it is dissolved or dispersed in water, the surfactant is classified as cationic. Cationic surfactants include quaternary ammonium salts and ethoxylated amines. The quaternary ammonium salts are the most used members of this class.

[0597] If the surfactant molecule has the ability to carry either a positive or negative charge, the surfactant is classified as amphoteric. Amphoteric surfactants include acrylic acid derivatives, substituted alkylamides, N-alkylbetaines and phosphatides.

The use of surfactants in drug products, formulations and in emulsions has been reviewed (Rieger, in Pharmaceutical Dosage Forms, Marcel Dekker, Inc., New York, N.Y., 1988, p. 285).

[0598] The RNAi agent for use in the methods of the disclosure can also be provided as micellar formulations. “Micelles” are defined herein as a particular type of molecular assembly in which amphipathic molecules are arranged in a spherical structure such that all the hydrophobic portions of the molecules are directed inward, leaving the hydrophilic portions in contact with the surrounding aqueous phase. The converse arrangement exists if the environment is hydrophobic.

[0599] A mixed micellar formulation suitable for delivery through transdermal membranes may be prepared by mixing an aqueous solution of the siRNA composition, an alkali metal C₈ to C₂₂ alkyl sulphate, and a micelle forming compounds. Exemplary micelle forming compounds include lecithin, hyaluronic acid, pharmaceutically acceptable salts of hyaluronic acid, glycolic acid, lactic acid, chamomile extract, cucumber extract, oleic acid, linoleic acid, linolenic acid, monoolein, monooleates, monolaurates, borage oil, evening of primrose oil, menthol, trihydroxy oxo cholanyl glycine and pharmaceutically acceptable salts thereof, glycerin, polyglycerin, lysine, polylysine, triolein, polyoxyethylene ethers and analogues thereof, polidocanol alkyl ethers and analogues thereof, chenodeoxycholate, deoxycholate, and mixtures thereof. The micelle forming compounds may be added at the same time or after addition of the alkali metal alkyl sulphate. Mixed micelles will form with substantially any kind of mixing of the ingredients but vigorous mixing in order to provide smaller size micelles.

[0600] In one method a first micellar composition is prepared which contains the siRNA composition and at least the alkali metal alkyl sulphate. The first micellar composition is then mixed with at least three micelle forming compounds to form a mixed micellar composition. In another method, the micellar composition is prepared by mixing the siRNA composition, the alkali metal alkyl sulphate and at least one of the micelle forming compounds, followed by addition of the remaining micelle forming compounds, with vigorous mixing.

[0601] Phenol or m-cresol may be added to the mixed micellar composition to stabilize the formulation and protect against bacterial growth. Alternatively, phenol or m-cresol may be added with the micelle forming ingredients. An isotonic agent such as glycerin may also be added after formation of the mixed micellar composition.

[0602] For delivery of the micellar formulation as a spray, the formulation can be put into an aerosol dispenser and the dispenser is charged with a propellant. The propellant, which is under pressure, is in liquid form in the dispenser. The ratios of the ingredients are adjusted so that the aqueous and propellant phases become one, i.e., there is one phase. If there are two phases, it is necessary to shake the dispenser prior to dispensing a portion of the contents, e.g., through a metered valve. The dispensed dose of pharmaceutical agent is propelled from the metered valve in a fine spray.

[0603] Propellants may include hydrogen-containing chlorofluorocarbons, hydrogen-containing fluorocarbons, dimethyl ether and diethyl ether. In certain embodiments, HFA 134a (1,1,1,2 tetrafluoroethane) may be used.

[0604] The specific concentrations of the essential ingredients can be determined by relatively straightforward experimentation. For absorption through the oral cavities, it is often desirable to increase, e.g., at least double or triple, the dosage for through injection or administration through the gastrointestinal tract.

[0605] Lipid Particles

[0606] RNAi agents, e.g., dsRNAs of in the disclosure may be fully encapsulated in a lipid formulation, e.g., a LNP, or other nucleic acid-lipid particle.

[0607] As used herein, the term “LNP” refers to a stable nucleic acid-lipid particle. LNPs typically contain a cationic lipid, a non-cationic lipid, and a lipid that prevents aggregation of the particle (e.g., a PEG-lipid conjugate). LNPs are extremely useful for systemic applications, as they exhibit extended circulation lifetimes following intravenous (i.v.) injection and accumulate at distal sites (e.g., sites physically separated from the administration site). LNPs include “pSPLP,” which include an encapsulated condensing agent-nucleic acid complex as set forth in WO 00/03683. The particles of the present disclosure typically have a mean diameter of about 50 nm to about 150 nm, more typically about 60 nm to about 130 nm, more typically about 70 nm to about 110 nm, most typically about 70 nm to about 90 nm, and are substantially nontoxic. In addition, the nucleic acids when present in the nucleic acid-lipid particles of the present disclosure are resistant in aqueous solution to degradation with a nuclease. Nucleic acid-lipid particles and their method of preparation are disclosed in, e.g., U.S. Pat. Nos. 5,976,567; 5,981,501; 6,534,484; 6,586,410; 6,815,432; United States Patent publication No. 2010/0324120 and WO 96/40964.

[0608] In one embodiment, the lipid to drug ratio (mass/mass ratio) (e.g., lipid to dsRNA ratio) will be in the range of from about 1:1 to about 50:1, from about 1:1 to about 25:1, from about 3:1 to about from about 4:1 to about 10:1, from about 5:1 to about 9:1, or about 6:1 to about 9:1. Ranges intermediate to the above recited ranges are also contemplated to be part of the disclosure.

[0609] Certain specific LNP formulations for delivery of RNAi agents have been described in the art, including, e.g., “LNP01” formulations as described in, e.g., WO 2008/042973, which is hereby incorporated by reference.

[0610] Additional exemplary lipid-dsRNA formulations are identified in the table below.

| | | cationic lipid/non-cationic |
|---|---|---|
| | | lipid/cholesterol/PEG-lipid conjugate |
| | Ionizable/Cationic Lipid | Lipid:siRNA ratio |
| SNALP-1 | 1,2-Dilinolenyloxy-N,N- | DLinDMA/DPPC/Cholesterol/PEG-CDMA |
| | dimethylaminopropane (DLinDMA) | (57.1/7.1/34.4/1.4) |
| | | lipid:siRNA ~ 7:1 |
| 2-XTC | 2,2-Dilinoleyl-4-dimethylaminoethyl-[1,3]- | XTC/DPPC/Cholesterol/PEG-CDMA |
| | dioxolane (XTC) | 57.1/7.1/34.4/1.4 |
| | | lipid:siRNA ~ 7:1 |
| LNP05 | 2,2-Dilinoleyl-4-dimethylaminoethyl-[1,3]- | XTC/DSPC/Cholesterol/PEG-DMG |
| | dioxolane (XTC) | 57.5/7.5/31.5/3.5 |
| | | lipid:siRNA ~ 6:1 |
| LNP06 | 2,2-Dilinoleyl-4-dimethylaminoethyl-[1,3]- | XTC/DSPC/Cholesterol/PEG-DMG |
| | dioxolane (XTC) | 57.5/7.5/31.5/3.5 |
| | | lipid:siRNA ~ 11:1 |
| LNP07 | 2,2-Dilinoleyl-4-dimethylaminoethyl-[1,3]- | XTC/DSPC/Cholesterol/PEG-DMG |
| | dioxolane (XTC) | 60/7.5/31/1.5, |
| | | lipid:siRNA ~ 6:1 |
| LNP08 | 2,2-Dilinoleyl-4-dimethylaminoethyl-[1,3]- | XTC/DSPC/Cholesterol/PEG-DMG |
| | dioxolane (XTC) | 60/7.5/31/1.5, |
| | | lipid:siRNA ~ 11:1 |
| LNP09 | 2,2-Dilinoleyl-4-dimethylaminoethyl-[1,3]- | XTC/DSPC/Cholesterol/PEG-DMG |
| | dioxolane (XTC) | 50/10/38.5/1.5 |
| | | Lipid:siRNA 10:1 |
| LNP10 | (3aR,5s,6aS)-N,N-dimethyl-2,2- | ALN100/DSPC/Cholesterol/PEG-DMG |
| | di((9Z,12Z)-octadeca-9,12- | 50/10/38.5/1.5 |
| | dienyl)tetrahydro-3aH- | Lipid:siRNA 10:1 |
| | cyclopenta[d][1,3]dioxol-5-amine | |
| | (ALN100) | |
| LNP11 | (6Z,9Z,28Z,31Z)-heptatriaconta-6,9,28,31- | MC-3/DSPC/Cholesterol/PEG-DMG |
| | tetraen-19-yl 4-(dimethylamino)butanoate | 50/10/38.5/1.5 |
| | (MC3) | Lipid:siRNA 10:1 |
| LNP12 | 1,1′-(2-(4-(2-((2-(bis(2- | Tech G1/DSPC/Cholesterol/PEG-DMG |
| | hydroxydodecyl)amino)ethyl)(2- | 50/10/38.5/1.5 |
| | hydroxydodecyl)amino)ethyl)piperazin-1- | Lipid:siRNA 10:1 |
| | yl)ethylazanediyl)didodecan-2-ol (Tech G1) | |
| LNP13 | XTC | XTC/DSPC/Chol/PEG-DMG |
| | | 50/10/38.5/1.5 |
| | | Lipid:siRNA: 33:1 |
| LNP14 | MC3 | MC3/DSPC/Chol/PEG-DMG |
| | | 40/15/40/5 |
| | | Lipid:siRNA: 11:1 |
| LNP15 | MC3 | MC3/DSPC/Chol/PEG-DSG/GalNAc-PEG-DSG |
| | | 50/10/35/4.5/0.5 |
| | | Lipid:siRNA: 11:1 |
| LNP16 | MC3 | MC3/DSPC/Chol/PEG-DMG |
| | | 50/10/38.5/1.5 |
| | | Lipid:siRNA: 7:1 |
| LNP17 | MC3 | MC3/DSPC/Chol/PEG-DSG |
| | | 50/10/38.5/1.5 |
| | | Lipid:siRNA: 10:1 |
| LNP18 | MC3 | MC3/DSPC/Chol/PEG-DMG |
| | | 50/10/38.5/1.5 |
| | | Lipid:siRNA: 12:1 |
| LNP19 | MC3 | MC3/DSPC/Chol/PEG-DMG |
| | | 50/10/35/5 |
| | | Lipid:siRNA: 8:1 |
| LNP20 | MC3 | MC3/DSPC/Chol/PEG-DPG |
| | | 50/10/38.5/1.5 |
| | | Lipid:siRNA: 10:1 |
| LNP21 | C12-200 | C12-200/DSPC/Chol/PEG-DSG |
| | | 50/10/38.5/1.5 |
| | | Lipid:siRNA: 7:1 |
| LNP22 | XTC | XTC/DSPC/Chol/PEG-DSG |
| | | 50/10/38.5/1.5 |
| | | Lipid:siRNA: 10:1 |

DSPC: distearoylphosphatidylcholine
DPPC: dipalmitoylphosphatidylcholine
PEG-DMG: PEG-didimyristoyl glycerol (C14-PEG, or PEG-C14) (PEG with avg mol wt of 2000)
PEG-DSG: PEG-distyryl glycerol (C18-PEG, or PEG-C18) (PEG with avg mol wt of 2000)
PEG-CDMA: PEG-carbamoyl-1,2-dimyristyloxypropylamine (PEG with avg mol wt of 2000)
SNALP (1,2-Dilinolenyloxy-N,N-dimethylaminopropane (DLinDMA)) comprising formulations are described in WO 2009/127060, which is hereby incorporated by reference.
XTC comprising formulations are described in WO 2010/088537, the entire contents of which are hereby incorporated herein by reference.
MC3 comprising formulations are described, e.g., in United States Patent Publication No. 2010/0324120, the entire contents of which are hereby incorporated by reference.
ALNY-100 comprising formulations are described in WO 2010/054406, the entire contents of which are hereby incorporated herein by reference.
C12-200 comprising formulations are described in WO 2010/129709, the entire contents of which are hereby incorporated herein by reference.

[0611] Compositions and formulations for oral administration include powders or granules, microparticulates, nanoparticulates, suspensions or solutions in water or non-aqueous media, capsules, gel capsules, sachets, tablets or minitablets. Thickeners, flavoring agents, diluents, emulsifiers, dispersing aids or binders can be desirable. In some embodiments, oral formulations are those in which dsRNAs featured in the disclosure are administered in conjunction with one or more penetration enhancer surfactants and chelators. Suitable surfactants include fatty acids or esters or salts thereof, bile acids or salts thereof. Suitable bile acids/salts include chenodeoxycholic acid (CDCA) and ursodeoxychenodeoxycholic acid (UDCA), cholic acid, dehydrocholic acid, deoxycholic acid, glucholic acid, glycholic acid, glycodeoxycholic acid, taurocholic acid, taurodeoxycholic acid, sodium tauro-24,25-dihydro-fusidate and sodium glycodihydrofusidate. Suitable fatty acids include arachidonic acid, undecanoic acid, oleic acid, lauric acid, caprylic acid, capric acid, myristic acid, palmitic acid, stearic acid, linoleic acid, linolenic acid, dicaprate, tricaprate, monoolein, dilaurin, glyceryl 1-monocaprate, 1-dodecylazacycloheptan-2-one, an acylcarnitine, an acylcholine, or a monoglyceride, a diglyceride or a pharmaceutically acceptable salt thereof (e.g., sodium). In some embodiments, combinations of penetration enhancers are used, for example, fatty acids/salts in combination with bile acids/salts. One exemplary combination is the sodium salt of lauric acid, capric acid and UDCA. Further penetration enhancers include polyoxyethylene-9-lauryl ether, polyoxyethylene-20-cetyl ether. DsRNAs featured in the disclosure can be delivered orally, in granular form including sprayed dried particles, or complexed to form micro or nanoparticles. DsRNA complexing agents include poly-amino acids; polyimines; polyacrylates; polyalkylacrylates, polyoxethanes, polyalkylcyanoacrylates; cationized gelatins, albumins, starches, acrylates, polyethyleneglycols (PEG) and starches; polyalkylcyanoacrylates; DEAE-derivatized polyimines, pollulans, celluloses and starches. Suitable complexing agents include chitosan, N-trimethylchitosan, poly-L-lysine, polyhistidine, polyornithine, polyspermines, protamine, polyvinylpyridine, polythiodiethylaminomethylethylene P(TDAE), polyaminostyrene (e.g., p-amino), poly(methylcyanoacrylate), poly(ethylcyanoacrylate), poly(butylcyanoacrylate), poly(isobutylcyanoacrylate), poly(isohexylcynaoacrylate), DEAE-methacrylate, DEAE-hexylacrylate, DEAE-acrylamide, DEAE-albumin and DEAE-dextran, polymethylacrylate, polyhexylacrylate, poly(D,L-lactic acid), poly(DL-lactic-co-glycolic acid (PLGA), alginate, and polyethyleneglycol (PEG). Oral formulations for dsRNAs and their preparation are described in detail in U.S. Pat. No. 6,887,906, U.S. 2003/0027780, and U.S. Pat. No. 6,747,014, each of which is incorporated herein by reference.

[0612] Compositions for pulmonary system delivery may include aqueous solutions, e.g., for intranasal or oral inhalative administration, suitable carriers composed of, e.g., lipids (liposomes, niosomes, microemulsions, lipidic micelles, solid lipid nanoparticles) or polymers (polymer micelles, dendrimers, polymeric nanoparticles, nonogels, nanocapsules), adjuvant, e.g., for oral inhalative administration. Aqueous compositions may be sterile and may optionally contain buffers, diluents, absorbtion enhancers and other suitable additives.

[0613] Compositions and formulations for parenteral, intraparenchymal (into the brain), intrathecal, intraventricular or intrahepatic administration can include sterile aqueous solutions which can also contain buffers, diluents and other suitable additives such as, but not limited to, penetration enhancers, carrier compounds and other pharmaceutically acceptable carriers or excipients.

[0614] Pharmaceutical compositions of the present disclosure include, but are not limited to, solutions, emulsions, and liposome-containing formulations. These compositions can be generated from a variety of components that include, but are not limited to, preformed liquids, self-emulsifying solids and self-emulsifying semisolids. Particularly preferred are formulations that target the brain when treating APP-associated diseases or disorders.

[0615] The pharmaceutical formulations of the present disclosure, which can conveniently be presented in unit dosage form, can be prepared according to conventional techniques well known in the pharmaceutical industry. Such techniques include the step of bringing into association the active ingredients with the pharmaceutical carrier(s) or excipient(s). In general, the formulations are prepared by uniformly and intimately bringing into association the active ingredients with liquid carriers or finely divided solid carriers or both, and then, if necessary, shaping the product.

[0616] The compositions of the present disclosure can be formulated into any of many possible dosage forms such as, but not limited to, tablets, capsules, gel capsules, liquid syrups, soft gels, suppositories, and enemas. The compositions of the present disclosure can also be formulated as suspensions in aqueous, non-aqueous or mixed media. Aqueous suspensions can further contain substances which increase the viscosity of the suspension including, for example, sodium carboxymethylcellulose, sorbitol or dextran. The suspension can also contain stabilizers.

[0617] Additional Formulations

[0618] i. Emulsions

[0619] The compositions of the present disclosure can be prepared and formulated as emulsions. Emulsions are typically heterogeneous systems of one liquid dispersed in another in the form of droplets usually exceeding 0.1 μm in diameter (see e.g., Ansel's Pharmaceutical Dosage Forms and Drug Delivery Systems, Allen, LV., Popovich N G., and Ansel H C., 2004, Lippincott Williams & Wilkins (8th ed.), New York, NY; Idson, in Pharmaceutical Dosage Forms, Lieberman, Rieger and Banker (Eds.), 1988, Marcel Dekker, Inc., New York, N.Y., volume 1, p. 199; Rosoff, in Pharmaceutical Dosage Forms, Lieberman, Rieger and Banker (Eds.), 1988, Marcel Dekker, Inc., New York, N.Y., Volume 1, p. 245; Block in Pharmaceutical Dosage Forms, Lieberman, Rieger and Banker (Eds.), 1988, Marcel Dekker, Inc., New York, N.Y., volume 2, p. 335; Higuchi et al., in Remington's Pharmaceutical Sciences, Mack Publishing Co., Easton, Pa., 1985, p. 301). Emulsions are often biphasic systems comprising two immiscible liquid phases intimately mixed and dispersed with each other. In general, emulsions can be of either the water-in-oil (w/o) or the oil-in-water (o/w) variety. When an aqueous phase is finely divided into and dispersed as minute droplets into a bulk oily phase, the resulting composition is called a water-in-oil (w/o) emulsion. Alternatively, when an oily phase is finely divided into and dispersed as minute droplets into a bulk aqueous phase, the resulting composition is called an oil-in-water (o/w) emulsion. Emulsions can contain additional components in addition to the dispersed phases, and the active drug which can be present as a solution in either aqueous phase, oily phase or itself as a separate phase. Pharmaceutical excipients such as emulsifiers, stabilizers, dyes, and anti-oxidants can also be present in emulsions as needed. Pharmaceutical emulsions can also be multiple emulsions that are comprised of more than two phases such as, for example, in the case of oil-in-water-in-oil (o/w/o) and water-in-oil-in-water (w/o/w) emulsions. Such complex formulations often provide certain advantages that simple binary emulsions do not. Multiple emulsions in which individual oil droplets of an o/w emulsion enclose small water droplets constitute a w/o/w emulsion. Likewise, a system of oil droplets enclosed in globules of water stabilized in an oily continuous phase provides an o/w/o emulsion.

[0620] Emulsions are characterized by little or no thermodynamic stability. Often, the dispersed or discontinuous phase of the emulsion is well dispersed into the external or continuous phase and maintained in this form through the means of emulsifiers or the viscosity of the formulation. Either of the phases of the emulsion can be a semisolid or a solid, as is the case of emulsion-style ointment bases and creams Other means of stabilizing emulsions entail the use of emulsifiers that can be incorporated into either phase of the emulsion. Emulsifiers can broadly be classified into four categories: synthetic surfactants, naturally occurring emulsifiers, absorption bases, and finely dispersed solids (see e.g., Ansel's Pharmaceutical Dosage Forms and Drug Delivery Systems, Allen, LV., Popovich N G., and Ansel H C., 2004, Lippincott Williams & Wilkins (8th ed.), New York, NY; Idson, in Pharmaceutical Dosage Forms, Lieberman, Rieger and Banker (Eds.), 1988, Marcel Dekker, Inc., New York, N.Y., volume 1, p. 199).

[0621] Synthetic surfactants, also known as surface active agents, have found wide applicability in the formulation of emulsions and have been reviewed in the literature (see e.g., Ansel's Pharmaceutical Dosage Forms and Drug Delivery Systems, Allen, LV., Popovich N G., and Ansel H C., 2004, Lippincott Williams & Wilkins (8th ed.), New York, NY; Rieger, in Pharmaceutical Dosage Forms, Lieberman, Rieger and Banker (Eds.), 1988, Marcel Dekker, Inc., New York, N.Y., volume 1, p. 285; Idson, in Pharmaceutical Dosage Forms, Lieberman, Rieger and Banker (Eds.), Marcel Dekker, Inc., New York, N.Y., 1988, volume 1, p. 199). Surfactants are typically amphiphilic and comprise a hydrophilic and a hydrophobic portion. The ratio of the hydrophilic to the hydrophobic nature of the surfactant has been termed the hydrophile/lipophile balance (HLB) and is a valuable tool in categorizing and selecting surfactants in the preparation of formulations. Surfactants can be classified into different classes based on the nature of the hydrophilic group: nonionic, anionic, cationic and amphoteric (see e.g., Ansel's Pharmaceutical Dosage Forms and Drug Delivery Systems, Allen, LV., Popovich N G., and Ansel H C., 2004, Lippincott Williams & Wilkins (8th ed.), New York, NY Rieger, in Pharmaceutical Dosage Forms, Lieberman, Rieger and Banker (Eds.), 1988, Marcel Dekker, Inc., New York, N.Y., volume 1, p. 285).

[0622] Naturally occurring emulsifiers used in emulsion formulations include lanolin, beeswax, phosphatides, lecithin and acacia. Absorption bases possess hydrophilic properties such that they can soak up water to form w/o emulsions yet retain their semisolid consistencies, such as anhydrous lanolin and hydrophilic petrolatum. Finely divided solids have also been used as good emulsifiers especially in combination with surfactants and in viscous preparations. These include polar inorganic solids, such as heavy metal hydroxides, nonswelling clays such as bentonite, attapulgite, hectorite, kaolin, montmorillonite, colloidal aluminum silicate and colloidal magnesium aluminum silicate, pigments and nonpolar solids such as carbon or glyceryl tristearate.

[0623] A large variety of non-emulsifying materials are also included in emulsion formulations and contribute to the properties of emulsions. These include fats, oils, waxes, fatty acids, fatty alcohols, fatty esters, humectants, hydrophilic colloids, preservatives and antioxidants (Block, in Pharmaceutical Dosage Forms, Lieberman, Rieger and Banker (Eds.), 1988, Marcel Dekker, Inc., New York, N.Y., volume 1, p. 335; Idson, in Pharmaceutical Dosage Forms, Lieberman, Rieger and Banker (Eds.), 1988, Marcel Dekker, Inc., New York, N.Y., volume 1, p. 199).

[0624] Hydrophilic colloids or hydrocolloids include naturally occurring gums and synthetic polymers such as polysaccharides (for example, acacia, agar, alginic acid, carrageenan, guar gum, karaya gum, and tragacanth), cellulose derivatives (for example, carboxymethylcellulose and carboxypropylcellulose), and synthetic polymers (for example, carbomers, cellulose ethers, and carboxyvinyl polymers). These disperse or swell in water to form colloidal solutions that stabilize emulsions by forming strong interfacial films around the dispersed-phase droplets and by increasing the viscosity of the external phase.

[0625] Since emulsions often contain a number of ingredients such as carbohydrates, proteins, sterols and phosphatides that can readily support the growth of microbes, these formulations often incorporate preservatives. Commonly used preservatives included in emulsion formulations include methyl paraben, propyl paraben, quaternary ammonium salts, benzalkonium chloride, esters of p-hydroxybenzoic acid, and boric acid. Antioxidants are also commonly added to emulsion formulations to prevent deterioration of the formulation. Antioxidants used can be free radical scavengers such as tocopherols, alkyl gallates, butylated hydroxyanisole, butylated hydroxytoluene, or reducing agents such as ascorbic acid and sodium metabisulfite, and antioxidant synergists such as citric acid, tartaric acid, and lecithin.

[0626] The application of emulsion formulations via dermatological, oral and parenteral routes and methods for their manufacture have been reviewed in the literature (see e.g., Ansel's Pharmaceutical Dosage Forms and Drug Delivery Systems, Allen, LV., Popovich N G., and Ansel H C., 2004, Lippincott Williams & Wilkins (8th ed.), New York, NY; Idson, in Pharmaceutical Dosage Forms, Lieberman, Rieger and Banker (Eds.), 1988, Marcel Dekker, Inc., New York, N.Y., volume 1, p. 199). Emulsion formulations for oral delivery have been very widely used because of ease of formulation, as well as efficacy from an absorption and bioavailability standpoint (see e.g., Ansel's Pharmaceutical Dosage Forms and Drug Delivery Systems, Allen, LV., Popovich N G., and Ansel H C., 2004, Lippincott Williams & Wilkins (8th ed.), New York, NY; Rosoff, in Pharmaceutical Dosage Forms, Lieberman, Rieger and Banker (Eds.), 1988, Marcel Dekker, Inc., New York, N.Y., volume 1, p. 245; Idson, in Pharmaceutical Dosage Forms, Lieberman, Rieger and Banker (Eds.), 1988, Marcel Dekker, Inc., New York, N.Y., volume 1, p. 199). Mineral-oil base laxatives, oil-soluble vitamins and high fat nutritive preparations are among the materials that have commonly been administered orally as o/w emulsions.

[0627] ii. Microemulsions

[0628] In one embodiment of the present disclosure, the compositions of RNAi agents and nucleic acids are formulated as microemulsions. A microemulsion can be defined as a system of water, oil and amphiphile which is a single optically isotropic and thermodynamically stable liquid solution (see e.g., Ansel's Pharmaceutical Dosage Forms and Drug Delivery Systems, Allen, LV., Popovich N G., and Ansel H C., 2004, Lippincott Williams & Wilkins (8th ed.), New York, NY; Rosoff, in Pharmaceutical Dosage Forms, Lieberman, Rieger and Banker (Eds.), 1988, Marcel Dekker, Inc., New York, N.Y., volume 1, p. 245). Typically, microemulsions are systems that are prepared by first dispersing an oil in an aqueous surfactant solution and then adding a sufficient amount of a fourth component, generally an intermediate chain-length alcohol to form a transparent system. Therefore, microemulsions have also been described as thermodynamically stable, isotropically clear dispersions of two immiscible liquids that are stabilized by interfacial films of surface-active molecules (Leung and Shah, in: Controlled Release of Drugs: Polymers and Aggregate Systems, Rosoff, M., Ed., 1989, VCH Publishers, New York, pages 185-215). Microemulsions commonly are prepared via a combination of three to five components that include oil, water, surfactant, cosurfactant and electrolyte. Whether the microemulsion is of the water-in-oil (w/o) or an oil-in-water (o/w) type is dependent on the properties of the oil and surfactant used, and on the structure and geometric packing of the polar heads and hydrocarbon tails of the surfactant molecules (Schott, in Remington's Pharmaceutical Sciences, Mack Publishing Co., Easton, Pa., 1985, p. 271).

[0629] The phenomenological approach utilizing phase diagrams has been extensively studied and has yielded a comprehensive knowledge, to one skilled in the art, of how to formulate microemulsions (see e.g., Ansel's Pharmaceutical Dosage Forms and Drug Delivery Systems, Allen, LV., Popovich N G., and Ansel H C., 2004, Lippincott Williams & Wilkins (8th ed.), New York, NY; Rosoff, in Pharmaceutical Dosage Forms, Lieberman, Rieger and Banker (Eds.), 1988, Marcel Dekker, Inc., New York, N.Y., volume 1, p. 245; Block, in Pharmaceutical Dosage Forms, Lieberman, Rieger and Banker (Eds.), 1988, Marcel Dekker, Inc., New York, N.Y., volume 1, p. 335). Compared to conventional emulsions, microemulsions offer the advantage of solubilizing water-insoluble drugs in a formulation of thermodynamically stable droplets that are formed spontaneously.

[0630] Surfactants used in the preparation of microemulsions include, but are not limited to, ionic surfactants, non-ionic surfactants, Brij 96, polyoxyethylene oleyl ethers, polyglycerol fatty acid esters, tetraglycerol monolaurate (ML310), tetraglycerol monooleate (MO310), hexaglycerol monooleate (PO310), hexaglycerol pentaoleate (PO500), decaglycerol monocaprate (MCA750), decaglycerol monooleate (MO750), decaglycerol sequioleate (SO750), decaglycerol decaoleate (DAO750), alone or in combination with cosurfactants. The cosurfactant, usually a short-chain alcohol such as ethanol, 1-propanol, and 1-butanol, serves to increase the interfacial fluidity by penetrating into the surfactant film and consequently creating a disordered film because of the void space generated among surfactant molecules. Microemulsions can, however, be prepared without the use of cosurfactants and alcohol-free self-emulsifying microemulsion systems are known in the art. The aqueous phase can typically be, but is not limited to, water, an aqueous solution of the drug, glycerol, PEG300, PEG400, polyglycerols, propylene glycols, and derivatives of ethylene glycol. The oil phase can include, but is not limited to, materials such as Captex 300, Captex 355, Capmul MCM, fatty acid esters, medium chain (C8-C12) mono, di, and tri-glycerides, polyoxyethylated glyceryl fatty acid esters, fatty alcohols, polyglycolized glycerides, saturated polyglycolized C8-C10 glycerides, vegetable oils and silicone oil.

[0631] Microemulsions are particularly of interest from the standpoint of drug solubilization and the enhanced absorption of drugs. Lipid based microemulsions (both o/w and w/o) have been proposed to enhance the oral bioavailability of drugs, including peptides (see e.g., U.S. Pat. Nos. 6,191,105; 7,063,860; 7,070,802; 7,157,099; Constantinides et al., Pharmaceutical Research, 1994, 11, 1385-1390; Ritschel, Meth. Find. Exp. Clin. Pharmacol., 1993, 13, 205). Microemulsions afford advantages of improved drug solubilization, protection of drug from enzymatic hydrolysis, possible enhancement of drug absorption due to surfactant-induced alterations in membrane fluidity and permeability, ease of preparation, ease of oral administration over solid dosage forms, improved clinical potency, and decreased toxicity (see e.g., U.S. Pat. Nos. 6,191,105; 7,063,860; 7,070,802; 7,157,099; Constantinides et al., Pharmaceutical Research, 1994, 11, 1385; Ho et al., J. Pharm. Sci., 1996, 85, 138-143). Often microemulsions can form spontaneously when their components are brought together at ambient temperature. This can be particularly advantageous when formulating thermolabile drugs, peptides or RNAi agents. Microemulsions have also been effective in the transdermal delivery of active components in both cosmetic and pharmaceutical applications. It is expected that the microemulsion compositions and formulations of the present disclosure will facilitate the increased systemic absorption of RNAi agents and nucleic acids from the gastrointestinal tract, as well as improve the local cellular uptake of RNAi agents and nucleic acids.

[0632] Microemulsions of the present disclosure can also contain additional components and additives such as sorbitan monostearate (Grill 3), Labrasol, and penetration enhancers to improve the properties of the formulation and to enhance the absorption of the RNAi agents and nucleic acids of the present disclosure. Penetration enhancers used in the microemulsions of the present disclosure can be classified as belonging to one of five broad categories—surfactants, fatty acids, bile salts, chelating agents, and non-chelating non-surfactants (Lee et al., Critical Reviews in Therapeutic Drug Carrier Systems, 1991, p. 92). Each of these classes has been discussed above.

[0633] iii. Microparticles

[0634] An RNAi agent of the disclosure may be incorporated into a particle, e.g., a microparticle. Microparticles can be produced by spray-drying, but may also be produced by other methods including lyophilization, evaporation, fluid bed drying, vacuum drying, or a combination of these techniques.

[0635] iv. Penetration Enhancers

[0636] In one embodiment, the present disclosure employs various penetration enhancers to effect the efficient delivery of nucleic acids, particularly RNAi agents, to the skin of animals. Most drugs are present in solution in both ionized and nonionized forms. However, usually only lipid soluble or lipophilic drugs readily cross cell membranes. It has been discovered that even non-lipophilic drugs can cross cell membranes if the membrane to be crossed is treated with a penetration enhancer. In addition to aiding the diffusion of non-lipophilic drugs across cell membranes, penetration enhancers also enhance the permeability of lipophilic drugs.

[0637] Penetration enhancers can be classified as belonging to one of five broad categories, i.e., surfactants, fatty acids, bile salts, chelating agents, and non-chelating non-surfactants (see e.g., Malmsten, M. Surfactants and polymers in drug delivery, Informa Health Care, New York, NY, 2002; Lee et al., Critical Reviews in Therapeutic Drug Carrier Systems, 1991, p. 92). Each of the above mentioned classes of penetration enhancers are described below in greater detail.

[0638] Surfactants (or “surface-active agents”) are chemical entities which, when dissolved in an aqueous solution, reduce the surface tension of the solution or the interfacial tension between the aqueous solution and another liquid, with the result that absorption of RNAi agents through the mucosa is enhanced. In addition to bile salts and fatty acids, these penetration enhancers include, for example, sodium lauryl sulfate, polyoxyethylene-9-lauryl ether and polyoxyethylene-20-cetyl ether) (see e.g., Malmsten, M. Surfactants and polymers in drug delivery, Informa Health Care, New York, NY, 2002; Lee et al., Critical Reviews in Therapeutic Drug Carrier Systems, 1991, p. 92); and perfluorochemical emulsions, such as FC-43. Takahashi et al., J. Pharm. Pharmacol., 1988, 40, 252).

[0639] Various fatty acids and their derivatives which act as penetration enhancers include, for example, oleic acid, lauric acid, capric acid (n-decanoic acid), myristic acid, palmitic acid, stearic acid, linoleic acid, linolenic acid, dicaprate, tricaprate, monoolein (1-monooleoyl-rac-glycerol), dilaurin, caprylic acid, arachidonic acid, glycerol 1-monocaprate, 1-dodecylazacycloheptan-2-one, acylcarnitines, acylcholines, C₁₋₂₀ alkyl esters thereof (e.g., methyl, isopropyl and t-butyl), and mono- and di-glycerides thereof (i.e., oleate, laurate, caprate, myristate, palmitate, stearate, linoleate, etc.) (see e.g., Touitou, E., et al. Enhancement in Drug Delivery, CRC Press, Danvers, M A, 2006; Lee et al., Critical Reviews in Therapeutic Drug Carrier Systems, 1991, p. 92; Muranishi, Critical Reviews in Therapeutic Drug Carrier Systems, 1990, 7, 1-33; El Hariri et al., J. Pharm. Pharmacol., 1992, 44, 651-654).

[0640] The physiological role of bile includes the facilitation of dispersion and absorption of lipids and fat-soluble vitamins (see e.g., Malmsten, M. Surfactants and polymers in drug delivery, Informa Health Care, New York, NY, 2002; Brunton, Chapter 38 in: Goodman & Gilman's The Pharmacological Basis of Therapeutics, 9th Ed., Hardman et al. Eds., McGraw-Hill, New York, 1996, pp. 934-935). Various natural bile salts, and their synthetic derivatives, act as penetration enhancers. Thus the term “bile salts” includes any of the naturally occurring components of bile as well as any of their synthetic derivatives. Suitable bile salts include, for example, cholic acid (or its pharmaceutically acceptable sodium salt, sodium cholate), dehydrocholic acid (sodium dehydrocholate), deoxycholic acid (sodium deoxycholate), glucholic acid (sodium glucholate), glycholic acid (sodium glycocholate), glycodeoxycholic acid (sodium glycodeoxycholate), taurocholic acid (sodium taurocholate), taurodeoxycholic acid (sodium taurodeoxycholate), chenodeoxycholic acid (sodium chenodeoxycholate), ursodeoxycholic acid (UDCA), sodium tauro-24,25-dihydro-fusidate (STDHF), sodium glycodihydrofusidate and polyoxyethylene-9-lauryl ether (POE) (see e.g., Malmsten, M. Surfactants and polymers in drug delivery, Informa Health Care, New York, NY, 2002; Lee et al., Critical Reviews in Therapeutic Drug Carrier Systems, 1991, page 92; Swinyard, Chapter 39 In: Remington's Pharmaceutical Sciences, 18th Ed., Gennaro, ed., Mack Publishing Co., Easton, Pa., 1990, pages 782-783; Muranishi, Critical Reviews in Therapeutic Drug Carrier Systems, 1990, 7, 1-33; Yamamoto et al., J. Pharm. Exp. Ther., 1992, 263, 25; Yamashita et al., J. Pharm. Sci., 1990, 79, 579-583).

[0641] Chelating agents, as used in connection with the present disclosure, can be defined as compounds that remove metallic ions from solution by forming complexes therewith, with the result that absorption of RNAi agents through the mucosa is enhanced. With regards to their use as penetration enhancers in the present disclosure, chelating agents have the added advantage of also serving as DNase inhibitors, as most characterized DNA nucleases require a divalent metal ion for catalysis and are thus inhibited by chelating agents (Jarrett, J. Chromatogr., 1993, 618, 315-339). Suitable chelating agents include but are not limited to disodium ethylenediaminetetraacetate (EDTA), citric acid, salicylates (e.g., sodium salicylate, 5-methoxysalicylate and homovanilate), N-acyl derivatives of collagen, laureth-9 and N-amino acyl derivatives of beta-diketones (enamines)(see e.g., Katdare, A. et al., Excipient development for pharmaceutical, biotechnology, and drug delivery, CRC Press, Danvers, M A, 2006; Lee et al., Critical Reviews in Therapeutic Drug Carrier Systems, 1991, page 92; Muranishi, Critical Reviews in Therapeutic Drug Carrier Systems, 1990, 7, 1-33; Buur et al., J. Control Rd., 1990, 14, 43-51).

[0642] As used herein, non-chelating non-surfactant penetration enhancing compounds can be defined as compounds that demonstrate insignificant activity as chelating agents or as surfactants but that nonetheless enhance absorption of RNAi agents through the alimentary mucosa (see e.g., Muranishi, Critical Reviews in Therapeutic Drug Carrier Systems, 1990, 7, 1-33). This class of penetration enhancers includes, for example, unsaturated cyclic ureas, 1-alkyl- and 1-alkenylazacyclo-alkanone derivatives (Lee et al., Critical Reviews in Therapeutic Drug Carrier Systems, 1991, page 92); and non-steroidal anti-inflammatory agents such as diclofenac sodium, indomethacin and phenylbutazone (Yamashita et al., J. Pharm. Pharmacol., 1987, 39, 621-626).

[0643] Agents that enhance uptake of RNAi agents at the cellular level can also be added to the pharmaceutical and other compositions of the present disclosure. For example, cationic lipids, such as lipofectin (Junichi et al, U.S. Pat. No. 5,705,188), cationic glycerol derivatives, and polycationic molecules, such as polylysine (WO 97/30731), are also known to enhance the cellular uptake of dsRNAs.

[0644] Other agents can be utilized to enhance the penetration of the administered nucleic acids, including glycols such as ethylene glycol and propylene glycol, pyrrols such as 2-pyrrol, azones, and terpenes such as limonene and menthone.

[0645] vi. Excipients

[0646] In contrast to a carrier compound, a “pharmaceutical carrier” or “excipient” is a pharmaceutically acceptable solvent, suspending agent or any other pharmacologically inert vehicle for delivering one or more nucleic acids to an animal. The excipient can be liquid or solid and is selected, with the planned manner of administration in mind, so as to provide for the desired bulk, consistency, etc., when combined with a nucleic acid and the other components of a given pharmaceutical composition. Typical pharmaceutical carriers include, but are not limited to, binding agents (e.g., pregelatinized maize starch, polyvinylpyrrolidone or hydroxypropyl methylcellulose, etc.); fillers (e.g., lactose and other sugars, microcrystalline cellulose, pectin, gelatin, calcium sulfate, ethyl cellulose, polyacrylates or calcium hydrogen phosphate, etc.); lubricants (e.g., magnesium stearate, talc, silica, colloidal silicon dioxide, stearic acid, metallic stearates, hydrogenated vegetable oils, corn starch, polyethylene glycols, sodium benzoate, sodium acetate, etc.); disintegrants (e.g., starch, sodium starch glycolate, etc.); and wetting agents (e.g., sodium lauryl sulphate, etc).

[0647] Pharmaceutically acceptable organic or inorganic excipients suitable for non-parenteral administration which do not deleteriously react with nucleic acids can also be used to formulate the compositions of the present disclosure. Suitable pharmaceutically acceptable carriers include, but are not limited to, water, salt solutions, alcohols, polyethylene glycols, gelatin, lactose, amylose, magnesium stearate, talc, silicic acid, viscous paraffin, hydroxymethylcellulose, polyvinylpyrrolidone and the like.

[0648] Formulations for topical administration of nucleic acids can include sterile and non-sterile aqueous solutions, non-aqueous solutions in common solvents such as alcohols, or solutions of the nucleic acids in liquid or solid oil bases. The solutions can also contain buffers, diluents and other suitable additives. Pharmaceutically acceptable organic or inorganic excipients suitable for non-parenteral administration which do not deleteriously react with nucleic acids can be used.

[0649] Suitable pharmaceutically acceptable excipients include, but are not limited to, water, salt solutions, alcohol, polyethylene glycols, gelatin, lactose, amylose, magnesium stearate, talc, silicic acid, viscous paraffin, hydroxymethylcellulose, polyvinylpyrrolidone and the like.

[0650] vii. Other Components

[0651] The compositions of the present disclosure can additionally contain other adjunct components conventionally found in pharmaceutical compositions, at their art-established usage levels. Thus, for example, the compositions can contain additional, compatible, pharmaceutically-active materials such as, for example, antipruritics, astringents, local anesthetics or anti-inflammatory agents, or can contain additional materials useful in physically formulating various dosage forms of the compositions of the present disclosure, such as dyes, flavoring agents, preservatives, antioxidants, opacifiers, thickening agents and stabilizers. However, such materials, when added, should not unduly interfere with the biological activities of the components of the compositions of the present disclosure. The formulations can be sterilized and, if desired, mixed with auxiliary agents, e.g., lubricants, preservatives, stabilizers, wetting agents, emulsifiers, salts for influencing osmotic pressure, buffers, colorings, flavorings or aromatic substances and the like which do not deleteriously interact with the nucleic acid(s) of the formulation.

[0652] Aqueous suspensions can contain substances which increase the viscosity of the suspension including, for example, sodium carboxymethylcellulose, sorbitol or dextran. The suspension can also contain stabilizers.

[0653] In some embodiments, pharmaceutical compositions featured in the disclosure include (a) one or more RNAi agents and (b) one or more agents which function by a non-RNAi mechanism and which are useful in treating a MUC5B-associated disorder. Examples of such agents include, but are not limited to an antiviral agent, an immune stimulator, a therapeutic vaccine, a viral entry inhibitor, and a combination of any of the foregoing.

[0654] Toxicity and therapeutic efficacy of such compounds can be determined by standard pharmaceutical procedures in cell cultures or experimental animals, e.g., for determining the LD 50 (the dose lethal to 50% of the population) and the ED 50 (the dose therapeutically effective in 50% of the population). The dose ratio between toxic and therapeutic effects is the therapeutic index and it can be expressed as the ratio LD₅₀/ED₅₀. Compounds that exhibit high therapeutic indices are preferred.

[0655] The data obtained from cell culture assays and animal studies can be used in formulating a range of dosage for use in humans. The dosage of compositions featured herein in the disclosure lies generally within a range of circulating concentrations that include the ED 50 with little or no toxicity. The dosage can vary within this range depending upon the dosage form employed and the route of administration utilized. For any compound used in the methods featured in the disclosure, the therapeutically effective dose can be estimated initially from cell culture assays. A dose can be formulated in animal models to achieve a circulating plasma concentration range of the compound or, when appropriate, of the polypeptide product of a target sequence (e.g., achieving a decreased concentration of the polypeptide) that includes the IC 50 (i.e., the concentration of the test compound which achieves a half-maximal inhibition of symptoms) as determined in cell culture. Such information can be used to more accurately determine useful doses in humans. Levels in plasma can be measured, for example, by high performance liquid chromatography.

[0656] In addition to their administration, as discussed above, the RNAi agents featured in the disclosure can be administered in combination with other known agents effective in treatment of pathological processes mediated by nucleotide repeat expression. In any event, the administering physician can adjust the amount and timing of RNAi agent administration on the basis of results observed using standard measures of efficacy known in the art or described herein.

### VII. Kits

[0657] In certain aspects, the instant disclosure provides kits that include a suitable container containing a pharmaceutical formulation of a siRNA compound, e.g., a double-stranded siRNA compound, or siRNA compound, (e.g., a precursor, e.g., a larger siRNA compound which can be processed into a siRNA compound, or a DNA which encodes an siRNA compound, e.g., a double-stranded siRNA compound, or siRNA compound, or precursor thereof). In certain embodiments the individual components of the pharmaceutical formulation may be provided in one container. Alternatively, it may be desirable to provide the components of the pharmaceutical formulation separately in two or more containers, e.g., one container for a siRNA compound preparation, and at least another for a carrier compound. The kit may be packaged in a number of different configurations such as one or more containers in a single box. The different components can be combined, e.g., according to instructions provided with the kit. The components can be combined according to a method described herein, e.g., to prepare and administer a pharmaceutical composition. The kit can also include a delivery device, such as a device suitable for pulmonary administration, e.g., a device suitable for oral inhalative administration including nebulizers, metered-dose inhalers, and dry powder inhalers.

### VIII. Methods for Inhibiting MUC5B Expression

[0658] The present disclosure also provides methods of inhibiting expression of a MUC5B gene in a cell. The methods include contacting a cell with an RNAi agent, e.g., double stranded RNAi agent, in an amount effective to inhibit expression of a MUC5B gene in the cell, thereby inhibiting expression of MUC5B in the cell. In certain embodiments of the disclosure, expression of a MUC5B gene is inhibited preferentially in the pulmonary system (e.g., lung, bronchial, alveoli) cells. In other embodiments of the disclosure, expression of a MUC5B gene is inhibited preferentially in the liver (e.g., hepatocytes). In certain embodiments of the disclosure, expression of a MUC5B gene is inhibited in the pulmonary system (e.g., lung, bronchial, alveoli) cells and in liver (e.g., hepatocytes) cells.

[0659] Contacting of a cell with a RNAi agent, e.g., a double stranded RNAi agent, may be done in vitro or in vivo. Contacting a cell in vivo with the RNAi agent includes contacting a cell or group of cells within a subject, e.g., a human subject, with the RNAi agent. Combinations of in vitro and in vivo methods of contacting a cell are also possible.

[0660] Contacting a cell may be direct or indirect, as discussed above. Furthermore, contacting a cell may be accomplished via a targeting ligand, including any ligand described herein or known in the art. In some embodiments, the targeting ligand is a lipophilic moiety, e.g., a C16, and/or a carbohydrate moiety, e.g., a GalNAc ligand, or any other ligand that directs the RNAi agent to a site of interest. In certain embodiments, the ligand is not a cholesterol moiety. In certain embodiments, the RNAi agent does not include a targeting ligand.

[0661] The term “inhibiting,” as used herein, is used interchangeably with “reducing,” “silencing,” “downregulating,” “suppressing” and other similar terms, and includes any level of inhibition. In certain embodiments, a level of inhibition, e.g., for an RNAi agent of the instant disclosure, can be assessed in cell culture conditions, e.g., wherein cells in cell culture are transfected via Lipofectamine™-mediated transfection at a concentration in the vicinity of a cell of 10 nM or less, 1 nM or less, etc. Knockdown of a given RNAi agent can be determined via comparison of pre-treated levels in cell culture versus post-treated levels in cell culture, optionally also comparing against cells treated in parallel with a scrambled or other form of control RNAi agent. Knockdown in cell culture of, e.g., preferably 50% or more, can thereby be identified as indicative of “inhibiting” or “reducing”, “downregulating” or “suppressing”, etc. having occurred. It is expressly contemplated that assessment of targeted mRNA or encoded protein levels (and therefore an extent of “inhibiting”, etc. caused by a RNAi agent of the disclosure) can also be assessed in in vivo systems for the RNAi agents of the instant disclosure, under properly controlled conditions as described in the art.

[0662] The phrase “inhibiting expression of a MUC5B gene” or “inhibiting expression of MUC5B,” as used herein, includes inhibition of expression of any MUC5B gene (such as, e.g., a mouse MUC5B gene, a rat MUC5B gene, a monkey MUC5B gene, or a human MUC5B gene) as well as variants or mutants of a MUC5B gene that encode a MUC5B protein. Thus, the MUC5B gene may be a wild-type MUC5B gene, a mutant MUC5B gene, or a transgenic MUC5B gene in the context of a genetically manipulated cell, group of cells, or organism.

[0663] “Inhibiting expression of a MUC5B gene” includes any level of inhibition of a MUC5B gene, e.g., at least partial suppression of the expression of a MUC5B gene, such as an inhibition by at least 20%. In certain embodiments, inhibition is by at least 30%, at least 40%, preferably at least 50%, at least about 60%, at least 70%, at least about 80%, at least 85%, at least 90%, at least 95%, at least 96%, at least 97%, at least 98%, or at least 99%; or to below the level of detection of the assay method. In a preferred method, inhibition is measured at a 10 nM concentration of the siRNA using the luciferase assay provided in Example 1.

[0664] The expression of a MUC5B gene may be assessed based on the level of any variable associated with MUC5B gene expression, e.g., MUC5B mRNA level or MUC5B protein level.

[0665] Inhibition may be assessed by a decrease in an absolute or relative level of one or more of these variables compared with a control level. The control level may be any type of control level that is utilized in the art, e.g., a pre-dose baseline level, or a level determined from a similar subject, cell, or sample that is untreated or treated with a control (such as, e.g., buffer only control or inactive agent control).

[0666] In some embodiments of the methods of the disclosure, expression of a MUC5B gene is inhibited by at least 20%, 30%, 40%, preferably at least 50%, 60%, 70%, 80%, 85%, 90%, or 95%, or to below the level of detection of the assay. In certain embodiments, the methods include a clinically relevant inhibition of expression of MUC5B, e.g. as demonstrated by a clinically relevant outcome after treatment of a subject with an agent to reduce the expression of a MUC5B gene.

[0667] Inhibition of the expression of a MUC5B gene may be manifested by a reduction of the amount of mRNA expressed by a first cell or group of cells (such cells may be present, for example, in a sample derived from a subject) in which a MUC5B gene is transcribed and which has or have been treated (e.g., by contacting the cell or cells with a RNAi agent of the disclosure, or by administering a RNAi agent of the disclosure to a subject in which the cells are or were present) such that the expression of a MUC5B gene is inhibited, as compared to a second cell or group of cells substantially identical to the first cell or group of cells but which has not or have not been so treated (control cell(s) not treated with a RNAi agent or not treated with a RNAi agent targeted to the genome of interest). The degree of inhibition may be expressed in terms of:

$$\frac{( mRNA in control cells ) - ( mRNA in treated cells )}{( mRNA in control cells )} \cdot 100 \%$$

[0668] In other embodiments, inhibition of the expression of a MUC5B gene may be assessed in terms of a reduction of a parameter that is functionally linked to a MUC5B gene expression, e.g., MUC5B protein expression, S protein priming, efficiency of viral entry, viral load. MUC5B gene silencing may be determined in any cell expressing a MUC5B gene, either endogenous or heterologous from an expression construct, and by any assay known in the art.

[0669] Inhibition of the expression of a MUC5B protein may be manifested by a reduction in the level of the MUC5B protein that is expressed by a cell or group of cells (e.g., the level of protein expressed in a sample derived from a subject). As explained above, for the assessment of genome suppression, the inhibition of protein expression levels in a treated cell or group of cells may similarly be expressed as a percentage of the level of protein in a control cell or group of cells.

[0670] A control cell or group of cells that may be used to assess the inhibition of the expression of a MUC5B gene includes a cell or group of cells that has not yet been contacted with an RNAi agent of the disclosure. For example, the control cell or group of cells may be derived from an individual subject (e.g., a human or animal subject) prior to treatment of the subject with an RNAi agent.

[0671] The level of MUC5B mRNA that is expressed by a cell or group of cells may be determined using any method known in the art for assessing RNA expression. In one embodiment, the level of expression of MUC5B in a sample is determined by detecting a transcribed polynucleotide, or portion thereof, e.g., mRNA of the MUC5B gene. RNA may be extracted from cells using RNA extraction techniques including, for example, using acid phenol/guanidine isothiocyanate extraction (RNAzol B; Biogenesis), RNeasy™ RNA preparation kits (Qiagen®) or PAXgene (PreAnalytix, Switzerland). Typical assay formats utilizing ribonucleic acid hybridization include nuclear run-on assays, RT-PCR, RNase protection assays, northern blotting, in situ hybridization, and microarray analysis. Circulating MUC5B mRNA may be detected using methods the described in WO2012/177906, the entire contents of which are hereby incorporated herein by reference.

[0672] In some embodiments, the level of expression of MUC5B is determined using a nucleic acid probe. The term “probe”, as used herein, refers to any molecule that is capable of selectively binding to a specific MUC5B nucleic acid or protein, or fragment thereof. Probes can be synthesized by one of skill in the art, or derived from appropriate biological preparations. Probes may be specifically designed to be labeled. Examples of molecules that can be utilized as probes include, but are not limited to, RNA, DNA, proteins, antibodies, and organic molecules.

[0673] Isolated mRNA can be used in hybridization or amplification assays that include, but are not limited to, Southern or northern analyses, polymerase chain reaction (PCR) analyses and probe arrays. One method for the determination of RNA levels involves contacting the isolated RNA with a nucleic acid molecule (probe) that can hybridize to MUC5B RNA. In one embodiment, the RNA is immobilized on a solid surface and contacted with a probe, for example by running the isolated RNA on an agarose gel and transferring the RNA from the gel to a membrane, such as nitrocellulose. In an alternative embodiment, the probe(s) are immobilized on a solid surface and the RNA is contacted with the probe(s), for example, in an Affymetrix gene chip array. A skilled artisan can readily adapt known RNA detection methods for use in determining the level of MUC5B mRNA.

[0674] An alternative method for determining the level of expression of MUC5B in a sample involves the process of nucleic acid amplification or reverse transcriptase (to prepare cDNA) of for example mRNA in the sample, e.g., by RT-PCR (the experimental embodiment set forth in Mullis, 1987, U.S. Pat. No. 4,683,202), ligase chain reaction (Barany (1991) Proc. Natl. Acad. Sci. USA 88:189-193), self sustained sequence replication (Guatelli et al. (1990) Proc. Natl. Acad. Sci. USA 87:1874-1878), transcriptional amplification system (Kwoh et al. (1989) Proc. Natl. Acad. Sci. USA 86:1173-1177), Q-Beta Replicase (Lizardi et al. (1988) Bio/Technology 6:1197), rolling circle replication (Lizardi et al., U.S. Pat. No. 5,854,033) or any other nucleic acid amplification method, followed by the detection of the amplified molecules using techniques well known to those of skill in the art. These detection schemes are especially useful for the detection of nucleic acid molecules if such molecules are present in very low numbers. In particular aspects of the disclosure, the level of expression of MUC5B is determined by quantitative fluorogenic RT-PCR (i.e., the TaqMan™ System), by a Dual-Glo® Luciferase assay, or by other art-recognized method for measurement of MUC5B expression or mRNA level.

[0675] The expression level of MUC5B mRNA may be monitored using a membrane blot (such as used in hybridization analysis such as northern, Southern, dot, and the like), or microwells, sample tubes, gels, beads or fibers (or any solid support comprising bound nucleic acids). See U.S. Pat. Nos. 5,770,722, 5,874,219, 5,744,305, 5,677,195 and 5,445,934, which are incorporated herein by reference. The determination of MUC5B expression level may also comprise using nucleic acid probes in solution.

[0676] In some embodiments, the level of RNA expression is assessed using branched DNA (bDNA) assays or real time PCR (qPCR). The use of this PCR method is described and exemplified in the Examples presented herein. Such methods can also be used for the detection of MUC5B nucleic acids.

[0677] The level of MUC5B protein expression may be determined using any method known in the art for the measurement of protein levels. Such methods include, for example, electrophoresis, capillary electrophoresis, high performance liquid chromatography (HPLC), thin layer chromatography (TLC), hyperdiffusion chromatography, fluid or gel precipitin reactions, absorption spectroscopy, a colorimetric assays, spectrophotometric assays, flow cytometry, immunodiffusion (single or double), immunoelectrophoresis, western blotting, radioimmunoassay (RIA), enzyme-linked immunosorbent assays (ELIS As), immunofluorescent assays, electrochemiluminescence assays, and the like. Such assays can also be used for the detection of proteins indicative of the presence or replication of MUC5B proteins.

[0678] In some embodiments, the efficacy of the methods of the disclosure in the treatment of a MUC5B-related disease is assessed by a decrease in MUC5B mRNA level (e.g, by assessment of a MUC5B level, e.g., in the lung, by biopsy, or otherwise, e.g., sputum sample or nasal swab).

[0679] In some embodiments, the efficacy of the methods of the disclosure in the treatment of a MUC5B-related disease is assessed by a decrease in MUC5B mRNA level (e.g, by assessment of a liver sample for MUC5B level, by biopsy, or otherwise).

[0680] In some embodiments of the methods of the disclosure, the RNAi agent is administered to a subject such that the RNAi agent is delivered to a specific site within the subject. The inhibition of expression of MUC5B may be assessed using measurements of the level or change in the level of MUC5B mRNA or MUC5B protein in a sample derived from a specific site within the subject, e.g., lung and/or liver cells or fluid sample from the respiratory system. In certain embodiments, the methods include a clinically relevant inhibition of expression of MUC5B, e.g. as demonstrated by a clinically relevant outcome after treatment of a subject with an agent to reduce the expression of MUC5B.

[0681] As used herein, the terms detecting or determining a level of an analyte are understood to mean performing the steps to determine if a material, e.g., protein, RNA, is present. As used herein, methods of detecting or determining include detection or determination of an analyte level that is below the level of detection for the method used.

### IX. Methods of Treating or Preventing MUC5B-Associated Diseases

[0682] The present disclosure also provides methods of using a RNAi agent of the disclosure or a composition containing a RNAi agent of the disclosure to reduce or inhibit MUC5B expression in a cell, such as a cell in the respiratory system. The methods include contacting the cell with a dsRNA of the disclosure and maintaining the cell for a time sufficient to obtain degradation of the mRNA transcripts of a MUC5B gene, thereby inhibiting expression of the MUC5B gene in the cell. Reduction in gene expression can be assessed by any methods known in the art. For example, a reduction in the expression of MUC5B may be determined by determining the mRNA expression level of a MUC5B gene using methods routine to one of ordinary skill in the art, e.g., northern blotting, qRT-PCR; by determining the protein level of a MUC5B protein using methods routine to one of ordinary skill in the art, such as western blotting, immunological techniques.

[0683] In the methods of the disclosure the cell may be contacted in vitro or in vivo, i.e., the cell may be within a subject.

[0684] A cell suitable for treatment using the methods of the disclosure may be any cell that expresses a MUC5B gene, such as a cell in the respiratory system that expresses MUC5B. A cell suitable for use in the methods of the disclosure may be a mammalian cell, e.g., a primate cell (such as a human cell or a non-human primate cell, e.g., a monkey cell or a chimpanzee cell), a non-primate cell (such as a rat cell, or a mouse cell. In one embodiment, the cell is a human cell, e.g., a human lung cell. In one embodiment, the cell is a human cell, e.g., a human liver cell. In one embodiment, the cell is a human cell, e.g., a human lung cell and a human liver cell. MUC5B expression is inhibited in the cell by at least about 30, 40, 50, 55, 60, 65, 70, 75, 80, 90, 95, 96, 97, 98, 99, or about 100%, i.e., to below the level of detection. In preferred embodiments, MUC5B expression is inhibited by at least 50%.

[0685] The in vivo methods of the disclosure may include administering to a subject a composition containing a RNAi agent, where the RNAi agent includes a nucleotide sequence that is complementary to at least a part of an RNA transcript of the MUC5B gene of the subject to be treated. When the organism to be treated is a mammal such as a human, the composition can be administered by any means known in the art including, but not limited to oral, intraperitoneal, or parenteral routes, including intracranial (e.g., intraventricular, intraparenchymal, and intrathecal), intravenous, intramuscular, subcutaneous, transdermal, airway (aerosol), nasal, rectal, and topical (including buccal and sublingual) administration. In certain embodiments, the compositions are administered by intravenous infusion or injection. In certain embodiments, the compositions are administered by subcutaneous injection. In certain embodiments, the compositions are administered by pulmonary delivery, e.g., oral inhalation or intranasal delivery.

[0686] In some embodiments, the administration is via a depot injection. A depot injection may release the RNAi agent in a consistent way over a prolonged time period. Thus, a depot injection may reduce the frequency of dosing needed to obtain a desired effect, e.g., a desired inhibition of MUC5B, or a therapeutic or prophylactic effect. A depot injection may also provide more consistent serum concentrations. Depot injections may include subcutaneous injections or intramuscular injections. In preferred embodiments, the depot injection is a subcutaneous injection.

[0687] In one embodiment, the double-stranded RNAi agent is administered by pulmonary system administration, e.g., intranasal administration or oral inhalative administration. Pulmonary system administration may be via a syringe, a dropper, atomization, or use of device, e.g., a passive breath driven or active power driven single/-multiple dose dry powder inhaler (DPI) device.

[0688] The mode of administration may be chosen based upon whether local or systemic treatment is desired and based upon the area to be treated. The route and site of administration may be chosen to enhance targeting.

[0689] In one aspect, the present disclosure also provides methods for inhibiting the expression of a MUC5B gene in a mammal. The methods include administering to the mammal a composition comprising a dsRNA that targets a MUC5B gene in a cell of the mammal and maintaining the mammal for a time sufficient to obtain degradation of the RNA transcript of the MUC5B gene, thereby inhibiting expression of the MUC5B gene in the cell. Reduction in genome expression can be assessed by any methods known it the art and by methods, e.g. qRT-PCR, described herein. Reduction in protein production can be assessed by any methods known it the art and by methods, e.g. ELISA, described herein. In one embodiment, a lung biopsy sample serves as the tissue material for monitoring the reduction in MUC5B gene or protein expression (or of a proxy therefore).

[0690] The present disclosure further provides methods of treatment of a subject in need thereof. The treatment methods of the disclosure include administering an RNAi agent of the disclosure to a subject, e.g., a subject that would benefit from inhibition of MUC5B expression, in a therapeutically effective amount of a RNAi agent targeting a MUC5B gene or a pharmaceutical composition comprising a RNAi agent targeting a MUC5B gene.

[0691] In addition, the present disclosure provides methods of preventing, treating or inhibiting the progression of a MUC5B-associated disease or disorder, e.g., a lung disease, e.g., cystic fibrosis, chronic obstructive pulmonary disease (COPD), and/or pulmonary fibrosis, e.g., idiopathic pulmonary fibrosis (IPF).

[0692] The methods include administering to the subject a therapeutically effective amount of any of the RNAi agent, e.g., dsRNA agents, or the pharmaceutical composition provided herein, thereby preventing, treating, or inhibiting the progression of the MUC5B-associated disease or disorder in the subject, such as IPF.

[0693] An RNAi agent of the disclosure may be administered as a “free RNAi agent.” A free RNAi agent is administered in the absence of a pharmaceutical composition. The naked RNAi agent may be in a suitable buffer solution. The buffer solution may comprise acetate, citrate, prolamine, carbonate, or phosphate, or any combination thereof. In one embodiment, the buffer solution is phosphate buffered saline (PBS). The pH and osmolarity of the buffer solution containing the RNAi agent can be adjusted such that it is suitable for administering to a subject. In certain embodiments, the free RNAi agent may be formulated in water or normal saline.

[0694] Alternatively, an RNAi agent of the disclosure may be administered as a pharmaceutical composition, such as a dsRNA liposomal formulation.

[0695] Subjects that would benefit from a reduction or inhibition of MUC5B gene expression are those having a MUC5B-associated disease, subjects at risk of developing a MUC5B-associate disease.

[0696] The disclosure further provides methods for the use of a RNAi agent or a pharmaceutical composition thereof, e.g., for treating a subject that would benefit from reduction or inhibition of MUC5B expression, e.g., a subject having a MUC5B-associated disorder, in combination with other pharmaceuticals or other therapeutic methods, e.g., with known pharmaceuticals or known therapeutic methods, such as, for example, those which are currently employed for treating these disorders. For example, in certain embodiments, an RNAi agent targeting MUC5B is administered in combination with, e.g., an agent useful in treating a MUC5B-associated disorder as described elsewhere herein or as otherwise known in the art. For example, additional agents and treatments suitable for treating a subject that would benefit from reduction in MUC5B expression, e.g., a subject having a MUC5B-associated disorder, may include agents currently used to treat symptoms of MUC5B-associated disorder. The RNAi agent and additional therapeutic agents may be administered at the same time or in the same combination, e.g., via pulmonary system administration, or the additional therapeutic agent can be administered as part of a separate composition or at separate times or by another method known in the art or described herein.

[0697] Exemplary additional therapeutics and treatments include, for example, an anti-inflammatory agent (e.g., a systemic corticosteroid (e.g., prednisone), an immune modulator (e.g., an immunosuppressant agents (e.g., azathioprine, cyclophosphamide), a phosphodiesterase-5 inhibitor, a tyrosine kinase inhibitor (e.g., nintedanib), an antifibrotic agent (e.g., pirfenidone), and a combination of any of the foregoing.

[0698] In one embodiment, the method includes administering a composition featured herein such that expression of the target MUC5B gene is decreased, for at least one month. In preferred embodiments, expression is decreased for at least 2 months, 3 months, or 6 months.

[0699] In certain embodiments, administration includes a loading dose administered at a higher frequency, e.g., once per day, twice per week, once per week, for an initial dosing period, e.g., 2-4 doses.

[0700] Preferably, the RNAi agents useful for the methods and compositions featured herein specifically target RNAs (primary or processed) of the target MUC5B gene. Compositions and methods for inhibiting the expression of these genes using RNAi agents can be prepared and performed as described herein.

[0701] Administration of the dsRNA according to the methods of the disclosure may result in a reduction of the severity, signs, symptoms, or markers of such diseases or disorders in a patient with a MUC5B-associated disorder. By “reduction” in this context is meant a statistically significant or clinically significant decrease in such level. The reduction can be, for example, at least 5%, 10%, 15%, 20%, 25%, 30%, 35%, 40%, 45%, 50%, 55%, 60%, 65%, 70%, 75%, 80%, 85%, 90%, 95%, or about 100%.

[0702] Efficacy of treatment or prevention of disease can be assessed, for example by measuring disease progression, disease remission, symptom severity, reduction in pain, quality of life, dose of a medication required to sustain a treatment effect, level of a disease marker or any other measurable parameter appropriate for a given disease being treated or targeted for prevention. It is well within the ability of one skilled in the art to monitor efficacy of treatment or prevention by measuring any one of such parameters, or any combination of parameters. It is well within the ability of one skilled in the art to monitor efficacy of treatment or prevention by measuring any one of such parameters, or any combination of parameters. In connection with the administration of a RNAi agent targeting MUC5B or pharmaceutical composition thereof, “effective against” a MUC5B-associated disorder indicates that administration in a clinically appropriate manner results in a beneficial effect for at least a statistically significant fraction of patients, such as an improvement of symptoms, a cure, a reduction in disease, extension of life, improvement in quality of life, or other effect generally recognized as positive by medical doctors familiar with treating MUC5B-associated disorders and the related causes.

[0703] A treatment or preventive effect is evident when there is a statistically significant improvement in one or more parameters of disease status, or by a failure to worsen or to develop symptoms where they would otherwise be anticipated. As an example, a favorable change of at least 10% in a measurable parameter of disease, and preferably at least 20%, 30%, 40%, 50%, or more can be indicative of effective treatment. Efficacy for a given RNAi agent drug or formulation of that drug can also be judged using an experimental animal model for the given disease as known in the art. When using an experimental animal model, efficacy of treatment is evidenced when a statistically significant reduction in a marker or symptom is observed.

[0704] Alternatively, the efficacy can be measured by a reduction in the severity of disease as determined by one skilled in the art of diagnosis based on a clinically accepted disease severity grading scale. Any positive change resulting in e.g., lessening of severity of disease measured using the appropriate scale, represents adequate treatment using a RNAi agent or RNAi agent formulation as described herein.

[0705] Subjects can be administered a therapeutic amount of dsRNA, such as about 0.01 mg/kg to about 200 mg/kg.

[0706] The RNAi agent can be administered via the pulmonary system over a period of time, on a regular basis. In certain embodiments, after an initial treatment regimen, the treatments can be administered on a less frequent basis. Administration of the RNAi agent can reduce MUC5B levels, e.g., in a cell, tissue, blood, lung sample or other compartment of the patient by at least 20%, 30%, 40%, 50%, 55%, 60%, 65%, 70,% 75%, 80%, 85%, 90%, 95%, 96%, 97%, 98%, or at least about 99% or more. In a preferred embodiment, administration of the RNAi agent can reduce MUC5B levels, e.g., in a cell, tissue, blood, pulmonary system sample or other compartment of the patient by at least 50%.

[0707] Before administration of a full dose of the RNAi agent, patients can be administered a smaller dose, such as a 5% infusion reaction, and monitored for adverse effects, such as an allergic reaction. In another example, the patient can be monitored for unwanted immunostimulatory effects, such as increased cytokine (e.g., TNF-alpha or INF-alpha) levels.

[0708] Alternatively, the RNAi agent can be administered by pulmonary administration or subcutaneously, i.e., by subcutaneous injection. One or more injections may be used to deliver the desired, e.g., monthly dose of RNAi agent to a subject. The injections may be repeated over a period of time. The administration may be repeated on a regular basis. In certain embodiments, after an initial treatment regimen, the treatments can be administered on a less frequent basis. A repeat-dose regimine may include administration of a therapeutic amount of RNAi agent on a regular basis, such as monthly or extending to once a quarter, twice per year, once per year. In certain embodiments, the RNAi agent is administered about once per month to about once per quarter (i.e., about once every three months).

[0709] Unless otherwise defined, all technical and scientific terms used herein have the same meaning as commonly understood by one of ordinary skill in the art to which this invention belongs. Although methods and materials similar or equivalent to those described herein can be used in the practice or testing of the RNAi agents and methods featured in the invention, suitable methods and materials are described below. All publications, patent applications, patents, and other references mentioned herein are incorporated by reference in their entirety. In case of conflict, the present specification, including definitions, will control. In addition, the materials, methods, and examples are illustrative only and not intended to be limiting.

[0710] An informal Sequence Listing is filed herewith and forms part of the specification as filed.

[0711] This invention is further illustrated by the following examples which should not be construed as limiting. The entire contents of all references, patents and published patent applications cited throughout this application, as well as the Figures and the Sequence Listing, are hereby incorporated herein by reference.

### EXAMPLES

### Example 1. iRNA Synthesis

### Source of Reagents

[0712] Where the source of a reagent is not specifically given herein, such reagent can be obtained from any supplier of reagents for molecular biology at a quality/purity standard for application in molecular biology.

siRNA Design

[0713] The selection of siRNA designs targeting human transmembrane serine protease (MUC5B) gene (human NCBI refseqID: NM_002458.3; NCBI GeneID: 727897) were designed using custo R and Python scripts. The human NM_002458.3 REFSEQ mRNA has a length of 17911 bases.

[0714] A detailed list of a set of the unmodified siRNA sense and antisense strand sequences targeting MUC5B is shown in Tables 2, 4, and 6.

[0715] A detailed list of a set of the modified siRNA sense and antisense strand sequences targeting MUC5B is shown in Tables 3, 5, and 7.

[0716] It is to be understood that, throughout the application, a duplex name without a decimal is equivalent to a duplex name with a decimal which merely references the batch number of the duplex. For example, AD-1230521 is equivalent to AD-1230521.

siRNA Synthesis

[0717] siRNAs were synthesized and annealed using routine methods known in the art. Briefly, siRNA sequences were synthesized on a 1 μmol scale using a Mermade 192 synthesizer (BioAutomation) with phosphoramidite chemistry on solid supports. The solid support was controlled pore glass (500-1000 Å) loaded with a custom GalNAc ligand (3′-GalNAc conjugates), universal solid support (AM Chemicals), or the first nucleotide of interest. Ancillary synthesis reagents and standard 2-cyanoethyl phosphoramidite monomers (2′-deoxy-2′-fluoro, 2′-O-methyl, RNA, DNA) were obtained from Thermo-Fisher (Milwaukee, WI), Hongene (China), or Chemgenes (Wilmington, MA, USA). Additional phosphoramidite monomers were procured from commercial suppliers, prepared in-house, or procured using custom synthesis from various CMOs. Phosphoramidites were prepared at a concentration of 100 mM in either acetonitrile or 9:1 acetonitrile:DMF and were coupled using 5-Ethylthio-1H-tetrazole (ETT, 0.25 M in acetonitrile) with a reaction time of 400 s. Phosphorothioate linkages were generated using a 100 mM solution of 3-((Dimethylamino-methylidene) amino)-3H-1,2,4-dithiazole-3-thione (DDTT, obtained from Chemgenes (Wilmington, MA, USA)) in anhydrous acetonitrile/pyridine (9:1 v/v). Oxidation time was 5 minutes. All sequences were synthesized with final removal of the DMT group (“DMT-Off”).

[0718] Upon completion of the solid phase synthesis, solid-supported oligoribonucleotides were treated with 300 μL of Methylamine (40% aqueous) at room temperature in 96 well plates for approximately 2 hours to afford cleavage from the solid support and subsequent removal of all additional base-labile protecting groups. For sequences containing any natural ribonucleotide linkages (2′-OH) protected with a tert-butyl dimethyl silyl (TBDMS) group, a second deprotection step was performed using TEA.3HF (triethylamine trihydrofluoride). To each oligonucleotide solution in aqueous methylamine was added 200 μL of dimethyl sulfoxide (DMSO) and 300 μL TEA.3HF and the solution was incubated for approximately 30 mins at 60° C. After incubation, the plate was allowed to come to room temperature and crude oligonucleotides were precipitated by the addition of 1 mL of 9:1 acetontrile:ethanol or 1:1 ethanol:isopropanol. The plates were then centrifuged at 4° C. for 45 mins and the supernatant carefully decanted with the aid of a multichannel pipette. The oligonucleotide pellet was resuspended in 20 mM NaOAc and subsequently desalted using a HiTrap size exclusion column (5 mL, GE Healthcare) on an Agilent LC system equipped with an autosampler, UV detector, conductivity meter, and fraction collector. Desalted samples were collected in 96 well plates and then analyzed by LC-MS and UV spectrometry to confirm identity and quantify the amount of material, respectively.

[0719] Duplexing of single strands was performed on a Tecan liquid handling robot. Sense and antisense single strands were combined in an equimolar ratio to a final concentration of 10 μM in 1×PBS in 96 well plates, the plate sealed, incubated at 100° C. for 10 minutes, and subsequently allowed to return slowly to room temperature over a period of 2-3 hours. The concentration and identity of each duplex was confirmed and then subsequently utilized for in vitro screening assays.

### Example 2. In Vitro Screening of siRNA Duplexes

[0720] Cell Culture and Transfections

[0721] Pulmonary system cells, A549 cells (adenocarcinomic human alveolar basal epithelial cells) or MLE12 (murine lung epithelial cells), were cultured according to standard methods and were transfected with the iRNA duplex of interest.

[0722] Briefly, cells were transfected by adding 7.5 μL of Opti-MEM plus 0.1 μL of RNAiMAX per well (Invitrogen, Carlsbad CA. cat #13778-150) to 2.5 μL of each siRNA duplex to an individual well in a 384-well plate. The cells were then incubated at room temperature for 15 minutes. Forty tit of MEDIA containing ˜1.5×10⁴ cells was then added to the siRNA mixture. Cells were incubated for 24 hours prior to RNA purification. Single dose experiments were performed in A549 cells at 10 nM. Single dose experiments were performed in MLE12 cells at 10 nM, 1 nM, or 0.1 nM.

[0723] In Vitro Dual-Luciferase and Endogenous Screening Assays

[0724] Cos7 cells were transfected by adding 50 μL of siRNA duplexes and 75 ng of human MUC5B plasmid per well along with 100 μL of Opti-MEM plus 0.5 μL of Lipofectamine 2000 per well (Invitrogen, Carlsbad CA. cat #13778-150) and then incubated at room temperature for 15 minutes. The mixture was then added to the cells which are re-suspended in 35 μL of fresh complete media. The transfected cells were incubated at 37° C. in an atmosphere of 5% CO2. Single-dose experiments were performed at 10 nM.

[0725] Twenty-four hours after the siRNAs and psiCHECK2 plasmid are transfected; Firefly (transfection control) and Renilla (fused to MUC5B target sequence) luciferase were measured. First, media was removed from cells. Then Firefly luciferase activity was measured by adding 75 μL of Dual-Glo® Luciferase Reagent equal to the culture medium volume to each well and mix. The mixture was incubated at room temperature for 30 minutes before luminescense (500 nm) was measured on a Spectramax (Molecular Devices) to detect the Firefly luciferase signal. Renilla luciferase activity was measured by adding 75 μL of room temperature of Dual-Glo® Stop & Glo® Reagent to each well and the plates were incubated for 10-15 minutes before luminescence was again measured to determine the Renilla luciferase signal. The Dual-Glo® Stop & Glo® Reagent quenches the firefly luciferase signal and sustained luminescence for the Renilla luciferase reaction. siRNA activity was determined by normalizing the Renilla (MUC5B) signal to the Firefly (control) signal within each well. The magnitude of siRNA activity was then assessed relative to cells that were transfected with the same vector but were not treated with siRNA or were treated with a non-targeting siRNA. All transfections were done with n=4.

[0726] Total RNA Isolation Using DYNABEADS mRNA Isolation Kit

[0727] Total RNA isolation was performed using DYNABEADS. Briefly, cells were lysed in 10 μl of Lysis/Binding Buffer containing 3 μL of beads per well were mixed for 10 minutes on an electrostatic shaker. The washing steps were automated on a Biotek EL406, using a magnetic plate support. Beads were washed (in 31 μL) once in Buffer A, once in Buffer B, and twice in Buffer E, with aspiration steps in between. Following a final aspiration, complete 12 μL RT mixture was added to each well, as described below.

[0728] cDNA Synthesis

[0729] For cDNA synthesis, a master mix of 1.5 μl 10× Buffer, 0.6 μl 10× dNTPs, 1.5 μl Random primers, 0.75 μl Reverse Transcriptase, 0.75 μl RNase inhibitor and 9.9 μl of H₂O per reaction were added per well. Plates were sealed, agitated for 10 minutes on an electrostatic shaker, and then incubated at 37 degrees C. for 2 hours. Following this, the plates were agitated at 80 degrees C. for 8 minutes.

[0730] Real Time PCR

[0731] Two microlitre (μ1) of cDNA were added to a master mix containing 0.5 μl of human GAPDH TaqMan Probe (4326317E), 0.5 μl human MUC5B, 2 μl nuclease-free water and 5 μl Lightcycler 480 probe master mix (Roche Cat #04887301001) per well in a 384 well plates (Roche cat #04887301001). Real time PCR was done in a LightCycler480 Real Time PCR system (Roche).

[0732] To calculate relative fold change, data were analyzed using the ΔΔCt method and normalized to assays performed with cells transfected with 10 nM AD-1955, or mock transfected cells. IC₅₀s are calculated using a 4 parameter fit model using XLFit and normalized to cells transfected with AD-1955 or mock-transfected. The sense and antisense sequences of AD-1955 are: sense: cuuAcGcuGAGuAcuucGAdTsdT (SEQ ID NO:15) and antisense

(SEQ ID NO: 16)
UCGAAGuACUcAGCGuAAGdTsdT.

[0733] The results of a single dose in vitro screen of the agents in Tables 4 and 5 in A549 cells are provided in Table 8.

TABLE 1
Abbreviations of nucleotide monomers used in nucleic acid sequence representation. It will be understood that these monomers,
when present in an oligonucleotide, are mutually linked by 5′-3′-phosphodiester bonds.

| Abbre- | |
|---|---|
| viation | Nucleotide(s) |
| A | Adenosine-3′-phosphate |
| Ab | beta-L-adenosine-3′-phosphate |
| Abs | beta-L-adenosine-3′-phosphorothioate |
| Af | 2′-fluoroadenosine-3′-phosphate |
| Afs | 2′-fluoroadenosine-3′-phosphorothioate |
| As | adenosine-3′-phosphorothioate |
| C | cytidine-3′-phosphate |
| Cb | beta-L-cytidine-3′-phosphate |
| Cbs | beta-L-cytidine-3'-phosphorothioate |
| Cf | 2′-fluorocytidine-3′-phosphate |
| Cfs | 2′-fluorocytidine-3′-phosphorothioate |
| Cs | cytidine-3′-phosphorothioate |
| G | guanosine-3′-phosphate |
| Gb | beta-L-guanosine-3′-phosphate |
| Gbs | beta-L-guanosine-3′-phosphorothioate |
| Gf | 2′-fluoroguanosine-3′-phosphate |
| Gfs | 2′-fluoroguanosine-3′-phosphorothioate |
| Gs | guanosine-3′-phosphorothioate |
| T | 5′-methyluridine-3′-phosphate |
| Tf | 2′-fluoro-5-methyluridine-3′-phosphate |
| Tfs | 2′-fluoro-5-methyluridine-3′-phosphorothioate |
| Ts | 5-methyluridine-3′-phosphorothioate |
| U | Uridine-3′-phosphate |
| Uf | 2′-fluorouridine-3′-phosphate |
| Ufs | 2′-fluorouridine-3′-phosphorothioate |
| Us | uridine-3′-phosphorothioate |
| N | any nucleotide, modified or unmodified |
| a | 2′-O-methyladenosine-3′-phosphate |
| as | 2′-O-methyladenosine-3′-phosphorothioate |
| c | 2′-O-methylcytidine-3′-phosphate |
| cs | 2′-O-methylcytidine-3′-phosphorothioate |
| g | 2′-O-methylguanosine-3′-phosphate |
| gs | 2′-O-methylguanosine-3′-phosphorothioate |
| t | 2′-O-methyl-5-methyluridine-3′-phosphate |
| ts | 2′-O-methyl-5-methyluridine-3′-phosphorothioate |
| u | 2′-O-methyluridine-3′-phosphate |
| us | 2′-O-methyluridine-3′-phosphorothioate |
| s | phosphorothioate linkage |
| L10 | N-(cholesterylcarboxamidocaproyl)-4-hydroxyprolinol (Hyp-C6-Chol) |
| L96 | N-[tris(GalNAc-alkyl)-amidodecanoyl)]-4-hydroxyprolinol (Hyp-(GalNAc-alkyl)3) |
| | [chemical structure] |
| Y34 | 2-hydroxymethyl-tetrahydrofurane-4-methoxy-3-phosphate (abasic 2′-OMe furanose) |
| Y44 | inverted abasic DNA (2-hydroxymethyl-tetrahydrofurane-5-phosphate) |
| (Agn) | Adenosine-glycol nucleic acid (GNA) |
| (Cgn) | Cytidine-glycol nucleic acid (GNA) |
| (Ggn) | Guanosine-glycol nucleic acid (GNA) |
| (Tgn) | Thymidine-glycol nucleic acid (GNA) S-Isomer |
| P | Phosphate |
| VP | Vinyl-phosphonate |
| dA | 2′-deoxyadenosine-3′-phosphate |
| dAs | 2′-deoxyadenosine-3′-phosphorothioate |
| dC | 2′-deoxycytidine-3′-phosphate |
| dCs | 2′-deoxycytidine-3′-phosphorothioate |
| dG | 2′-deoxyguanosine-3′-phosphate |
| dGs | 2′-deoxyguanosine-3′-phosphorothioate |
| dT | 2′-deoxythymidine-3′-phosphate |
| dTs | 2′-deoxythymidine-3′-phosphorothioate |
| dU | 2′-deoxyuridine |
| dUs | 2′-deoxyuridine-3′-phosphorothioate |
| (C2p) | cytidine-2′-phosphate |
| (G2p) | guanosine-2′-phosphate |
| (U2p) | uridine-2′-phosphate |
| (A2p) | adenosine-2′-phosphate |
| (Chd) | 2′-O-hexadecyl-cytidine-3′-phosphate |
| (Ahd) | 2′-O-hexadecyl-adenosine-3′-phosphate |
| (Ghd) | 2′-O-hexadecyl-guanosine-3′-phosphate |
| (Uhd) | 2′-O-hexadecyl-uridine-3′-phosphate |

TABLE 2
Unmodified Sense and Antisense Strand MUC5B dsRNA Sequences

| | | | SEQ | | SEQ | |
|---|---|---|---|---|---|---|
| | | Range in | ID | | ID | Range in |
| Duplex ID | Sense Sequence 5′ to 3′ | NM_002458.3 | NO: | Antisense Sequence 5′ to 3′ | NO: | NM_002458.3 |
| AD-1302944 | UUGGCUCUGGCGGCCAUGCUU | 92-112 | 17 | AAGCAUGGCCGCCAGAGCCAACA | 348 | 90-112 |
| AD-1302994 | CCGAGCUGGGAGAAUGCAGGU | 149-169 | 18 | ACCUGCAUUCUCCCAGCUCGGCU | 349 | 147-169 |
| AD-1303025 | GCGCGUGAGCUUUGUUCCACU | 211-231 | 19 | AGUGGAACAAAGCUCACGCGCCG | 350 | 209-231 |
| AD-1303054 | UGGGCGGGUGUGCAGCACCUU | 277-297 | 20 | AAGGUGCUGCACACCCGCCCAUU | 351 | 275-297 |
| AD-1303066 | CCACUACAAGACCUUCGACGU | 307-327 | 21 | ACGUCGAAGGUCUUGUAGUGGAA | 352 | 305-327 |
| AD-1303108 | CCUUUGCAACUACGUGUUCUU | 349-369 | 22 | AAGAACACGUAGUUGCAAAGGCC | 353 | 347-369 |
| AD-1303139 | GAGGACUUCAACGUCCAGCUU | 392-412 | 23 | AAGCUGGACGUUGAAGUCCUCGU | 354 | 390-412 |
| AD-1303190 | UCACCCGUGUUGUCAUCAAGU | 444-464 | 24 | ACUUGAUGACAACACGGGUGACC | 355 | 442-464 |
| AD-1303222 | GGCUCCGUCCUCAUCAAUGGU | 494-514 | 25 | ACCAUUGAUGAGGACGGAGCCGU | 356 | 492-514 |
| AD-1303251 | GCUGCCUUACAGCCGCACUGU | 526-546 | 26 | ACAGUGCGGCUGUAAGGCAGCUC | 357 | 524-546 |
| AD-1303275 | GACUACAUCAAGGUCAGCAUU | 569-589 | 27 | AAUGCUGACCUUGAUGUAGUCCC | 358 | 567-589 |
| AD-1303304 | GCUGACAUUCCUGUGGAACGU | 598-618 | 28 | ACGUUCCACAGGAAUGUCAGCAC | 359 | 596-618 |
| AD-1303344 | GAGCUGGAUCCCAAAUACGCU | 638-658 | 29 | AGCGUAUUUGGGAUCCAGCUCCA | 360 | 636-658 |
| AD-1303368 | CAGACCUGUGGCCUGUGUGGU | 662-682 | 30 | ACCACACAGGCCACAGGUCUGGU | 361 | 660-682 |
| AD-1303389 | GCCUUCAACGAGUUCUAUGCU | 701-721 | 31 | AGCAUAGAACUCGUUGAAGGCCG | 362 | 699-721 |
| AD-1303422 | GAACCUGCAGAAGUUGGAUGU | 754-774 | 32 | ACAUCCAACUUCUGCAGGUUCCC | 363 | 752-774 |
| AD-1303457 | UGCACGGACGAGGAGGGCAUU | 821-841 | 33 | AAUGCCCUCCUCGUCCGUGCAGU | 364 | 819-841 |
| AD-1303507 | GUGGACAGCACUGCGUACCUU | 890-910 | 34 | AAGGUACGCAGUGCUGUCCACCA | 365 | 888-910 |
| AD-1303537 | GCCACCUUUGUGGAAUACUCU | 956-976 | 35 | AGAGUAUUCCACAAAGGUGGCAC | 366 | 954-976 |
| AD-1303569 | CUGGAGGUGCCCUGAGCUCUU | 1012-1032 | 36 | AAGAGCUCAGGGCACCUCCAGUU | 367 | 1010-1032 |
| AD-1303573 | CUCAACAUGCAGCACCAGGAU | 1049-1069 | 37 | AUCCUGGUGCUGCAUGUUGAGGG | 368 | 1047-1069 |
| AD-1303602 | ACCCUGCACGGACACCUGCUU | 1078-1098 | 38 | AAGCAGGUGUCCGUGCAGGGUGA | 369 | 1076-1098 |
| AD-1303626 | GGACCACUGUGUGGACGGCUU | 1126-1146 | 39 | AAGCCGUCCACACAGUGGUCCUC | 370 | 1124-1146 |
| AD-1303646 | GCUGGAUGACAUCACGCACUU | 1168-1188 | 40 | AAGUGCGUGAUGUCAUCCAGCAC | 371 | 1166-1188 |
| AD-1303679 | CACCUCCUUCAACACCACCUU | 1249-1269 | 41 | AAGGUGGUGUUGAAGGAGGUGCC | 372 | 1247-1269 |
| AD-1303705 | CUAUGGCAGUGCCAGGACCUU | 1295-1315 | 42 | AAGGUCCUGGCACUGCCAUAGCC | 373 | 1293-1315 |
| AD-1303746 | CCUAUGAUGAGAAACUCUACU | 1362-1382 | 43 | AGUAGAGUUUCUCAUCAUAGGUG | 374 | 1360-1382 |
| AD-1303787 | UACGUUCUGUCCAAGAAAUGU | 1403-1423 | 44 | ACAUUUCUUGGACAGAACGUAGC | 375 | 1401-1423 |
| AD-1303811 | GACAGCAGCUUCACCGUGCUU | 1427-1447 | 45 | AAGCACGGUGAAGCUGCUGUCGG | 376 | 1425-1447 |
| AD-1303862 | AACGAGAACUGCCUGAAAGCU | 1478-1498 | 46 | AGCUUUCAGGCAGUUCUCGUUGU | 377 | 1476-1498 |
| AD-1303914 | UCCUCAACUCCAUCUACACGU | 1560-1580 | 47 | ACGUGUAGAUGGAGUUGAGGAAC | 378 | 1558-1580 |
| AD-1303932 | GCCAACAUCACCCUGUUCACU | 1598-1618 | 48 | AGUGAACAGGGUGAUGUUGGCUG | 379 | 1596-1618 |
| AD-1303956 | UCGAGCUUCUUCAUCGUGGUU | 1622-1642 | 49 | AACCACGAUGAAGAAGCUCGAGG | 380 | 1620-1642 |
| AD-1303977 | CAGCUGCUGGUGCAGCUGGUU | 1661-1681 | 50 | AACCAGCUGCACCAGCAGCUGCA | 381 | 1659-1681 |
| AD-1304001 | CUCAUGCAGGUGUUUGUCAGU | 1685-1705 | 51 | ACUGACAAACACCUGCAUGAGUG | 382 | 1683-1705 |
| AD-1304039 | GUGGGAACUUCAACCAGAACU | 1743-1763 | 52 | AGUUCUGGUUGAAGUUCCCACAC | 383 | 1741-1763 |
| AD-1304064 | UGACGACUUCACGGCCCUCAU | 1768-1788 | 53 | AUGAGGGCCGUGAAGUCGUCAGC | 384 | 1766-1788 |
| AD-1304077 | AGCCUUCGCCAACACCUGGAU | 1813-1833 | 54 | AUCCAGGUGUUGGCGAAGGCUGC | 385 | 1811-1833 |
| AD-1304119 | CCAGGAACAGCUUUGAGGACU | 1857-1877 | 55 | AGUCCUCAAAGCUGUUCCUGGCA | 386 | 1855-1877 |
| AD-1304134 | GUGGAGAAUGAGAACUACGCU | 1892-1912 | 56 | AGCGUAGUUCUCAUUCUCCACAC | 387 | 1890-1912 |
| AD-1304174 | UCCCAACAGUGCCUUCUCGCU | 1939-1959 | 57 | AGCGAGAAGGCACUGUUGGGAUC | 388 | 1937-1959 |
| AD-1304202 | CUUCCACUCGAACUGCAUGUU | 1987-2007 | 58 | AACAUGCAGUUCGAGUGGAAGGG | 389 | 1985-2007 |
| AD-1304226 | CACCUGCAACUGUGAGCGGAU | 2011-2031 | 59 | AUCCGCUCACAGUUGCAGGUGUC | 390 | 2009-2031 |
| AD-1304262 | CCUCCUAUGUGCACGCCUGUU | 2058-2078 | 60 | AACAGGCGUGCACAUAGGAGGAC | 391 | 2056-2078 |
| AD-1304286 | GGGCGUACAGCUCAGCGACUU | 2086-2106 | 61 | AAGUCGCUGAGCUGUACGCCCUU | 392 | 2084-2106 |
| AD-1304322 | ACCAAGUACAUGCAGAACUGU | 2123-2143 | 62 | ACAGUUCUGCAUGUACUUGGUGC | 393 | 2121-2143 |
| AD-1304326 | AAGUCCCAGCGCUACGCCUAU | 2147-2167 | 63 | AUAGGCGUAGCGCUGGGACUUGG | 394 | 2145-2167 |
| AD-1304352 | GGAUGCCUGCCAGCCCACUUU | 2173-2193 | 64 | AAAGUGGGCUGGCAGGCAUCCAC | 395 | 2171-2193 |
| AD-1304386 | UCACCUGCAGCGUUUCCUUCU | 2217-2237 | 65 | AGAAGGAAACGCUGCAGGUGACG | 396 | 2215-2237 |
| AD-1304415 | GGGCACCUUCCUCAAUGACGU | 2266-2286 | 66 | ACGUCAUUGAGGAAGGUGCCCGC | 397 | 2264-2286 |
| AD-1304454 | CUGGCUCCUGGAGAGGUGGUU | 2339-2359 | 67 | AACCACCUCUCCAGGAGCCAGCA | 398 | 2337-2359 |
| AD-1304482 | CCGUGUGUUCAUGUACGGGUU | 2373-2393 | 68 | AACCCGUACAUGAACACACGGCG | 399 | 2371-2393 |
| AD-1304524 | CCUCUCUGCAGAAAAGCACAU | 2415-2435 | 69 | AUGUGCUUUUCUGCAGAGAGGCU | 400 | 2413-2435 |
| AD-1304546 | CCUGGACUGCAGCAACAGCUU | 2458-2478 | 70 | AAGCUGUUGCUGCAGUCCAGGUA | 401 | 2456-2478 |
| AD-1304596 | GCUGUUUCAGCACACACUGCU | 2532-2552 | 71 | AGCAGUGUGUGCUGAAACAGCCC | 402 | 2530-2552 |
| AD-1304624 | CUGCAUUGCCGAGGAGGACUU | 2602-2622 | 72 | AAGUCCUCCUCGGCAAUGCAGCC | 403 | 2600-2622 |
| AD-1304646 | CACCUACAAGCCUGGAGAGAU | 2644-2664 | 73 | AUCUCUCCAGGCUUGUAGGUGGC | 404 | 2642-2664 |
| AD-1304676 | CGACUGCAACACCUGCACCUU | 2674-2694 | 74 | AAGGUGCAGGUGUUGCAGUCGAC | 405 | 2672-2694 |
| AD-1304700 | GAACCGGAGGUGGGAGUGCAU | 2698-2718 | 75 | AUGCACUCCCACCUCCGGUUCCU | 406 | 2696-2718 |
| AD-1304732 | UGGCCACUUCAUCACCUUUGU | 2758-2778 | 76 | ACAAAGGUGAUGAAGUGGCCAUC | 407 | 2756-2778 |
| AD-1304756 | CGAUCGCUACAGCUUUGAAGU | 2782-2802 | 77 | ACUUCAAAGCUGUAGCGAUCGCC | 408 | 2780-2802 |
| AD-1304779 | GCUGCGAGUACAUCUUGGCCU | 2805-2825 | 78 | AGGCCAAGAUGUACUCGCAGCUG | 409 | 2803-2825 |
| AD-1304818 | UCCGCAUCGUCACCGAGAACU | 2862-2882 | 79 | AGUUCUCGGUGACGAUGCGGAAG | 410 | 2860-2882 |
| AD-1304850 | AAGGCCAUCAAGCUCUUCGUU | 2915-2935 | 80 | AACGAAGAGCUUGAUGGCCUUGG | 411 | 2913-2935 |
| AD-1304873 | GAGCUACGAGCUGAUCCUCCU | 2938-2958 | 81 | AGGAGGAUCAGCUCGUAGCUCUC | 412 | 2936-2958 |
| AD-1304882 | GACCUUUAAGGCGGUGGCGAU | 2965-2985 | 82 | AUCGCCACCGCCUUAAAGGUCCC | 413 | 2963-2985 |
| AD-1304894 | CACCCUACAAGAUACGCUACU | 3003-3023 | 83 | AGUAGCGUAUCUUGUAGGGUGGG | 414 | 3001-3023 |
| AD-1304902 | AUCUUCCUGGUCAUCGAGACU | 3029-3049 | 84 | AGUCUCGAUGACCAGGAAGAUCC | 415 | 3027-3049 |
| AD-1304953 | CAGCGUGUUCAUCCGACUGCU | 3082-3102 | 85 | AGCAGUCGGAUGAACACGCUGGU | 416 | 3080-3102 |
| AD-1304977 | GGACUACAAGGGCAGGGUCUU | 3106-3126 | 86 | AAGACCCUGCCCUUGUAGUCCUG | 417 | 3104-3126 |
| AD-1305014 | GACAAUGCCAUCAAUGACUUU | 3149-3169 | 87 | AAAGUCAUUGAUGGCAUUGUCGU | 418 | 3147-3169 |
| AD-1305043 | GCACUGGAGUUUGGGAACAGU | 3200-3220 | 88 | ACUGUUCCCAAACUCCAGUGCGU | 419 | 3198-3220 |
| AD-1305082 | CAGAAGCAGUGCAGCAUCCUU | 3302-3322 | 89 | AAGGAUGCUGCACUGCUUCUGGG | 420 | 3300-3322 |
| AD-1305104 | CCAGGUUGACUCCACCAAGUU | 3352-3372 | 90 | AACUUGGUGGAGUCAACCUGGGA | 421 | 3350-3372 |
| AD-1305128 | CGAGGCCUGCGUGAACGACGU | 3376-3396 | 91 | ACGUCGUUCACGCAGGCCUCGUA | 422 | 3374-3396 |
| AD-1305170 | ACUGCGAGUGUUUCUGCACGU | 3420-3440 | 92 | ACGUGCAGAAACACUCGCAGUCG | 423 | 3418-3440 |
| AD-1305212 | UGUGUGUGUCCUGGCGGACUU | 3480-3500 | 93 | AAGUCCGCCAGGACACACACAGG | 424 | 3478-3500 |
| AD-1305228 | UGUUCUGUGACUUCUACAACU | 3516-3536 | 94 | AGUUGUAGAAGUCACAGAACAAG | 425 | 3514-3536 |
| AD-1305240 | CUGUGAGUGGCACUACCAGCU | 3547-3567 | 95 | AGCUGGUAGUGCCACUCACAGCC | 426 | 3545-3567 |
| AD-1305297 | GCUGCUACCCGAAGUGCCCAU | 3642-3662 | 96 | AUGGGCACUUCGGGUAGCAGCCU | 427 | 3640-3662 |
| AD-1305321 | AGCCCUUCUUCAAUGAGGACU | 3669-3689 | 97 | AGUCCUCAUUGAAGAAGGGCUGG | 428 | 3667-3689 |
| AD-1305347 | AAGUGCGUGGCCCAGUGUGGU | 3695-3715 | 98 | ACCACACUGGGCCACGCACUUCA | 429 | 3693-3715 |
| AD-1305370 | CUACGACAAGGACGGAAACUU | 3718-3738 | 99 | AAGUUUCCGUCCUUGUCGUAGCA | 430 | 3716-3738 |
| AD-1305393 | AUGACGUCGGUGCAAGGGUCU | 3741-3761 | 100 | AGACCCUUGCACCGACGUCAUAG | 431 | 3739-3761 |
| AD-1305410 | CCAGAGCUGUAACUGCACACU | 3778-3798 | 101 | AGUGUGCAGUUACAGCUCUGGCA | 432 | 3776-3798 |
| AD-1305441 | CAGUGCGCUCACAGCCUUGAU | 3809-3829 | 102 | AUCAAGGCUGUGAGCGCACUGGA | 433 | 3807-3829 |
| AD-1305471 | UGCACCUAUGAGGACAGGACU | 3839-3859 | 103 | AGUCCUGUCCUCAUAGGUGCAGG | 434 | 3837-3859 |
| AD-1305501 | CAGGACGUCAUCUACAACACU | 3869-3889 | 104 | AGUGUUGUAGAUGACGUCCUGGU | 435 | 3867-3889 |
| AD-1305536 | CGCCUGCUUGAUCGCCAUCUU | 3904-3924 | 105 | AAGAUGGCGAUCAAGCAGGCGCC | 436 | 3902-3924 |
| AD-1305570 | ACCAUCAUCAGGAAGGCUGUU | 3938-3958 | 106 | AACAGCCUUCCUGAUGAUGGUGC | 437 | 3936-3958 |
| AD-1305610 | CCACAACGCCAUUCACCUUCU | 3978-3998 | 107 | AGAAGGUGAAUGGCGUUGUGGCU | 438 | 3976-3998 |
| AD-1305643 | UCCACCGUGUGUGUCCGCGAU | 4046-4066 | 108 | AUCGCGGACACACACGGUGGAGA | 439 | 4044-4066 |
| AD-1305672 | GUCCAGCUGGUACAAUGGGCU | 4078-4098 | 109 | AGCCCAUUGUACCAGCUGGACCA | 440 | 4076-4098 |
| AD-1305701 | GACUUUGAGACGUUUGAAAAU | 4127-4147 | 110 | AUUUUCAAACGUCUCAAAGUCUC | 441 | 4125-4147 |
| AD-1305731 | AGAGGGUACCAGGUAUGCCCU | 4157-4177 | 111 | AGGGCAUACCUGGUACCCUCUCU | 442 | 4155-4177 |
| AD-1305754 | GCUGGCUGACAUCGAGUGCCU | 4180-4200 | 112 | AGGCACUCGAUGUCAGCCAGCAC | 443 | 4178-4200 |
| AD-1305771 | CUUCCCGACAUGCCGCUGGAU | 4211-4231 | 113 | AUCCAGCGGCAUGUCGGGAAGCU | 444 | 4209-4231 |
| AD-1305801 | CAGGUGGACUGUGACCGCAUU | 4244-4264 | 114 | AAUGCGGUCACAGUCCACCUGCU | 445 | 4242-4264 |
| AD-1305817 | CGCCAACAGCCAACAGAGUCU | 4279-4299 | 115 | AGACUCUGUUGGCUGUUGGCGCA | 446 | 4277-4299 |
| AD-1305821 | CUCUGUCACGACUACGAGCUU | 4304-4324 | 116 | AAGCUCGUAGUCGUGACAGAGCG | 447 | 4302-4324 |
| AD-1305847 | UCUCUGCUGCGAAUACGUGCU | 4330-4350 | 117 | AGCACGUAUUCGCAGCAGAGAAC | 448 | 4328-4350 |
| AD-1305889 | CACGGAGCCUGCUGUGCCUAU | 4405-4425 | 118 | AUAGGCACAGCAGGCUCCGUGCU | 449 | 4403-4425 |
| AD-1305898 | AGACCACAGCAACCGAAAAGU | 4434-4454 | 119 | ACUUUUCGGUUGCUGUGGUCUGG | 450 | 4432-4454 |
| AD-1305930 | CUCGCAGACUGGGUCCAGCUU | 4501-4521 | 120 | AAGCUGGACCCAGUCUGCGAGGU | 451 | 4499-4521 |
| AD-1305948 | GUGGACAGAGUGGUUUGAUGU | 4582-4602 | 121 | ACAUCAAACCACUCUGUCCACUG | 452 | 4580-4602 |
| AD-1305958 | CAAGUCUGAACAACUUGGAGU | 4612-4632 | 122 | ACUCCAAGUUGUUCAGACUUGGG | 453 | 4610-4632 |
| AD-1305966 | UUGAGUCCUACGAUAAGAUCU | 4638-4658 | 123 | AGAUCUUAUCGUAGGACUCAACG | 454 | 4636-4658 |
| AD-1306008 | GCAGCCUAAGGACAUAGAGUU | 4684-4704 | 124 | AACUCUAUGUCCUUAGGCUGCUG | 455 | 4682-4704 |
| AD-1306030 | CUGGACCCUGGCACAGGUGGU | 4726-4746 | 125 | ACCACCUGUGCCAGGGUCCAGUU | 456 | 4724-4746 |
| AD-1306042 | GCACUGUGACGUCCACUUCGU | 4756-4776 | 126 | ACGAAGUGGACGUCACAGUGCAC | 457 | 4754-4776 |
| AD-1306069 | GUGCAGGAACUGGGAGCAGGU | 4783-4803 | 127 | ACCUGCUCCCAGUUCCUGCACAC | 458 | 4781-4803 |
| AD-1306099 | CAAGAUGUGCUACAACUACAU | 4813-4833 | 128 | AUGUAGUUGUAGCACAUCUUGAA | 459 | 4811-4833 |
| AD-1306132 | CUGCUGCAGUGACGACCACUU | 4846-4866 | 129 | AAGUGGUCGUCACUGCAGCAGAG | 460 | 4844-4866 |
| AD-1306144 | CGACCACAGAGCUGGAGACGU | 4893-4913 | 130 | ACGUCUCCAGCUCUGUGGUCGGU | 461 | 4891-4913 |
| AD-1306168 | ACCCAGGCCCUGUUCUCAACU | 4928-4948 | 131 | AGUUGAGAACAGGGCCUGGGUGG | 462 | 4926-4948 |
| AD-1306198 | CUCUCAGAAGGACUGACAUCU | 5015-5035 | 132 | AGAUGUCAGUCCUUCUGAGAGGG | 463 | 5013-5035 |
| AD-1306200 | CAGAUACACAAGCACCCUUGU | 5038-5058 | 133 | ACAAGGGUGCUUGUGUAUCUGGG | 464 | 5036-5058 |
| AD-1306235 | GCUCCACAGAACCCACUGUCU | 5094-5114 | 134 | AGACAGUGGGUUCUGUGGAGCCU | 465 | 5092-5114 |
| AD-1306254 | CACCCUUCCAACACGCUCAGU | 5131-5151 | 135 | ACUGAGCGUGUUGGAAGGGUGGA | 466 | 5129-5151 |
| AD-1306278 | CAACAACAAUGGCAACCUCCU | 5214-5234 | 136 | AGGAGGUUGCCAUUGUUGUUGGG | 467 | 5212-5234 |
| AD-1306324 | ACCGCUUCCAAAGAGCCGCUU | 5261-5281 | 137 | AAGCGGCUCUUUGGAAGCGGUGC | 468 | 5259-5281 |
| AD-1306359 | CCAACACUCACGAGCGAGCUU | 5297-5317 | 138 | AAGCUCGCUCGUGAGUGUUGGCG | 469 | 5295-5317 |
| AD-1306382 | CACCUCUCAGGCCGAGACCAU | 5320-5340 | 139 | AUGGUCUCGGCCUGAGAGGUGGA | 470 | 5318-5340 |
| AD-1306406 | CCAGGACAGAGACGACAAUGU | 5346-5366 | 140 | ACAUUGUCGUCUCUGUCCUGGGC | 471 | 5344-5366 |
| AD-1306411 | CUUGACUAACACCACCACCAU | 5371-5391 | 141 | AUGGUGGUGGUGUUAGUCAAGGG | 472 | 5369-5391 |
| AD-1306442 | CUGUCAACCGAAGUGUGAGUU | 5407-5427 | 142 | AACUCACACUUCGGUUGACAGCG | 473 | 5405-5427 |
| AD-1306478 | CGUGGACUUCCCAACCUCAGU | 5443-5463 | 143 | ACUGAGGUUGGGAAGUCCACGUC | 474 | 5441-5463 |
| AD-1306483 | ACAUGGAAACUUUUGAAAACU | 5478-5498 | 144 | AGUUUUCAAAAGUUUCCAUGUCC | 475 | 5476-5498 |
| AD-1306514 | GCACCAAAGAGCAUAGAGUGU | 5528-5548 | 145 | ACACUCUAUGCUCUUUGGUGCCC | 476 | 5526-5548 |
| AD-1306535 | GGUAAGCAUCGACCAGGUCGU | 5569-5589 | 146 | ACGACCUGGUCGAUGCUUACCUC | 477 | 5567-5589 |
| AD-1306563 | CUGACCUGCAGCCUGGAGACU | 5597-5617 | 147 | AGUCUCCAGGCUGCAGGUCAGCA | 478 | 5595-5617 |
| AD-1306575 | UGCAAGAACGAAGACCAGACU | 5627-5647 | 148 | AGUCUGGUCUUCGUUCUUGCAGG | 479 | 5625-5647 |
| AD-1306603 | UCAACAUGUGCUUCAACUACU | 5655-5675 | 149 | AGUAGUUGAAGCACAUGUUGAAC | 480 | 5653-5675 |
| AD-1306627 | UGCGUGUGCUUUGCUGUGACU | 5679-5699 | 150 | AGUCACAGCAAAGCACACGCACG | 481 | 5677-5699 |
| AD-1306673 | CUCCACCCUGAGAACAGCUCU | 5839-5859 | 151 | AGAGCUGUUCUCAGGGUGGAGGU | 482 | 5837-5859 |
| AD-1306676 | UCCCAAAGUGCUGACCACCAU | 5863-5883 | 152 | AUGGUGGUCAGCACUUUGGGAGG | 483 | 5861-5883 |
| AD-1306698 | UUCCUCCCUGGGCACCACCUU | 6013-6033 | 153 | AAGGUGGUGCCCAGGGAGGAAGA | 484 | 6011-6033 |
| AD-1306717 | UGCCAACUACCACAACCACGU | 6210-6230 | 154 | ACGUGGUUGUGGUAGUUGGCACU | 485 | 6208-6230 |
| AD-1307191 | CACACCCACAACCAGAGGCUU | 6301-6321 | 155 | AAGCCUCUGGUUGUGGGUGUGGU | 486 | 6299-6321 |
| AD-1307354 | GACCUGGAUCCUCACAAAGCU | 5767-5787 | 156 | AGCUUUGUGAGGAUCCAGGUCGU | 487 | 5765-5787 |
| AD-1308029 | CUACCAGCGUUACACCCAUCU | 5988-6008 | 157 | AGAUGGGUGUAACGCUGGUAGCU | 488 | 5986-6008 |
| AD-1308183 | CCACAACAGCCACUACGACUU | 5790-5810 | 158 | AAGUCGUAGUGGCUGUUGUGGUC | 489 | 5788-5810 |
| AD-1308294 | CAGCUCCAAAGCCACUCCCUU | 5905-5925 | 159 | AAGGGAGUGGCUUUGGAGCUGGU | 490 | 5903-5925 |
| AD-1334092 | GCCCUUCCAGCACUGAGAAGU | 5948-5968 | 160 | ACUUCUCAGUGCUGGAAGGGCGG | 491 | 5946-5968 |
| AD-1308403 | CCUAUCACAGACCACCACACU | 6040-6060 | 161 | AGUGUGGUGGUCUGUGAUAGGCG | 492 | 6038-6060 |
| AD-1308420 | GGCCACCAUGUCCACAGCCAU | 6064-6084 | 162 | AUGGCUGUGGACAUGGUGGCCGU | 493 | 6062-6084 |
| AD-1308440 | CCUCCUCCACUCCAGAGACUU | 6087-6107 | 163 | AAGUCUCUGGAGUGGAGGAGGGU | 494 | 6085-6107 |
| AD-1334093 | CACACCUCCACAGUGCUUACU | 6110-6130 | 164 | AGUAAGCACUGUGGAGGUGUGGG | 495 | 6108-6130 |
| AD-1308488 | CAGGAACAGCUCACACUACCU | 6186-6206 | 165 | AGGUAGUGUGAGCUGUUCCUGGG | 496 | 6184-6206 |
| AD-1308555 | UCCAGUGUGGAUCAGCACAAU | 6277-6297 | 166 | AUUGUGCUGAUCCACACUGGAGG | 497 | 6275-6297 |
| AD-1306730 | CUCCUGGGACAACUCCCAUCU | 6513-6533 | 167 | AGAUGGGAGUUGUCCCAGGAGUU | 498 | 6511-6533 |
| AD-1306746 | CAGCAACACAGUGACUCCCUU | 6574-6594 | 168 | AAGGGAGUCACUGUGUUGCUGGU | 499 | 6572-6594 |
| AD-1306753 | AGUGCCGAACACCAUGGCCAU | 6625-6645 | 169 | AUGGCCAUGGUGUUCGGCACUGG | 500 | 6623-6645 |
| AD-1306772 | GGUGACUUCCCACACCCUAGU | 6754-6774 | 170 | ACUAGGGUGUGGGAAGUCACCGU | 501 | 6752-6774 |
| AD-1306796 | CGACUCCAGCCCUUUCCAGCU | 6801-6821 | 171 | AGCUGGAAAGGGCUGGAGUCGAG | 502 | 6799-6821 |
| AD-1306820 | UAGCAGCAGAACCACCGAGUU | 6829-6849 | 172 | AACUCGGUGGUUCUGCUGCUAGG | 503 | 6827-6849 |
| AD-1306844 | GCUCACACUACCAAAGUGCUU | 7865-7885 | 173 | AAGCACUUUGGUAGUGUGAGCUG | 504 | 7863-7885 |
| AD-1306879 | ACGCUUCCAGUGUGGAUCAGU | 7943-7963 | 174 | ACUGAUCCACACUGGAAGCGUGC | 505 | 7941-7963 |
| AD-1306887 | CACCCACAACCAGAGGUUCCU | 7974-7994 | 175 | AGGAACCUCUGGUUGUGGGUGUG | 506 | 7972-7994 |
| AD-1306916 | CACGGUGGUGACCAUGGGCUU | 6979-6999 | 176 | AAGCCCAUGGUCACCACCGUGGU | 507 | 6977-6999 |
| AD-1307191 | CACACCCACAACCAGAGGCUU | 6301-6321 | 155 | AAGCCUCUGGUUGUGGGUGUGGU | 486 | 6299-6321 |
| AD-1307212 | ACCGCCACAGUGCUGACCACU | 6359-6379 | 177 | AGUGGUCAGCACUGUGGCGGUGU | 508 | 6357-6379 |
| AD-1307378 | CCACUACGACUGAGUCCACUU | 7386-7406 | 178 | AAGUGGACUCAGUCGUAGUGGCU | 509 | 7384-7406 |
| AD-1307392 | GCUCCAAAGCCACUCCCUUCU | 7578-7598 | 179 | AGAAGGGAGUGGCUUUGGAGCUG | 510 | 7576-7598 |
| AD-1307516 | CUCCAGGGACAACACCUAUCU | 8184-8204 | 180 | AGAUAGGUGUUGUCCCUGGAGUU | 511 | 8182-8204 |
| AD-1307551 | CAGCAGCACAGUGACUCCCUU | 8245-8265 | 181 | AAGGGAGUCACUGUGCUGCUGGU | 512 | 8243-8265 |
| AD-1307575 | UGCCCUAGGGACCACCCACAU | 6598-6618 | 182 | AUGUGGGUGGUCCCUAGGGCAGA | 513 | 6596-6618 |
| AD-1307600 | CACACACGGGCGAUCCCUGUU | 8317-8337 | 183 | AACAGGGAUCGCCCGUGUGUGGU | 514 | 8315-8337 |
| AD-1307617 | AGCCUGGACUUCGGCCACCUU | 6694-6714 | 184 | AAGGUGGCCGAAGUCCAGGCUGU | 515 | 6692-6714 |
| AD-1307654 | ACCCACAUCACAGAGCCUUCU | 6731-6751 | 185 | AGAAGGCUCUGUGAUGUGGGUGG | 516 | 6729-6751 |
| AD-1307666 | CAACCACCGGUACCACCCAGU | 6777-6797 | 186 | ACUGGGUGGUACCGGUGGUUGCU | 517 | 6775-6797 |
| AD-1307754 | ACCCAGCAAGACCCGCACCUU | 6919-6939 | 187 | AAGGUGCGGGUCUUGCUGGGUGU | 518 | 6917-6939 |
| AD-1307805 | GUGGCUGGACUACAGCUACCU | 7024-7044 | 188 | AGGUAGCUGUAGUCCAGCCACUC | 519 | 7022-7044 |
| AD-1307812 | UUGACACCUACUCCAACAUCU | 7071-7091 | 189 | AGAUGUUGGAGUAGGUGUCAAAG | 520 | 7069-7091 |
| AD-1307837 | UUGGGCCAGGUCGUGGAAUGU | 7175-7195 | 190 | ACAUUCCACGACCUGGCCCAACU | 521 | 7173-7195 |
| AD-1307860 | CCUGGACUUUGGCCUGGUCUU | 7198-7218 | 191 | AAGACCAGGCCAAAGUCCAGGCU | 522 | 7196-7218 |
| AD-1307893 | GAUGUGCUUCAACUAUGAAAU | 7249-7269 | 192 | AUUUCAUAGUUGAAGCACAUCUU | 523 | 7247-7269 |
| AD-1307917 | UGUGUUCUGCUGCAACUACGU | 7273-7293 | 193 | ACGUAGUUGCAGCAGAACACACG | 524 | 7271-7293 |
| AD-1307934 | CAGCUCUACGGCCAUGCCCUU | 7318-7338 | 194 | AAGGGCAUGGCCGUAGAGCUGGU | 525 | 7316-7338 |
| AD-1308171 | AUCCUCACAGAGCUGACCACU | 7361-7381 | 195 | AGUGGUCAGCUCUGUGAGGAUCC | 526 | 7359-7381 |
| AD-1308216 | CCGAGCACUACAGCCACCGUU | 7460-7480 | 196 | AACGGUGGCUGUAGUGCUCGGCU | 527 | 7458-7480 |
| AD-1308250 | CCUCCACCCAGGCAACUGCUU | 7512-7532 | 197 | AAGCAGUUGCCUGGGUGGAGGAG | 528 | 7510-7532 |
| AD-1308273 | GGCCACGACACCCACAGUCAU | 7555-7575 | 198 | AUGACUGUGGGUGUCGUGGCCGU | 529 | 7553-7575 |
| AD-1334092 | GCCCUUCCAGCACUGAGAAGU | 5948-5968 | 160 | ACUUCUCAGUGCUGGAAGGGCGG | 491 | 5946-5968 |
| AD-1308369 | CACAGCUACCAGCUUUACAGU | 7654-7674 | 199 | ACUGUAAAGCUGGUAGCUGUGGG | 530 | 7652-7674 |
| AD-1308403 | CCUAUCACAGACCACCACACU | 6040-6060 | 161 | AGUGUGGUGGUCUGUGAUAGGCG | 492 | 6038-6060 |
| AD-1308420 | GGCCACCAUGUCCACAGCCAU | 6064-6084 | 162 | AUGGCUGUGGACAUGGUGGCCGU | 493 | 6062-6084 |
| AD-1308440 | CCUCCUCCACUCCAGAGACUU | 6087-6107 | 163 | AAGUCUCUGGAGUGGAGGAGGGU | 494 | 6085-6107 |
| AD-1308463 | CACACCUCCACAGUGCUUACU | 6110-6130 | 164 | AGUAAGCACUGUGGAGGUGUGGA | 531 | 7779-7801 |
| AD-1308520 | ACCACAACCACGGGCUUCACU | 6218-6238 | 200 | AGUGAAGCCCGUGGUUGUGGUAG | 532 | 6216-6238 |
| AD-1308605 | GACCACCACCACCACAACUGU | 6373-6393 | 201 | ACAGUUGUGGUGGUGGUGGUCAG | 533 | 6371-6393 |
| AD-1308629 | CACUGGUUCUAUGGCAACACU | 6397-6417 | 202 | AGUGUUGCCAUAGAACCAGUGGC | 534 | 6395-6417 |
| AD-1308652 | CCUCUAGCACACAGACCAGUU | 6420-6440 | 203 | AACUGGUCUGUGUGCUAGAGGAG | 535 | 6418-6440 |
| AD-1308673 | CCACGGCCACUACGAUCACGU | 6462-6482 | 204 | ACGUGAUCGUAGUGGCCGUGGUG | 536 | 6460-6482 |
| AD-1309037 | GGGACCACCUGGAUCCUCACU | 7436-7456 | 205 | AGUGAGGAUCCAGGUGGUCCCUG | 537 | 7434-7456 |
| AD-1306916 | CACGGUGGUGACCAUGGGCUU | 6979-6999 | 176 | AAGCCCAUGGUCACCACCGUGGU | 507 | 6977-6999 |
| AD-1306975 | CAGCCACUACGACCGCAACCU | 9054-9074 | 206 | AGGUUGCGGUCGUAGUGGCUGCU | 538 | 9052-9074 |
| AD-1307006 | UCCCAAAGUGCUGACCAGCAU | 9121-9141 | 207 | AUGCUGGUCAGCACUUUGGGAGG | 539 | 9119-9141 |
| AD-1307011 | CUCCUUCACCCUUGGGACCAU | 9268-9288 | 208 | AUGGUCCCAAGGGUGAAGGAGGG | 540 | 9266-9288 |
| AD-1307040 | GGGCCACCAGUUCCAUGUCCU | 9408-9428 | 209 | AGGACAUGGAACUGGUGGCCCUU | 541 | 9406-9428 |
| AD-1307063 | CAGCACUACAGCCACCGUGAU | 9559-9579 | 210 | AUCACGGUGGCUGUAGUGCUGGG | 542 | 9557-9579 |
| AD-1307092 | ACCCUCAAAGUGCUGACCAGU | 9632-9652 | 211 | ACUGGUCAGCACUUUGAGGGUGC | 543 | 9630-9652 |
| AD-1307111 | CACACCCACAGUCAUCAGCUU | 9661-9681 | 212 | AAGCUGAUGACUGUGGGUGUGGU | 544 | 9659-9681 |
| AD-1307137 | CACCCACAGCUACCAGCGUUU | 5979-5999 | 213 | AAACGCUGGUAGCUGUGGGUGUG | 545 | 5977-5999 |
| AD-1307167 | UCCUCUACUCCAGAGACUGUU | 9860-9880 | 214 | AACAGUCUCUGGAGUAGAGGAGG | 546 | 9858-9880 |
| AD-1307174 | ACAGUGCUUACCACCACGACU | 9890-9910 | 215 | AGUCGUGGUGGUAAGCACUGUGG | 547 | 9888-9910 |
| AD-1307191 | CACACCCACAACCAGAGGCUU | 6301-6321 | 155 | AAGCCUCUGGUUGUGGGUGUGGU | 486 | 6299-6321 |
| AD-1307212 | ACCGCCACAGUGCUGACCACU | 6359-6379 | 177 | AGUGGUCAGCACUGUGGCGGUGU | 508 | 6357-6379 |
| AD-1307222 | GCCACUACGAUCACAGCCACU | 10238-10258 | 216 | AGUGGCUGUGAUCGUAGUGGCCG | 548 | 10236-10258 |
| AD-1307242 | CUCCAGGGACAACUCCCAUCU | 10284-10304 | 217 | AGAUGGGAGUUGUCCCUGGAGUU | 549 | 10282-10304 |
| AD-1307288 | CAGCAGCAACCACCAGUACCU | 10542-10562 | 218 | AGGUACUGGUGGUUGCUGCUGGG | 550 | 10540-10562 |
| AD-1307310 | CUCCAGGACCACAGCCACAGU | 10666-10686 | 219 | ACUGUGGCUGUGGUCCUGGAGGU | 551 | 10664-10686 |
| AD-1307346 | CGGCCACGCCCUCCUCAACUU | 5739-5759 | 220 | AAGUUGAGGAGGGCGUGGCCGUA | 552 | 11095-11117 |
| AD-1307363 | CCUCACAAAGCUGACCACAAU | 11134-11154 | 221 | AUUGUGGUCAGCUUUGUGAGGAU | 553 | 11132-11154 |
| AD-1307378 | CCACUACGACUGAGUCCACUU | 7386-7406 | 178 | AAGUGGACUCAGUCGUAGUGGCU | 509 | 7384-7406 |
| AD-1307392 | GCUCCAAAGCCACUCCCUUCU | 7578-7598 | 179 | AGAAGGGAGUGGCUUUGGAGCUG | 510 | 7576-7598 |
| AD-1307431 | UCCUCCACUCCAGAGACUGCU | 6089-6109 | 222 | AGCAGUCUCUGGAGUGGAGGAGG | 554 | 6087-6109 |
| AD-1307456 | CCACAGUGCUUACCACCACGU | 7788-7808 | 223 | ACGUGGUGGUAAGCACUGUGGAG | 555 | 7786-7808 |
| AD-1307516 | CUCCAGGGACAACACCUAUCU | 8184-8204 | 180 | AGAUAGGUGUUGUCCCUGGAGUU | 511 | 8182-8204 |
| AD-1307551 | CAGCAGCACAGUGACUCCCUU | 8245-8265 | 181 | AAGGGAGUCACUGUGCUGCUGGU | 512 | 8243-8265 |
| AD-1307575 | UGCCCUAGGGACCACCCACAU | 6598-6618 | 182 | AUGUGGGUGGUCCCUAGGGCAGA | 513 | 6596-6618 |
| AD-1307590 | CACCACGGCCACCACACACGU | 8305-8325 | 224 | ACGUGUGUGGUGGCCGUGGUGUU | 556 | 8303-8325 |
| AD-1307600 | CACACACGGGCGAUCCCUGUU | 8317-8337 | 183 | AACAGGGAUCGCCCGUGUGUGGU | 514 | 8315-8337 |
| AD-1307617 | AGCCUGGACUUCGGCCACCUU | 6694-6714 | 184 | AAGGUGGCCGAAGUCCAGGCUGU | 515 | 6692-6714 |
| AD-1307654 | ACCCACAUCACAGAGCCUUCU | 6731-6751 | 185 | AGAAGGCUCUGUGAUGUGGGUGG | 516 | 6729-6751 |
| AD-1307677 | ACCACCCAGCACUCGACUCCU | 6788-6808 | 225 | AGGAGUCGAGUGCUGGGUGGUAC | 557 | 6786-6808 |
| AD-1307706 | CAGCCCUCACCCUAGCAGCAU | 6817-6837 | 226 | AUGCUGCUAGGGUGAGGGCUGGA | 558 | 6815-6837 |
| AD-1307754 | ACCCAGCAAGACCCGCACCUU | 6919-6939 | 187 | AAGGUGCGGGUCUUGCUGGGUGU | 518 | 6917-6939 |
| AD-1307775 | AUAACCACGGUGGUGACCACU | 10745-10765 | 227 | AGUGGUCACCACCGUGGUUAUGG | 559 | 10743-10765 |
| AD-1307805 | GUGGCUGGACUACAGCUACCU | 7024-7044 | 188 | AGGUAGCUGUAGUCCAGCCACUC | 519 | 7022-7044 |
| AD-1307812 | UUGACACCUACUCCAACAUCU | 7071-7091 | 189 | AGAUGUUGGAGUAGGUGUCAAAG | 520 | 7069-7091 |
| AD-1307837 | UUGGGCCAGGUCGUGGAAUGU | 7175-7195 | 190 | ACAUUCCACGACCUGGCCCAACU | 521 | 7173-7195 |
| AD-1307860 | CCUGGACUUUGGCCUGGUCUU | 7198-7218 | 191 | AAGACCAGGCCAAAGUCCAGGCU | 522 | 7196-7218 |
| AD-1307893 | GAUGUGCUUCAACUAUGAAAU | 7249-7269 | 192 | AUUUCAUAGUUGAAGCACAUCUU | 523 | 7247-7269 |
| AD-1307917 | UGUGUUCUGCUGCAACUACGU | 7273-7293 | 193 | ACGUAGUUGCAGCAGAACACACG | 524 | 7271-7293 |
| AD-1307934 | CAGCUCUACGGCCAUGCCCUU | 7318-7338 | 194 | AAGGGCAUGGCCGUAGAGCUGGU | 525 | 7316-7338 |
| AD-1307994 | CCAGUUCCAAAGCCACUUCCU | 9162-9182 | 228 | AGGAAGUGGCUUUGGAACUGGUG | 560 | 9160-9182 |
| AD-1308057 | CCCAGAACAGACCACCACACU | 9298-9318 | 229 | AGUGUGGUGGUCUGUUCUGGGAG | 561 | 9296-9318 |
| AD-1308098 | CUCCACAGUGCUGACCACGAU | 9373-9393 | 230 | AUCGUGGUCAGCACUGUGGAGGU | 562 | 9371-9393 |
| AD-1308142 | GACCUGGAUCCUCACAGAGCU | 7354-7374 | 231 | AGCUCUGUGAGGAUCCAGGUCGU | 563 | 7352-7374 |
| AD-1308171 | AUCCUCACAGAGCUGACCACU | 7361-7381 | 195 | AGUGGUCAGCUCUGUGAGGAUCC | 526 | 7359-7381 |
| AD-1308216 | CCGAGCACUACAGCCACCGUU | 7460-7480 | 196 | AACGGUGGCUGUAGUGCUCGGCU | 527 | 7458-7480 |
| AD-1308250 | CCUCCACCCAGGCAACUGCUU | 7512-7532 | 197 | AAGCAGUUGCCUGGGUGGAGGAG | 528 | 7510-7532 |
| AD-1308273 | GGCCACGACACCCACAGUCAU | 7555-7575 | 198 | AUGACUGUGGGUGUCGUGGCCGU | 529 | 7553-7575 |
| AD-1308305 | CCACUCCCUCCUCCAGUCCAU | 5916-5936 | 232 | AUGGACUGGAGGAGGGAGUGGCU | 564 | 5914-5936 |
| AD-1334092 | GCCCUUCCAGCACUGAGAAGU | 5948-5968 | 160 | ACUUCUCAGUGCUGGAAGGGCGG | 491 | 5946-5968 |
| AD-1308369 | CACAGCUACCAGCUUUACAGU | 7654-7674 | 199 | ACUGUAAAGCUGGUAGCUGUGGG | 530 | 7652-7674 |
| AD-1308403 | CCUAUCACAGACCACCACACU | 6040-6060 | 161 | AGUGUGGUGGUCUGUGAUAGGCG | 492 | 6038-6060 |
| AD-1308422 | CCACCAUGUCCACAGCCACAU | 6066-6086 | 233 | AUGUGGCUGUGGACAUGGUGGCC | 565 | 6064-6086 |
| AD-1308488 | CAGGAACAGCUCACACUACCU | 6186-6206 | 165 | AGGUAGUGUGAGCUGUUCCUGGG | 496 | 6184-6206 |
| AD-1308512 | UGCCGACUACCACAACCACGU | 9981-10001 | 234 | ACGUGGUUGUGGUAGUCGGCACU | 566 | 9979-10001 |
| AD-1308555 | UCCAGUGUGGAUCAGCACAAU | 6277-6297 | 166 | AUUGUGCUGAUCCACACUGGAGG | 497 | 6275-6297 |
| AD-1308569 | CACACCCACAACCAGUGGCUU | 11743-11763 | 235 | AAGCCACUGGUUGUGGGUGUGGU | 567 | 11741-11763 |
| AD-1308605 | GACCACCACCACCACAACUGU | 6373-6393 | 201 | ACAGUUGUGGUGGUGGUGGUCAG | 533 | 6371-6393 |
| AD-1308629 | CACUGGUUCUAUGGCAACACU | 6397-6417 | 202 | AGUGUUGCCAUAGAACCAGUGGC | 534 | 6395-6417 |
| AD-1308652 | CCUCUAGCACACAGACCAGUU | 6420-6440 | 203 | AACUGGUCUGUGUGCUAGAGGAG | 535 | 6418-6440 |
| AD-1308673 | CCACGGCCACUACGAUCACGU | 6462-6482 | 204 | ACGUGAUCGUAGUGGCCGUGGUG | 536 | 6460-6482 |
| AD-1308759 | CAAGGACUGCAACCACCCUUU | 9192-9212 | 236 | AAAGGGUGGUUGCAGUCCUUGGA | 568 | 9190-9212 |
| AD-1308782 | GUGCUGACAAGCACAGCCACU | 9215-9235 | 237 | AGUGGCUGUGCUUGUCAGCACUG | 569 | 9213-9235 |
| AD-1308808 | CACAGCUACCAGCUUUACACU | 9241-9261 | 238 | AGUGUAAAGCUGGUAGCUGUGGA | 570 | 9239-9261 |
| AD-1334094 | CCACCAUGUCCACAAUCCACU | 9324-9344 | 239 | AGUGGAUUGUGGACAUGGUGGCC | 571 | 9322-9344 |
| AD-1309007 | CCACUACAACUGCAGCCACUU | 9483-9503 | 240 | AAGUGGCUGCAGUUGUAGUGGCU | 572 | 9481-9503 |
| AD-1309037 | GGGACCACCUGGAUCCUCACU | 7436-7456 | 205 | AGUGAGGAUCCAGGUGGUCCCUG | 537 | 7434-7456 |
| AD-1309039 | GACCACCUGGAUCCUCACAGU | 7438-7458 | 241 | ACUGUGAGGAUCCAGGUGGUCCC | 573 | 7436-7458 |
| AD-1307953 | CCACUACGACUGCAUCCACUU | 12828-12848 | 242 | AAGUGGAUGCAGUCGUAGUGGCU | 574 | 12826-12848 |
| AD-1307967 | CUCCCAAAGUGCUGACCAGCU | 9120-9140 | 243 | AGCUGGUCAGCACUUUGGGAGGG | 575 | 9118-9140 |
| AD-1307994 | CCAGUUCCAAAGCCACUUCCU | 9162-9182 | 228 | AGGAAGUGGCUUUGGAACUGGUG | 560 | 9160-9182 |
| AD-1308024 | CACAGCUACCAGCGUUACACU | 5983-6003 | 244 | AGUGUAACGCUGGUAGCUGUGGA | 576 | 13010-13032 |
| AD-1308057 | CCCAGAACAGACCACCACACU | 9298-9318 | 229 | AGUGUGGUGGUCUGUUCUGGGAG | 561 | 9296-9318 |
| AD-1308098 | CUCCACAGUGCUGACCACGAU | 9373-9393 | 230 | AUCGUGGUCAGCACUGUGGAGGU | 562 | 9371-9393 |
| AD-1308133 | GGGCCACCAGUUCCACGUCCU | 13179-13199 | 245 | AGGACGUGGAACUGGUGGCCCUU | 577 | 13177-13199 |
| AD-1308171 | AUCCUCACAGAGCUGACCACU | 7361-7381 | 195 | AGUGGUCAGCUCUGUGAGGAUCC | 526 | 7359-7381 |
| AD-1308180 | UGACCACAACAGCCACUACGU | 7374-7394 | 246 | ACGUAGUGGCUGUUGUGGUCAGC | 578 | 7372-7394 |
| AD-1308216 | CCGAGCACUACAGCCACCGUU | 7460-7480 | 196 | AACGGUGGCUGUAGUGCUCGGCU | 527 | 7458-7480 |
| AD-1308250 | CCUCCACCCAGGCAACUGCUU | 7512-7532 | 197 | AAGCAGUUGCCUGGGUGGAGGAG | 528 | 7510-7532 |
| AD-1308263 | UGAGCACCACGGCCACGACAU | 7545-7565 | 247 | AUGUCGUGGCCGUGGUGCUCACA | 579 | 7543-7565 |
| AD-1308294 | CAGCUCCAAAGCCACUCCCUU | 5905-5925 | 159 | AAGGGAGUGGCUUUGGAGCUGGU | 490 | 5903-5925 |
| AD-1308317 | CCAGUCCAGGGACUGCAACUU | 13554-13574 | 248 | AAGUUGCAGUCCCUGGACUGGAG | 580 | 13552-13574 |
| AD-1308344 | CAGCACUGAGAAGCACAGCCU | 5955-5975 | 249 | AGGCUGUGCUUCUCAGUGCUGGA | 581 | 5953-5975 |
| AD-1308369 | CACAGCUACCAGCUUUACAGU | 7654-7674 | 199 | ACUGUAAAGCUGGUAGCUGUGGG | 530 | 7652-7674 |
| AD-1308403 | CCUAUCACAGACCACCACACU | 6040-6060 | 161 | AGUGUGGUGGUCUGUGAUAGGCG | 492 | 6038-6060 |
| AD-1308420 | GGCCACCAUGUCCACAGCCAU | 6064-6084 | 162 | AUGGCUGUGGACAUGGUGGCCGU | 493 | 6062-6084 |
| AD-1308440 | CCUCCUCCACUCCAGAGACUU | 6087-6107 | 163 | AAGUCUCUGGAGUGGAGGAGGGU | 494 | 6085-6107 |
| AD-1308463 | CACACCUCCACAGUGCUUACU | 6110-6130 | 164 | AGUAAGCACUGUGGAGGUGUGGA | 531 | 7779-7801 |
| AD-1308488 | CAGGAACAGCUCACACUACCU | 6186-6206 | 165 | AGGUAGUGUGAGCUGUUCCUGGG | 496 | 6184-6206 |
| AD-1308512 | UGCCGACUACCACAACCACGU | 9981-10001 | 234 | ACGUGGUUGUGGUAGUCGGCACU | 566 | 9979-10001 |
| AD-1308555 | UCCAGUGUGGAUCAGCACAAU | 6277-6297 | 166 | AUUGUGCUGAUCCACACUGGAGG | 497 | 6275-6297 |
| AD-1308566 | CACCACACCCACAACCAGUGU | 11740-11760 | 250 | ACACUGGUUGUGGGUGUGGUGGU | 582 | 11738-11760 |
| AD-1308595 | CGCCAGAGUGCUGACCACCAU | 14002-14022 | 251 | AUGGUGGUCAGCACUCUGGCGGU | 583 | 14000-14022 |
| AD-1308629 | CACUGGUUCUAUGGCAACACU | 6397-6417 | 202 | AGUGUUGCCAUAGAACCAGUGGC | 534 | 6395-6417 |
| AD-1308652 | CCUCUAGCACACAGACCAGUU | 6420-6440 | 203 | AACUGGUCUGUGUGCUAGAGGAG | 535 | 6418-6440 |
| AD-1308673 | CCACGGCCACUACGAUCACGU | 6462-6482 | 204 | ACGUGAUCGUAGUGGCCGUGGUG | 536 | 6460-6482 |
| AD-1308702 | CAGGGACAACACCCAUCACCU | 14157-14177 | 252 | AGGUGAUGGGUGUUGUCCCUGGA | 584 | 14155-14177 |
| AD-1308733 | CUCCAAAGCCACUUCCUCCUU | 14218-14238 | 253 | AAGGAGGAAGUGGCUUUGGAGCU | 585 | 14216-14238 |
| AD-1308759 | CAAGGACUGCAACCACCCUUU | 9192-9212 | 236 | AAAGGGUGGUUGCAGUCCUUGGA | 568 | 9190-9212 |
| AD-1308782 | GUGCUGACAAGCACAGCCACU | 9215-9235 | 237 | AGUGGCUGUGCUUGUCAGCACUG | 569 | 9213-9235 |
| AD-1308783 | UGCUGACAAGCACAGCCACAU | 14268-14288 | 254 | AUGUGGCUGUGCUUGUCAGCACU | 586 | 14266-14288 |
| AD-1308808 | CACAGCUACCAGCUUUACACU | 9241-9261 | 238 | AGUGUAAAGCUGGUAGCUGUGGA | 570 | 9239-9261 |
| AD-1308818 | CUCCACCCUGUGGACCACGUU | 14323-14343 | 255 | AACGUGGUCCACAGGGUGGAGGA | 587 | 14321-14343 |
| AD-1308845 | CCCAGCACAGACCACCACACU | 14350-14370 | 256 | AGUGUGGUGGUCUGUGCUGGGAC | 588 | 14348-14370 |
| AD-1308868 | GUCCACCAUGUCCACAAUCCU | 14374-14394 | 257 | AGGAUUGUGGACAUGGUGGACAU | 589 | 14372-14394 |
| AD-1334094 | CCACCAUGUCCACAAUCCACU | 9324-9344 | 239 | AGUGGAUUGUGGACAUGGUGGCC | 571 | 9322-9344 |
| AD-1308890 | CCUCCUCUACUCCAGAGACCU | 14397-14417 | 258 | AGGUCUCUGGAGUAGAGGAGGUG | 590 | 14395-14417 |
| AD-1308912 | CACACCUCCACAGUGCUGACU | 9368-9388 | 259 | AGUCAGCACUGUGGAGGUGUGGG | 591 | 9366-9388 |
| AD-1308935 | CACAGCCACCAUGACAAGGGU | 14443-14463 | 260 | ACCCUUGUCAUGGUGGCUGUGGU | 592 | 14441-14463 |
| AD-1308963 | UCCACGGCCACACCCUCCUCU | 14471-14491 | 261 | AGAGGAGGGUGUGGCCGUGGAAU | 593 | 14469-14491 |
| AD-1308975 | GACCCGGAUCCUCACUGAGCU | 14503-14523 | 262 | AGCUCAGUGAGGAUCCGGGUCGU | 594 | 14501-14523 |
| AD-1308998 | CCACAACAGCCACUACAACUU | 14526-14546 | 263 | AAGUUGUAGUGGCUGUUGUGGUC | 595 | 14524-14546 |
| AD-1309007 | CCACUACAACUGCAGCCACUU | 9483-9503 | 240 | AAGUGGCUGCAGUUGUAGUGGCU | 572 | 9481-9503 |
| AD-1309026 | UGGAUCCACGGCCACCCUGUU | 14554-14574 | 264 | AACAGGGUGGCCGUGGAUCCAGU | 596 | 14552-14574 |
| AD-1309037 | GGGACCACCUGGAUCCUCACU | 7436-7456 | 205 | AGUGAGGAUCCAGGUGGUCCCUG | 537 | 7434-7456 |
| AD-1309039 | GACCACCUGGAUCCUCACAGU | 7438-7458 | 241 | ACUGUGAGGAUCCAGGUGGUCCC | 573 | 7436-7458 |
| AD-1309042 | CACCUGGAUCCUCACAGAGCU | 7441-7461 | 265 | AGCUCUGUGAGGAUCCAGGUGGU | 597 | 7439-7461 |
| AD-1309069 | UAUAGCCACCGUGAUGGUGCU | 14617-14637 | 266 | AGCACCAUCACGGUGGCUAUAGU | 598 | 14615-14637 |
| AD-1309105 | CCACUCUGGGAACAGCUCACU | 14664-14684 | 267 | AGUGAGCUGUUCCCAGAGUGGAG | 599 | 14662-14684 |
| AD-1309124 | CAUGGCCACUAUGCCCACAGU | 14704-14724 | 268 | ACUGUGGGCAUAGUGGCCAUGGU | 600 | 14702-14724 |
| AD-1309148 | UGCCUCCACGGUUCCCAGCUU | 14728-14748 | 269 | AAGCUGGGAACCGUGGAGGCAGU | 601 | 14726-14748 |
| AD-1309167 | CCUGCCAACCUUCAGCGUGUU | 14794-14814 | 270 | AACACGCUGAAGGUUGGCAGGCU | 602 | 14792-14814 |
| AD-1309192 | GUGUCCUCCUCAGUCCUCACU | 14819-14839 | 271 | AGUGAGGACUGAGGAGGACACAG | 603 | 14817-14839 |
| AD-1309216 | CAGCUCCCACUUCUCUACUCU | 14863-14883 | 272 | AGAGUAGAGAAGUGGGAGCUGGG | 604 | 14861-14883 |
| AD-1309250 | GCAUUUGGACAGUUUUUCUCU | 14897-14917 | 273 | AGAGAAAAACUGUCCAAAUGCCC | 605 | 14895-14917 |
| AD-1309259 | GAAGUCAUCUACAAUAAGACU | 14924-14944 | 274 | AGUCUUAUUGUAGAUGACUUCCC | 606 | 14922-14944 |
| AD-1309287 | CUGCCAUUUCUACGCAGUGUU | 14956-14976 | 275 | AACACUGCGUAGAAAUGGCAGCC | 607 | 14954-14976 |
| AD-1309315 | CACUGUGACAUUGACCGCUUU | 14984-15004 | 276 | AAAGCGGUCAAUGUCACAGUGCU | 608 | 14982-15004 |
| AD-1309337 | UGUGACAAUGCCAUCCCUCUU | 15077-15097 | 277 | AAGAGGGAUGGCAUUGUCACAGC | 609 | 15075-15097 |
| AD-1309379 | ACCCUGGAGAACUGCACGGUU | 15119-15139 | 278 | AACCGUGCAGUUCUCCAGGGUCC | 610 | 15117-15139 |
| AD-1309406 | GUGGGUGACAACCGUGUCGUU | 15149-15169 | 279 | AACGACACGGUUGUCACCCACGC | 611 | 15147-15169 |
| AD-1309433 | GACCCAAAGCCUGUGGCCAAU | 15176-15196 | 280 | AUUGGCCACAGGCUUUGGGUCCA | 612 | 15174-15196 |
| AD-1309459 | CUGCGUGAACAAGCACCUGCU | 15202-15222 | 281 | AGCAGGUGCUUGUUCACGCAGGU | 613 | 15200-15222 |
| AD-1309482 | UCAAAGUGUCGGACCCGAGCU | 15225-15245 | 282 | AGCUCGGGUCCGACACUUUGAUG | 614 | 15223-15245 |
| AD-1309503 | CUGUGACUUCCACUAUGAGUU | 15250-15270 | 283 | AACUCAUAGUGGAAGUCACAGGG | 615 | 15248-15270 |
| AD-1309526 | AGUGCAUCUGCAGCAUGUGGU | 15273-15293 | 284 | ACCACAUGCUGCAGAUGCACUCG | 616 | 15271-15293 |
| AD-1309535 | CCCACUAUUCCACCUUUGACU | 15300-15320 | 285 | AGUCAAAGGUGGAAUAGUGGGAG | 617 | 15298-15320 |
| AD-1309567 | ACCUAUGUCCUCAUGAGAGAU | 15350-15370 | 286 | AUCUCUCAUGAGGACAUAGGUGC | 618 | 15348-15370 |
| AD-1309595 | CACGCUUUGGGAAUCUCAGCU | 15378-15398 | 287 | AGCUGAGAUUCCCAAAGCGUGCA | 619 | 15376-15398 |
| AD-1309621 | CUGGACAACCACUACUGCACU | 15404-15424 | 288 | AGUGCAGUAGUGGUUGUCCAGGU | 620 | 15402-15424 |
| AD-1309647 | CCUCAGCAUCCACUACAAGUU | 15463-15483 | 289 | AACUUGUAGUGGAUGCUGAGGGC | 621 | 15461-15483 |
| AD-1309678 | GUCCUCACUGUCACCAUGGUU | 15494-15514 | 290 | AACCAUGGUGACAGUGAGGACGA | 622 | 15492-15514 |
| AD-1309720 | AUCCUGUUUGACCAAAUUCCU | 15536-15556 | 291 | AGGAAUUUGGUCAAACAGGAUCA | 623 | 15534-15556 |
| AD-1309747 | AGCGGUUUCAGCAAGAACGGU | 15563-15583 | 292 | ACCGUUCUUGCUGAAACCGCUGC | 624 | 15561-15583 |
| AD-1309780 | AUGCGUGUGGACAUUCCUGCU | 15614-15634 | 293 | AGCAGGAAUGUCCACACGCAUGG | 625 | 15612-15634 |
| AD-1309804 | GUGAGCGUCACCUUCAAUGGU | 15641-15661 | 294 | ACCAUUGAAGGUGACGCUCACGC | 626 | 15639-15661 |
| AD-1309844 | AGCCUCUUCCACAACAACACU | 15689-15709 | 295 | AGUGUUGUUGUGGAAGAGGCUGU | 627 | 15687-15709 |
| AD-1309872 | CACCUGCACCAACAACCAGAU | 15724-15744 | 296 | AUCUGGUUGUUGGUGCAGGUGCC | 628 | 15722-15744 |
| AD-1309900 | UGUCUCCAGCGGGACGGAACU | 15752-15772 | 297 | AGUUCCGUCCCGCUGGAGACAGU | 629 | 15750-15772 |
| AD-1309926 | CGCCAGUUGCAAGGACAUGGU | 15778-15798 | 298 | ACCAUGUCCUUGCAACUGGCGGC | 630 | 15776-15798 |
| AD-1309945 | CGACAGCAGAAAGGAUGGCUU | 15817-15837 | 299 | AAGCCAUCCUUUCUGCUGUCGGG | 631 | 15815-15837 |
| AD-1309969 | CCGCUCUGUGAUCUGAUGCUU | 15923-15943 | 300 | AAGCAUCAGAUCACAGAGCGGCU | 632 | 15921-15943 |
| AD-1309993 | CAGGUCUUUGCUGAGUGCCAU | 15947-15967 | 301 | AUGGCACUCAGCAAAGACCUGGC | 633 | 15945-15967 |
| AD-1310022 | CGCCUGCAUCAGCGACCACUU | 15997-16017 | 302 | AAGUGGUCGCUGAUGCAGGCGUU | 634 | 15995-16017 |
| AD-1310059 | GAGGCUUACGCAGAGCUCUGU | 16052-16072 | 303 | ACAGAGCUCUGCGUAAGCCUCCA | 635 | 16050-16072 |
| AD-1310068 | AGUGUGCAGUGACUGGCGAGU | 16084-16104 | 304 | ACUCGCCAGUCACUGCACACUCC | 636 | 16082-16104 |
| AD-1310124 | CACCAAAGUGUACAAGCCAUU | 16141-16161 | 305 | AAUGGCUUGUACACUUUGGUGGG | 637 | 16139-16161 |
| AD-1310146 | CUGCAACUCUAGGAACCAGAU | 16183-16203 | 306 | AUCUGGUUCCUAGAGUUGCAGGU | 638 | 16181-16203 |
| AD-1310192 | GACCAGAUCCUCUUCAACGCU | 16247-16267 | 307 | AGCGUUGAAGAGGAUCUGGUCCU | 639 | 16245-16267 |
| AD-1310215 | CAUGGGCAUCUGCGUGCAGGU | 16270-16290 | 308 | ACCUGCACGCAGAUGCCCAUGUG | 640 | 16268-16290 |
| AD-1310234 | CGAUGGGUUUCCUAAAUUUCU | 16309-16329 | 309 | AGAAAUUUAGGAAACCCAUCGGG | 641 | 16307-16329 |
| AD-1310249 | GGUCAGCAACUGCCAGUCCUU | 16342-16362 | 310 | AAGGACUGGCAGUUGCUGACCCA | 642 | 16340-16362 |
| AD-1310280 | GAGGGUUCAGUGUCGGUGCAU | 16373-16393 | 311 | AUGCACCGACACUGAACCCUCGU | 643 | 16371-16393 |
| AD-1310310 | CCGGCUUCGUAACCGUGACCU | 16446-16466 | 312 | AGGUCACGGUUACGAAGCCGGGA | 644 | 16444-16466 |
| AD-1310328 | CGUGUGCAACACAACCACCUU | 16507-16527 | 313 | AAGGUGGUUGUGUUGCACACGCA | 645 | 16505-16527 |
| AD-1310345 | GGCAGGAGUCCAUCUGCACCU | 16557-16577 | 314 | AGGUGCAGAUGGACUCCUGCCCU | 646 | 16555-16577 |
| AD-1310378 | CUGCUGUCCCACCUUCCGCUU | 16591-16611 | 315 | AAGCGGAAGGUGGGACAGCAGUC | 647 | 16589-16611 |
| AD-1310405 | UCAGCUGUGUUCGUACAAUGU | 16618-16638 | 316 | ACAUUGUACGAACACAGCUGAGG | 648 | 16616-16638 |
| AD-1310422 | UUGGUGCAACCUUCCCAGGCU | 16653-16673 | 317 | AGCCUGGGAAGGUUGCACCAACC | 649 | 16651-16673 |
| AD-1310443 | UCCCUGCCACAUGUGUACCUU | 16678-16698 | 318 | AAGGUACACAUGUGGCAGGGAAG | 650 | 16676-16698 |
| AD-1310466 | ACCCAACGGUGCAAUGUCAGU | 16719-16739 | 319 | ACUGACAUUGCACCGUUGGGUCC | 651 | 16717-16739 |
| AD-1310493 | CCUGCAACAAUACUACCUGUU | 16746-16766 | 320 | AACAGGUAGUAUUGUUGCAGGCA | 652 | 16744-16766 |
| AD-1310497 | AGGGCUUUGAGUACAAGAGAU | 16770-16790 | 321 | AUCUCUUGUACUCAAAGCCCUGG | 653 | 16768-16790 |
| AD-1310552 | AGUCCAGCUGAAUGAAACCUU | 16852-16872 | 322 | AAGGUUUCAUUCAGCUGGACUGG | 654 | 16850-16872 |
| AD-1310576 | CAACAGCCAUGUGGACAACUU | 16876-16896 | 323 | AAGUUGUCCACAUGGCUGUUGAC | 655 | 16874-16896 |
| AD-1310599 | CCGUGUACCUCUGUGAGGCUU | 16899-16919 | 324 | AAGCCUCACAGAGGUACACGGUG | 656 | 16897-16919 |
| AD-1310622 | GGUGGAGUCCAUUUGCUGACU | 16922-16942 | 325 | AGUCAGCAAAUGGACUCCACCCU | 657 | 16920-16942 |
| AD-1310637 | CUGCCCAGAUGUGUCCAGCUU | 16957-16977 | 326 | AAGCUGGACACAUCUGGGCAGGA | 658 | 16955-16977 |
| AD-1310665 | GCUGCUACUCCUGUGAGGAGU | 17004-17024 | 327 | ACUCCUCACAGGAGUAGCAGCAG | 659 | 17002-17024 |
| AD-1310689 | CCUGUCAAGUCCGCAUCAACU | 17028-17048 | 328 | AGUUGAUGCGGACUUGACAGGAG | 660 | 17026-17048 |
| AD-1310714 | CAUCCUGUGGCACCAGGGCUU | 17053-17073 | 329 | AAGCCCUGGUGCCACAGGAUGGU | 661 | 17051-17073 |
| AD-1310741 | CGAGGUCAACAUCACCUUCUU | 17080-17100 | 330 | AAGAAGGUGAUGUUGACCUCGGU | 662 | 17078-17100 |
| AD-1310762 | CGUCCAAGUACUCAGCAGAGU | 17121-17141 | 331 | ACUCUGCUGAGUACUUGGACGCU | 663 | 17119-17141 |
| AD-1310790 | CAUGCAGCACCAGUGCACCUU | 17149-17169 | 332 | AAGGUGCACUGGUGCUGCAUGGC | 664 | 17147-17169 |
| AD-1310845 | CUUGCACUGUCCUAACGGCUU | 17206-17226 | 333 | AAGCCGUUAGGACAGUGCAAGGG | 665 | 17204-17226 |
| AD-1310873 | CUGCACACCUACACCCACGUU | 17234-17254 | 334 | AACGUGGGUGUAGGUGUGCAGGA | 666 | 17232-17254 |
| AD-1310907 | GCACGCCCUUCUGUGUCCCUU | 17268-17288 | 335 | AAGGGACACAGAAGGGCGUGCAG | 667 | 17266-17288 |
| AD-1310938 | ACUGCUGUCUGAGAACGUUCU | 17336-17356 | 336 | AGAACGUUCUCAGACAGCAGUGG | 668 | 17334-17356 |
| AD-1310950 | CAUGCUCUGUCCACCUGGAGU | 17368-17388 | 337 | ACUCCAGGUGGACAGAGCAUGGG | 669 | 17366-17388 |
| AD-1310979 | GCAUUGUCUGAUCAUGAAAAU | 17397-17417 | 338 | AUUUUCAUGAUCAGACAAUGCAC | 670 | 17395-17417 |
| AD-1311016 | GGCGCCACUCAGGAGUCCUAU | 17544-17564 | 339 | AUAGGACUCCUGAGUGGCGCCCU | 671 | 17542-17564 |
| AD-1311052 | CUCCCUGAUGUCACUGGGACU | 17600-17620 | 340 | AGUCCCAGUGACAUCAGGGAGGG | 672 | 17598-17620 |
| AD-1311075 | CUGGAACAAACUAAGCAUGUU | 17623-17643 | 341 | AACAUGCUUAGUUUGUUCCAGGG | 673 | 17621-17643 |
| AD-1311115 | CACGGAUUCCAGCUGGCCACU | 17685-17705 | 342 | AGUGGCCAGCUGGAAUCCGUGCU | 674 | 17683-17705 |
| AD-1311126 | GACAGGCUGGUCCAGGCAAGU | 17722-17742 | 343 | ACUUGCCUGGACCAGCCUGUCUG | 675 | 17720-17742 |
| AD-1311154 | CUGCCAGGAAGCUGCGACAGU | 17750-17770 | 344 | ACUGUCGCAGCUUCCUGGCAGCA | 676 | 17748-17770 |
| AD-1311185 | CUGCUGCAGGGUAACUCAGGU | 17793-17813 | 345 | ACCUGAGUUACCCUGCAGCAGGC | 677 | 17791-17813 |
| AD-1311214 | GCAACGGCCAGGUCAGAGAGU | 17822-17842 | 346 | ACUCUCUGACCUGGCCGUUGCGA | 678 | 17820-17842 |
| AD-1311231 | CCCAGUUUUGCAAAUAAACCU | 17878-17898 | 347 | AGGUUUAUUUGCAAAACUGGGCU | 679 | 17876-17898 |

TABLE 3
Modified Sense and Antisense Strand MUC5B dsRNA Sequences

| | | SEQ | | SEQ |
|---|---|---|---|---|
| | | ID | | ID |
| Duplex Name | Sense Sequence 5′-3′ | NO: | Antisense Sequence 5′-3′ | NO: |
| AD-1302944 | ususggcuCfuGfGfCfggccaugcuuL96 | 680 | asAfsgcaUfgGfCfcgccAfgAfgccaascsa | 1011 |
| AD-1302994 | cscsgagcUfgGfGfAfgaaugcagguL96 | 681 | asCfscugCfaUfUfcuccCfaGfcucggscsu | 1012 |
| AD-1303025 | gscsgcguGfaGfCfUfuuguuccacuL96 | 682 | asGfsuggAfaCfAfaagcUfcAfcgcgcscsg | 1013 |
| AD-1303054 | usgsggcgGfgUfGfUfgcagcaccuuL96 | 683 | asAfsgguGfcUfGfcacaCfcCfgcccasusu | 1014 |
| AD-1303066 | cscsacuaCfaAfGfAfccuucgacguL96 | 684 | asCfsgucGfaAfGfgucuUfgUfaguggsasa | 1015 |
| AD-1303108 | cscsuuugCfaAfCfUfacguguucuuL96 | 685 | asAfsgaaCfaCfGfuaguUfgCfaaaggscsc | 1016 |
| AD-1303139 | gsasggacUfuCfAfAfcguccagcuuL96 | 686 | asAfsgcuGfgAfCfguugAfaGfuccucsgsu | 1017 |
| AD-1303190 | uscsacccGfuGfUfUfgucaucaaguL96 | 687 | asCfsuugAfuGfAfcaacAfcGfggugascsc | 1018 |
| AD-1303222 | gsgscuccGfuCfCfUfcaucaaugguL96 | 688 | asCfscauUfgAfUfgaggAfcGfgagccsgsu | 1019 |
| AD-1303251 | gscsugccUfuAfCfAfgccgcacuguL96 | 689 | asCfsaguGfcGfGfcuguAfaGfgcagcsusc | 1020 |
| AD-1303275 | gsascuacAfuCfAfAfggucagcauuL96 | 690 | asAfsugcUfgAfCfcuugAfuGfuagucscsc | 1021 |
| AD-1303304 | gscsugacAfuUfCfCfuguggaacguL96 | 691 | asCfsguuCfcAfCfaggaAfuGfucagcsasc | 1022 |
| AD-1303344 | gsasgcugGfaUfCfCfcaaauacgcuL96 | 692 | asGfscguAfuUfUfgggaUfcCfagcucscsa | 1023 |
| AD-1303368 | csasgaccUfgUfGfGfccugugugguL96 | 693 | asCfscacAfcAfGfgccaCfaGfgucugsgsu | 1024 |
| AD-1303389 | gscscuucAfaCfGfAfguucuaugcuL96 | 694 | asGfscauAfgAfAfcucgUfuGfaaggcscsg | 1025 |
| AD-1303422 | gsasaccuGfcAfGfAfaguuggauguL96 | 695 | asCfsaucCfaAfCfuucuGfcAfgguucscsc | 1026 |
| AD-1303457 | usgscacgGfaCfGfAfggagggcauuL96 | 696 | asAfsugcCfcUfCfcucgUfcCfgugcasgsu | 1027 |
| AD-1303507 | gsusggacAfgCfAfCfugcguaccuuL96 | 697 | asAfsgguAfcGfCfagugCfuGfuccacscsa | 1028 |
| AD-1303537 | gscscaccUfuUfGfUfggaauacucuL96 | 698 | asGfsaguAfuUfCfcacaAfaGfguggcsasc | 1029 |
| AD-1303569 | csusggagGfuGfCfCfcugagcucuuL96 | 699 | asAfsgagCfuCfAfgggcAfcCfuccagsusu | 1030 |
| AD-1303573 | csuscaacAfuGfCfAfgcaccaggauL96 | 700 | asUfsccuGfgUfGfcugcAfuGfuugagsgsg | 1031 |
| AD-1303602 | ascsccugCfaCfGfGfacaccugcuuL96 | 701 | asAfsgcaGfgUfGfuccgUfgCfagggusgsa | 1032 |
| AD-1303626 | gsgsaccaCfuGfUfGfuggacggcuuL96 | 702 | asAfsgccGfuCfCfacacAfgUfgguccsusc | 1033 |
| AD-1303646 | gscsuggaUfgAfCfAfucacgcacuuL96 | 703 | asAfsgugCfgUfGfauguCfaUfccagcsasc | 1034 |
| AD-1303679 | csasccucCfuUfCfAfacaccaccuuL96 | 704 | asAfsgguGfgUfGfuugaAfgGfaggugscsc | 1035 |
| AD-1303705 | csusauggCfaGfUfGfccaggaccuuL96 | 705 | asAfsgguCfcUfGfgcacUfgCfcauagscsc | 1036 |
| AD-1303746 | cscsuaugAfuGfAfGfaaacucuacuL96 | 706 | asGfsuagAfgUfUfucucAfuCfauaggsusg | 1037 |
| AD-1303787 | usascguuCfuGfUfCfcaagaaauguL96 | 707 | asCfsauuUfcUfUfggacAfgAfacguasgsc | 1038 |
| AD-1303811 | gsascagcAfgCfUfUfcaccgugcuuL96 | 708 | asAfsgcaCfgGfUfgaagCfuGfcugucsgsg | 1039 |
| AD-1303862 | asascgagAfaCfUfGfccugaaagcuL96 | 709 | asGfscuuUfcAfGfgcagUfuCfucguusgsu | 1040 |
| AD-1303914 | uscscucaAfcUfCfCfaucuacacguL96 | 710 | asCfsgugUfaGfAfuggaGfuUfgaggasasc | 1041 |
| AD-1303932 | gscscaacAfuCfAfCfccuguucacuL96 | 711 | asGfsugaAfcAfGfggugAfuGfuuggcsusg | 1042 |
| AD-1303956 | uscsgagcUfuCfUfUfcaucgugguuL96 | 712 | asAfsccaCfgAfUfgaagAfaGfcucgasgsg | 1043 |
| AD-1303977 | csasgcugCfuGfGfUfgcagcugguuL96 | 713 | asAfsccaGfcUfGfcaccAfgCfagcugscsa | 1044 |
| AD-1304001 | csuscaugCfaGfGfUfguuugucaguL96 | 714 | asCfsugaCfaAfAfcaccUfgCfaugagsusg | 1045 |
| AD-1304039 | gsusgggaAfcUfUfCfaaccagaacuL96 | 715 | asGfsuucUfgGfUfugaaGfuUfcccacsasc | 1046 |
| AD-1304064 | usgsacgaCfuUfCfAfcggcccucauL96 | 716 | asUfsgagGfgCfCfgugaAfgUfcgucasgsc | 1047 |
| AD-1304077 | asgsccuuCfgCfCfAfacaccuggauL96 | 717 | asUfsccaGfgUfGfuuggCfgAfaggcusgsc | 1048 |
| AD-1304119 | cscsaggaAfcAfGfCfuuugaggacuL96 | 718 | asGfsuccUfcAfAfagcuGfuUfccuggscsa | 1049 |
| AD-1304134 | gsusggagAfaUfGfAfgaacuacgcuL96 | 719 | asGfscguAfgUfUfcucaUfuCfuccacsasc | 1050 |
| AD-1304174 | uscsccaaCfaGfUfGfccuucucgcuL96 | 720 | asGfscgaGfaAfGfgcacUfgUfugggasusc | 1051 |
| AD-1304202 | csusuccaCfuCfGfAfacugcauguuL96 | 721 | asAfscauGfcAfGfuucgAfgUfggaagsgsg | 1052 |
| AD-1304226 | csasccugCfaAfCfUfgugagcggauL96 | 722 | asUfsccgCfuCfAfcaguUfgCfaggugsusc | 1053 |
| AD-1304262 | cscsuccuAfuGfUfGfcacgccuguuL96 | 723 | asAfscagGfcGfUfgcacAfuAfggaggsasc | 1054 |
| AD-1304286 | gsgsgcguAfcAfGfCfucagcgacuuL96 | 724 | asAfsgucGfcUfGfagcuGfuAfcgcccsusu | 1055 |
| AD-1304322 | ascscaagUfaCfAfUfgcagaacuguL96 | 725 | asCfsaguUfcUfGfcaugUfaCfuuggusgsc | 1056 |
| AD-1304326 | asasguccCfaGfCfGfcuacgccuauL96 | 726 | asUfsaggCfgUfAfgcgcUfgGfgacuusgsg | 1057 |
| AD-1304352 | gsgsaugcCfuGfCfCfagcccacuuuL96 | 727 | asAfsaguGfgGfCfuggcAfgGfcauccsasc | 1058 |
| AD-1304386 | uscsaccuGfcAfGfCfguuuccuucuL96 | 728 | asGfsaagGfaAfAfcgcuGfcAfggugascsg | 1059 |
| AD-1304415 | gsgsgcacCfuUfCfCfucaaugacguL96 | 729 | asCfsgucAfuUfGfaggaAfgGfugcccsgsc | 1060 |
| AD-1304454 | csusggcuCfcUfGfGfagaggugguuL96 | 730 | asAfsccaCfcUfCfuccaGfgAfgccagscsa | 1061 |
| AD-1304482 | cscsguguGfuUfCfAfuguacggguuL96 | 731 | asAfscccGfuAfCfaugaAfcAfcacggscsg | 1062 |
| AD-1304524 | cscsucucUfgCfAfGfaaaagcacauL96 | 732 | asUfsgugCfuUfUfucugCfaGfagaggscsu | 1063 |
| AD-1304546 | cscsuggaCfuGfCfAfgcaacagcuuL96 | 733 | asAfsgcuGfuUfGfcugcAfgUfccaggsusa | 1064 |
| AD-1304596 | gscsuguuUfcAfGfCfacacacugcuL96 | 734 | asGfscagUfgUfGfugcuGfaAfacagcscsc | 1065 |
| AD-1304624 | csusgcauUfgCfCfGfaggaggacuuL96 | 735 | asAfsgucCfuCfCfucggCfaAfugcagscsc | 1066 |
| AD-1304646 | csasccuaCfaAfGfCfcuggagagauL96 | 736 | asUfscucUfcCfAfggcuUfgUfaggugsgsc | 1067 |
| AD-1304676 | csgsacugCfaAfCfAfccugcaccuuL96 | 737 | asAfsgguGfcAfGfguguUfgCfagucgsasc | 1068 |
| AD-1304700 | gsasaccgGfaGfGfUfgggagugcauL96 | 738 | asUfsgcaCfuCfCfcaccUfcCfgguucscsu | 1069 |
| AD-1304732 | usgsgccaCfuUfCfAfucaccuuuguL96 | 739 | asCfsaaaGfgUfGfaugaAfgUfggccasusc | 1070 |
| AD-1304756 | csgsaucgCfuAfCfAfgcuuugaaguL96 | 740 | asCfsuucAfaAfGfcuguAfgCfgaucgscsc | 1071 |
| AD-1304779 | gscsugcgAfgUfAfCfaucuuggccuL96 | 741 | asGfsgccAfaGfAfuguaCfuCfgcagcsusg | 1072 |
| AD-1304818 | uscscgcaUfcGfUfCfaccgagaacuL96 | 742 | asGfsuucUfcGfGfugacGfaUfgcggasasg | 1073 |
| AD-1304850 | asasggccAfuCfAfAfgcucuucguuL96 | 743 | asAfscgaAfgAfGfcuugAfuGfgccuusgsg | 1074 |
| AD-1304873 | gsasgcuaCfgAfGfCfugauccuccuL96 | 744 | asGfsgagGfaUfCfagcuCfgUfagcucsusc | 1075 |
| AD-1304882 | gsasccuuUfaAfGfGfcgguggcgauL96 | 745 | asUfscgcCfaCfCfgccuUfaAfaggucscsc | 1076 |
| AD-1304894 | csascccuAfcAfAfGfauacgcuacuL96 | 746 | asGfsuagCfgUfAfucuuGfuAfgggugsgsg | 1077 |
| AD-1304902 | asuscuucCfuGfGfUfcaucgagacuL96 | 747 | asGfsucuCfgAfUfgaccAfgGfaagauscsc | 1078 |
| AD-1304953 | csasgcguGfuUfCfAfuccgacugcuL96 | 748 | asGfscagUfcGfGfaugaAfcAfcgcugsgsu | 1079 |
| AD-1304977 | gsgsacuaCfaAfGfGfgcagggucuuL96 | 749 | asAfsgacCfcUfGfcccuUfgUfaguccsusg | 1080 |
| AD-1305014 | gsascaauGfcCfAfUfcaaugacuuuL96 | 750 | asAfsaguCfaUfUfgaugGfcAfuugucsgsu | 1081 |
| AD-1305043 | gscsacugGfaGfUfUfugggaacaguL96 | 751 | asCfsuguUfcCfCfaaacUfcCfagugcsgsu | 1082 |
| AD-1305082 | csasgaagCfaGfUfGfcagcauccuuL96 | 752 | asAfsggaUfgCfUfgcacUfgCfuucugsgsg | 1083 |
| AD-1305104 | cscsagguUfgAfCfUfccaccaaguuL96 | 753 | asAfscuuGfgUfGfgaguCfaAfccuggsgsa | 1084 |
| AD-1305128 | csgsaggcCfuGfCfGfugaacgacguL96 | 754 | asCfsgucGfuUfCfacgcAfgGfccucgsusa | 1085 |
| AD-1305170 | ascsugcgAfgUfGfUfuucugcacguL96 | 755 | asCfsgugCfaGfAfaacaCfuCfgcaguscsg | 1086 |
| AD-1305212 | usgsugugUfgUfCfCfuggcggacuuL96 | 756 | asAfsgucCfgCfCfaggaCfaCfacacasgsg | 1087 |
| AD-1305228 | usgsuucuGfuGfAfCfuucuacaacuL96 | 757 | asGfsuugUfaGfAfagucAfcAfgaacasasg | 1088 |
| AD-1305240 | csusgugaGfuGfGfCfacuaccagcuL96 | 758 | asGfscugGfuAfGfugccAfcUfcacagscsc | 1089 |
| AD-1305297 | gscsugcuAfcCfCfGfaagugcccauL96 | 759 | asUfsgggCfaCfUfucggGfuAfgcagescsu | 1090 |
| AD-1305321 | asgscccuUfcUfUfCfaaugaggacuL96 | 760 | asGfsuccUfcAfUfugaaGfaAfgggcusgsg | 1091 |
| AD-1305347 | asasgugcGfuGfGfCfccagugugguL96 | 761 | asCfscacAfcUfGfggccAfcGfcacuuscsa | 1092 |
| AD-1305370 | csusacgaCfaAfGfGfacggaaacuuL96 | 762 | asAfsguuUfcCfGfuccuUfgUfcguagscsa | 1093 |
| AD-1305393 | asusgacgUfcGfGfUfgcaagggucuL96 | 763 | asGfsaccCfuUfGfcaccGfaCfgucausasg | 1094 |
| AD-1305410 | cscsagagCfuGfUfAfacugcacacuL96 | 764 | asGfsuguGfcAfGfuuacAfgCfucuggscsa | 1095 |
| AD-1305441 | csasgugcGfcUfCfAfcagccuugauL96 | 765 | asUfscaaGfgCfUfgugaGfcGfcacugsgsa | 1096 |
| AD-1305471 | usgscaccUfaUfGfAfggacaggacuL96 | 766 | asGfsuccUfgUfCfcucaUfaGfgugcasgsg | 1097 |
| AD-1305501 | csasggacGfuCfAfUfcuacaacacuL96 | 767 | asGfsuguUfgUfAfgaugAfcGfuccugsgsu | 1098 |
| AD-1305536 | csgsccugCfuUfGfAfucgccaucuuL96 | 768 | asAfsgauGfgCfGfaucaAfgCfaggcgscsc | 1099 |
| AD-1305570 | ascscaucAfuCfAfGfgaaggcuguuL96 | 769 | asAfscagCfcUfUfccugAfuGfauggusgsc | 1100 |
| AD-1305610 | cscsacaaCfgCfCfAfuucaccuucuL96 | 770 | asGfsaagGfuGfAfauggCfgUfuguggscsu | 1101 |
| AD-1305643 | uscscaccGfuGfUfGfuguccgcgauL96 | 771 | asUfscgcGfgAfCfacacAfcGfguggasgsa | 1102 |
| AD-1305672 | gsusccagCfuGfGfUfacaaugggcuL96 | 772 | asGfscccAfuUfGfuaccAfgCfuggacscsa | 1103 |
| AD-1305701 | gsascuuuGfaGfAfCfguuugaaaauL96 | 773 | asUfsuuuCfaAfAfcgucUfcAfaagucsusc | 1104 |
| AD-1305731 | asgsagggUfaCfCfAfgguaugcccuL96 | 774 | asGfsggcAfuAfCfcuggUfaCfccucuscsu | 1105 |
| AD-1305754 | gscsuggcUfgAfCfAfucgagugccuL96 | 775 | asGfsgcaCfuCfGfauguCfaGfccagcsasc | 1106 |
| AD-1305771 | csusucccGfaCfAfUfgccgcuggauL96 | 776 | asUfsccaGfcGfGfcaugUfcGfggaagscsu | 1107 |
| AD-1305801 | csasggugGfaCfUfGfugaccgcauuL96 | 777 | asAfsugcGfgUfCfacagUfcCfaccugscsu | 1108 |
| AD-1305817 | csgsccaaCfaGfCfCfaacagagucuL96 | 778 | asGfsacuCfuGfUfuggcUfgUfuggcgscsa | 1109 |
| AD-1305821 | csuscuguCfaCfGfAfcuacgagcuuL96 | 779 | asAfsgcuCfgUfAfgucgUfgAfcagagscsg | 1110 |
| AD-1305847 | uscsucugCfuGfCfGfaauacgugcuL96 | 780 | asGfscacGfuAfUfucgcAfgCfagagasasc | 1111 |
| AD-1305889 | csascggaGfcCfUfGfcugugccuauL96 | 781 | asUfsaggCfaCfAfgcagGfcUfccgugscsu | 1112 |
| AD-1305898 | asgsaccaCfaGfCfAfaccgaaaaguL96 | 782 | asCfsuuuUfcGfGfuugcUfgUfggucusgsg | 1113 |
| AD-1305930 | csuscgcaGfaCfUfGfgguccagcuuL96 | 783 | asAfsgcuGfgAfCfccagUfcUfgcgagsgsu | 1114 |
| AD-1305948 | gsusggacAfgAfGfUfgguuugauguL96 | 784 | asCfsaucAfaAfCfcacuCfuGfuccacsusg | 1115 |
| AD-1305958 | csasagucUfgAfAfCfaacuuggaguL96 | 785 | asCfsuccAfaGfUfuguuCfaGfacuugsgsg | 1116 |
| AD-1305966 | ususgaguCfcUfAfCfgauaagaucuL96 | 786 | asGfsaucUfuAfUfcguaGfgAfcucaascsg | 1117 |
| AD-1306008 | gscsagccUfaAfGfGfacauagaguuL96 | 787 | asAfscucUfaUfGfuccuUfaGfgcugcsusg | 1118 |
| AD-1306030 | csusggacCfcUfGfGfcacaggugguL96 | 788 | asCfscacCfuGfUfgccaGfgGfuccagsusu | 1119 |
| AD-1306042 | gscsacugUfgAfCfGfuccacuucguL96 | 789 | asCfsgaaGfuGfGfacguCfaCfagugcsasc | 1120 |
| AD-1306069 | gsusgcagGfaAfCfUfgggagcagguL96 | 790 | asCfscugCfuCfCfcaguUfcCfugcacsasc | 1121 |
| AD-1306099 | csasagauGfuGfCfUfacaacuacauL96 | 791 | asUfsguaGfuUfGfuagcAfcAfucuugsasa | 1122 |
| AD-1306132 | csusgcugCfaGfUfGfacgaccacuuL96 | 792 | asAfsgugGfuCfGfucacUfgCfagcagsasg | 1123 |
| AD-1306144 | csgsaccaCfaGfAfGfcuggagacguL96 | 793 | asCfsgucUfcCfAfgcucUfgUfggucgsgsu | 1124 |
| AD-1306168 | ascsccagGfcCfCfUfguucucaacuL96 | 794 | asGfsuugAfgAfAfcaggGfcCfugggusgsg | 1125 |
| AD-1306198 | csuscucaGfaAfGfGfacugacaucuL96 | 795 | asGfsaugUfcAfGfuccuUfcUfgagagsgsg | 1126 |
| AD-1306200 | csasgauaCfaCfAfAfgcacccuuguL96 | 796 | asCfsaagGfgUfGfcuugUfgUfaucugsgsg | 1127 |
| AD-1306235 | gscsuccaCfaGfAfAfcccacugucuL96 | 797 | asGfsacaGfuGfGfguucUfgUfggagcscsu | 1128 |
| AD-1306254 | csascccuUfcCfAfAfcacgcucaguL96 | 798 | asCfsugaGfcGfUfguugGfaAfgggugsgsa | 1129 |
| AD-1306278 | csasacaaCfaAfUfGfgcaaccuccuL96 | 799 | asGfsgagGfuUfGfccauUfgUfuguugsgsg | 1130 |
| AD-1306324 | ascscgcuUfcCfAfAfagagccgcuuL96 | 800 | asAfsgcgGfcUfCfuuugGfaAfgcggusgsc | 1131 |
| AD-1306359 | cscsaacaCfuCfAfCfgagcgagcuuL96 | 801 | asAfsgcuCfgCfUfcgugAfgUfguuggscsg | 1132 |
| AD-1306382 | csasccucUfcAfGfGfccgagaccauL96 | 802 | asUfsgguCfuCfGfgccuGfaGfaggugsgsa | 1133 |
| AD-1306406 | cscsaggaCfaGfAfGfacgacaauguL96 | 803 | asCfsauuGfuCfGfucucUfgUfccuggsgsc | 1134 |
| AD-1306411 | csusugacUfaAfCfAfccaccaccauL96 | 804 | asUfsgguGfgUfGfguguUfaGfucaagsgsg | 1135 |
| AD-1306442 | csusgucaAfcCfGfAfagugugaguuL96 | 805 | asAfscucAfcAfCfuucgGfuUfgacagscsg | 1136 |
| AD-1306478 | csgsuggaCfuUfCfCfcaaccucaguL96 | 806 | asCfsugaGfgUfUfgggaAfgUfccacgsusc | 1137 |
| AD-1306483 | ascsauggAfaAfCfUfuuugaaaacuL96 | 807 | asGfsuuuUfcAfAfaaguUfuCfcauguscsc | 1138 |
| AD-1306514 | gscsaccaAfaGfAfGfcauagaguguL96 | 808 | asCfsacuCfuAfUfgcucUfuUfggugcscsc | 1139 |
| AD-1306535 | gsgsuaagCfaUfCfGfaccaggucguL96 | 809 | asCfsgacCfuGfGfucgaUfgCfuuaccsusc | 1140 |
| AD-1306563 | csusgaccUfgCfAfGfccuggagacuL96 | 810 | asGfsucuCfcAfGfgcugCfaGfgucagscsa | 1141 |
| AD-1306575 | usgscaagAfaCfGfAfagaccagacuL96 | 811 | asGfsucuGfgUfCfuucgUfuCfuugcasgsg | 1142 |
| AD-1306603 | uscsaacaUfgUfGfCfuucaacuacuL96 | 812 | asGfsuagUfuGfAfagcaCfaUfguugasasc | 1143 |
| AD-1306627 | usgscgugUfgCfUfUfugcugugacuL96 | 813 | asGfsucaCfaGfCfaaagCfaCfacgcascsg | 1144 |
| AD-1306673 | csusccacCfcUfGfAfgaacagcucuL96 | 814 | asGfsagcUfgUfUfcucaGfgGfuggagsgsu | 1145 |
| AD-1306676 | uscsccaaAfgUfGfCfugaccaccauL96 | 815 | asUfsgguGfgUfCfagcaCfuUfugggasgsg | 1146 |
| AD-1306698 | ususccucCfcUfGfGfgcaccaccuuL96 | 816 | asAfsgguGfgUfGfcccaGfgGfaggaasgsa | 1147 |
| AD-1306717 | usgsccaaCfuAfCfCfacaaccacguL96 | 817 | asCfsgugGfuUfGfugguAfgUfuggcascsu | 1148 |
| AD-1307191 | csascaccCfaCfAfAfccagaggcuuL96 | 818 | asAfsgccUfcUfGfguugUfgGfgugugsgsu | 1149 |
| AD-1307354 | gsasccugGfaUfCfCfucacaaagcuL96 | 819 | asGfscuuUfgUfGfaggaUfcCfaggucsgsu | 1150 |
| AD-1308029 | csusaccaGfcGfUfUfacacccaucuL96 | 820 | asGfsaugGfgUfGfuaacGfcUfgguagscsu | 1151 |
| AD-1308183 | cscsacaaCfaGfCfCfacuacgacuuL96 | 821 | asAfsgucGfuAfGfuggcUfgUfuguggsusc | 1152 |
| AD-1308294 | csasgcucCfaAfAfGfccacucccuuL96 | 822 | asAfsgggAfgUfGfgcuuUfgGfagcugsgsu | 1153 |
| AD-1334092 | gscsccuuCfcAfGfCfacugagaaguL96 | 823 | asCfsuucUfcAfGfugcuGfgAfagggcsgsg | 1154 |
| AD-1308403 | cscsuaucAfcAfGfAfccaccacacuL96 | 824 | asGfsuguGfgUfGfgucuGfuGfauaggscsg | 1155 |
| AD-1308420 | gsgsccacCfaUfGfUfccacagccauL96 | 825 | asUfsggcUfgUfGfgacaUfgGfuggccsgsu | 1156 |
| AD-1308440 | cscsuccuCfcAfCfUfccagagacuuL96 | 826 | asAfsgucUfcUfGfgaguGfgAfggaggsgsu | 1157 |
| AD-1334093 | csascaccUfcCfAfCfagugcuuacuL96 | 827 | asGfsuaaGfcAfCfugugGfaGfgugugsgsg | 1158 |
| AD-1308488 | csasggaaCfaGfCfUfcacacuaccuL96 | 828 | asGfsguaGfuGfUfgagcUfgUfuccugsgsg | 1159 |
| AD-1308555 | uscscaguGfuGfGfAfucagcacaauL96 | 829 | asUfsuguGfcUfGfauccAfcAfcuggasgsg | 1160 |
| AD-1306730 | csusccugGfgAfCfAfacucccaucuL96 | 830 | asGfsaugGfgAfGfuuguCfcCfaggagsusu | 1161 |
| AD-1306746 | csasgcaaCfaCfAfGfugacucccuuL96 | 831 | asAfsgggAfgUfCfacugUfgUfugcugsgsu | 1162 |
| AD-1306753 | asgsugccGfaAfCfAfccauggccauL96 | 832 | asUfsggcCfaUfGfguguUfcGfgcacusgsg | 1163 |
| AD-1306772 | gsgsugacUfuCfCfCfacacccuaguL96 | 833 | asCfsuagGfgUfGfugggAfaGfucaccsgsu | 1164 |
| AD-1306796 | csgsacucCfaGfCfCfcuuuccagcuL96 | 834 | asGfscugGfaAfAfgggcUfgGfagucgsasg | 1165 |
| AD-1306820 | usasgcagCfaGfAfAfccaccgaguuL96 | 835 | asAfscucGfgUfGfguucUfgCfugcuasgsg | 1166 |
| AD-1306844 | gscsucacAfcUfAfCfcaaagugcuuL96 | 836 | asAfsgcaCfuUfUfgguaGfuGfugagcsusg | 1167 |
| AD-1306879 | ascsgcuuCfcAfGfUfguggaucaguL96 | 837 | asCfsugaUfcCfAfcacuGfgAfagcgusgsc | 1168 |
| AD-1306887 | csascccaCfaAfCfCfagagguuccuL96 | 838 | asGfsgaaCfcUfCfugguUfgUfgggugsusg | 1169 |
| AD-1306916 | csascgguGfgUfGfAfccaugggcuuL96 | 839 | asAfsgccCfaUfGfgucaCfcAfccgugsgsu | 1170 |
| AD-1307191 | csascaccCfaCfAfAfccagaggcuuL96 | 818 | asAfsgccUfcUfGfguugUfgGfgugugsgsu | 1149 |
| AD-1307212 | ascscgccAfcAfGfUfgcugaccacuL96 | 840 | asGfsuggUfcAfGfcacuGfuGfgcggusgsu | 1171 |
| AD-1307378 | cscsacuaCfgAfCfUfgaguccacuuL96 | 841 | asAfsgugGfaCfUfcaguCfgUfaguggscsu | 1172 |
| AD-1307392 | gscsuccaAfaGfCfCfacucccuucuL96 | 842 | asGfsaagGfgAfGfuggcUfuUfggagcsusg | 1173 |
| AD-1307516 | csusccagGfgAfCfAfacaccuaucuL96 | 843 | asGfsauaGfgUfGfuuguCfcCfuggagsusu | 1174 |
| AD-1307551 | csasgcagCfaCfAfGfugacucccuuL96 | 844 | asAfsgggAfgUfCfacugUfgCfugcugsgsu | 1175 |
| AD-1307575 | usgscccuAfgGfGfAfccacccacauL96 | 845 | asUfsgugGfgUfGfguccCfuAfgggcasgsa | 1176 |
| AD-1307600 | csascacaCfgGfGfCfgaucccuguuL96 | 846 | asAfscagGfgAfUfcgccCfgUfgugugsgsu | 1177 |
| AD-1307617 | asgsccugGfaCfUfUfcggccaccuuL96 | 847 | asAfsgguGfgCfCfgaagUfcCfaggcusgsu | 1178 |
| AD-1307654 | ascsccacAfuCfAfCfagagccuucuL96 | 848 | asGfsaagGfcUfCfugugAfuGfugggusgsg | 1179 |
| AD-1307666 | csasaccaCfcGfGfUfaccacccaguL96 | 849 | asCfsuggGfuGfGfuaccGfgUfgguugscsu | 1180 |
| AD-1307754 | ascsccagCfaAfGfAfcccgcaccuuL96 | 850 | asAfsgguGfcGfGfgucuUfgCfugggusgsu | 1181 |
| AD-1307805 | gsusggcuGfgAfCfUfacagcuaccuL96 | 851 | asGfsguaGfcUfGfuaguCfcAfgccacsusc | 1182 |
| AD-1307812 | ususgacaCfcUfAfCfuccaacaucuL96 | 852 | asGfsaugUfuGfGfaguaGfgUfgucaasasg | 1183 |
| AD-1307837 | ususgggcCfaGfGfUfcguggaauguL96 | 853 | asCfsauuCfcAfCfgaccUfgGfcccaascsu | 1184 |
| AD-1307860 | cscsuggaCfuUfUfGfgccuggucuuL96 | 854 | asAfsgacCfaGfGfccaaAfgUfccaggscsu | 1185 |
| AD-1307893 | gsasugugCfuUfCfAfacuaugaaauL96 | 855 | asUfsuucAfuAfGfuugaAfgCfacaucsusu | 1186 |
| AD-1307917 | usgsuguuCfuGfCfUfgcaacuacguL96 | 856 | asCfsguaGfuUfGfcagcAfgAfacacascsg | 1187 |
| AD-1307934 | csasgcucUfaCfGfGfccaugcccuuL96 | 857 | asAfsgggCfaUfGfgccgUfaGfagcugsgsu | 1188 |
| AD-1308171 | asusccucAfcAfGfAfgcugaccacuL96 | 858 | asGfsuggUfcAfGfcucuGfuGfaggauscsc | 1189 |
| AD-1308216 | cscsgagcAfcUfAfCfagccaccguuL96 | 859 | asAfscggUfgGfCfuguaGfuGfcucggscsu | 1190 |
| AD-1308250 | cscsuccaCfcCfAfGfgcaacugcuuL96 | 860 | asAfsgcaGfuUfGfccugGfgUfggaggsasg | 1191 |
| AD-1308273 | gsgsccacGfaCfAfCfccacagucauL96 | 861 | asUfsgacUfgUfGfggugUfcGfuggccsgsu | 1192 |
| AD-1334092 | gscsccuuCfcAfGfCfacugagaaguL96 | 823 | asCfsuucUfcAfGfugcuGfgAfagggcsgsg | 1154 |
| AD-1308369 | csascagcUfaCfCfAfgcuuuacaguL96 | 862 | asCfsuguAfaAfGfcuggUfaGfcugugsgsg | 1193 |
| AD-1308403 | cscsuaucAfcAfGfAfccaccacacuL96 | 824 | asGfsuguGfgUfGfgucuGfuGfauaggscsg | 1155 |
| AD-1308420 | gsgsccacCfaUfGfUfccacagccauL96 | 825 | asUfsggcUfgUfGfgacaUfgGfuggccsgsu | 1156 |
| AD-1308440 | cscsuccuCfcAfCfUfccagagacuuL96 | 826 | asAfsgucUfcUfGfgaguGfgAfggaggsgsu | 1157 |
| AD-1308463 | csascaccUfcCfAfCfagugcuuacuL96 | 827 | asGfsuaaGfcAfCfugugGfaGfgugugsgsa | 1194 |
| AD-1308520 | ascscacaAfcCfAfCfgggcuucacuL96 | 863 | asGfsugaAfgCfCfcgugGfuUfguggusasg | 1195 |
| AD-1308605 | gsasccacCfaCfCfAfccacaacuguL96 | 864 | asCfsaguUfgUfGfguggUfgGfuggucsasg | 1196 |
| AD-1308629 | csascuggUfuCfUfAfuggcaacacuL96 | 865 | asGfsuguUfgCfCfauagAfaCfcagugsgsc | 1197 |
| AD-1308652 | cscsucuaGfcAfCfAfcagaccaguuL96 | 866 | asAfscugGfuCfUfguguGfcUfagaggsasg | 1198 |
| AD-1308673 | cscsacggCfcAfCfUfacgaucacguL96 | 867 | asCfsgugAfuCfGfuaguGfgCfcguggsusg | 1199 |
| AD-1309037 | gsgsgaccAfcCfUfGfgauccucacuL96 | 868 | asGfsugaGfgAfUfccagGfuGfgucccsusg | 1200 |
| AD-1306916 | csascgguGfgUfGfAfccaugggcuuL96 | 839 | asAfsgccCfaUfGfgucaCfcAfccgugsgsu | 1170 |
| AD-1306975 | csasgccaCfuAfCfGfaccgcaaccuL96 | 869 | asGfsguuGfcGfGfucguAfgUfggcugscsu | 1201 |
| AD-1307006 | uscsccaaAfgUfGfCfugaccagcauL96 | 870 | asUfsgcuGfgUfCfagcaCfuUfugggasgsg | 1202 |
| AD-1307011 | csusccuuCfaCfCfCfuugggaccauL96 | 871 | asUfsgguCfcCfAfagggUfgAfaggagsgsg | 1203 |
| AD-1307040 | gsgsgccaCfcAfGfUfuccauguccuL96 | 872 | asGfsgacAfuGfGfaacuGfgUfggcccsusu | 1204 |
| AD-1307063 | csasgcacUfaCfAfGfccaccgugauL96 | 873 | asUfscacGfgUfGfgcugUfaGfugcugsgsg | 1205 |
| AD-1307092 | ascsccucAfaAfGfUfgcugaccaguL96 | 874 | asCfsuggUfcAfGfcacuUfuGfagggusgsc | 1206 |
| AD-1307111 | csascaccCfaCfAfGfucaucagcuuL96 | 875 | asAfsgcuGfaUfGfacugUfgGfgugugsgsu | 1207 |
| AD-1307137 | csascccaCfaGfCfUfaccagcguuuL96 | 876 | asAfsacgCfuGfGfuagcUfgUfgggugsusg | 1208 |
| AD-1307167 | uscscucuAfcUfCfCfagagacuguuL96 | 877 | asAfscagUfcUfCfuggaGfuAfgaggasgsg | 1209 |
| AD-1307174 | ascsagugCfuUfAfCfcaccacgacuL96 | 878 | asGfsucgUfgGfUfgguaAfgCfacugusgsg | 1210 |
| AD-1307191 | csascaccCfaCfAfAfccagaggcuuL96 | 818 | asAfsgccUfcUfGfguugUfgGfgugugsgsu | 1149 |
| AD-1307212 | ascscgccAfcAfGfUfgcugaccacuL96 | 840 | asGfsuggUfcAfGfcacuGfuGfgcggusgsu | 1171 |
| AD-1307222 | gscscacuAfcGfAfUfcacagccacuL96 | 879 | asGfsuggCfuGfUfgaucGfuAfguggcscsg | 1211 |
| AD-1307242 | csusccagGfgAfCfAfacucccaucuL96 | 880 | asGfsaugGfgAfGfuuguCfcCfuggagsusu | 1212 |
| AD-1307288 | csasgcagCfaAfCfCfaccaguaccuL96 | 881 | asGfsguaCfuGfGfugguUfgCfugcugsgsg | 1213 |
| AD-1307310 | csusccagGfaCfCfAfcagccacaguL96 | 882 | asCfsuguGfgCfUfguggUfcCfuggagsgsu | 1214 |
| AD-1307346 | csgsgccaCfgCfCfCfuccucaacuuL96 | 883 | asAfsguuGfaGfGfagggCfgUfggccgsusa | 1215 |
| AD-1307363 | cscsucacAfaAfGfCfugaccacaauL96 | 884 | asUfsuguGfgUfCfagcuUfuGfugaggsasu | 1216 |
| AD-1307378 | cscsacuaCfgAfCfUfgaguccacuuL96 | 841 | asAfsgugGfaCfUfcaguCfgUfaguggscsu | 1172 |
| AD-1307392 | gscsuccaAfaGfCfCfacucccuucuL96 | 842 | asGfsaagGfgAfGfuggcUfuUfggagcsusg | 1173 |
| AD-1307431 | uscscuccAfcUfCfCfagagacugcuL96 | 885 | asGfscagUfcUfCfuggaGfuGfgaggasgsg | 1217 |
| AD-1307456 | cscsacagUfgCfUfUfaccaccacguL96 | 886 | asCfsgugGfuGfGfuaagCfaCfuguggsasg | 1218 |
| AD-1307516 | csusccagGfgAfCfAfacaccuaucuL96 | 843 | asGfsauaGfgUfGfuuguCfcCfuggagsusu | 1174 |
| AD-1307551 | csasgcagCfaCfAfGfugacucccuuL96 | 844 | asAfsgggAfgUfCfacugUfgCfugcugsgsu | 1175 |
| AD-1307575 | usgscccuAfgGfGfAfccacccacauL96 | 845 | asUfsgugGfgUfGfguccCfuAfgggcasgsa | 1176 |
| AD-1307590 | csasccacGfgCfCfAfccacacacguL96 | 887 | asCfsgugUfgUfGfguggCfcGfuggugsusu | 1219 |
| AD-1307600 | csascacaCfgGfGfCfgaucccuguuL96 | 846 | asAfscagGfgAfUfcgccCfgUfgugugsgsu | 1177 |
| AD-1307617 | asgsccugGfaCfUfUfcggccaccuuL96 | 847 | asAfsgguGfgCfCfgaagUfcCfaggcusgsu | 1178 |
| AD-1307654 | ascsccacAfuCfAfCfagagccuucuL96 | 848 | asGfsaagGfcUfCfugugAfuGfugggusgsg | 1179 |
| AD-1307677 | ascscaccCfaGfCfAfcucgacuccuL96 | 888 | asGfsgagUfcGfAfgugcUfgGfguggusasc | 1220 |
| AD-1307706 | csasgcccUfcAfCfCfcuagcagcauL96 | 889 | asUfsgcuGfcUfAfggguGfaGfggcugsgsa | 1221 |
| AD-1307754 | ascsccagCfaAfGfAfcccgcaccuuL96 | 850 | asAfsgguGfcGfGfgucuUfgCfugggusgsu | 1181 |
| AD-1307775 | asusaaccAfcGfGfUfggugaccacuL96 | 890 | asGfsuggUfcAfCfcaccGfuGfguuausgsg | 1222 |
| AD-1307805 | gsusggcuGfgAfCfUfacagcuaccuL96 | 851 | asGfsguaGfcUfGfuaguCfcAfgccacsusc | 1182 |
| AD-1307812 | ususgacaCfcUfAfCfuccaacaucuL96 | 852 | asGfsaugUfuGfGfaguaGfgUfgucaasasg | 1183 |
| AD-1307837 | ususgggcCfaGfGfUfcguggaauguL96 | 853 | asCfsauuCfcAfCfgaccUfgGfcccaascsu | 1184 |
| AD-1307860 | cscsuggaCfuUfUfGfgccuggucuuL96 | 854 | asAfsgacCfaGfGfccaaAfgUfccaggscsu | 1185 |
| AD-1307893 | gsasugugCfuUfCfAfacuaugaaauL96 | 855 | asUfsuucAfuAfGfuugaAfgCfacaucsusu | 1186 |
| AD-1307917 | usgsuguuCfuGfCfUfgcaacuacguL96 | 856 | asCfsguaGfuUfGfcagcAfgAfacacascsg | 1187 |
| AD-1307934 | csasgcucUfaCfGfGfccaugcccuuL96 | 857 | asAfsgggCfaUfGfgccgUfaGfagcugsgsu | 1188 |
| AD-1307994 | cscsaguuCfcAfAfAfgccacuuccuL96 | 891 | asGfsgaaGfuGfGfcuuuGfgAfacuggsusg | 1223 |
| AD-1308057 | cscscagaAfcAfGfAfccaccacacuL96 | 892 | asGfsuguGfgUfGfgucuGfuUfcugggsasg | 1224 |
| AD-1308098 | csusccacAfgUfGfCfugaccacgauL96 | 893 | asUfscguGfgUfCfagcaCfuGfuggagsgsu | 1225 |
| AD-1308142 | gsasccugGfaUfCfCfucacagagcuL96 | 894 | asGfscucUfgUfGfaggaUfcCfaggucsgsu | 1226 |
| AD-1308171 | asusccucAfcAfGfAfgcugaccacuL96 | 858 | asGfsuggUfcAfGfcucuGfuGfaggauscsc | 1189 |
| AD-1308216 | cscsgagcAfcUfAfCfagccaccguuL96 | 859 | asAfscggUfgGfCfuguaGfuGfcucggscsu | 1190 |
| AD-1308250 | cscsuccaCfcCfAfGfgcaacugcuuL96 | 860 | asAfsgcaGfuUfGfccugGfgUfggaggsasg | 1191 |
| AD-1308273 | gsgsccacGfaCfAfCfccacagucauL96 | 861 | asUfsgacUfgUfGfggugUfcGfuggccsgsu | 1192 |
| AD-1308305 | cscsacucCfcUfCfCfuccaguccauL96 | 895 | asUfsggaCfuGfGfaggaGfgGfaguggscsu | 1227 |
| AD-1334092 | gscsccuuCfcAfGfCfacugagaaguL96 | 823 | asCfsuucUfcAfGfugcuGfgAfagggcsgsg | 1154 |
| AD-1308369 | csascagcUfaCfCfAfgcuuuacaguL96 | 862 | asCfsuguAfaAfGfcuggUfaGfcugugsgsg | 1193 |
| AD-1308403 | cscsuaucAfcAfGfAfccaccacacuL96 | 824 | asGfsuguGfgUfGfgucuGfuGfauaggscsg | 1155 |
| AD-1308422 | cscsaccaUfgUfCfCfacagccacauL96 | 896 | asUfsgugGfcUfGfuggaCfaUfgguggscsc | 1228 |
| AD-1308488 | csasggaaCfaGfCfUfcacacuaccuL96 | 828 | asGfsguaGfuGfUfgagcUfgUfuccugsgsg | 1159 |
| AD-1308512 | usgsccgaCfuAfCfCfacaaccacguL96 | 897 | asCfsgugGfuUfGfugguAfgUfcggcascsu | 1229 |
| AD-1308555 | uscscaguGfuGfGfAfucagcacaauL96 | 829 | asUfsuguGfcUfGfauccAfcAfcuggasgsg | 1160 |
| AD-1308569 | csascaccCfaCfAfAfccaguggcuuL96 | 898 | asAfsgccAfcUfGfguugUfgGfgugugsgsu | 1230 |
| AD-1308605 | gsasccacCfaCfCfAfccacaacuguL96 | 864 | asCfsaguUfgUfGfguggUfgGfuggucsasg | 1196 |
| AD-1308629 | csascuggUfuCfUfAfuggcaacacuL96 | 865 | asGfsuguUfgCfCfauagAfaCfcagugsgsc | 1197 |
| AD-1308652 | cscsucuaGfcAfCfAfcagaccaguuL96 | 866 | asAfscugGfuCfUfguguGfcUfagaggsasg | 1198 |
| AD-1308673 | cscsacggCfcAfCfUfacgaucacguL96 | 867 | asCfsgugAfuCfGfuaguGfgCfcguggsusg | 1199 |
| AD-1308759 | csasaggaCfuGfCfAfaccacccuuuL96 | 899 | asAfsaggGfuGfGfuugcAfgUfccuugsgsa | 1231 |
| AD-1308782 | gsusgcugAfcAfAfGfcacagccacuL96 | 900 | asGfsuggCfuGfUfgcuuGfuCfagcacsusg | 1232 |
| AD-1308808 | csascagcUfaCfCfAfgcuuuacacuL96 | 901 | asGfsuguAfaAfGfcuggUfaGfcugugsgsa | 1233 |
| AD-1334094 | cscsaccaUfgUfCfCfacaauccacuL96 | 902 | asGfsuggAfuUfGfuggaCfaUfgguggscsc | 1234 |
| AD-1309007 | cscsacuaCfaAfCfUfgcagccacuuL96 | 903 | asAfsgugGfcUfGfcaguUfgUfaguggscsu | 1235 |
| AD-1309037 | gsgsgaccAfcCfUfGfgauccucacuL96 | 868 | asGfsugaGfgAfUfccagGfuGfgucccsusg | 1200 |
| AD-1309039 | gsasccacCfuGfGfAfuccucacaguL96 | 904 | asCfsuguGfaGfGfauccAfgGfuggucscsc | 1236 |
| AD-1307953 | cscsacuaCfgAfCfUfgcauccacuuL96 | 905 | asAfsgugGfaUfGfcaguCfgUfaguggscsu | 1237 |
| AD-1307967 | csuscccaAfaGfUfGfcugaccagcuL96 | 906 | asGfscugGfuCfAfgcacUfuUfgggagsgsg | 1238 |
| AD-1307994 | cscsaguuCfcAfAfAfgccacuuccuL96 | 891 | asGfsgaaGfuGfGfcuuuGfgAfacuggsusg | 1223 |
| AD-1308024 | csascagcUfaCfCfAfgcguuacacuL96 | 907 | asGfsuguAfaCfGfcuggUfaGfcugugsgsa | 1239 |
| AD-1308057 | cscscagaAfcAfGfAfccaccacacuL96 | 892 | asGfsuguGfgUfGfgucuGfuUfcugggsasg | 1224 |
| AD-1308098 | csusccacAfgUfGfCfugaccacgauL96 | 893 | asUfscguGfgUfCfagcaCfuGfuggagsgsu | 1225 |
| AD-1308133 | gsgsgccaCfcAfGfUfuccacguccuL96 | 908 | asGfsgacGfuGfGfaacuGfgUfggcccsusu | 1240 |
| AD-1308171 | asusccucAfcAfGfAfgcugaccacuL96 | 858 | asGfsuggUfcAfGfcucuGfuGfaggauscsc | 1189 |
| AD-1308180 | usgsaccaCfaAfCfAfgccacuacguL96 | 909 | asCfsguaGfuGfGfcuguUfgUfggucasgsc | 1241 |
| AD-1308216 | cscsgagcAfcUfAfCfagccaccguuL96 | 859 | asAfscggUfgGfCfuguaGfuGfcucggscsu | 1190 |
| AD-1308250 | cscsuccaCfcCfAfGfgcaacugcuuL96 | 860 | asAfsgcaGfuUfGfccugGfgUfggaggsasg | 1191 |
| AD-1308263 | usgsagcaCfcAfCfGfgccacgacauL96 | 910 | asUfsgucGfuGfGfccguGfgUfgcucascsa | 1242 |
| AD-1308294 | csasgcucCfaAfAfGfccacucccuuL96 | 822 | asAfsgggAfgUfGfgcuuUfgGfagcugsgsu | 1153 |
| AD-1308317 | cscsagucCfaGfGfGfacugcaacuuL96 | 911 | asAfsguuGfcAfGfucccUfgGfacuggsasg | 1243 |
| AD-1308344 | csasgcacUfgAfGfAfagcacagccuL96 | 912 | asGfsgcuGfuGfCfuucuCfaGfugcugsgsa | 1244 |
| AD-1308369 | csascagcUfaCfCfAfgcuuuacaguL96 | 862 | asCfsuguAfaAfGfcuggUfaGfcugugsgsg | 1193 |
| AD-1308403 | cscsuaucAfcAfGfAfccaccacacuL96 | 824 | asGfsuguGfgUfGfgucuGfuGfauaggscsg | 1155 |
| AD-1308420 | gsgsccacCfaUfGfUfccacagccauL96 | 825 | asUfsggcUfgUfGfgacaUfgGfuggccsgsu | 1156 |
| AD-1308440 | cscsuccuCfcAfCfUfccagagacuuL96 | 826 | asAfsgucUfcUfGfgaguGfgAfggaggsgsu | 1157 |
| AD-1308463 | csascaccUfcCfAfCfagugcuuacuL96 | 827 | asGfsuaaGfcAfCfugugGfaGfgugugsgsa | 1194 |
| AD-1308488 | csasggaaCfaGfCfUfcacacuaccuL96 | 828 | asGfsguaGfuGfUfgagcUfgUfuccugsgsg | 1159 |
| AD-1308512 | usgsccgaCfuAfCfCfacaaccacguL96 | 897 | asCfsgugGfuUfGfugguAfgUfcggcascsu | 1229 |
| AD-1308555 | uscscaguGfuGfGfAfucagcacaauL96 | 829 | asUfsuguGfcUfGfauccAfcAfcuggasgsg | 1160 |
| AD-1308566 | csasccacAfcCfCfAfcaaccaguguL96 | 913 | asCfsacuGfgUfUfguggGfuGfuggugsgsu | 1245 |
| AD-1308595 | csgsccagAfgUfGfCfugaccaccauL96 | 914 | asUfsgguGfgUfCfagcaCfuCfuggcgsgsu | 1246 |
| AD-1308629 | csascuggUfuCfUfAfuggcaacacuL96 | 865 | asGfsuguUfgCfCfauagAfaCfcagugsgsc | 1197 |
| AD-1308652 | cscsucuaGfcAfCfAfcagaccaguuL96 | 866 | asAfscugGfuCfUfguguGfcUfagaggsasg | 1198 |
| AD-1308673 | cscsacggCfcAfCfUfacgaucacguL96 | 867 | asCfsgugAfuCfGfuaguGfgCfcguggsusg | 1199 |
| AD-1308702 | csasgggaCfaAfCfAfcccaucaccuL96 | 915 | asGfsgugAfuGfGfguguUfgUfcccugsgsa | 1247 |
| AD-1308733 | csusccaaAfgCfCfAfcuuccuccuuL96 | 916 | asAfsggaGfgAfAfguggCfuUfuggagscsu | 1248 |
| AD-1308759 | csasaggaCfuGfCfAfaccacccuuuL96 | 899 | asAfsaggGfuGfGfuugcAfgUfccuugsgsa | 1231 |
| AD-1308782 | gsusgcugAfcAfAfGfcacagccacuL96 | 900 | asGfsuggCfuGfUfgcuuGfuCfagcacsusg | 1232 |
| AD-1308783 | usgscugaCfaAfGfCfacagccacauL96 | 917 | asUfsgugGfcUfGfugcuUfgUfcagcascsu | 1249 |
| AD-1308808 | csascagcUfaCfCfAfgcuuuacacuL96 | 901 | asGfsuguAfaAfGfcuggUfaGfcugugsgsa | 1233 |
| AD-1308818 | csusccacCfcUfGfUfggaccacguuL96 | 918 | asAfscguGfgUfCfcacaGfgGfuggagsgsa | 1250 |
| AD-1308845 | cscscagcAfcAfGfAfccaccacacuL96 | 919 | asGfsuguGfgUfGfgucuGfuGfcugggsasc | 1251 |
| AD-1308868 | gsusccacCfaUfGfUfccacaauccuL96 | 920 | asGfsgauUfgUfGfgacaUfgGfuggacsasu | 1252 |
| AD-1334094 | cscsaccaUfgUfCfCfacaauccacuL96 | 902 | asGfsuggAfuUfGfuggaCfaUfgguggscsc | 1234 |
| AD-1308890 | cscsuccuCfuAfCfUfccagagaccuL96 | 921 | asGfsgucUfcUfGfgaguAfgAfggaggsusg | 1253 |
| AD-1308912 | csascaccUfcCfAfCfagugcugacuL96 | 922 | asGfsucaGfcAfCfugugGfaGfgugugsgsg | 1254 |
| AD-1308935 | csascagcCfaCfCfAfugacaaggguL96 | 923 | asCfsccuUfgUfCfauggUfgGfcugugsgsu | 1255 |
| AD-1308963 | uscscacgGfcCfAfCfacccuccucuL96 | 924 | asGfsaggAfgGfGfugugGfcCfguggasasu | 1256 |
| AD-1308975 | gsascccgGfaUfCfCfucacugagcuL96 | 925 | asGfscucAfgUfGfaggaUfcCfgggucsgsu | 1257 |
| AD-1308998 | cscsacaaCfaGfCfCfacuacaacuuL96 | 926 | asAfsguuGfuAfGfuggcUfgUfuguggsusc | 1258 |
| AD-1309007 | cscsacuaCfaAfCfUfgcagccacuuL96 | 903 | asAfsgugGfcUfGfcaguUfgUfaguggscsu | 1235 |
| AD-1309026 | usgsgaucCfaCfGfGfccacccuguuL96 | 927 | asAfscagGfgUfGfgccgUfgGfauccasgsu | 1259 |
| AD-1309037 | gsgsgaccAfcCfUfGfgauccucacuL96 | 868 | asGfsugaGfgAfUfccagGfuGfgucccsusg | 1200 |
| AD-1309039 | gsasccacCfuGfGfAfuccucacaguL96 | 904 | asCfsuguGfaGfGfauccAfgGfuggucscsc | 1236 |
| AD-1309042 | csasccugGfaUfCfCfucacagagcuL96 | 928 | asGfscucUfgUfGfaggaUfcCfaggugsgsu | 1260 |
| AD-1309069 | usasuagcCfaCfCfGfugauggugcuL96 | 929 | asGfscacCfaUfCfacggUfgGfcuauasgsu | 1261 |
| AD-1309105 | cscsacucUfgGfGfAfacagcucacuL96 | 930 | asGfsugaGfcUfGfuuccCfaGfaguggsasg | 1262 |
| AD-1309124 | csasuggcCfaCfUfAfugcccacaguL96 | 931 | asCfsuguGfgGfCfauagUfgGfccaugsgsu | 1263 |
| AD-1309148 | usgsccucCfaCfGfGfuucccagcuuL96 | 932 | asAfsgcuGfgGfAfaccgUfgGfaggcasgsu | 1264 |
| AD-1309167 | cscsugccAfaCfCfUfucagcguguuL96 | 933 | asAfscacGfcUfGfaaggUfuGfgcaggscsu | 1265 |
| AD-1309192 | gsusguccUfcCfUfCfaguccucacuL96 | 934 | asGfsugaGfgAfCfugagGfaGfgacacsasg | 1266 |
| AD-1309216 | csasgcucCfcAfCfUfucucuacucuL96 | 935 | asGfsaguAfgAfGfaaguGfgGfagcugsgsg | 1267 |
| AD-1309250 | gscsauuuGfgAfCfAfguuuuucucuL96 | 936 | asGfsagaAfaAfAfcuguCfcAfaaugcscsc | 1268 |
| AD-1309259 | gsasagucAfuCfUfAfcaauaagacuL96 | 937 | asGfsucuUfaUfUfguagAfuGfacuucscsc | 1269 |
| AD-1309287 | csusgccaUfuUfCfUfacgcaguguuL96 | 938 | asAfscacUfgCfGfuagaAfaUfggcagscsc | 1270 |
| AD-1309315 | csascuguGfaCfAfUfugaccgcuuuL96 | 939 | asAfsagcGfgUfCfaaugUfcAfcagugscsu | 1271 |
| AD-1309337 | usgsugacAfaUfGfCfcaucccucuuL96 | 940 | asAfsgagGfgAfUfggcaUfuGfucacasgsc | 1272 |
| AD-1309379 | ascsccugGfaGfAfAfcugcacgguuL96 | 941 | asAfsccgUfgCfAfguucUfcCfaggguscsc | 1273 |
| AD-1309406 | gsusggguGfaCfAfAfccgugucguuL96 | 942 | asAfscgaCfaCfGfguugUfcAfcccacsgsc | 1274 |
| AD-1309433 | gsascccaAfaGfCfCfuguggccaauL96 | 943 | asUfsuggCfcAfCfaggcUfuUfgggucscsa | 1275 |
| AD-1309459 | csusgcguGfaAfCfAfagcaccugcuL96 | 944 | asGfscagGfuGfCfuuguUfcAfcgcagsgsu | 1276 |
| AD-1309482 | uscsaaagUfgUfCfGfgacccgagcuL96 | 945 | asGfscucGfgGfUfccgaCfaCfuuugasusg | 1277 |
| AD-1309503 | csusgugaCfuUfCfCfacuaugaguuL96 | 946 | asAfscucAfuAfGfuggaAfgUfcacagsgsg | 1278 |
| AD-1309526 | asgsugcaUfcUfGfCfagcaugugguL96 | 947 | asCfscacAfuGfCfugcaGfaUfgcacuscsg | 1279 |
| AD-1309535 | cscscacuAfuUfCfCfaccuuugacuL96 | 948 | asGfsucaAfaGfGfuggaAfuAfgugggsasg | 1280 |
| AD-1309567 | ascscuauGfuCfCfUfcaugagagauL96 | 949 | asUfscucUfcAfUfgaggAfcAfuaggusgsc | 1281 |
| AD-1309595 | csascgcuUfuGfGfGfaaucucagcuL96 | 950 | asGfscugAfgAfUfucccAfaAfgcgugscsa | 1282 |
| AD-1309621 | csusggacAfaCfCfAfcuacugcacuL96 | 951 | asGfsugcAfgUfAfguggUfuGfuccagsgsu | 1283 |
| AD-1309647 | cscsucagCfaUfCfCfacuacaaguuL96 | 952 | asAfscuuGfuAfGfuggaUfgCfugaggsgsc | 1284 |
| AD-1309678 | gsusccucAfcUfGfUfcaccaugguuL96 | 953 | asAfsccaUfgGfUfgacaGfuGfaggacsgsa | 1285 |
| AD-1309720 | asusccugUfuUfGfAfccaaauuccuL96 | 954 | asGfsgaaUfuUfGfgucaAfaCfaggauscsa | 1286 |
| AD-1309747 | asgscgguUfuCfAfGfcaagaacgguL96 | 955 | asCfscguUfcUfUfgcugAfaAfccgcusgsc | 1287 |
| AD-1309780 | asusgcguGfuGfGfAfcauuccugcuL96 | 956 | asGfscagGfaAfUfguccAfcAfcgcausgsg | 1288 |
| AD-1309804 | gsusgagcGfuCfAfCfcuucaaugguL96 | 957 | asCfscauUfgAfAfggugAfcGfcucacsgsc | 1289 |
| AD-1309844 | asgsccucUfuCfCfAfcaacaacacuL96 | 958 | asGfsuguUfgUfUfguggAfaGfaggcusgsu | 1290 |
| AD-1309872 | csasccugCfaCfCfAfacaaccagauL96 | 959 | asUfscugGfuUfGfuuggUfgCfaggugscsc | 1291 |
| AD-1309900 | usgsucucCfaGfCfGfggacggaacuL96 | 960 | asGfsuucCfgUfCfccgcUfgGfagacasgsu | 1292 |
| AD-1309926 | csgsccagUfuGfCfAfaggacaugguL96 | 961 | asCfscauGfuCfCfuugcAfaCfuggcgsgsc | 1293 |
| AD-1309945 | csgsacagCfaGfAfAfaggauggcuuL96 | 962 | asAfsgccAfuCfCfuuucUfgCfugucgsgsg | 1294 |
| AD-1309969 | cscsgcucUfgUfGfAfucugaugcuuL96 | 963 | asAfsgcaUfcAfGfaucaCfaGfagcggscsu | 1295 |
| AD-1309993 | csasggucUfuUfGfCfugagugccauL96 | 964 | asUfsggcAfcUfCfagcaAfaGfaccugsgsc | 1296 |
| AD-1310022 | csgsccugCfaUfCfAfgcgaccacuuL96 | 965 | asAfsgugGfuCfGfcugaUfgCfaggcgsusu | 1297 |
| AD-1310059 | gsasggcuUfaCfGfCfagagcucuguL96 | 966 | asCfsagaGfcUfCfugcgUfaAfgccucscsa | 1298 |
| AD-1310068 | asgsugugCfaGfUfGfacuggcgaguL96 | 967 | asCfsucgCfcAfGfucacUfgCfacacuscsc | 1299 |
| AD-1310124 | csasccaaAfgUfGfUfacaagccauuL96 | 968 | asAfsuggCfuUfGfuacaCfuUfuggugsgsg | 1300 |
| AD-1310146 | csusgcaaCfuCfUfAfggaaccagauL96 | 969 | asUfscugGfuUfCfcuagAfgUfugcagsgsu | 1301 |
| AD-1310192 | gsasccagAfuCfCfUfcuucaacgcuL96 | 970 | asGfscguUfgAfAfgaggAfuCfuggucscsu | 1302 |
| AD-1310215 | csasugggCfaUfCfUfgcgugcagguL96 | 971 | asCfscugCfaCfGfcagaUfgCfccaugsusg | 1303 |
| AD-1310234 | csgsauggGfuUfUfCfcuaaauuucuL96 | 972 | asGfsaaaUfuUfAfggaaAfcCfcaucgsgsg | 1304 |
| AD-1310249 | gsgsucagCfaAfCfUfgccaguccuuL96 | 973 | asAfsggaCfuGfGfcaguUfgCfugaccscsa | 1305 |
| AD-1310280 | gsasggguUfcAfGfUfgucggugcauL96 | 974 | asUfsgcaCfcGfAfcacuGfaAfcccucsgsu | 1306 |
| AD-1310310 | cscsggcuUfcGfUfAfaccgugaccuL96 | 975 | asGfsgucAfcGfGfuuacGfaAfgccggsgsa | 1307 |
| AD-1310328 | csgsugugCfaAfCfAfcaaccaccuuL96 | 976 | asAfsgguGfgUfUfguguUfgCfacacgscsa | 1308 |
| AD-1310345 | gsgscaggAfgUfCfCfaucugcaccuL96 | 977 | asGfsgugCfaGfAfuggaCfuCfcugccscsu | 1309 |
| AD-1310378 | csusgcugUfcCfCfAfccuuccgcuuL96 | 978 | asAfsgcgGfaAfGfguggGfaCfagcagsusc | 1310 |
| AD-1310405 | uscsagcuGfuGfUfUfcguacaauguL96 | 979 | asCfsauuGfuAfCfgaacAfcAfgcugasgsg | 1311 |
| AD-1310422 | ususggugCfaAfCfCfuucccaggcuL96 | 980 | asGfsccuGfgGfAfagguUfgCfaccaascsc | 1312 |
| AD-1310443 | uscsccugCfcAfCfAfuguguaccuuL96 | 981 | asAfsgguAfcAfCfauguGfgCfagggasasg | 1313 |
| AD-1310466 | ascsccaaCfgGfUfGfcaaugucaguL96 | 982 | asCfsugaCfaUfUfgcacCfgUfuggguscsc | 1314 |
| AD-1310493 | cscsugcaAfcAfAfUfacuaccuguuL96 | 983 | asAfscagGfuAfGfuauuGfuUfgcaggscsa | 1315 |
| AD-1310497 | asgsggcuUfuGfAfGfuacaagagauL96 | 984 | asUfscucUfuGfUfacucAfaAfgcccusgsg | 1316 |
| AD-1310552 | asgsuccaGfcUfGfAfaugaaaccuuL96 | 985 | asAfsgguUfuCfAfuucaGfcUfggacusgsg | 1317 |
| AD-1310576 | csasacagCfcAfUfGfuggacaacuuL96 | 986 | asAfsguuGfuCfCfacauGfgCfuguugsasc | 1318 |
| AD-1310599 | cscsguguAfcCfUfCfugugaggcuuL96 | 987 | asAfsgccUfcAfCfagagGfuAfcacggsusg | 1319 |
| AD-1310622 | gsgsuggaGfuCfCfAfuuugcugacuL96 | 988 | asGfsucaGfcAfAfauggAfcUfccaccscsu | 1320 |
| AD-1310637 | csusgcccAfgAfUfGfuguccagcuuL96 | 989 | asAfsgcuGfgAfCfacauCfuGfggcagsgsa | 1321 |
| AD-1310665 | gscsugcuAfcUfCfCfugugaggaguL96 | 990 | asCfsuccUfcAfCfaggaGfuAfgcagcsasg | 1322 |
| AD-1310689 | cscsugucAfaGfUfCfcgcaucaacuL96 | 991 | asGfsuugAfuGfCfggacUfuGfacaggsasg | 1323 |
| AD-1310714 | csasuccuGfuGfGfCfaccagggcuuL96 | 992 | asAfsgccCfuGfGfugccAfcAfggaugsgsu | 1324 |
| AD-1310741 | csgsagguCfaAfCfAfucaccuucuuL96 | 993 | asAfsgaaGfgUfGfauguUfgAfccucgsgsu | 1325 |
| AD-1310762 | csgsuccaAfgUfAfCfucagcagaguL96 | 994 | asCfsucuGfcUfGfaguaCfuUfggacgscsu | 1326 |
| AD-1310790 | csasugcaGfcAfCfCfagugcaccuuL96 | 995 | asAfsgguGfcAfCfugguGfcUfgcaugsgsc | 1327 |
| AD-1310845 | csusugcaCfuGfUfCfcuaacggcuuL96 | 996 | asAfsgccGfuUfAfggacAfgUfgcaagsgsg | 1328 |
| AD-1310873 | csusgcacAfcCfUfAfcacccacguuL96 | 997 | asAfscguGfgGfUfguagGfuGfugcagsgsa | 1329 |
| AD-1310907 | gscsacgcCfcUfUfCfugugucccuuL96 | 998 | asAfsgggAfcAfCfagaaGfgGfcgugcsasg | 1330 |
| AD-1310938 | ascsugcuGfuCfUfGfagaacguucuL96 | 999 | asGfsaacGfuUfCfucagAfcAfgcagusgsg | 1331 |
| AD-1310950 | csasugcuCfuGfUfCfcaccuggaguL96 | 1000 | asCfsuccAfgGfUfggacAfgAfgcaugsgsg | 1332 |
| AD-1310979 | gscsauugUfcUfGfAfucaugaaaauL96 | 1001 | asUfsuuuCfaUfGfaucaGfaCfaaugcsasc | 1333 |
| AD-1311016 | gsgscgccAfcUfCfAfggaguccuauL96 | 1002 | asUfsaggAfcUfCfcugaGfuGfgcgccscsu | 1334 |
| AD-1311052 | csuscccuGfaUfGfUfcacugggacuL96 | 1003 | asGfsuccCfaGfUfgacaUfcAfgggagsgsg | 1335 |
| AD-1311075 | csusggaaCfaAfAfCfuaagcauguuL96 | 1004 | asAfscauGfcUfUfaguuUfgUfuccagsgsg | 1336 |
| AD-1311115 | csascggaUfuCfCfAfgcuggccacuL96 | 1005 | asGfsuggCfcAfGfcuggAfaUfccgugscsu | 1337 |
| AD-1311126 | gsascaggCfuGfGfUfccaggcaaguL96 | 1006 | asCfsuugCfcUfGfgaccAfgCfcugucsusg | 1338 |
| AD-1311154 | csusgccaGfgAfAfGfcugcgacaguL96 | 1007 | asCfsuguCfgCfAfgcuuCfcUfggcagscsa | 1339 |
| AD-1311185 | csusgcugCfaGfGfGfuaacucagguL96 | 1008 | asCfscugAfgUfUfacccUfgCfagcagsgsc | 1340 |
| AD-1311214 | gscsaacgGfcCfAfGfgucagagaguL96 | 1009 | asCfsucuCfuGfAfccugGfcCfguugcsgsa | 1341 |
| AD-1311231 | cscscaguUfuUfGfCfaaauaaaccuL96 | 1010 | asGfsguuUfaUfUfugcaAfaAfcugggscsu | 1342 |
| | | | | SEQ |
| | | | | ID |
| | | Duplex Name | mRNA target sequence | NO: |
| | | AD-1302944 | UGUUGGCUCUGGCGGCCAUGCUC | 1343 |
| | | AD-1302994 | AGCCGAGCUGGGAGAAUGCAGGG | 1344 |
| | | AD-1303025 | CGGCGCGUGAGCUUUGUUCCACC | 1345 |
| | | AD-1303054 | AAUGGGCGGGUGUGCAGCACCUG | 1346 |
| | | AD-1303066 | UUCCACUACAAGACCUUCGACGG | 1347 |
| | | AD-1303108 | GGCCUUUGCAACUACGUGUUCUC | 1348 |
| | | AD-1303139 | ACGAGGACUUCAACGUCCAGCUA | 1349 |
| | | AD-1303190 | GGUCACCCGUGUUGUCAUCAAGG | 1350 |
| | | AD-1303222 | ACGGCUCCGUCCUCAUCAAUGGG | 1351 |
| | | AD-1303251 | GAGCUGCCUUACAGCCGCACUGG | 1352 |
| | | AD-1303275 | GGGACUACAUCAAGGUCAGCAUC | 1353 |
| | | AD-1303304 | GUGCUGACAUUCCUGUGGAACGG | 1354 |
| | | AD-1303344 | UGGAGCUGGAUCCCAAAUACGCC | 1355 |
| | | AD-1303368 | ACCAGACCUGUGGCCUGUGUGGG | 1356 |
| | | AD-1303389 | CGGCCUUCAACGAGUUCUAUGCC | 1357 |
| | | AD-1303422 | GGGAACCUGCAGAAGUUGGAUGG | 1358 |
| | | AD-1303457 | ACUGCACGGACGAGGAGGGCAUC | 1359 |
| | | AD-1303507 | UGGUGGACAGCACUGCGUACCUG | 1360 |
| | | AD-1303537 | GUGCCACCUUUGUGGAAUACUCA | 1361 |
| | | AD-1303569 | AACUGGAGGUGCCCUGAGCUCUG | 1362 |
| | | AD-1303573 | CCCUCAACAUGCAGCACCAGGAG | 1363 |
| | | AD-1303602 | UCACCCUGCACGGACACCUGCUC | 1364 |
| | | AD-1303626 | GAGGACCACUGUGUGGACGGCUG | 1365 |
| | | AD-1303646 | GUGCUGGAUGACAUCACGCACUC | 1366 |
| | | AD-1303679 | GGCACCUCCUUCAACACCACCUG | 1367 |
| | | AD-1303705 | GGCUAUGGCAGUGCCAGGACCUG | 1368 |
| | | AD-1303746 | CACCUAUGAUGAGAAACUCUACG | 1369 |
| | | AD-1303787 | GCUACGUUCUGUCCAAGAAAUGU | 1370 |
| | | AD-1303811 | CCGACAGCAGCUUCACCGUGCUG | 1371 |
| | | AD-1303862 | ACAACGAGAACUGCCUGAAAGCG | 1372 |
| | | AD-1303914 | GUUCCUCAACUCCAUCUACACGC | 1373 |
| | | AD-1303932 | CAGCCAACAUCACCCUGUUCACA | 1374 |
| | | AD-1303956 | CCUCGAGCUUCUUCAUCGUGGUG | 1375 |
| | | AD-1303977 | UGCAGCUGCUGGUGCAGCUGGUG | 1376 |
| | | AD-1304001 | CACUCAUGCAGGUGUUUGUCAGG | 1377 |
| | | AD-1304039 | GUGUGGGAACUUCAACCAGAACC | 1378 |
| | | AD-1304064 | GCUGACGACUUCACGGCCCUCAG | 1379 |
| | | AD-1304077 | GCAGCCUUCGCCAACACCUGGAA | 1380 |
| | | AD-1304119 | UGCCAGGAACAGCUUUGAGGACC | 1381 |
| | | AD-1304134 | GUGUGGAGAAUGAGAACUACGCC | 1382 |
| | | AD-1304174 | GAUCCCAACAGUGCCUUCUCGCG | 1383 |
| | | AD-1304202 | CCCUUCCACUCGAACUGCAUGUU | 1384 |
| | | AD-1304226 | GACACCUGCAACUGUGAGCGGAG | 1385 |
| | | AD-1304262 | GUCCUCCUAUGUGCACGCCUGUG | 1386 |
| | | AD-1304286 | AAGGGCGUACAGCUCAGCGACUG | 1387 |
| | | AD-1304322 | GCACCAAGUACAUGCAGAACUGC | 1388 |
| | | AD-1304326 | CCAAGUCCCAGCGCUACGCCUAC | 1389 |
| | | AD-1304352 | GUGGAUGCCUGCCAGCCCACUUG | 1390 |
| | | AD-1304386 | CGUCACCUGCAGCGUUUCCUUCG | 1391 |
| | | AD-1304415 | GCGGGCACCUUCCUCAAUGACGC | 1392 |
| | | AD-1304454 | UGCUGGCUCCUGGAGAGGUGGUG | 1393 |
| | | AD-1304482 | CGCCGUGUGUUCAUGUACGGGUG | 1394 |
| | | AD-1304524 | AGCCUCUCUGCAGAAAAGCACAG | 1395 |
| | | AD-1304546 | UACCUGGACUGCAGCAACAGCUC | 1396 |
| | | AD-1304596 | GGGCUGUUUCAGCACACACUGCG | 1397 |
| | | AD-1304624 | GGCUGCAUUGCCGAGGAGGACUG | 1398 |
| | | AD-1304646 | GCCACCUACAAGCCUGGAGAGAC | 1399 |
| | | AD-1304676 | GUCGACUGCAACACCUGCACCUG | 1400 |
| | | AD-1304700 | AGGAACCGGAGGUGGGAGUGCAG | 1401 |
| | | AD-1304732 | GAUGGCCACUUCAUCACCUUUGA | 1402 |
| | | AD-1304756 | GGCGAUCGCUACAGCUUUGAAGG | 1403 |
| | | AD-1304779 | CAGCUGCGAGUACAUCUUGGCCC | 1404 |
| | | AD-1304818 | CUUCCGCAUCGUCACCGAGAACA | 1405 |
| | | AD-1304850 | CCAAGGCCAUCAAGCUCUUCGUG | 1406 |
| | | AD-1304873 | GAGAGCUACGAGCUGAUCCUCCA | 1407 |
| | | AD-1304882 | GGGACCUUUAAGGCGGUGGCGAG | 1408 |
| | | AD-1304894 | CCCACCCUACAAGAUACGCUACA | 1409 |
| | | AD-1304902 | GGAUCUUCCUGGUCAUCGAGACC | 1410 |
| | | AD-1304953 | ACCAGCGUGUUCAUCCGACUGCA | 1411 |
| | | AD-1304977 | CAGGACUACAAGGGCAGGGUCUG | 1412 |
| | | AD-1305014 | ACGACAAUGCCAUCAAUGACUUU | 1413 |
| | | AD-1305043 | ACGCACUGGAGUUUGGGAACAGC | 1414 |
| | | AD-1305082 | CCCAGAAGCAGUGCAGCAUCCUC | 1415 |
| | | AD-1305104 | UCCCAGGUUGACUCCACCAAGUA | 1416 |
| | | AD-1305128 | UACGAGGCCUGCGUGAACGACGC | 1417 |
| | | AD-1305170 | CGACUGCGAGUGUUUCUGCACGG | 1418 |
| | | AD-1305212 | CCUGUGUGUGUCCUGGCGGACUC | 1419 |
| | | AD-1305228 | CUUGUUCUGUGACUUCUACAACC | 1420 |
| | | AD-1305240 | GGCUGUGAGUGGCACUACCAGCC | 1421 |
| | | AD-1305297 | AGGCUGCUACCCGAAGUGCCCAC | 1422 |
| | | AD-1305321 | CCAGCCCUUCUUCAAUGAGGACC | 1423 |
| | | AD-1305347 | UGAAGUGCGUGGCCCAGUGUGGC | 1424 |
| | | AD-1305370 | UGCUACGACAAGGACGGAAACUA | 1425 |
| | | AD-1305393 | CUAUGACGUCGGUGCAAGGGUCC | 1426 |
| | | AD-1305410 | UGCCAGAGCUGUAACUGCACACC | 1427 |
| | | AD-1305441 | UCCAGUGCGCUCACAGCCUUGAG | 1428 |
| | | AD-1305471 | CCUGCACCUAUGAGGACAGGACC | 1429 |
| | | AD-1305501 | ACCAGGACGUCAUCUACAACACC | 1430 |
| | | AD-1305536 | GGCGCCUGCUUGAUCGCCAUCUG | 1431 |
| | | AD-1305570 | GCACCAUCAUCAGGAAGGCUGUG | 1432 |
| | | AD-1305610 | AGCCACAACGCCAUUCACCUUCA | 1433 |
| | | AD-1305643 | UCUCCACCGUGUGUGUCCGCGAG | 1434 |
| | | AD-1305672 | UGGUCCAGCUGGUACAAUGGGCA | 1435 |
| | | AD-1305701 | GAGACUUUGAGACGUUUGAAAAC | 1436 |
| | | AD-1305731 | AGAGAGGGUACCAGGUAUGCCCU | 1437 |
| | | AD-1305754 | GUGCUGGCUGACAUCGAGUGCCG | 1438 |
| | | AD-1305771 | AGCUUCCCGACAUGCCGCUGGAG | 1439 |
| | | AD-1305801 | AGCAGGUGGACUGUGACCGCAUG | 1440 |
| | | AD-1305817 | UGCGCCAACAGCCAACAGAGUCC | 1441 |
| | | AD-1305821 | CGCUCUGUCACGACUACGAGCUG | 1442 |
| | | AD-1305847 | GUUCUCUGCUGCGAAUACGUGCC | 1443 |
| | | AD-1305889 | AGCACGGAGCCUGCUGUGCCUAC | 1444 |
| | | AD-1305898 | CCAGACCACAGCAACCGAAAAGA | 1445 |
| | | AD-1305930 | ACCUCGCAGACUGGGUCCAGCUC | 1446 |
| | | AD-1305948 | CAGUGGACAGAGUGGUUUGAUGA | 1447 |
| | | AD-1305958 | CCCAAGUCUGAACAACUUGGAGG | 1448 |
| | | AD-1305966 | CGUUGAGUCCUACGAUAAGAUCA | 1449 |
| | | AD-1306008 | CAGCAGCCUAAGGACAUAGAGUG | 1450 |
| | | AD-1306030 | AACUGGACCCUGGCACAGGUGGG | 1451 |
| | | AD-1306042 | GUGCACUGUGACGUCCACUUCGG | 1452 |
| | | AD-1306069 | GUGUGCAGGAACUGGGAGCAGGA | 1453 |
| | | AD-1306099 | UUCAAGAUGUGCUACAACUACAG | 1454 |
| | | AD-1306132 | CUCUGCUGCAGUGACGACCACUG | 1455 |
| | | AD-1306144 | ACCGACCACAGAGCUGGAGACGG | 1456 |
| | | AD-1306168 | CCACCCAGGCCCUGUUCUCAACG | 1457 |
| | | AD-1306198 | CCCUCUCAGAAGGACUGACAUCC | 1458 |
| | | AD-1306200 | CCCAGAUACACAAGCACCCUUGG | 1459 |
| | | AD-1306235 | AGGCUCCACAGAACCCACUGUCC | 1460 |
| | | AD-1306254 | UCCACCCUUCCAACACGCUCAGC | 1461 |
| | | AD-1306278 | CCCAACAACAAUGGCAACCUCCA | 1462 |
| | | AD-1306324 | GCACCGCUUCCAAAGAGCCGCUG | 1463 |
| | | AD-1306359 | CGCCAACACUCACGAGCGAGCUG | 1464 |
| | | AD-1306382 | UCCACCUCUCAGGCCGAGACCAG | 1465 |
| | | AD-1306406 | GCCCAGGACAGAGACGACAAUGA | 1466 |
| | | AD-1306411 | CCCUUGACUAACACCACCACCAG | 1467 |
| | | AD-1306442 | CGCUGUCAACCGAAGUGUGAGUG | 1468 |
| | | AD-1306478 | GACGUGGACUUCCCAACCUCAGG | 1469 |
| | | AD-1306483 | GGACAUGGAAACUUUUGAAAACA | 1470 |
| | | AD-1306514 | GGGCACCAAAGAGCAUAGAGUGC | 1471 |
| | | AD-1306535 | GAGGUAAGCAUCGACCAGGUCGG | 1472 |
| | | AD-1306563 | UGCUGACCUGCAGCCUGGAGACG | 1473 |
| | | AD-1306575 | CCUGCAAGAACGAAGACCAGACA | 1474 |
| | | AD-1306603 | GUUCAACAUGUGCUUCAACUACA | 1475 |
| | | AD-1306627 | CGUGCGUGUGCUUUGCUGUGACG | 1476 |
| | | AD-1306673 | ACCUCCACCCUGAGAACAGCUCC | 1477 |
| | | AD-1306676 | CCUCCCAAAGUGCUGACCACCAC | 1478 |
| | | AD-1306698 | UCUUCCUCCCUGGGCACCACCUG | 1479 |
| | | AD-1306717 | AGUGCCAACUACCACAACCACGG | 1480 |
| | | AD-1307191 | ACCACACCCACAACCAGAGGCUC | 1481 |
| | | AD-1307354 | ACGACCUGGAUCCUCACAAAGCC | 1482 |
| | | AD-1308029 | AGCUACCAGCGUUACACCCAUCC | 1483 |
| | | AD-1308183 | GACCACAACAGCCACUACGACUG | 1484 |
| | | AD-1308294 | ACCAGCUCCAAAGCCACUCCCUC | 1485 |
| | | AD-1334092 | CCGCCCUUCCAGCACUGAGAAGC | 1486 |
| | | AD-1308403 | CGCCUAUCACAGACCACCACACC | 1487 |
| | | AD-1308420 | ACGGCCACCAUGUCCACAGCCAC | 1488 |
| | | AD-1308440 | ACCCUCCUCCACUCCAGAGACUG | 1489 |
| | | AD-1334093 | CCCACACCUCCACAGUGCUUACC | 1490 |
| | | AD-1308488 | CCCAGGAACAGCUCACACUACCA | 1491 |
| | | AD-1308555 | CCUCCAGUGUGGAUCAGCACAAC | 1492 |
| | | AD-1306730 | AACUCCUGGGACAACUCCCAUCC | 1493 |
| | | AD-1306746 | ACCAGCAACACAGUGACUCCCUC | 1494 |
| | | AD-1306753 | CCAGUGCCGAACACCAUGGCCAC | 1495 |
| | | AD-1306772 | ACGGUGACUUCCCACACCCUAGC | 1496 |
| | | AD-1306796 | CUCGACUCCAGCCCUUUCCAGCC | 1497 |
| | | AD-1306820 | CCUAGCAGCAGAACCACCGAGUC | 1498 |
| | | AD-1306844 | CAGCUCACACUACCAAAGUGCUG | 1499 |
| | | AD-1306879 | GCACGCUUCCAGUGUGGAUCAGC | 1500 |
| | | AD-1306887 | CACACCCACAACCAGAGGUUCCA | 1501 |
| | | AD-1306916 | ACCACGGUGGUGACCAUGGGCUG | 1502 |
| | | AD-1307191 | ACCACACCCACAACCAGAGGCUC | 1481 |
| | | AD-1307212 | ACACCGCCACAGUGCUGACCACC | 1503 |
| | | AD-1307378 | AGCCACUACGACUGAGUCCACUG | 1504 |
| | | AD-1307392 | CAGCUCCAAAGCCACUCCCUUCU | 1505 |
| | | AD-1307516 | AACUCCAGGGACAACACCUAUCC | 1506 |
| | | AD-1307551 | ACCAGCAGCACAGUGACUCCCUC | 1507 |
| | | AD-1307575 | UCUGCCCUAGGGACCACCCACAC | 1508 |
| | | AD-1307600 | ACCACACACGGGCGAUCCCUGUC | 1509 |
| | | AD-1307617 | ACAGCCUGGACUUCGGCCACCUC | 1510 |
| | | AD-1307654 | CCACCCACAUCACAGAGCCUUCC | 1511 |
| | | AD-1307666 | AGCAACCACCGGUACCACCCAGC | 1512 |
| | | AD-1307754 | ACACCCAGCAAGACCCGCACCUC | 1513 |
| | | AD-1307805 | GAGUGGCUGGACUACAGCUACCC | 1514 |
| | | AD-1307812 | CUUUGACACCUACUCCAACAUCC | 1515 |
| | | AD-1307837 | AGUUGGGCCAGGUCGUGGAAUGC | 1516 |
| | | AD-1307860 | AGCCUGGACUUUGGCCUGGUCUG | 1517 |
| | | AD-1307893 | AAGAUGUGCUUCAACUAUGAAAU | 1518 |
| | | AD-1307917 | CGUGUGUUCUGCUGCAACUACGG | 1519 |
| | | AD-1307934 | ACCAGCUCUACGGCCAUGCCCUC | 1520 |
| | | AD-1308171 | GGAUCCUCACAGAGCUGACCACA | 1521 |
| | | AD-1308216 | AGCCGAGCACUACAGCCACCGUG | 1522 |
| | | AD-1308250 | CUCCUCCACCCAGGCAACUGCUG | 1523 |
| | | AD-1308273 | ACGGCCACGACACCCACAGUCAC | 1524 |
| | | AD-1334092 | CCGCCCUUCCAGCACUGAGAAGC | 1486 |
| | | AD-1308369 | CCCACAGCUACCAGCUUUACAGC | 525 |
| | | AD-1308403 | CGCCUAUCACAGACCACCACACC | 1487 |
| | | AD-1308420 | ACGGCCACCAUGUCCACAGCCAC | 1488 |
| | | AD-1308440 | ACCCUCCUCCACUCCAGAGACUG | 1489 |
| | | AD-1308463 | UCCACACCUCCACAGUGCUUACC | 1526 |
| | | AD-1308520 | CUACCACAACCACGGGCUUCACA | 1527 |
| | | AD-1308605 | CUGACCACCACCACCACAACUGU | 1528 |
| | | AD-1308629 | GCCACUGGUUCUAUGGCAACACC | 1529 |
| | | AD-1308652 | CUCCUCUAGCACACAGACCAGUG | 1530 |
| | | AD-1308673 | CACCACGGCCACUACGAUCACGG | 1531 |
| | | AD-1309037 | CAGGGACCACCUGGAUCCUCACA | 1532 |
| | | AD-1306916 | ACCACGGUGGUGACCAUGGGCUG | 1502 |
| | | AD-1306975 | AGCAGCCACUACGACCGCAACCA | 1533 |
| | | AD-1307006 | CCUCCCAAAGUGCUGACCAGCAC | 1534 |
| | | AD-1307011 | CCCUCCUUCACCCUUGGGACCAC | 1535 |
| | | AD-1307040 | AAGGGCCACCAGUUCCAUGUCCA | 1536 |
| | | AD-1307063 | CCCAGCACUACAGCCACCGUGAC | 1537 |
| | | AD-1307092 | GCACCCUCAAAGUGCUGACCAGC | 1538 |
| | | AD-1307111 | ACCACACCCACAGUCAUCAGCUC | 1539 |
| | | AD-1307137 | CACACCCACAGCUACCAGCGUUA | 1540 |
| | | AD-1307167 | CCUCCUCUACUCCAGAGACUGUC | 1541 |
| | | AD-1307174 | CCACAGUGCUUACCACCACGACC | 1542 |
| | | AD-1307191 | ACCACACCCACAACCAGAGGCUC | 1481 |
| | | AD-1307212 | ACACCGCCACAGUGCUGACCACC | 1503 |
| | | AD-1307222 | CGGCCACUACGAUCACAGCCACC | 1543 |
| | | AD-1307242 | AACUCCAGGGACAACUCCCAUCC | 1544 |
| | | AD-1307288 | CCCAGCAGCAACCACCAGUACCA | 1545 |
| | | AD-1307310 | ACCUCCAGGACCACAGCCACAGC | 1546 |
| | | AD-1307346 | UACGGCCACGCCCUCCUCAACUC | 1547 |
| | | AD-1307363 | AUCCUCACAAAGCUGACCACAAC | 1548 |
| | | AD-1307378 | AGCCACUACGACUGAGUCCACUG | 1504 |
| | | AD-1307392 | CAGCUCCAAAGCCACUCCCUUCU | 1505 |
| | | AD-1307431 | CCUCCUCCACUCCAGAGACUGCC | 1549 |
| | | AD-1307456 | CUCCACAGUGCUUACCACCACGG | 1550 |
| | | AD-1307516 | AACUCCAGGGACAACACCUAUCC | 1506 |
| | | AD-1307551 | ACCAGCAGCACAGUGACUCCCUC | 1507 |
| | | AD-1307575 | UCUGCCCUAGGGACCACCCACAC | 1508 |
| | | AD-1307590 | AACACCACGGCCACCACACACGG | 1551 |
| | | AD-1307600 | ACCACACACGGGCGAUCCCUGUC | 1509 |
| | | AD-1307617 | ACAGCCUGGACUUCGGCCACCUC | 1510 |
| | | AD-1307654 | CCACCCACAUCACAGAGCCUUCC | 1511 |
| | | AD-1307677 | GUACCACCCAGCACUCGACUCCA | 1552 |
| | | AD-1307706 | UCCAGCCCUCACCCUAGCAGCAG | 1553 |
| | | AD-1307754 | ACACCCAGCAAGACCCGCACCUC | 1513 |
| | | AD-1307775 | CCAUAACCACGGUGGUGACCACG | 1554 |
| | | AD-1307805 | GAGUGGCUGGACUACAGCUACCC | 1514 |
| | | AD-1307812 | CUUUGACACCUACUCCAACAUCC | 1515 |
| | | AD-1307837 | AGUUGGGCCAGGUCGUGGAAUGC | 1516 |
| | | AD-1307860 | AGCCUGGACUUUGGCCUGGUCUG | 1517 |
| | | AD-1307893 | AAGAUGUGCUUCAACUAUGAAAU | 1518 |
| | | AD-1307917 | CGUGUGUUCUGCUGCAACUACGG | 1519 |
| | | AD-1307934 | ACCAGCUCUACGGCCAUGCCCUC | 1520 |
| | | AD-1307994 | CACCAGUUCCAAAGCCACUUCCU | 1555 |
| | | AD-1308057 | CUCCCAGAACAGACCACCACACC | 1556 |
| | | AD-1308098 | ACCUCCACAGUGCUGACCACGAA | 1557 |
| | | AD-1308142 | ACGACCUGGAUCCUCACAGAGCU | 1558 |
| | | AD-1308171 | GGAUCCUCACAGAGCUGACCACA | 1521 |
| | | AD-1308216 | AGCCGAGCACUACAGCCACCGUG | 1522 |
| | | AD-1308250 | CUCCUCCACCCAGGCAACUGCUG | 1523 |
| | | AD-1308273 | ACGGCCACGACACCCACAGUCAC | 1524 |
| | | AD-1308305 | AGCCACUCCCUCCUCCAGUCCAG | 1559 |
| | | AD-1334092 | CCGCCCUUCCAGCACUGAGAAGC | 1486 |
| | | AD-1308369 | CCCACAGCUACCAGCUUUACAGC | 1525 |
| | | AD-1308403 | CGCCUAUCACAGACCACCACACC | 1487 |
| | | AD-1308422 | GGCCACCAUGUCCACAGCCACAC | 1560 |
| | | AD-1308488 | CCCAGGAACAGCUCACACUACCA | 1491 |
| | | AD-1308512 | AGUGCCGACUACCACAACCACGG | 1561 |
| | | AD-1308555 | CCUCCAGUGUGGAUCAGCACAAC | 1492 |
| | | AD-1308569 | ACCACACCCACAACCAGUGGCUC | 1562 |
| | | AD-1308605 | CUGACCACCACCACCACAACUGU | 1528 |
| | | AD-1308629 | GCCACUGGUUCUAUGGCAACACC | 1529 |
| | | AD-1308652 | CUCCUCUAGCACACAGACCAGUG | 1530 |
| | | AD-1308673 | CACCACGGCCACUACGAUCACGG | 1531 |
| | | AD-1308759 | UCCAAGGACUGCAACCACCCUUC | 1563 |
| | | AD-1308782 | CAGUGCUGACAAGCACAGCCACC | 1564 |
| | | AD-1308808 | UCCACAGCUACCAGCUUUACACC | 1565 |
| | | AD-1334094 | GGCCACCAUGUCCACAAUCCACC | 1566 |
| | | AD-1309007 | AGCCACUACAACUGCAGCCACUG | 1567 |
| | | AD-1309037 | CAGGGACCACCUGGAUCCUCACA | 1532 |
| | | AD-1309039 | GGGACCACCUGGAUCCUCACAGA | 1568 |
| | | AD-1307953 | AGCCACUACGACUGCAUCCACUG | 1569 |
| | | AD-1307967 | CCCUCCCAAAGUGCUGACCAGCA | 1570 |
| | | AD-1307994 | CACCAGUUCCAAAGCCACUUCCU | 1555 |
| | | AD-1308024 | UCCACAGCUACCAGCGUUACACC | 1571 |
| | | AD-1308057 | CUCCCAGAACAGACCACCACACC | 1556 |
| | | AD-1308098 | ACCUCCACAGUGCUGACCACGAA | 1557 |
| | | AD-1308133 | AAGGGCCACCAGUUCCACGUCCA | 1572 |
| | | AD-1308171 | GGAUCCUCACAGAGCUGACCACA | 1521 |
| | | AD-1308180 | GCUGACCACAACAGCCACUACGA | 1573 |
| | | AD-1308216 | AGCCGAGCACUACAGCCACCGUG | 1522 |
| | | AD-1308250 | CUCCUCCACCCAGGCAACUGCUG | 1523 |
| | | AD-1308263 | UGUGAGCACCACGGCCACGACAC | 1574 |
| | | AD-1308294 | ACCAGCUCCAAAGCCACUCCCUC | 1485 |
| | | AD-1308317 | CUCCAGUCCAGGGACUGCAACUG | 1575 |
| | | AD-1308344 | UCCAGCACUGAGAAGCACAGCCA | 1576 |
| | | AD-1308369 | CCCACAGCUACCAGCUUUACAGC | 1525 |
| | | AD-1308403 | CGCCUAUCACAGACCACCACACC | 1487 |
| | | AD-1308420 | ACGGCCACCAUGUCCACAGCCAC | 1488 |
| | | AD-1308440 | ACCCUCCUCCACUCCAGAGACUG | 1489 |
| | | AD-1308463 | UCCACACCUCCACAGUGCUUACC | 1526 |
| | | AD-1308488 | CCCAGGAACAGCUCACACUACCA | 1491 |
| | | AD-1308512 | AGUGCCGACUACCACAACCACGG | 1561 |
| | | AD-1308555 | CCUCCAGUGUGGAUCAGCACAAC | 1492 |
| | | AD-1308566 | ACCACCACACCCACAACCAGUGG | 1577 |
| | | AD-1308595 | ACCGCCAGAGUGCUGACCACCAC | 1578 |
| | | AD-1308629 | GCCACUGGUUCUAUGGCAACACC | 1529 |
| | | AD-1308652 | CUCCUCUAGCACACAGACCAGUG | 1530 |
| | | AD-1308673 | CACCACGGCCACUACGAUCACGG | 1531 |
| | | AD-1308702 | UCCAGGGACAACACCCAUCACCC | 1579 |
| | | AD-1308733 | AGCUCCAAAGCCACUUCCUCCUC | 1580 |
| | | AD-1308759 | UCCAAGGACUGCAACCACCCUUC | 1563 |
| | | AD-1308782 | CAGUGCUGACAAGCACAGCCACC | 1564 |
| | | AD-1308783 | AGUGCUGACAAGCACAGCCACAA | 1581 |
| | | AD-1308808 | UCCACAGCUACCAGCUUUACACC | 1565 |
| | | AD-1308818 | UCCUCCACCCUGUGGACCACGUG | 1582 |
| | | AD-1308845 | GUCCCAGCACAGACCACCACACC | 1583 |
| | | AD-1308868 | AUGUCCACCAUGUCCACAAUCCA | 1584 |
| | | AD-1334094 | GGCCACCAUGUCCACAAUCCACC | 1566 |
| | | AD-1308890 | CACCUCCUCUACUCCAGAGACCA | 1585 |
| | | AD-1308912 | CCCACACCUCCACAGUGCUGACC | 1586 |
| | | AD-1308935 | ACCACAGCCACCAUGACAAGGGC | 1587 |
| | | AD-1308963 | AUUCCACGGCCACACCCUCCUCC | 1588 |
| | | AD-1308975 | ACGACCCGGAUCCUCACUGAGCU | 1589 |
| | | AD-1308998 | GACCACAACAGCCACUACAACUG | 1590 |
| | | AD-1309007 | AGCCACUACAACUGCAGCCACUG | 1567 |
| | | AD-1309026 | ACUGGAUCCACGGCCACCCUGUC | 1591 |
| | | AD-1309037 | CAGGGACCACCUGGAUCCUCACA | 1532 |
| | | AD-1309039 | GGGACCACCUGGAUCCUCACAGA | 1568 |
| | | AD-1309042 | ACCACCUGGAUCCUCACAGAGCC | 1592 |
| | | AD-1309069 | ACUAUAGCCACCGUGAUGGUGCC | 1593 |
| | | AD-1309105 | CUCCACUCUGGGAACAGCUCACA | 1594 |
| | | AD-1309124 | ACCAUGGCCACUAUGCCCACAGC | 1595 |
| | | AD-1309148 | ACUGCCUCCACGGUUCCCAGCUC | 1596 |
| | | AD-1309167 | AGCCUGCCAACCUUCAGCGUGUC | 1597 |
| | | AD-1309192 | CUGUGUCCUCCUCAGUCCUCACC | 1598 |
| | | AD-1309216 | CCCAGCUCCCACUUCUCUACUCC | 1599 |
| | | AD-1309250 | GGGCAUUUGGACAGUUUUUCUCG | 1600 |
| | | AD-1309259 | GGGAAGUCAUCUACAAUAAGACC | 1601 |
| | | AD-1309287 | GGCUGCCAUUUCUACGCAGUGUG | 1602 |
| | | AD-1309315 | AGCACUGUGACAUUGACCGCUUC | 1603 |
| | | AD-1309337 | GCUGUGACAAUGCCAUCCCUCUC | 1604 |
| | | AD-1309379 | GGACCCUGGAGAACUGCACGGUG | 1605 |
| | | AD-1309406 | GCGUGGGUGACAACCGUGUCGUC | 1606 |
| | | AD-1309433 | UGGACCCAAAGCCUGUGGCCAAC | 1607 |
| | | AD-1309459 | ACCUGCGUGAACAAGCACCUGCC | 1608 |
| | | AD-1309482 | CAUCAAAGUGUCGGACCCGAGCC | 1609 |
| | | AD-1309503 | CCCUGUGACUUCCACUAUGAGUG | 1610 |
| | | AD-1309526 | CGAGUGCAUCUGCAGCAUGUGGG | 1611 |
| | | AD-1309535 | CUCCCACUAUUCCACCUUUGACG | 1612 |
| | | AD-1309567 | GCACCUAUGUCCUCAUGAGAGAG | 1613 |
| | | AD-1309595 | UGCACGCUUUGGGAAUCUCAGCC | 1614 |
| | | AD-1309621 | ACCUGGACAACCACUACUGCACG | 1615 |
| | | AD-1309647 | GCCCUCAGCAUCCACUACAAGUC | 1616 |
| | | AD-1309678 | UCGUCCUCACUGUCACCAUGGUG | 1617 |
| | | AD-1309720 | UGAUCCUGUUUGACCAAAUUCCG | 1618 |
| | | AD-1309747 | GCAGCGGUUUCAGCAAGAACGGC | 1619 |
| | | AD-1309780 | CCAUGCGUGUGGACAUUCCUGCC | 1620 |
| | | AD-1309804 | GCGUGAGCGUCACCUUCAAUGGC | 1621 |
| | | AD-1309844 | ACAGCCUCUUCCACAACAACACC | 1622 |
| | | AD-1309872 | GGCACCUGCACCAACAACCAGAG | 1623 |
| | | AD-1309900 | ACUGUCUCCAGCGGGACGGAACC | 1624 |
| | | AD-1309926 | GCCGCCAGUUGCAAGGACAUGGC | 1625 |
| | | AD-1309945 | CCCGACAGCAGAAAGGAUGGCUG | 1626 |
| | | AD-1309969 | AGCCGCUCUGUGAUCUGAUGCUG | 1627 |
| | | AD-1309993 | GCCAGGUCUUUGCUGAGUGCCAC | 1628 |
| | | AD-1310022 | AACGCCUGCAUCAGCGACCACUG | 1629 |
| | | AD-1310059 | UGGAGGCUUACGCAGAGCUCUGC | 1630 |
| | | AD-1310068 | GGAGUGUGCAGUGACUGGCGAGG | 1631 |
| | | AD-1310124 | CCCACCAAAGUGUACAAGCCAUG | 1632 |
| | | AD-1310146 | ACCUGCAACUCUAGGAACCAGAG | 1633 |
| | | AD-1310192 | AGGACCAGAUCCUCUUCAACGCA | 1634 |
| | | AD-1310215 | CACAUGGGCAUCUGCGUGCAGGC | 1635 |
| | | AD-1310234 | CCCGAUGGGUUUCCUAAAUUUCC | 1636 |
| | | AD-1310249 | UGGGUCAGCAACUGCCAGUCCUG | 1637 |
| | | AD-1310280 | ACGAGGGUUCAGUGUCGGUGCAG | 1638 |
| | | AD-1310310 | UCCCGGCUUCGUAACCGUGACCA | 1639 |
| | | AD-1310328 | UGCGUGUGCAACACAACCACCUG | 1640 |
| | | AD-1310345 | AGGGCAGGAGUCCAUCUGCACCC | 1641 |
| | | AD-1310378 | GACUGCUGUCCCACCUUCCGCUG | 1642 |
| | | AD-1310405 | CCUCAGCUGUGUUCGUACAAUGG | 1643 |
| | | AD-1310422 | GGUUGGUGCAACCUUCCCAGGCG | 1644 |
| | | AD-1310443 | CUUCCCUGCCACAUGUGUACCUG | 1645 |
| | | AD-1310466 | GGACCCAACGGUGCAAUGUCAGG | 1646 |
| | | AD-1310493 | UGCCUGCAACAAUACUACCUGUC | 1647 |
| | | AD-1310497 | CCAGGGCUUUGAGUACAAGAGAG | 1648 |
| | | AD-1310552 | CCAGUCCAGCUGAAUGAAACCUG | 1649 |
| | | AD-1310576 | GUCAACAGCCAUGUGGACAACUG | 1650 |
| | | AD-1310599 | CACCGUGUACCUCUGUGAGGCUG | 1651 |
| | | AD-1310622 | AGGGUGGAGUCCAUUUGCUGACC | 1652 |
| | | AD-1310637 | UCCUGCCCAGAUGUGUCCAGCUG | 1653 |
| | | AD-1310665 | CUGCUGCUACUCCUGUGAGGAGG | 1654 |
| | | AD-1310689 | CUCCUGUCAAGUCCGCAUCAACA | 1655 |
| | | AD-1310714 | ACCAUCCUGUGGCACCAGGGCUG | 1656 |
| | | AD-1310741 | ACCGAGGUCAACAUCACCUUCUG | 1657 |
| | | AD-1310762 | AGCGUCCAAGUACUCAGCAGAGG | 1658 |
| | | AD-1310790 | GCCAUGCAGCACCAGUGCACCUG | 1659 |
| | | AD-1310845 | CCCUUGCACUGUCCUAACGGCUC | 1660 |
| | | AD-1310873 | UCCUGCACACCUACACCCACGUG | 1661 |
| | | AD-1310907 | CUGCACGCCCUUCUGUGUCCCUG | 1662 |
| | | AD-1310938 | CCACUGCUGUCUGAGAACGUUCU | 1663 |
| | | AD-1310950 | CCCAUGCUCUGUCCACCUGGAGC | 1664 |
| | | AD-1310979 | GUGCAUUGUCUGAUCAUGAAAAC | 1665 |
| | | AD-1311016 | AGGGCGCCACUCAGGAGUCCUAC | 1666 |
| | | AD-1311052 | CCCUCCCUGAUGUCACUGGGACG | 1667 |
| | | AD-1311075 | CCCUGGAACAAACUAAGCAUGUG | 1668 |
| | | AD-1311115 | AGCACGGAUUCCAGCUGGCCACG | 1669 |
| | | AD-1311126 | CAGACAGGCUGGUCCAGGCAAGG | 1670 |
| | | AD-1311154 | UGCUGCCAGGAAGCUGCGACAGG | 1671 |
| | | AD-1311185 | GCCUGCUGCAGGGUAACUCAGGG | 1672 |
| | | AD-1311214 | UCGCAACGGCCAGGUCAGAGAGG | 1673 |
| | | AD-1311231 | AGCCCAGUUUUGCAAAUAAACCC | 1674 |

TABLE 4
Unmodified Sense and Antisense Strand MUC5B dsRNA Sequences

| Duplex | | SEQ ID | | SEQ ID | Start Site(s) in |
|---|---|---|---|---|---|
| Name | Sense Sequence 5′ to 3′ | NO: | Antisense Sequence 5′ to 3′ | NO: | NM_002458.3 |
| AD-1334097 | UUGGCUCUGGCGGCCAUGCUA | 1675 | UAGCAUGGCCGCCAGAGCCAACA | 1999 | 90 |
| AD-1334098 | CUGGGAGAAUGCAGGGCACAA | 1676 | UUGUGCCCUGCAUUCUCCCAGCU | 2000 | 152 |
| AD-1334099 | GCGCGUGAGCUUUGUUCCACA | 1677 | UGUGGAACAAAGCUCACGCGCCG | 2001 | 209 |
| AD-1334100 | UGGGCGGGUGUGCAGCACCUA | 1678 | UAGGUGCUGCACACCCGCCCAUU | 2002 | 275 |
| AD-1334101 | CCACUACAAGACCUUCGACGA | 1679 | UCGUCGAAGGUCUUGUAGUGGAA | 2003 | 305 |
| AD-1334102 | CCUUUGCAACUACGUGUUCUA | 1680 | UAGAACACGUAGUUGCAAAGGCC | 2004 | 347 |
| AD-1334103 | GAGGACUUCAACGUCCAGCUA | 1681 | UAGCUGGACGUUGAAGUCCUCGU | 2005 | 390 |
| AD-1334104 | ACCCGUGUUGUCAUCAAGGCA | 1682 | UGCCUUGAUGACAACACGGGUGA | 2006 | 444 |
| AD-1334105 | GGCUCCGUCCUCAUCAAUGGA | 1683 | UCCAUUGAUGAGGACGGAGCCGU | 2007 | 492 |
| AD-1334106 | GCUGCCUUACAGCCGCACUGA | 1684 | UCAGUGCGGCUGUAAGGCAGCUC | 2008 | 524 |
| AD-1334107 | GACUACAUCAAGGUCAGCAUA | 1685 | UAUGCUGACCUUGAUGUAGUCCC | 2009 | 567 |
| AD-1334108 | GCUGACAUUCCUGUGGAACGA | 1686 | UCGUUCCACAGGAAUGUCAGCAC | 2010 | 596 |
| AD-1334109 | CUGGAUCCCAAAUACGCCAAA | 1687 | UUUGGCGUAUUUGGGAUCCAGCU | 2011 | 639 |
| AD-1334110 | GCCUUCAACGAGUUCUAUGCA | 1688 | UGCAUAGAACUCGUUGAAGGCCG | 2012 | 699 |
| AD-1334111 | AACCUGCAGAAGUUGGAUGGA | 1689 | UCCAUCCAACUUCUGCAGGUUCC | 2013 | 753 |
| AD-1334112 | UGCACGGACGAGGAGGGCAUA | 1690 | UAUGCCCUCCUCGUCCGUGCAGU | 2014 | 819 |
| AD-1334113 | UUUGCGGAGUGCCACGCACUA | 1691 | UAGUGCGUGGCACUCCGCAAAGG | 2015 | 867 |
| AD-1334114 | GACAGCACUGCGUACCUGGCA | 1692 | UGCCAGGUACGCAGUGCUGUCCA | 2016 | 891 |
| AD-1334115 | GCCACCUUUGUGGAAUACUCA | 1693 | UGAGUAUUCCACAAAGGUGGCAC | 2017 | 954 |
| AD-1334116 | CUGGAGGUGCCCUGAGCUCUA | 1694 | UAGAGCUCAGGGCACCUCCAGUU | 2018 | 1010 |
| AD-1334117 | CUCAACAUGCAGCACCAGGAA | 1695 | UUCCUGGUGCUGCAUGUUGAGGG | 2019 | 1047 |
| AD-1334118 | ACCCUGCACGGACACCUGCUA | 1696 | UAGCAGGUGUCCGUGCAGGGUGA | 2020 | 1076 |
| AD-1334119 | GGACCACUGUGUGGACGGCUA | 1697 | UAGCCGUCCACACAGUGGUCCUC | 2021 | 1124 |
| AD-1334120 | GCUGGAUGACAUCACGCACUA | 1698 | UAGUGCGUGAUGUCAUCCAGCAC | 2022 | 1166 |
| AD-1334121 | CUCCUUCAACACCACCUGCAA | 1699 | UUGCAGGUGGUGUUGAAGGAGGU | 2023 | 1250 |
| AD-1334122 | CUAUGGCAGUGCCAGGACCUA | 1700 | UAGGUCCUGGCACUGCCAUAGCC | 2024 | 1293 |
| AD-1334123 | ACCUAUGAUGAGAAACUCUAA | 1701 | UUAGAGUUUCUCAUCAUAGGUGG | 2025 | 1359 |
| AD-1334124 | AGCUACGUUCUGUCCAAGAAA | 1702 | UUUCUUGGACAGAACGUAGCUGC | 2026 | 1398 |
| AD-1334125 | GACAGCAGCUUCACCGUGCUA | 1703 | UAGCACGGUGAAGCUGCUGUCGG | 2027 | 1425 |
| AD-1334126 | GGACAACGAGAACUGCCUGAA | 1704 | UUCAGGCAGUUCUCGUUGUCCGU | 2028 | 1472 |
| AD-1334127 | UCCUCAACUCCAUCUACACGA | 1705 | UCGUGUAGAUGGAGUUGAGGAAC | 2029 | 1558 |
| AD-1334128 | GCCAACAUCACCCUGUUCACA | 1706 | UGUGAACAGGGUGAUGUUGGCUG | 2030 | 1596 |
| AD-1334129 | UCGAGCUUCUUCAUCGUGGUA | 1707 | UACCACGAUGAAGAAGCUCGAGG | 2031 | 1620 |
| AD-1334130 | GCCACUCAUGCAGGUGUUUGA | 1708 | UCAAACACCUGCAUGAGUGGCAC | 2032 | 1679 |
| AD-1334131 | GGGAACUUCAACCAGAACCAA | 1709 | UUGGUUCUGGUUGAAGUUCCCAC | 2033 | 1743 |
| AD-1334132 | UGACGACUUCACGGCCCUCAA | 1710 | UUGAGGGCCGUGAAGUCGUCAGC | 2034 | 1766 |
| AD-1334133 | AGCCUUCGCCAACACCUGGAA | 1711 | UUCCAGGUGUUGGCGAAGGCUGC | 2035 | 1811 |
| AD-1334134 | CCAGGAACAGCUUUGAGGACA | 1712 | UGUCCUCAAAGCUGUUCCUGGCA | 2036 | 1855 |
| AD-1334135 | GUGGAGAAUGAGAACUACGCA | 1713 | UGCGUAGUUCUCAUUCUCCACAC | 2037 | 1890 |
| AD-1334136 | CAACAGUGCCUUCUCGCGCUA | 1714 | UAGCGCGAGAAGGCACUGUUGGG | 2038 | 1940 |
| AD-1334137 | CUUCCACUCGAACUGCAUGUA | 1715 | UACAUGCAGUUCGAGUGGAAGGG | 2039 | 1985 |
| AD-1334138 | CACCUGCAACUGUGAGCGGAA | 1716 | UUCCGCUCACAGUUGCAGGUGUC | 2040 | 2009 |
| AD-1334139 | CCUCCUAUGUGCACGCCUGUA | 1717 | UACAGGCGUGCACAUAGGAGGAC | 2041 | 2056 |
| AD-1334140 | GGCGUACAGCUCAGCGACUGA | 1718 | UCAGUCGCUGAGCUGUACGCCCU | 2042 | 2085 |
| AD-1334141 | ACCAAGUACAUGCAGAACUGA | 1719 | UCAGUUCUGCAUGUACUUGGUGC | 2043 | 2121 |
| AD-1334142 | UACGCCUACGUGGUGGAUGCA | 1720 | UGCAUCCACCACGUAGGCGUAGC | 2044 | 2157 |
| AD-1334143 | GCAGCGUUUCCUUCGUGCCUA | 1721 | UAGGCACGAAGGAAACGCUGCAG | 2045 | 2221 |
| AD-1334144 | GCACCUUCCUCAAUGACGCGA | 1722 | UCGCGUCAUUGAGGAAGGUGCCC | 2046 | 2266 |
| AD-1334145 | CUGGAGAGGUGGUGCACGACA | 1723 | UGUCGUGCACCACCUCUCCAGGA | 2047 | 2344 |
| AD-1334146 | CCGUGUGUUCAUGUACGGGUA | 1724 | UACCCGUACAUGAACACACGGCG | 2048 | 2371 |
| AD-1334147 | CCUCUCUGCAGAAAAGCACAA | 1725 | UUGUGCUUUUCUGCAGAGAGGCU | 2049 | 2413 |
| AD-1334148 | GGACUGCAGCAACAGCUCGGA | 1726 | UCCGAGCUGUUGCUGCAGUCCAG | 2050 | 2459 |
| AD-1334149 | CUGUUUCAGCACACACUGCGA | 1727 | UCGCAGUGUGUGCUGAAACAGCC | 2051 | 2531 |
| AD-1334150 | CUGCAUUGCCGAGGAGGACUA | 1728 | UAGUCCUCCUCGGCAAUGCAGCC | 2052 | 2600 |
| AD-1334151 | CACCUACAAGCCUGGAGAGAA | 1729 | UUCUCUCCAGGCUUGUAGGUGGC | 2053 | 2642 |
| AD-1334152 | CGACUGCAACACCUGCACCUA | 1730 | UAGGUGCAGGUGUUGCAGUCGAC | 2054 | 2672 |
| AD-1334153 | GAACCGGAGGUGGGAGUGCAA | 1731 | UUGCACUCCCACCUCCGGUUCCU | 2055 | 2696 |
| AD-1334154 | UGGCCACUUCAUCACCUUUGA | 1732 | UCAAAGGUGAUGAAGUGGCCAUC | 2056 | 2756 |
| AD-1334155 | CGAUCGCUACAGCUUUGAAGA | 1733 | UCUUCAAAGCUGUAGCGAUCGCC | 2057 | 2780 |
| AD-1334156 | GCUGCGAGUACAUCUUGGCCA | 1734 | UGGCCAAGAUGUACUCGCAGCUG | 2058 | 2803 |
| AD-1334157 | CUUCCGCAUCGUCACCGAGAA | 1735 | UUCUCGGUGACGAUGCGGAAGGU | 2059 | 2858 |
| AD-1334158 | GCCAUCAAGCUCUUCGUGGAA | 1736 | UUCCACGAAGAGCUUGAUGGCCU | 2060 | 2916 |
| AD-1334159 | UACGAGCUGAUCCUCCAAGAA | 1737 | UUCUUGGAGGAUCAGCUCGUAGC | 2061 | 2940 |
| AD-1334160 | GACCUUUAAGGCGGUGGCGAA | 1738 | UUCGCCACCGCCUUAAAGGUCCC | 2062 | 2963 |
| AD-1334161 | ACCCUACAAGAUACGCUACAA | 1739 | UUGUAGCGUAUCUUGUAGGGUGG | 2063 | 3002 |
| AD-1334162 | UUCCUGGUCAUCGAGACCCAA | 1740 | UUGGGUCUCGAUGACCAGGAAGA | 2064 | 3030 |
| AD-1334163 | CCAGCGUGUUCAUCCGACUGA | 1741 | UCAGUCGGAUGAACACGCUGGUC | 2065 | 3079 |
| AD-1334164 | CAGGACUACAAGGGCAGGGUA | 1742 | UACCCUGCCCUUGUAGUCCUGGU | 2066 | 3102 |
| AD-1334165 | GGGAACUUCGACGACAAUGCA | 1743 | UGCAUUGUCGUCGAAGUUCCCGC | 2067 | 3135 |
| AD-1334166 | CAAUGACUUUGCCACGCGUAA | 1744 | UUACGCGUGGCAAAGUCAUUGAU | 2068 | 3158 |
| AD-1334167 | GCACUGGAGUUUGGGAACAGA | 1745 | UCUGUUCCCAAACUCCAGUGCGU | 2069 | 3198 |
| AD-1334168 | GGCCCAGAAGCAGUGCAGCAA | 1746 | UUGCUGCACUGCUUCUGGGCCCA | 2070 | 3296 |
| AD-1334169 | CCAGGUUGACUCCACCAAGUA | 1747 | UACUUGGUGGAGUCAACCUGGGA | 2071 | 3350 |
| AD-1334170 | CGAGGCCUGCGUGAACGACGA | 1748 | UCGUCGUUCACGCAGGCCUCGUA | 2072 | 3374 |
| AD-1334171 | ACUGCGAGUGUUUCUGCACGA | 1749 | UCGUGCAGAAACACUCGCAGUCG | 2073 | 3418 |
| AD-1334172 | UGUGUGUGUCCUGGCGGACUA | 1750 | UAGUCCGCCAGGACACACACAGG | 2074 | 3478 |
| AD-1334173 | UGUUCUGUGACUUCUACAACA | 1751 | UGUUGUAGAAGUCACAGAACAAG | 2075 | 3514 |
| AD-1334174 | UGUGAGUGGCACUACCAGCCA | 1752 | UGGCUGGUAGUGCCACUCACAGC | 2076 | 3546 |
| AD-1334175 | GCUGCUACCCGAAGUGCCCAA | 1753 | UUGGGCACUUCGGGUAGCAGCCU | 2077 | 3640 |
| AD-1334176 | AGCCCUUCUUCAAUGAGGACA | 1754 | UGUCCUCAUUGAAGAAGGGCUGG | 2078 | 3667 |
| AD-1334177 | AAGUGCGUGGCCCAGUGUGGA | 1755 | UCCACACUGGGCCACGCACUUCA | 2079 | 3693 |
| AD-1334178 | CUACGACAAGGACGGAAACUA | 1756 | UAGUUUCCGUCCUUGUCGUAGCA | 2080 | 3716 |
| AD-1334179 | UGACGUCGGUGCAAGGGUCCA | 1757 | UGGACCCUUGCACCGACGUCAUA | 2081 | 3740 |
| AD-1334180 | CCAGAGCUGUAACUGCACACA | 1758 | UGUGUGCAGUUACAGCUCUGGCA | 2082 | 3776 |
| AD-1334181 | CAGUGCGCUCACAGCCUUGAA | 1759 | UUCAAGGCUGUGAGCGCACUGGA | 2083 | 3807 |
| AD-1334182 | CUGCACCUAUGAGGACAGGAA | 1760 | UUCCUGUCCUCAUAGGUGCAGGU | 2084 | 3836 |
| AD-1334183 | CAGGACGUCAUCUACAACACA | 1761 | UGUGUUGUAGAUGACGUCCUGGU | 2085 | 3867 |
| AD-1334184 | CGCCUGCUUGAUCGCCAUCUA | 1762 | UAGAUGGCGAUCAAGCAGGCGCC | 2086 | 3902 |
| AD-1334185 | ACCAUCAUCAGGAAGGCUGUA | 1763 | UACAGCCUUCCUGAUGAUGGUGC | 2087 | 3936 |
| AD-1334186 | CACAACGCCAUUCACCUUCAA | 1764 | UUGAAGGUGAAUGGCGUUGUGGC | 2088 | 3977 |
| AD-1334187 | UCCACCGUGUGUGUCCGCGAA | 1765 | UUCGCGGACACACACGGUGGAGA | 2089 | 4044 |
| AD-1334188 | UCCAGCUGGUACAAUGGGCAA | 1766 | UUGCCCAUUGUACCAGCUGGACC | 2090 | 4077 |
| AD-1334189 | CGGAGACUUUGAGACGUUUGA | 1767 | UCAAACGUCUCAAAGUCUCCGCC | 2091 | 4121 |
| AD-1334190 | GAGGGUACCAGGUAUGCCCUA | 1768 | UAGGGCAUACCUGGUACCCUCUC | 2092 | 4156 |
| AD-1334191 | CUGGCUGACAUCGAGUGCCGA | 1769 | UCGGCACUCGAUGUCAGCCAGCA | 2093 | 4179 |
| AD-1334192 | CUUCCCGACAUGCCGCUGGAA | 1770 | UUCCAGCGGCAUGUCGGGAAGCU | 2094 | 4209 |
| AD-1334193 | CAGGUGGACUGUGACCGCAUA | 1771 | UAUGCGGUCACAGUCCACCUGCU | 2095 | 4242 |
| AD-1334194 | CGCCAACAGCCAACAGAGUCA | 1772 | UGACUCUGUUGGCUGUUGGCGCA | 2096 | 4277 |
| AD-1334195 | UCUGUCACGACUACGAGCUGA | 1773 | UCAGCUCGUAGUCGUGACAGAGC | 2097 | 4303 |
| AD-1334196 | UCUCUGCUGCGAAUACGUGCA | 1774 | UGCACGUAUUCGCAGCAGAGAAC | 2098 | 4328 |
| AD-1334197 | CACGGAGCCUGCUGUGCCUAA | 1775 | UUAGGCACAGCAGGCUCCGUGCU | 2099 | 4403 |
| AD-1334198 | AGACCACAGCAACCGAAAAGA | 1776 | UCUUUUCGGUUGCUGUGGUCUGG | 2100 | 4432 |
| AD-1334199 | CACCUCGCAGACUGGGUCCAA | 1777 | UUGGACCCAGUCUGCGAGGUGAG | 2101 | 4496 |
| AD-1334200 | ACAGAGUGGUUUGAUGAGGAA | 1778 | UUCCUCAUCAAACCACUCUGUCC | 2102 | 4584 |
| AD-1334201 | GACGUUGAGUCCUACGAUAAA | 1779 | UUUAUCGUAGGACUCAACGUCCC | 2103 | 4632 |
| AD-1334202 | GGCCGCUGGAGGGCACUUAUA | 1780 | UAUAAGUGCCCUCCAGCGGCCCU | 2104 | 4658 |
| AD-1334203 | CAGCCUAAGGACAUAGAGUGA | 1781 | UCACUCUAUGUCCUUAGGCUGCU | 2105 | 4683 |
| AD-1334204 | AACUGGACCCUGGCACAGGUA | 1782 | UACCUGUGCCAGGGUCCAGUUGG | 2106 | 4722 |
| AD-1334205 | GUGCACUGUGACGUCCACUUA | 1783 | UAAGUGGACGUCACAGUGCACCU | 2107 | 4752 |
| AD-1334206 | GUGCAGGAACUGGGAGCAGGA | 1784 | UCCUGCUCCCAGUUCCUGCACAC | 2108 | 4781 |
| AD-1334207 | CGUCUUCAAGAUGUGCUACAA | 1785 | UUGUAGCACAUCUUGAAGACGCC | 2109 | 4805 |
| AD-1334208 | CUGCUGCAGUGACGACCACUA | 1786 | UAGUGGUCGUCACUGCAGCAGAG | 2110 | 4844 |
| AD-1334209 | CGACCACAGAGCUGGAGACGA | 1787 | UCGUCUCCAGCUCUGUGGUCGGU | 2111 | 4891 |
| AD-1334210 | GCCCUGUUCUCAACGCCGCAA | 1788 | UUGCGGCGUUGAGAACAGGGCCU | 2112 | 4932 |
| AD-1334211 | CCUCUCAGAAGGACUGACAUA | 1789 | UAUGUCAGUCCUUCUGAGAGGGU | 2113 | 5012 |
| AD-1334212 | CAGAUACACAAGCACCCUUGA | 1790 | UCAAGGGUGCUUGUGUAUCUGGG | 2114 | 5036 |
| AD-1334213 | GCUCCACAGAACCCACUGUCA | 1791 | UGACAGUGGGUUCUGUGGAGCCU | 2115 | 5092 |
| AD-1334214 | CACCCUUCCAACACGCUCAGA | 1792 | UCUGAGCGUGUUGGAAGGGUGGA | 2116 | 5129 |
| AD-1334215 | CAACAACAAUGGCAACCUCCA | 1793 | UGGAGGUUGCCAUUGUUGUUGGG | 2117 | 5212 |
| AD-1334216 | CGCUUCCAAAGAGCCGCUGAA | 1794 | UUCAGCGGCUCUUUGGAAGCGGU | 2118 | 5261 |
| AD-1334217 | GCGCCAACACUCACGAGCGAA | 1795 | UUCGCUCGUGAGUGUUGGCGCCA | 2119 | 5292 |
| AD-1334218 | GUCCACCUCUCAGGCCGAGAA | 1796 | UUCUCGGCCUGAGAGGUGGACAG | 2120 | 5315 |
| AD-1334219 | CAGGACAGAGACGACAAUGAA | 1797 | UUCAUUGUCGUCUCUGUCCUGGG | 2121 | 5345 |
| AD-1334220 | CUUGACUAACACCACCACCAA | 1798 | UUGGUGGUGGUGUUAGUCAAGGG | 2122 | 5369 |
| AD-1334221 | CUGUCAACCGAAGUGUGAGUA | 1799 | UACUCACACUUCGGUUGACAGCG | 2123 | 5405 |
| AD-1334222 | AGAGUGGUUUGACGUGGACUA | 1800 | UAGUCCACGUCAAACCACUCUGU | 2124 | 5429 |
| AD-1334223 | GGAAACUUUUGAAAACAUCAA | 1801 | UUGAUGUUUUCAAAAGUUUCCAU | 2125 | 5480 |
| AD-1334224 | GCACCAAAGAGCAUAGAGUGA | 1802 | UCACUCUAUGCUCUUUGGUGCCC | 2126 | 5526 |
| AD-1334225 | CGAGGUAAGCAUCGACCAGGA | 1803 | UCCUGGUCGAUGCUUACCUCGGG | 2127 | 5564 |
| AD-1334226 | CUGACCUGCAGCCUGGAGACA | 1804 | UGUCUCCAGGCUGCAGGUCAGCA | 2128 | 5595 |
| AD-1334227 | CUGCAAGAACGAAGACCAGAA | 1805 | UUCUGGUCUUCGUUCUUGCAGGU | 2129 | 5624 |
| AD-1334228 | UGCUUCAACUACAACGUGCGA | 1806 | UCGCACGUUGUAGUUGAAGCACA | 2130 | 5661 |
| AD-1334229 | UUGCUGUGACGACUACAGCCA | 1807 | UGGCUGUAGUCGUCACAGCAAAG | 2131 | 5687 |
| AD-1334230 | GACGACCUGGAUCCUCACAAA | 1808 | UUUGUGAGGAUCCAGGUCGUCCC | 2132 | 5762, |
| | | | | | 11120 |
| AD-1334231 | CGACCACAACAGCCACUACGA | 1809 | UCGUAGUGGCUGUUGUGGUCGGC | 2133 | 5785, |
| | | | | | 7372, |
| | | | | | 11143, |
| | | | | | 12814, |
| | | | | | 13327 |
| AD-1334232 | UCCACCCUGAGAACAGCUCCA | 1810 | UGGAGCUGUUCUCAGGGUGGAGG | 2134 | 5838 |
| AD-1334233 | UCCCAAAGUGCUGACCACCAA | 1811 | UUGGUGGUCAGCACUUUGGGAGG | 2135 | 5861 |
| AD-1334234 | CAGCUCCAAAGCCACUCCCUA | 1812 | UAGGGAGUGGCUUUGGAGCUGGU | 2136 | 5903, |
| | | | | | 7574, |
| | | | | | 11345, |
| | | | | | 13529 |
| AD-1334235 | CCAGUCCAGGGACUGCAACCA | 1813 | UGGUUGCAGUCCCUGGACUGGAG | 2137 | 5926, |
| | | | | | 7597, |
| | | | | | 9697, |
| | | | | | 11368 |
| AD-1334236 | AGCACUGAGAAGCACAGCCAA | 1814 | UUGGCUGUGCUUCUCAGUGCUGG | 2138 | 5954, |
| | | | | | 7625, |
| | | | | | 9725, |
| | | | | | 11396, |
| | | | | | 13580 |
| AD-1334237 | CUACCAGCGUUACACCCAUCA | 1815 | UGAUGGGUGUAACGCUGGUAGCU | 2139 | 5986, |
| | | | | | 13015 |
| AD-1334238 | UUCCUCCCUGGGCACCACCUA | 1816 | UAGGUGGUGCCCAGGGAGGAAGA | 2140 | 6011, |
| | | | | | 7682, |
| | | | | | 11453, |
| | | | | | 13637 |
| AD-1334239 | CCUAUCACAGACCACCACACA | 1817 | UGUGUGGUGGUCUGUGAUAGGCG | 2141 | 6038, |
| | | | | | 7709, |
| | | | | | 9809, |
| | | | | | 11480, |
| | | | | | 13664 |
| AD-1334240 | CCACCAUGUCCACAGCCACAA | 1818 | UUGUGGCUGUGGACAUGGUGGCC | 2142 | 6064, |
| | | | | | 7735, |
| | | | | | 9835, |
| | | | | | 11506, |
| | | | | | 13690 |
| AD-1334241 | UCCUCCACUCCAGAGACUGCA | 1819 | UGCAGUCUCUGGAGUGGAGGAGG | 2143 | 6087, |
| | | | | | 11529 |
| AD-1334242 | CUCCACAGUGCUUACCGCCAA | 1820 | UUGGCGGUAAGCACUGUGGAGGU | 2144 | 6113, |
| | | | | | 13739 |
| AD-1334243 | CAGGAACAGCUCACACUACCA | 1821 | UGGUAGUGUGAGCUGUUCCUGGG | 2145 | 6184, |
| | | | | | 7855, |
| | | | | | 9955, |
| | | | | | 11626, |
| | | | | | 13810 |
| AD-1334244 | UGCCAACUACCACAACCACGA | 1822 | UCGUGGUUGUGGUAGUUGGCACU | 2146 | 6208 |
| AD-1334245 | UCCAGUGUGGAUCAGCACAAA | 1823 | UUUGUGCUGAUCCACACUGGAGG | 2147 | 6275, |
| | | | | | 7946, |
| | | | | | 10046, |
| | | | | | 11717, |
| | | | | | 13901 |
| AD-1334246 | ACCCACAACCAGAGGCUCCAA | 1824 | UUGGAGCCUCUGGUUGUGGGUGU | 2148 | 6302, |
| | | | | | 10073 |
| AD-1334247 | CGCCACAGUGCUGACCACCAA | 1825 | UUGGUGGUCAGCACUGUGGCGGU | 2149 | 6359, |
| | | | | | 8030, |
| | | | | | 10130, |
| | | | | | 11801, |
| | | | | | 14423 |
| AD-1334248 | GCCACUGGUUCUAUGGCAACA | 1826 | UGUUGCCAUAGAACCAGUGGCCA | 2150 | 6393, |
| | | | | | 8064, |
| | | | | | 10164, |
| | | | | | 11835, |
| | | | | | 14034 |
| AD-1334249 | CUCCUCUAGCACACAGACCAA | 1827 | UUGGUCUGUGUGCUAGAGGAGGG | 2151 | 6416, |
| | | | | | 8087, |
| | | | | | 10187, |
| | | | | | 11858, |
| | | | | | 14057 |
| AD-1334250 | GGCCACUACGAUCACGGCCAA | 1828 | UUGGCCGUGAUCGUAGUGGCCGU | 2152 | 6464, |
| | | | | | 8135, |
| | | | | | 11906, |
| | | | | | 14105 |
| AD-1334251 | CUCCUCAACUCCUGGGACAAA | 1829 | UUUGUCCCAGGAGUUGAGGAGGG | 2153 | 6503 |
| AD-1334252 | CAGCAACACAGUGACUCCCUA | 1830 | UAGGGAGUCACUGUGUUGCUGGU | 2154 | 6572 |
| AD-1334253 | UGCCCUAGGGACCACCCACAA | 1831 | UUGUGGGUGGUCCCUAGGGCAGA | 2155 | 6596, |
| | | | | | 8267, |
| | | | | | 10367, |
| | | | | | 12038 |
| AD-1334254 | AGUGCCGAACACCAUGGCCAA | 1832 | UUGGCCAUGGUGUUCGGCACUGG | 2156 | 6623 |
| AD-1334255 | AGCCUGGACUUCGGCCACCUA | 1833 | UAGGUGGCCGAAGUCCAGGCUGU | 2157 | 6692, |
| | | | | | 8363, |
| | | | | | 10463, |
| | | | | | 12134 |
| AD-1334256 | ACCCACAUCACAGAGCCUUCA | 1834 | UGAAGGCUCUGUGAUGUGGGUGG | 2158 | 6729, |
| | | | | | 8400, |
| | | | | | 10500, |
| | | | | | 12171 |
| AD-1334257 | GGUGACUUCCCACACCCUAGA | 1835 | UCUAGGGUGUGGGAAGUCACCGU | 2159 | 6752 |
| AD-1334258 | CAACCACCGGUACCACCCAGA | 1836 | UCUGGGUGGUACCGGUGGUUGCU | 2160 | 6775, |
| | | | | | 8446, |
| | | | | | 12217 |
| AD-1334259 | CGACUCCAGCCCUUUCCAGCA | 1837 | UGCUGGAAAGGGCUGGAGUCGAG | 2161 | 6799 |
| AD-1334260 | UAGCAGCAGAACCACCGAGUA | 1838 | UACUCGGUGGUUCUGCUGCUAGG | 2162 | 6827 |
| AD-1334261 | ACCCAGCAAGACCCGCACCUA | 1839 | UAGGUGCGGGUCUUGCUGGGUGU | 2163 | 6917, |
| | | | | | 8588, |
| | | | | | 10688, |
| | | | | | 12359 |
| AD-1334262 | CGGUGGUGACCAUGGGCUGUA | 1840 | UACAGCCCAUGGUCACCACCGUG | 2164 | 6979, |
| | | | | | 8650 |
| AD-1334263 | GUGGCUGGACUACAGCUACCA | 1841 | UGGUAGCUGUAGUCCAGCCACUC | 2165 | 7022, |
| | | | | | 8693, |
| | | | | | 10793, |
| | | | | | 12464 |
| AD-1334264 | UUGACACCUACUCCAACAUCA | 1842 | UGAUGUUGGAGUAGGUGUCAAAG | 2166 | 7069, |
| | | | | | 8740, |
| | | | | | 10840, |
| | | | | | 12511 |
| AD-1334265 | UUGGGCCAGGUCGUGGAAUGA | 1843 | UCAUUCCACGACCUGGCCCAACU | 2167 | 7173, |
| | | | | | 8844, |
| | | | | | 10944, |
| | | | | | 12615 |
| AD-1334266 | CCUGGACUUUGGCCUGGUCUA | 1844 | UAGACCAGGCCAAAGUCCAGGCU | 2168 | 7196, |
| | | | | | 8867, |
| | | | | | 10967, |
| | | | | | 12638 |
| AD-1334267 | AUGUGCUUCAACUAUGAAAUA | 1845 | UAUUUCAUAGUUGAAGCACAUCU | 2169 | 7248, |
| | | | | | 8919, |
| | | | | | 11019, |
| | | | | | 12690 |
| AD-1334268 | UGUGUUCUGCUGCAACUACGA | 1846 | UCGUAGUUGCAGCAGAACACACG | 2170 | 7271, |
| | | | | | 8942, |
| | | | | | 11042, |
| | | | | | 12713 |
| AD-1334269 | CAGCUCUACGGCCAUGCCCUA | 1847 | UAGGGCAUGGCCGUAGAGCUGGU | 2171 | 7316, |
| | | | | | 12758 |
| AD-1334270 | AUCCUCACAGAGCUGACCACA | 1848 | UGUGGUCAGCUCUGUGAGGAUCC | 2172 | 7359, |
| | | | | | 9456, |
| | | | | | 12801, |
| | | | | | 13227, |
| | | | | | 13314 |
| AD-1334271 | CCACUACGACUGAGUCCACUA | 1849 | UAGUGGACUCAGUCGUAGUGGCU | 2173 | 7384, |
| | | | | | 11155 |
| AD-1334272 | GACCACCUGGAUCCUCACAGA | 1850 | UCUGUGAGGAUCCAGGUGGUCCC | 2174 | 7436, |
| | | | | | 9533, |
| | | | | | 11207, |
| | | | | | 13304, |
| | | | | | 13391, |
| | | | | | 14585 |
| AD-1334273 | GAGCACUACAGCCACCGUGAA | 1851 | UUCACGGUGGCUGUAGUGCUCGG | 2175 | 7460, |
| | | | | | 9557, |
| | | | | | 11231, |
| | | | | | 13415 |
| AD-1334274 | CCUCCACCCAGGCAACUGCUA | 1852 | UAGCAGUUGCCUGGGUGGAGGAG | 2176 | 7510, |
| | | | | | 11281, |
| | | | | | 13465 |
| AD-1334275 | GGCCACGACACCCACAGUCAA | 1853 | UUGACUGUGGGUGUCGUGGCCGU | 2177 | 7553, |
| | | | | | 11324, |
| | | | | | 13508 |
| AD-1334276 | GCUCCAAAGCCACUCCCUUCA | 1854 | UGAAGGGAGUGGCUUUGGAGCUG | 2178 | 7576, |
| | | | | | 11347 |
| AD-1334277 | ACAGCUACCAGCUUUACAGCA | 1855 | UGCUGUAAAGCUGGUAGCUGUGG | 2179 | 7653, |
| | | | | | 11424, |
| | | | | | 13608 |
| AD-1334278 | UCCUCCACUCCAGAGACUGUA | 1856 | UACAGUCUCUGGAGUGGAGGAGG | 2180 | 7758, |
| | | | | | 13713 |
| AD-1334279 | CCACAGUGCUUACCACCACGA | 1857 | UCGUGGUGGUAAGCACUGUGGAG | 2181 | 7786, |
| | | | | | 9886, |
| | | | | | 11557 |
| AD-1334280 | GCUCACACUACCAAAGUGCUA | 1858 | UAGCACUUUGGUAGUGUGAGCUG | 2182 | 7863 |
| AD-1334281 | UACCACAACCACGGGCUUCAA | 1859 | UUGAAGCCCGUGGUUGUGGUAGU | 2183 | 6215, |
| | | | | | 7886, |
| | | | | | 9986, |
| | | | | | 11657, |
| | | | | | 13841 |
| AD-1334282 | CACGCUUCCAGUGUGGAUCAA | 1860 | UUGAUCCACACUGGAAGCGUGCG | 2184 | 7940 |
| AD-1334283 | ACCCACAACCAGAGGUUCCAA | 1861 | UUGGAACCUCUGGUUGUGGGUGU | 2185 | 7973 |
| AD-1334284 | UGACCACCACCACCACAACUA | 1862 | UAGUUGUGGUGGUGGUGGUCAGC | 2186 | 6370, |
| | | | | | 8041, |
| | | | | | 10141, |
| | | | | | 11812, |
| | | | | | 14011 |
| AD-1334285 | CUCCUCAACUCCAGGGACAAA | 1863 | UUUGUCCCUGGAGUUGAGGAGGG | 2187 | 8174, |
| | | | | | 10274, |
| | | | | | 11945, |
| | | | | | 14144 |
| AD-1334286 | CAGCAGCACAGUGACUCCCUA | 1864 | UAGGGAGUCACUGUGCUGCUGGU | 2188 | 8243, |
| | | | | | 10343, |
| | | | | | 12014 |
| AD-1334287 | CACACACGGGCGAUCCCUGUA | 1865 | UACAGGGAUCGCCCGUGUGUGGU | 2189 | 8315, |
| | | | | | 12086 |
| AD-1334288 | CCACCCAGCACUCGACUCCAA | 1866 | UUGGAGUCGAGUGCUGGGUGGUA | 2190 | 6787, |
| | | | | | 8458, |
| | | | | | 10558, |
| | | | | | 12229 |
| AD-1334289 | CAGCCCUCACCCUAGCAGCAA | 1867 | UUGCUGCUAGGGUGAGGGCUGGA | 2191 | 6815, |
| | | | | | 8486, |
| | | | | | 10586, |
| | | | | | 12257 |
| AD-1334290 | CUGGAUCCUCACAGAGCAGAA | 1868 | UUCUGCUCUGUGAGGAUCCAGGU | 2192 | 9026 |
| AD-1334291 | CAGCCACUACGACCGCAACCA | 1869 | UGGUUGCGGUCGUAGUGGCUGCU | 2193 | 9052 |
| AD-1334292 | UCCCAAAGUGCUGACCAGCAA | 1870 | UUGCUGGUCAGCACUUUGGGAGG | 2194 | 9119 |
| AD-1334293 | CAGUUCCAAAGCCACUUCCUA | 1871 | UAGGAAGUGGCUUUGGAACUGGU | 2195 | 9161, |
| | | | | | 12932 |
| AD-1334294 | CAAGGACUGCAACCACCCUUA | 1872 | UAAGGGUGGUUGCAGUCCUUGGA | 2196 | 9190, |
| | | | | | 12961, |
| | | | | | 14242 |
| AD-1334295 | GUGCUGACAAGCACAGCCACA | 1873 | UGUGGCUGUGCUUGUCAGCACUG | 2197 | 9213, |
| | | | | | 12984, |
| | | | | | 14265 |
| AD-1334296 | CACAGCUACCAGCUUUACACA | 1874 | UGUGUAAAGCUGGUAGCUGUGGA | 2198 | 9239, |
| | | | | | 14291 |
| AD-1334297 | CUCCUUCACCCUUGGGACCAA | 1875 | UUGGUCCCAAGGGUGAAGGAGGG | 2199 | 9266 |
| AD-1334298 | CCCAGAACAGACCACCACACA | 1876 | UGUGUGGUGGUCUGUUCUGGGAG | 2200 | 9296, |
| | | | | | 13067 |
| AD-1334299 | CACCAUGUCCACAAUCCACCA | 1877 | UGGUGGAUUGUGGACAUGGUGGC | 2201 | 9323, |
| | | | | | 13094 |
| AD-1334300 | CUCCACAGUGCUGACCACGAA | 1878 | UUCGUGGUCAGCACUGUGGAGGU | 2202 | 9371, |
| | | | | | 13142 |
| AD-1334301 | GGCCACCAGUUCCAUGUCCAA | 1879 | UUGGACAUGGAACUGGUGGCCCU | 2203 | 9407 |
| AD-1334302 | CCACUACAACUGCAGCCACUA | 1880 | UAGUGGCUGCAGUUGUAGUGGCU | 2204 | 9481, |
| | | | | | 13252, |
| | | | | | 14533 |
| AD-1334303 | CAGCACUACAGCCACCGUGAA | 1881 | UUCACGGUGGCUGUAGUGCUGGG | 2205 | 7460, |
| | | | | | 9557, |
| | | | | | 11231, |
| | | | | | 13415 |
| AD-1334304 | ACCCUCAAAGUGCUGACCAGA | 1882 | UCUGGUCAGCACUUUGAGGGUGC | 2206 | 9630 |
| AD-1334305 | ACCCACAGUCAUCAGCUCCAA | 1883 | UUGGAGCUGAUGACUGUGGGUGU | 2207 | 9662 |
| AD-1334306 | CCACUCCCUCCUCCAGUCCAA | 1884 | UUGGACUGGAGGAGGGAGUGGCU | 2208 | 5914, |
| | | | | | 9685, |
| | | | | | 13540 |
| AD-1334307 | CUACCAGCGUUACAGCCAUCA | 1885 | UGAUGGCUGUAACGCUGGUAGCU | 2209 | 9757 |
| AD-1334308 | CCUCUACUCCAGAGACUGUCA | 1886 | UGACAGUCUCUGGAGUAGAGGAG | 2210 | 9859 |
| AD-1334309 | AGCUCACACUACCAAAGUGCA | 1887 | UGCACUUUGGUAGUGUGAGCUGU | 2211 | 6191, |
| | | | | | 7862, |
| | | | | | 9962, |
| | | | | | 11633, |
| | | | | | 13817 |
| AD-1334310 | CUACCACAACCACGGGCUUCA | 1888 | UGAAGCCCGUGGUUGUGGUAGUC | 2212 | 6214, |
| | | | | | 7885, |
| | | | | | 9985, |
| | | | | | 11656, |
| | | | | | 13840 |
| AD-1334311 | GGCCACUACGAUCACAGCCAA | 1889 | UUGGCUGUGAUCGUAGUGGCCGU | 2213 | 10235 |
| AD-1334312 | CACCACGGCCACCACACACGA | 1890 | UCGUGUGUGGUGGCCGUGGUGUU | 2214 | 8303, |
| | | | | | 10403, |
| | | | | | 12074 |
| AD-1334313 | CAGCAGCAACCACCAGUACCA | 1891 | UGGUACUGGUGGUUGCUGCUGGG | 2215 | 10540 |
| AD-1334314 | CCUCCAGGACCACAGCCACAA | 1892 | UUGUGGCUGUGGUCCUGGAGGUG | 2216 | 10663 |
| AD-1334315 | ACCACGGUGGUGACCACGGGA | 1893 | UCCCGUGGUCACCACCGUGGUUA | 2217 | 10746, |
| | | | | | 12417 |
| AD-1334316 | CGGCCACGCCCUCCUCAACUA | 1894 | UAGUUGAGGAGGGCGUGGCCGUA | 2218 | 5737, |
| | | | | | 11095 |
| AD-1334317 | CUGGAUCCUCACAAAGCUGAA | 1895 | UUCAGCUUUGUGAGGAUCCAGGU | 2219 | 11126 |
| AD-1334318 | ACCCACAACCAGUGGCUCCAA | 1896 | UUGGAGCCACUGGUUGUGGGUGU | 2220 | 11744, |
| | | | | | 13943 |
| AD-1334319 | GACGACCUGGAUCCUCACAGA | 1897 | UCUGUGAGGAUCCAGGUCGUCCC | 2221 | 7349, |
| | | | | | 9020, |
| | | | | | 9446, |
| | | | | | 12791, |
| | | | | | 13217 |
| AD-1334320 | UGACCACAACAGCCACUACGA | 1898 | UCGUAGUGGCUGUUGUGGUCAGC | 2222 | 5785, |
| | | | | | 7372, |
| | | | | | 11143, |
| | | | | | 12814, |
| | | | | | 13327 |
| AD-1334321 | AUCCACUGGAUCCACGGCCAA | 1899 | UUGGCCGUGGAUCCAGUGGAUGC | 2223 | 5810, |
| | | | | | 7397, |
| | | | | | 9068, |
| | | | | | 11168, |
| | | | | | 12839, |
| | | | | | 13352, |
| | | | | | 14546 |
| AD-1334322 | CUCCCAAAGUGCUGACCAGCA | 1900 | UGCUGGUCAGCACUUUGGGAGGG | 2224 | 9118, |
| | | | | | 12889 |
| AD-1334323 | CCACCAAAUCCACAGCUACCA | 1901 | UGGUAGCUGUGGAUUUGGUGGCU | 2225 | 9229, |
| | | | | | 13000 |
| AD-1334324 | GGCCACCAGUUCCACGUCCAA | 1902 | UUGGACGUGGAACUGGUGGCCCU | 2226 | 13178 |
| AD-1334325 | UGAGCACCACGGCCACGACAA | 1903 | UUGUCGUGGCCGUGGUGCUCACA | 2227 | 7543, |
| | | | | | 11314, |
| | | | | | 13498 |
| AD-1334326 | CCAGGGACUGCAACUGCCCUA | 1904 | UAGGGCAGUUGCAGUCCCUGGAC | 2228 | 13557 |
| AD-1334327 | CGCCAGAGUGCUGACCACCAA | 1905 | UUGGUGGUCAGCACUCUGGCGGU | 2229 | 14000 |
| AD-1334328 | CAGGGACAACACCCAUCACCA | 1906 | UGGUGAUGGGUGUUGUCCCUGGA | 2230 | 14155 |
| AD-1334329 | CUCCAAAGCCACUUCCUCCUA | 1907 | UAGGAGGAAGUGGCUUUGGAGCU | 2231 | 9164, |
| | | | | | 12935, |
| | | | | | 14216 |
| AD-1334330 | UGCUGACAAGCACAGCCACAA | 1908 | UUGUGGCUGUGCUUGUCAGCACU | 2232 | 14266 |
| AD-1334331 | CUCCACCCUGUGGACCACGUA | 1909 | UACGUGGUCCACAGGGUGGAGGA | 2233 | 14321 |
| AD-1334332 | CCCAGCACAGACCACCACACA | 1910 | UGUGUGGUGGUCUGUGCUGGGAC | 2234 | 14348 |
| AD-1334333 | GUCCACCAUGUCCACAAUCCA | 1911 | UGGAUUGUGGACAUGGUGGACAU | 2235 | 9320, |
| | | | | | 13091, |
| | | | | | 14372 |
| AD-1334334 | CUCCUCUACUCCAGAGACCAA | 1912 | UUGGUCUCUGGAGUAGAGGAGGU | 2236 | 14396 |
| AD-1334335 | CUCCACAGUGCUGACCACCAA | 1913 | UUGGUGGUCAGCACUGUGGAGGU | 2237 | 6359, |
| | | | | | 8030, |
| | | | | | 10130, |
| | | | | | 11801, |
| | | | | | 14423 |
| AD-1334336 | GGCCACCAAUUCCACGGCCAA | 1914 | UUGGCCGUGGAAUUGGUGGCCCU | 2238 | 14459 |
| AD-1334337 | UGACCACAACAGCCACUACAA | 1915 | UUGUAGUGGCUGUUGUGGUCAGC | 2239 | 14521 |
| AD-1334338 | UGGAUCCACGGCCACCCUGUA | 1916 | UACAGGGUGGCCGUGGAUCCAGU | 2240 | 14552 |
| AD-1334339 | GAGCACUAUAGCCACCGUGAA | 1917 | UUCACGGUGGCUAUAGUGCUCGG | 2241 | 14609 |
| AD-1334340 | CCACUCUGGGAACAGCUCACA | 1918 | UGUGAGCUGUUCCCAGAGUGGAG | 2242 | 14662 |
| AD-1334341 | CAUGGCCACUAUGCCCACAGA | 1919 | UCUGUGGGCAUAGUGGCCAUGGU | 2243 | 14702 |
| AD-1334342 | UGCCUCCACGGUUCCCAGCUA | 1920 | UAGCUGGGAACCGUGGAGGCAGU | 2244 | 14726 |
| AD-1334343 | GCCAACCUUCAGCGUGUCCAA | 1921 | UUGGACACGCUGAAGGUUGGCAG | 2245 | 14795 |
| AD-1334344 | UCCUCCUCAGUCCUCACCACA | 1922 | UGUGGUGAGGACUGAGGAGGACA | 2246 | 14820 |
| AD-1334345 | UCCCACUUCUCUACUCCCUGA | 1923 | UCAGGGAGUAGAGAAGUGGGAGC | 2247 | 14865 |
| AD-1334346 | GCAUUUGGACAGUUUUUCUCA | 1924 | UGAGAAAAACUGUCCAAAUGCCC | 2248 | 14895 |
| AD-1334347 | GAAGUCAUCUACAAUAAGACA | 1925 | UGUCUUAUUGUAGAUGACUUCCC | 2249 | 14922 |
| AD-1334348 | CUGCCAUUUCUACGCAGUGUA | 1926 | UACACUGCGUAGAAAUGGCAGCC | 2250 | 14954 |
| AD-1334349 | CACUGUGACAUUGACCGCUUA | 1927 | UAAGCGGUCAAUGUCACAGUGCU | 2251 | 14982 |
| AD-1334350 | UGUGACAAUGCCAUCCCUCUA | 1928 | UAGAGGGAUGGCAUUGUCACAGC | 2252 | 15075 |
| AD-1334351 | ACCCUGGAGAACUGCACGGUA | 1929 | UACCGUGCAGUUCUCCAGGGUCC | 2253 | 15117 |
| AD-1334352 | GUGGGUGACAACCGUGUCGUA | 1930 | UACGACACGGUUGUCACCCACGC | 2254 | 15147 |
| AD-1334353 | GACCCAAAGCCUGUGGCCAAA | 1931 | UUUGGCCACAGGCUUUGGGUCCA | 2255 | 15174 |
| AD-1334354 | CUGCGUGAACAAGCACCUGCA | 1932 | UGCAGGUGCUUGUUCACGCAGGU | 2256 | 15200 |
| AD-1334355 | UCAAAGUGUCGGACCCGAGCA | 1933 | UGCUCGGGUCCGACACUUUGAUG | 2257 | 15223 |
| AD-1334356 | CCUGUGACUUCCACUAUGAGA | 1934 | UCUCAUAGUGGAAGUCACAGGGC | 2258 | 15247 |
| AD-1334357 | GAGUGCAUCUGCAGCAUGUGA | 1935 | UCACAUGCUGCAGAUGCACUCGC | 2259 | 15270 |
| AD-1334358 | CCCACUAUUCCACCUUUGACA | 1936 | UGUCAAAGGUGGAAUAGUGGGAG | 2260 | 15298 |
| AD-1334359 | ACCUAUGUCCUCAUGAGAGAA | 1937 | UUCUCUCAUGAGGACAUAGGUGC | 2261 | 15348 |
| AD-1334360 | CACGCUUUGGGAAUCUCAGCA | 1938 | UGCUGAGAUUCCCAAAGCGUGCA | 2262 | 15376 |
| AD-1334361 | CUGGACAACCACUACUGCACA | 1939 | UGUGCAGUAGUGGUUGUCCAGGU | 2263 | 15402 |
| AD-1334362 | CUCAGCAUCCACUACAAGUCA | 1940 | UGACUUGUAGUGGAUGCUGAGGG | 2264 | 15462 |
| AD-1334363 | GUCCUCACUGUCACCAUGGUA | 1941 | UACCAUGGUGACAGUGAGGACGA | 2265 | 15492 |
| AD-1334364 | CCUGAUCCUGUUUGACCAAAA | 1942 | UUUUGGUCAAACAGGAUCAGGCC | 2266 | 15530 |
| AD-1334365 | AGCGGUUUCAGCAAGAACGGA | 1943 | UCCGUUCUUGCUGAAACCGCUGC | 2267 | 15561 |
| AD-1334366 | CGUGUGGACAUUCCUGCCCUA | 1944 | UAGGGCAGGAAUGUCCACACGCA | 2268 | 15615 |
| AD-1334367 | GUGAGCGUCACCUUCAAUGGA | 1945 | UCCAUUGAAGGUGACGCUCACGC | 2269 | 15639 |
| AD-1334368 | AGCCUCUUCCACAACAACACA | 1946 | UGUGUUGUUGUGGAAGAGGCUGU | 2270 | 15687 |
| AD-1334369 | UGCACCAACAACCAGAGGGAA | 1947 | UUCCCUCUGGUUGUUGGUGCAGG | 2271 | 15726 |
| AD-1334370 | UGUCUCCAGCGGGACGGAACA | 1948 | UGUUCCGUCCCGCUGGAGACAGU | 2272 | 15750 |
| AD-1334371 | CGCCAGUUGCAAGGACAUGGA | 1949 | UCCAUGUCCUUGCAACUGGCGGC | 2273 | 15776 |
| AD-1334372 | CGACAGCAGAAAGGAUGGCUA | 1950 | UAGCCAUCCUUUCUGCUGUCGGG | 2274 | 15815 |
| AD-1334373 | CCGCUCUGUGAUCUGAUGCUA | 1951 | UAGCAUCAGAUCACAGAGCGGCU | 2275 | 15921 |
| AD-1334374 | CAGGUCUUUGCUGAGUGCCAA | 1952 | UUGGCACUCAGCAAAGACCUGGC | 2276 | 15945 |
| AD-1334375 | GGGCCCAUUCUUCAACGCCUA | 1953 | UAGGCGUUGAAGAAUGGGCCCGG | 2277 | 15980 |
| AD-1334376 | GAGGCUUACGCAGAGCUCUGA | 1954 | UCAGAGCUCUGCGUAAGCCUCCA | 2278 | 16050 |
| AD-1334377 | AGUGUGCAGUGACUGGCGAGA | 1955 | UCUCGCCAGUCACUGCACACUCC | 2279 | 16082 |
| AD-1334378 | CCACCAAAGUGUACAAGCCAA | 1956 | UUGGCUUGUACACUUUGGUGGGU | 2280 | 16138 |
| AD-1334379 | CUGCAACUCUAGGAACCAGAA | 1957 | UUCUGGUUCCUAGAGUUGCAGGU | 2281 | 16181 |
| AD-1334380 | CAGAUCCUCUUCAACGCACAA | 1958 | UUGUGCGUUGAAGAGGAUCUGGU | 2282 | 16248 |
| AD-1334381 | GGGCAUCUGCGUGCAGGCCUA | 1959 | UAGGCCUGCACGCAGAUGCCCAU | 2283 | 16271 |
| AD-1334382 | CGAUGGGUUUCCUAAAUUUCA | 1960 | UGAAAUUUAGGAAACCCAUCGGG | 2284 | 16307 |
| AD-1334383 | GGUCAGCAACUGCCAGUCCUA | 1961 | UAGGACUGGCAGUUGCUGACCCA | 2285 | 16340 |
| AD-1334384 | GAGGGUUCAGUGUCGGUGCAA | 1962 | UUGCACCGACACUGAACCCUCGU | 2286 | 16371 |
| AD-1334385 | CGGCUUCGUAACCGUGACCAA | 1963 | UUGGUCACGGUUACGAAGCCGGG | 2287 | 16445 |
| AD-1334386 | CGUGUGCAACACAACCACCUA | 1964 | UAGGUGGUUGUGUUGCACACGCA | 2288 | 16505 |
| AD-1334387 | CAGGAGUCCAUCUGCACCCAA | 1965 | UUGGGUGCAGAUGGACUCCUGCC | 2289 | 16557 |
| AD-1334388 | CUGUCCCACCUUCCGCUGCAA | 1966 | UUGCAGCGGAAGGUGGGACAGCA | 2290 | 16592 |
| AD-1334389 | UCAGCUGUGUUCGUACAAUGA | 1967 | UCAUUGUACGAACACAGCUGAGG | 2291 | 16616 |
| AD-1334390 | UUGGUGCAACCUUCCCAGGCA | 1968 | UGCCUGGGAAGGUUGCACCAACC | 2292 | 16651 |
| AD-1334391 | UCCCUGCCACAUGUGUACCUA | 1969 | UAGGUACACAUGUGGCAGGGAAG | 2293 | 16676 |
| AD-1334392 | ACGGUGCAAUGUCAGGAGGAA | 1970 | UUCCUCCUGACAUUGCACCGUUG | 2294 | 16722 |
| AD-1334393 | CUGCAACAAUACUACCUGUCA | 1971 | UGACAGGUAGUAUUGUUGCAGGC | 2295 | 16745 |
| AD-1334394 | GGGCUUUGAGUACAAGAGAGA | 1972 | UCUCUCUUGUACUCAAAGCCCUG | 2296 | 16769 |
| AD-1334395 | GUCCAGCUGAAUGAAACCUGA | 1973 | UCAGGUUUCAUUCAGCUGGACUG | 2297 | 16851 |
| AD-1334396 | CAACAGCCAUGUGGACAACUA | 1974 | UAGUUGUCCACAUGGCUGUUGAC | 2298 | 16874 |
| AD-1334397 | CCGUGUACCUCUGUGAGGCUA | 1975 | UAGCCUCACAGAGGUACACGGUG | 2299 | 16897 |
| AD-1334398 | GGUGGAGUCCAUUUGCUGACA | 1976 | UGUCAGCAAAUGGACUCCACCCU | 2300 | 16920 |
| AD-1334399 | CUGCCCAGAUGUGUCCAGCUA | 1977 | UAGCUGGACACAUCUGGGCAGGA | 2301 | 16955 |
| AD-1334400 | GCUGCUACUCCUGUGAGGAGA | 1978 | UCUCCUCACAGGAGUAGCAGCAG | 2302 | 17002 |
| AD-1334401 | UCCUGUCAAGUCCGCAUCAAA | 1979 | UUUGAUGCGGACUUGACAGGAGU | 2303 | 17025 |
| AD-1334402 | GACCAUCCUGUGGCACCAGGA | 1980 | UCCUGGUGCCACAGGAUGGUCGU | 2304 | 17048 |
| AD-1334403 | GGUCAACAUCACCUUCUGCGA | 1981 | UCGCAGAAGGUGAUGUUGACCUC | 2305 | 17081 |
| AD-1334404 | CGUCCAAGUACUCAGCAGAGA | 1982 | UCUCUGCUGAGUACUUGGACGCU | 2306 | 17119 |
| AD-1334405 | AUGCAGCACCAGUGCACCUGA | 1983 | UCAGGUGCACUGGUGCUGCAUGG | 2307 | 17148 |
| AD-1334406 | GCCCUUGCACUGUCCUAACGA | 1984 | UCGUUAGGACAGUGCAAGGGCAC | 2308 | 17201 |
| AD-1334407 | CUGCACACCUACACCCACGUA | 1985 | UACGUGGGUGUAGGUGUGCAGGA | 2309 | 17232 |
| AD-1334408 | GCACGCCCUUCUGUGUCCCUA | 1986 | UAGGGACACAGAAGGGCGUGCAG | 2310 | 17266 |
| AD-1334409 | ACUGCUGUCUGAGAACGUUCA | 1987 | UGAACGUUCUCAGACAGCAGUGG | 2311 | 17334 |
| AD-1334410 | CAUGCUCUGUCCACCUGGAGA | 1988 | UCUCCAGGUGGACAGAGCAUGGG | 2312 | 17366 |
| AD-1334411 | GCAUUGUCUGAUCAUGAAAAA | 1989 | UUUUUCAUGAUCAGACAAUGCAC | 2313 | 17395 |
| AD-1334412 | GGCGCCACUCAGGAGUCCUAA | 1990 | UUAGGACUCCUGAGUGGCGCCCU | 2314 | 17542 |
| AD-1334413 | CUCCCUGAUGUCACUGGGACA | 1991 | UGUCCCAGUGACAUCAGGGAGGG | 2315 | 17598 |
| AD-1334414 | CUGGAACAAACUAAGCAUGUA | 1992 | UACAUGCUUAGUUUGUUCCAGGG | 2316 | 17621 |
| AD-1334415 | GCACGGAUUCCAGCUGGCCAA | 1993 | UUGGCCAGCUGGAAUCCGUGCUG | 2317 | 17682 |
| AD-1334416 | GACAGGCUGGUCCAGGCAAGA | 1994 | UCUUGCCUGGACCAGCCUGUCUG | 2318 | 17720 |
| AD-1334417 | GCUGCCAGGAAGCUGCGACAA | 1995 | UUGUCGCAGCUUCCUGGCAGCAG | 2319 | 17747 |
| AD-1334418 | GCAGGGUAACUCAGGGCUGAA | 1996 | UUCAGCCCUGAGUUACCCUGCAG | 2320 | 17796 |
| AD-1334419 | GCAACGGCCAGGUCAGAGAGA | 1997 | UCUCUCUGACCUGGCCGUUGCGA | 2321 | 17820 |
| AD-1334420 | AGCCCAGUUUUGCAAAUAAAA | 1998 | UUUUAUUUGCAAAACUGGGCUGG | 2322 | 17874 |

TABLE 5
Modified Sense and Antisense Strand MUC5B dsRNA Sequences

| | | SEQ | | SEQ |
|---|---|---|---|---|
| | | ID | | ID |
| Duplex Name | Sense Sequence 5′ to 3′ | NO: | Antisense Sequence | NO: |
| AD-1334097 | ususggcuCfuGfGfCfggccaugcsusa | 2323 | VPusAfsgcaUfgGfCfcgccAfgAfgccaascsa | 2647 |
| AD-1334098 | csusgggaGfaAfUfGfcagggcacsasa | 2324 | VPusUfsgugCfcCfUfgcauUfcUfcccagscsu | 2648 |
| AD-1334099 | gscsgcguGfaGfCfUfuuguuccascsa | 2325 | VPusGfsuggAfaCfAfaagcUfcAfcgcgcscsg | 2649 |
| AD-1334100 | usgsggcgGfgUfGfUfgcagcaccsusa | 2326 | VPusAfsgguGfcUfGfcacaCfcCfgcccasusu | 2650 |
| AD-1334101 | cscsacuaCfaAfGfAfccuucgacsgsa | 2327 | VPusCfsgucGfaAfGfgucuUfgUfaguggsasa | 2651 |
| AD-1334102 | cscsuuugCfaAfCfUfacguguucsusa | 2328 | VPusAfsgaaCfaCfGfuaguUfgCfaaaggscsc | 2652 |
| AD-1334103 | gsasggacUfuCfAfAfcguccagcsusa | 2329 | VPusAfsgcuGfgAfCfguugAfaGfuccucsgsu | 2653 |
| AD-1334104 | ascsccguGfuUfGfUfcaucaaggscsa | 2330 | VPusGfsccuUfgAfUfgacaAfcAfcgggusgsa | 2654 |
| AD-1334105 | gsgscuccGfuCfCfUfcaucaaugsgsa | 2331 | VPusCfscauUfgAfUfgaggAfcGfgagccsgsu | 2655 |
| AD-1334106 | gscsugccUfuAfCfAfgccgcacusgsa | 2332 | VPusCfsaguGfcGfGfcuguAfaGfgcagcsusc | 2656 |
| AD-1334107 | gsascuacAfuCfAfAfggucagcasusa | 2333 | VPusAfsugcUfgAfCfcuugAfuGfuagucscsc | 2657 |
| AD-1334108 | gscsugacAfuUfCfCfuguggaacsgsa | 2334 | VPusCfsguuCfcAfCfaggaAfuGfucagcsasc | 2658 |
| AD-1334109 | csusggauCfcCfAfAfauacgccasasa | 2335 | VPusUfsuggCfgUfAfuuugGfgAfuccagscsu | 2659 |
| AD-1334110 | gscscuucAfaCfGfAfguucuaugscsa | 2336 | VPusGfscauAfgAfAfcucgUfuGfaaggcscsg | 2660 |
| AD-1334111 | asasccugCfaGfAfAfguuggaugsgsa | 2337 | VPusCfscauCfcAfAfcuucUfgCfagguuscsc | 2661 |
| AD-1334112 | usgscacgGfaCfGfAfggagggcasusa | 2338 | VPusAfsugcCfcUfCfcucgUfcCfgugcasgsu | 2662 |
| AD-1334113 | ususugcgGfaGfUfGfccacgcacsusa | 2339 | VPusAfsgugCfgUfGfgcacUfcCfgcaaasgsg | 2663 |
| AD-1334114 | gsascagcAfcUfGfCfguaccuggscsa | 2340 | VPusGfsccaGfgUfAfcgcaGfuGfcugucscsa | 2664 |
| AD-1334115 | gscscaccUfuUfGfUfggaauacuscsa | 2341 | VPusGfsaguAfuUfCfcacaAfaGfguggcsasc | 2665 |
| AD-1334116 | csusggagGfuGfCfCfcugagcucsusa | 2342 | VPusAfsgagCfuCfAfgggcAfcCfuccagsusu | 2666 |
| AD-1334117 | csuscaacAfuGfCfAfgcaccaggsasa | 2343 | VPusUfsccuGfgUfGfcugcAfuGfuugagsgsg | 2667 |
| AD-1334118 | ascsccugCfaCfGfGfacaccugcsusa | 2344 | VPusAfsgcaGfgUfGfuccgUfgCfagggusgsa | 2668 |
| AD-1334119 | gsgsaccaCfuGfUfGfuggacggcsusa | 2345 | VPusAfsgccGfuCfCfacacAfgUfgguccsusc | 2669 |
| AD-1334120 | gscsuggaUfgAfCfAfucacgcacsusa | 2346 | VPusAfsgugCfgUfGfauguCfaUfccagcsasc | 2670 |
| AD-1334121 | csusccuuCfaAfCfAfccaccugcsasa | 2347 | VPusUfsgcaGfgUfGfguguUfgAfaggagsgsu | 2671 |
| AD-1334122 | csusauggCfaGfUfGfccaggaccsusa | 2348 | VPusAfsgguCfcUfGfgcacUfgCfcauagscsc | 2672 |
| AD-1334123 | ascscuauGfaUfGfAfgaaacucusasa | 2349 | VPusUfsagaGfuUfUfcucaUfcAfuaggusgsg | 2673 |
| AD-1334124 | asgscuacGfuUfCfUfguccaagasasa | 2350 | VPusUfsucuUfgGfAfcagaAfcGfuagcusgsc | 2674 |
| AD-1334125 | gsascagcAfgCfUfUfcaccgugcsusa | 2351 | VPusAfsgcaCfgGfUfgaagCfuGfcugucsgsg | 2675 |
| AD-1334126 | gsgsacaaCfgAfGfAfacugccugsasa | 2352 | VPusUfscagGfcAfGfuucuCfgUfuguccsgsu | 2676 |
| AD-1334127 | uscscucaAfcUfCfCfaucuacacsgsa | 2353 | VPusCfsgugUfaGfAfuggaGfuUfgaggasasc | 2677 |
| AD-1334128 | gscscaacAfuCfAfCfccuguucascsa | 2354 | VPusGfsugaAfcAfGfggugAfuGfuuggcsusg | 2678 |
| AD-1334129 | uscsgagcUfuCfUfUfcaucguggsusa | 2355 | VPusAfsccaCfgAfUfgaagAfaGfcucgasgsg | 2679 |
| AD-1334130 | gscscacuCfaUfGfCfagguguuusgsa | 2356 | VPusCfsaaaCfaCfCfugcaUfgAfguggcsasc | 2680 |
| AD-1334131 | gsgsgaacUfuCfAfAfccagaaccsasa | 2357 | VPusUfsgguUfcUfGfguugAfaGfuucccsasc | 2681 |
| AD-1334132 | usgsacgaCfuUfCfAfcggcccucsasa | 2358 | VPusUfsgagGfgCfCfgugaAfgUfcgucasgsc | 2682 |
| AD-1334133 | asgsccuuCfgCfCfAfacaccuggsasa | 2359 | VPusUfsccaGfgUfGfuuggCfgAfaggcusgsc | 2683 |
| AD-1334134 | cscsaggaAfcAfGfCfuuugaggascsa | 2360 | VPusGfsuccUfcAfAfagcuGfuUfccuggscsa | 2684 |
| AD-1334135 | gsusggagAfaUfGfAfgaacuacgscsa | 2361 | VPusGfscguAfgUfUfcucaUfuCfuccacsasc | 2685 |
| AD-1334136 | csasacagUfgCfCfUfucucgcgcsusa | 2362 | VPusAfsgcgCfgAfGfaaggCfaCfuguugsgsg | 2686 |
| AD-1334137 | csusuccaCfuCfGfAfacugcaugsusa | 2363 | VPusAfscauGfcAfGfuucgAfgUfggaagsgsg | 2687 |
| AD-1334138 | csasccugCfaAfCfUfgugagcggsasa | 2364 | VPusUfsccgCfuCfAfcaguUfgCfaggugsusc | 2688 |
| AD-1334139 | cscsuccuAfuGfUfGfcacgccugsusa | 2365 | VPusAfscagGfcGfUfgcacAfuAfggaggsasc | 2689 |
| AD-1334140 | gsgscguaCfaGfCfUfcagcgacusgsa | 2366 | VPusCfsaguCfgCfUfgagcUfgUfacgccscsu | 2690 |
| AD-1334141 | ascscaagUfaCfAfUfgcagaacusgsa | 2367 | VPusCfsaguUfcUfGfcaugUfaCfuuggusgsc | 2691 |
| AD-1334142 | usascgccUfaCfGfUfgguggaugscsa | 2368 | VPusGfscauCfcAfCfcacgUfaGfgcguasgsc | 2692 |
| AD-1334143 | gscsagcgUfuUfCfCfuucgugccsusa | 2369 | VPusAfsggcAfcGfAfaggaAfaCfgcugcsasg | 2693 |
| AD-1334144 | gscsaccuUfcCfUfCfaaugacgcsgsa | 2370 | VPusCfsgcgUfcAfUfugagGfaAfggugcscsc | 2694 |
| AD-1334145 | csusggagAfgGfUfGfgugcacgascsa | 2371 | VPusGfsucgUfgCfAfccacCfuCfuccagsgsa | 2695 |
| AD-1334146 | cscsguguGfuUfCfAfuguacgggsusa | 2372 | VPusAfscccGfuAfCfaugaAfcAfcacggscsg | 2696 |
| AD-1334147 | cscsucucUfgCfAfGfaaaagcacsasa | 2373 | VPusUfsgugCfuUfUfucugCfaGfagaggscsu | 2697 |
| AD-1334148 | gsgsacugCfaGfCfAfacagcucgsgsa | 2374 | VPusCfscgaGfcUfGfuugcUfgCfaguccsasg | 2698 |
| AD-1334149 | csusguuuCfaGfCfAfcacacugcsgsa | 2375 | VPusCfsgcaGfuGfUfgugcUfgAfaacagscsc | 2699 |
| AD-1334150 | csusgcauUfgCfCfGfaggaggacsusa | 2376 | VPusAfsgucCfuCfCfucggCfaAfugcagscsc | 2700 |
| AD-1334151 | csasccuaCfaAfGfCfcuggagagsasa | 2377 | VPusUfscucUfcCfAfggcuUfgUfaggugsgsc | 2701 |
| AD-1334152 | csgsacugCfaAfCfAfccugcaccsusa | 2378 | VPusAfsgguGfcAfGfguguUfgCfagucgsasc | 2702 |
| AD-1334153 | gsasaccgGfaGfGfUfgggagugcsasa | 2379 | VPusUfsgcaCfuCfCfcaccUfcCfgguucscsu | 2703 |
| AD-1334154 | usgsgccaCfuUfCfAfucaccuuusgsa | 2380 | VPusCfsaaaGfgUfGfaugaAfgUfggccasusc | 2704 |
| AD-1334155 | csgsaucgCfuAfCfAfgcuuugaasgsa | 2381 | VPusCfsuucAfaAfGfcuguAfgCfgaucgscsc | 2705 |
| AD-1334156 | gscsugcgAfgUfAfCfaucuuggcscsa | 2382 | VPusGfsgccAfaGfAfuguaCfuCfgcagcsusg | 2706 |
| AD-1334157 | csusuccgCfaUfCfGfucaccgagsasa | 2383 | VPusUfscucGfgUfGfacgaUfgCfggaagsgsu | 2707 |
| AD-1334158 | gscscaucAfaGfCfUfcuucguggsasa | 2384 | VPusUfsccaCfgAfAfgagcUfuGfauggcscsu | 2708 |
| AD-1334159 | usascgagCfuGfAfUfccuccaagsasa | 2385 | VPusUfscuuGfgAfGfgaucAfgCfucguasgsc | 2709 |
| AD-1334160 | gsasccuuUfaAfGfGfcgguggcgsasa | 2386 | VPusUfscgcCfaCfCfgccuUfaAfaggucscsc | 2710 |
| AD-1334161 | ascsccuaCfaAfGfAfuacgcuacsasa | 2387 | VPusUfsguaGfcGfUfaucuUfgUfagggusgsg | 2711 |
| AD-1334162 | ususccugGfuCfAfUfcgagacccsasa | 2388 | VPusUfsgggUfcUfCfgaugAfcCfaggaasgsa | 2712 |
| AD-1334163 | cscsagcgUfgUfUfCfauccgacusgsa | 2389 | VPusCfsaguCfgGfAfugaaCfaCfgcuggsusc | 2713 |
| AD-1334164 | csasggacUfaCfAfAfgggcagggsusa | 2390 | VPusAfscccUfgCfCfcuugUfaGfuccugsgsu | 2714 |
| AD-1334165 | gsgsgaacUfuCfGfAfcgacaaugscsa | 2391 | VPusGfscauUfgUfCfgucgAfaGfuucccsgsc | 2715 |
| AD-1334166 | csasaugaCfuUfUfGfccacgcgusasa | 2392 | VPusUfsacgCfgUfGfgcaaAfgUfcauugsasu | 2716 |
| AD-1334167 | gscsacugGfaGfUfUfugggaacasgsa | 2393 | VPusCfsuguUfcCfCfaaacUfcCfagugcsgsu | 2717 |
| AD-1334168 | gsgscccaGfaAfGfCfagugcagcsasa | 2394 | VPusUfsgcuGfcAfCfugcuUfcUfgggccscsa | 2718 |
| AD-1334169 | cscsagguUfgAfCfUfccaccaagsusa | 2395 | VPusAfscuuGfgUfGfgaguCfaAfccuggsgsa | 2719 |
| AD-1334170 | csgsaggcCfuGfCfGfugaacgacsgsa | 2396 | VPusCfsgucGfuUfCfacgcAfgGfccucgsusa | 2720 |
| AD-1334171 | ascsugcgAfgUfGfUfuucugcacsgsa | 2397 | VPusCfsgugCfaGfAfaacaCfuCfgcaguscsg | 2721 |
| AD-1334172 | usgsugugUfgUfCfCfuggcggacsusa | 2398 | VPusAfsgucCfgCfCfaggaCfaCfacacasgsg | 2722 |
| AD-1334173 | usgsuucuGfuGfAfCfuucuacaascsa | 2399 | VPusGfsuugUfaGfAfagucAfcAfgaacasasg | 2723 |
| AD-1334174 | usgsugagUfgGfCfAfcuaccagcscsa | 2400 | VPusGfsgcuGfgUfAfgugcCfaCfucacasgsc | 2724 |
| AD-1334175 | gscsugcuAfcCfCfGfaagugcccsasa | 2401 | VPusUfsgggCfaCfUfucggGfuAfgcagescsu | 2725 |
| AD-1334176 | asgscccuUfcUfUfCfaaugaggascsa | 2402 | VPusGfsuccUfcAfUfugaaGfaAfgggcusgsg | 2726 |
| AD-1334177 | asasgugcGfuGfGfCfccagugugsgsa | 2403 | VPusCfscacAfcUfGfggccAfcGfcacuuscsa | 2727 |
| AD-1334178 | csusacgaCfaAfGfGfacggaaacsusa | 2404 | VPusAfsguuUfcCfGfuccuUfgUfcguagscsa | 2728 |
| AD-1334179 | usgsacguCfgGfUfGfcaagggucscsa | 2405 | VPusGfsgacCfcUfUfgcacCfgAfcgucasusa | 2729 |
| AD-1334180 | cscsagagCfuGfUfAfacugcacascsa | 2406 | VPusGfsuguGfcAfGfuuacAfgCfucuggscsa | 2730 |
| AD-1334181 | csasgugcGfcUfCfAfcagccuugsasa | 2407 | VPusUfscaaGfgCfUfgugaGfcGfcacugsgsa | 2731 |
| AD-1334182 | csusgcacCfuAfUfGfaggacaggsasa | 2408 | VPusUfsccuGfuCfCfucauAfgGfugcagsgsu | 2732 |
| AD-1334183 | csasggacGfuCfAfUfcuacaacascsa | 2409 | VPusGfsuguUfgUfAfgaugAfcGfuccugsgsu | 2733 |
| AD-1334184 | csgsccugCfuUfGfAfucgccaucsusa | 2410 | VPusAfsgauGfgCfGfaucaAfgCfaggcgscsc | 2734 |
| AD-1334185 | ascscaucAfuCfAfGfgaaggcugsusa | 2411 | VPusAfscagCfcUfUfccugAfuGfauggusgsc | 2735 |
| AD-1334186 | csascaacGfcCfAfUfucaccuucsasa | 2412 | VPusUfsgaaGfgUfGfaaugGfcGfuugugsgsc | 2736 |
| AD-1334187 | uscscaccGfuGfUfGfuguccgcgsasa | 2413 | VPusUfscgcGfgAfCfacacAfcGfguggasgsa | 2737 |
| AD-1334188 | uscscagcUfgGfUfAfcaaugggcsasa | 2414 | VPusUfsgccCfaUfUfguacCfaGfcuggascsc | 2738 |
| AD-1334189 | csgsgagaCfuUfUfGfagacguuusgsa | 2415 | VPusCfsaaaCfgUfCfucaaAfgUfcuccgscsc | 2739 |
| AD-1334190 | gsasggguAfcCfAfGfguaugcccsusa | 2416 | VPusAfsgggCfaUfAfccugGfuAfcccucsusc | 2740 |
| AD-1334191 | csusggcuGfaCfAfUfcgagugccsgsa | 2417 | VPusCfsggcAfcUfCfgaugUfcAfgccagscsa | 2741 |
| AD-1334192 | csusucccGfaCfAfUfgccgcuggsasa | 2418 | VPusUfsccaGfcGfGfcaugUfcGfggaagscsu | 2742 |
| AD-1334193 | csasggugGfaCfUfGfugaccgcasusa | 2419 | VPusAfsugcGfgUfCfacagUfcCfaccugscsu | 2743 |
| AD-1334194 | csgsccaaCfaGfCfCfaacagaguscsa | 2420 | VPusGfsacuCfuGfUfuggcUfgUfuggcgscsa | 2744 |
| AD-1334195 | uscsugucAfcGfAfCfuacgagcusgsa | 2421 | VPusCfsagcUfcGfUfagucGfuGfacagasgsc | 2745 |
| AD-1334196 | uscsucugCfuGfCfGfaauacgugscsa | 2422 | VPusGfscacGfuAfUfucgcAfgCfagagasasc | 2746 |
| AD-1334197 | csascggaGfcCfUfGfcugugccusasa | 2423 | VPusUfsaggCfaCfAfgcagGfcUfccgugscsu | 2747 |
| AD-1334198 | asgsaccaCfaGfCfAfaccgaaaasgsa | 2424 | VPusCfsuuuUfcGfGfuugcUfgUfggucusgsg | 2748 |
| AD-1334199 | csasccucGfcAfGfAfcuggguccsasa | 2425 | VPusUfsggaCfcCfAfgucuGfcGfaggugsasg | 2749 |
| AD-1334200 | ascsagagUfgGfUfUfugaugaggsasa | 2426 | VPusUfsccuCfaUfCfaaacCfaCfucuguscsc | 2750 |
| AD-1334201 | gsascguuGfaGfUfCfcuacgauasasa | 2427 | VPusUfsuauCfgUfAfggacUfcAfacgucscsc | 2751 |
| AD-1334202 | gsgsccgcUfgGfAfGfggcacuuasusa | 2428 | VPusAfsuaaGfuGfCfccucCfaGfcggccscsu | 2752 |
| AD-1334203 | csasgccuAfaGfGfAfcauagagusgsa | 2429 | VPusCfsacuCfuAfUfguccUfuAfggcugscsu | 2753 |
| AD-1334204 | asascuggAfcCfCfUfggcacaggsusa | 2430 | VPusAfsccuGfuGfCfcaggGfuCfcaguusgsg | 2754 |
| AD-1334205 | gsusgcacUfgUfGfAfcguccacususa | 2431 | VPusAfsaguGfgAfCfgucaCfaGfugcacscsu | 2755 |
| AD-1334206 | gsusgcagGfaAfCfUfgggagcagsgsa | 2432 | VPusCfscugCfuCfCfcaguUfcCfugcacsasc | 2756 |
| AD-1334207 | csgsucuuCfaAfGfAfugugcuacsasa | 2433 | VPusUfsguaGfcAfCfaucuUfgAfagacgscsc | 2757 |
| AD-1334208 | csusgcugCfaGfUfGfacgaccacsusa | 2434 | VPusAfsgugGfuCfGfucacUfgCfagcagsasg | 2758 |
| AD-1334209 | csgsaccaCfaGfAfGfcuggagacsgsa | 2435 | VPusCfsgucUfcCfAfgcucUfgUfggucgsgsu | 2759 |
| AD-1334210 | gscsccugUfuCfUfCfaacgccgcsasa | 2436 | VPusUfsgcgGfcGfUfugagAfaCfagggcscsu | 2760 |
| AD-1334211 | cscsucucAfgAfAfGfgacugacasusa | 2437 | VPusAfsuguCfaGfUfccuuCfuGfagaggsgsu | 2761 |
| AD-1334212 | csasgauaCfaCfAfAfgcacccuusgsa | 2438 | VPusCfsaagGfgUfGfcuugUfgUfaucugsgsg | 2762 |
| AD-1334213 | gscsuccaCfaGfAfAfcccacuguscsa | 2439 | VPusGfsacaGfuGfGfguucUfgUfggagcscsu | 2763 |
| AD-1334214 | csascccuUfcCfAfAfcacgcucasgsa | 2440 | VPusCfsugaGfcGfUfguugGfaAfgggugsgsa | 2764 |
| AD-1334215 | csasacaaCfaAfUfGfgcaaccucscsa | 2441 | VPusGfsgagGfuUfGfccauUfgUfuguugsgsg | 2765 |
| AD-1334216 | csgscuucCfaAfAfGfagccgcugsasa | 2442 | VPusUfscagCfgGfCfucuuUfgGfaagcgsgsu | 2766 |
| AD-1334217 | gscsgccaAfcAfCfUfcacgagcgsasa | 2443 | VPusUfscgcUfcGfUfgaguGfuUfggcgcscsa | 2767 |
| AD-1334218 | gsusccacCfuCfUfCfaggccgagsasa | 2444 | VPusUfscucGfgCfCfugagAfgGfuggacsasg | 2768 |
| AD-1334219 | csasggacAfgAfGfAfcgacaaugsasa | 2445 | VPusUfscauUfgUfCfgucuCfuGfuccugsgsg | 2769 |
| AD-1334220 | csusugacUfaAfCfAfccaccaccsasa | 2446 | VPusUfsgguGfgUfGfguguUfaGfucaagsgsg | 2770 |
| AD-1334221 | csusgucaAfcCfGfAfagugugagsusa | 2447 | VPusAfscucAfcAfCfuucgGfuUfgacagscsg | 2771 |
| AD-1334222 | asgsagugGfuUfUfGfacguggacsusa | 2448 | VPusAfsgucCfaCfGfucaaAfcCfacucusgsu | 2772 |
| AD-1334223 | gsgsaaacUfuUfUfGfaaaacaucsasa | 2449 | VPusUfsgauGfuUfUfucaaAfaGfuuuccsasu | 2773 |
| AD-1334224 | gscsaccaAfaGfAfGfcauagagusgsa | 2450 | VPusCfsacuCfuAfUfgcucUfuUfggugcscsc | 2774 |
| AD-1334225 | csgsagguAfaGfCfAfucgaccagsgsa | 2451 | VPusCfscugGfuCfGfaugcUfuAfccucgsgsg | 2775 |
| AD-1334226 | csusgaccUfgCfAfGfccuggagascsa | 2452 | VPusGfsucuCfcAfGfgcugCfaGfgucagscsa | 2776 |
| AD-1334227 | csusgcaaGfaAfCfGfaagaccagsasa | 2453 | VPusUfscugGfuCfUfucguUfcUfugcagsgsu | 2777 |
| AD-1334228 | usgscuucAfaCfUfAfcaacgugcsgsa | 2454 | VPusCfsgcaCfgUfUfguagUfuGfaagcascsa | 2778 |
| AD-1334229 | ususgcugUfgAfCfGfacuacagcscsa | 2455 | VPusGfsgcuGfuAfGfucguCfaCfagcaasasg | 2779 |
| AD-1334230 | gsascgacCfuGfGfAfuccucacasasa | 2456 | VPusUfsuguGfaGfGfauccAfgGfucgucscsc | 2780 |
| AD-1334231 | csgsaccaCfaAfCfAfgccacuacsgsa | 2457 | VPusCfsguaGfuGfGfcuguUfgUfggucgsgsc | 2781 |
| AD-1334232 | uscscaccCfuGfAfGfaacagcucscsa | 2458 | VPusGfsgagCfuGfUfucucAfgGfguggasgsg | 2782 |
| AD-1334233 | uscsccaaAfgUfGfCfugaccaccsasa | 2459 | VPusUfsgguGfgUfCfagcaCfuUfugggasgsg | 2783 |
| AD-1334234 | csasgcucCfaAfAfGfccacucccsusa | 2460 | VPusAfsgggAfgUfGfgcuuUfgGfagcugsgsu | 2784 |
| AD-1334235 | cscsagucCfaGfGfGfacugcaacscsa | 2461 | VPusGfsguuGfcAfGfucccUfgGfacuggsasg | 2785 |
| AD-1334236 | asgscacuGfaGfAfAfgcacagccsasa | 2462 | VPusUfsggcUfgUfGfcuucUfcAfgugcusgsg | 2786 |
| AD-1334237 | csusaccaGfcGfUfUfacacccauscsa | 2463 | VPusGfsaugGfgUfGfuaacGfcUfgguagscsu | 2787 |
| AD-1334238 | ususccucCfcUfGfGfgcaccaccsusa | 2464 | VPusAfsgguGfgUfGfcccaGfgGfaggaasgsa | 2788 |
| AD-1334239 | cscsuaucAfcAfGfAfccaccacascsa | 2465 | VPusGfsuguGfgUfGfgucuGfuGfauaggscsg | 2789 |
| AD-1334240 | cscsaccaUfgUfCfCfacagccacsasa | 2466 | VPusUfsgugGfcUfGfuggaCfaUfgguggscsc | 2790 |
| AD-1334241 | uscscuccAfcUfCfCfagagacugscsa | 2467 | VPusGfscagUfcUfCfuggaGfuGfgaggasgsg | 2791 |
| AD-1334242 | csusccacAfgUfGfCfuuaccgccsasa | 2468 | VPusUfsggcGfgUfAfagcaCfuGfuggagsgsu | 2792 |
| AD-1334243 | csasggaaCfaGfCfUfcacacuacscsa | 2469 | VPusGfsguaGfuGfUfgagcUfgUfuccugsgsg | 2793 |
| AD-1334244 | usgsccaaCfuAfCfCfacaaccacsgsa | 2470 | VPusCfsgugGfuUfGfugguAfgUfuggcascsu | 2794 |
| AD-1334245 | uscscaguGfuGfGfAfucagcacasasa | 2471 | VPusUfsuguGfcUfGfauccAfcAfcuggasgsg | 2795 |
| AD-1334246 | ascsccacAfaCfCfAfgaggcuccsasa | 2472 | VPusUfsggaGfcCfUfcuggUfuGfugggusgsu | 2796 |
| AD-1334247 | csgsccacAfgUfGfCfugaccaccsasa | 2473 | VPusUfsgguGfgUfCfagcaCfuGfuggcgsgsu | 2797 |
| AD-1334248 | gscscacuGfgUfUfCfuauggcaascsa | 2474 | VPusGfsuugCfcAfUfagaaCfcAfguggcscsa | 2798 |
| AD-1334249 | csusccucUfaGfCfAfcacagaccsasa | 2475 | VPusUfsgguCfuGfUfgugcUfaGfaggagsgsg | 2799 |
| AD-1334250 | gsgsccacUfaCfGfAfucacggccsasa | 2476 | VPusUfsggcCfgUfGfaucgUfaGfuggccsgsu | 2800 |
| AD-1334251 | csusccucAfaCfUfCfcugggacasasa | 2477 | VPusUfsuguCfcCfAfggagUfuGfaggagsgsg | 2801 |
| AD-1334252 | csasgcaaCfaCfAfGfugacucccsusa | 2478 | VPusAfsgggAfgUfCfacugUfgUfugcugsgsu | 2802 |
| AD-1334253 | usgscccuAfgGfGfAfccacccacsasa | 2479 | VPusUfsgugGfgUfGfguccCfuAfgggcasgsa | 2803 |
| AD-1334254 | asgsugccGfaAfCfAfccauggccsasa | 2480 | VPusUfsggcCfaUfGfguguUfcGfgcacusgsg | 2804 |
| AD-1334255 | asgsccugGfaCfUfUfcggccaccsusa | 2481 | VPusAfsgguGfgCfCfgaagUfcCfaggcusgsu | 2805 |
| AD-1334256 | ascsccacAfuCfAfCfagagccuuscsa | 2482 | VPusGfsaagGfcUfCfugugAfuGfugggusgsg | 2806 |
| AD-1334257 | gsgsugacUfuCfCfCfacacccuasgsa | 2483 | VPusCfsuagGfgUfGfugggAfaGfucaccsgsu | 2807 |
| AD-1334258 | csasaccaCfcGfGfUfaccacccasgsa | 2484 | VPusCfsuggGfuGfGfuaccGfgUfgguugscsu | 2808 |
| AD-1334259 | csgsacucCfaGfCfCfcuuuccagscsa | 2485 | VPusGfscugGfaAfAfgggcUfgGfagucgsasg | 2809 |
| AD-1334260 | usasgcagCfaGfAfAfccaccgagsusa | 2486 | VPusAfscucGfgUfGfguucUfgCfugcuasgsg | 2810 |
| AD-1334261 | ascsccagCfaAfGfAfcccgcaccsusa | 2487 | VPusAfsgguGfcGfGfgucuUfgCfugggusgsu | 2811 |
| AD-1334262 | csgsguggUfgAfCfCfaugggcugsusa | 2488 | VPusAfscagCfcCfAfugguCfaCfcaccgsusg | 2812 |
| AD-1334263 | gsusggcuGfgAfCfUfacagcuacscsa | 2489 | VPusGfsguaGfcUfGfuaguCfcAfgccacsusc | 2813 |
| AD-1334264 | ususgacaCfcUfAfCfuccaacauscsa | 2490 | VPusGfsaugUfuGfGfaguaGfgUfgucaasasg | 2814 |
| AD-1334265 | ususgggcCfaGfGfUfcguggaausgsa | 2491 | VPusCfsauuCfcAfCfgaccUfgGfcccaascsu | 2815 |
| AD-1334266 | cscsuggaCfuUfUfGfgccuggucsusa | 2492 | VPusAfsgacCfaGfGfccaaAfgUfccaggscsu | 2816 |
| AD-1334267 | asusgugcUfuCfAfAfcuaugaaasusa | 2493 | VPusAfsuuuCfaUfAfguugAfaGfcacauscsu | 2817 |
| AD-1334268 | usgsuguuCfuGfCfUfgcaacuacsgsa | 2494 | VPusCfsguaGfuUfGfcagcAfgAfacacascsg | 2818 |
| AD-1334269 | csasgcucUfaCfGfGfccaugcccsusa | 2495 | VPusAfsgggCfaUfGfgccgUfaGfagcugsgsu | 2819 |
| AD-1334270 | asusccucAfcAfGfAfgcugaccascsa | 2496 | VPusGfsuggUfcAfGfcucuGfuGfaggauscsc | 2820 |
| AD-1334271 | cscsacuaCfgAfCfUfgaguccacsusa | 2497 | VPusAfsgugGfaCfUfcaguCfgUfaguggscsu | 2821 |
| AD-1334272 | gsasccacCfuGfGfAfuccucacasgsa | 2498 | VPusCfsuguGfaGfGfauccAfgGfuggucscsc | 2822 |
| AD-1334273 | gsasgcacUfaCfAfGfccaccgugsasa | 2499 | VPusUfscacGfgUfGfgcugUfaGfugcucsgsg | 2823 |
| AD-1334274 | cscsuccaCfcCfAfGfgcaacugcsusa | 2500 | VPusAfsgcaGfuUfGfccugGfgUfggaggsasg | 2824 |
| AD-1334275 | gsgsccacGfaCfAfCfccacagucsasa | 2501 | VPusUfsgacUfgUfGfggugUfcGfuggccsgsu | 2825 |
| AD-1334276 | gscsuccaAfaGfCfCfacucccuuscsa | 2502 | VPusGfsaagGfgAfGfuggcUfuUfggagcsusg | 2826 |
| AD-1334236 | asgscacuGfaGfAfAfgcacagccsasa | 2462 | VPusUfsggcUfgUfGfcuucUfcAfgugcusgsg | 2786 |
| AD-1334277 | ascsagcuAfcCfAfGfcuuuacagscsa | 2503 | VPusGfscugUfaAfAfgcugGfuAfgcugusgsg | 2827 |
| AD-1334239 | cscsuaucAfcAfGfAfccaccacascsa | 2465 | VPusGfsuguGfgUfGfgucuGfuGfauaggscsg | 2789 |
| AD-1334240 | cscsaccaUfgUfCfCfacagccacsasa | 2466 | VPusUfsgugGfcUfGfuggaCfaUfgguggscsc | 2790 |
| AD-1334278 | uscscuccAfcUfCfCfagagacugsusa | 2504 | VPusAfscagUfcUfCfuggaGfuGfgaggasgsg | 2828 |
| AD-1334279 | cscsacagUfgCfUfUfaccaccacsgsa | 2505 | VPusCfsgugGfuGfGfuaagCfaCfuguggsasg | 2829 |
| AD-1334280 | gscsucacAfcUfAfCfcaaagugcsusa | 2506 | VPusAfsgcaCfuUfUfgguaGfuGfugagcsusg | 2830 |
| AD-1334281 | usasccacAfaCfCfAfcgggcuucsasa | 2507 | VPusUfsgaaGfcCfCfguggUfuGfugguasgsu | 2831 |
| AD-1334282 | csascgcuUfcCfAfGfuguggaucsasa | 2508 | VPusUfsgauCfcAfCfacugGfaAfgcgugscsg | 2832 |
| AD-1334283 | ascsccacAfaCfCfAfgagguuccsasa | 2509 | VPusUfsggaAfcCfUfcuggUfuGfugggusgsu | 2833 |
| AD-1334284 | usgsaccaCfcAfCfCfaccacaacsusa | 2510 | VPusAfsguuGfuGfGfugguGfgUfggucasgsc | 2834 |
| AD-1334248 | gscscacuGfgUfUfCfuauggcaascsa | 2474 | VPusGfsuugCfcAfUfagaaCfcAfguggcscsa | 2798 |
| AD-1334249 | csusccucUfaGfCfAfcacagaccsasa | 2475 | VPusUfsgguCfuGfUfgugcUfaGfaggagsgsg | 2799 |
| AD-1334250 | gsgsccacUfaCfGfAfucacggccsasa | 2476 | VPusUfsggcCfgUfGfaucgUfaGfuggccsgsu | 2800 |
| AD-1334285 | csusccucAfaCfUfCfcagggacasasa | 2511 | VPusUfsuguCfcCfUfggagUfuGfaggagsgsg | 2835 |
| AD-1334286 | csasgcagCfaCfAfGfugacucccsusa | 2512 | VPusAfsgggAfgUfCfacugUfgCfugcugsgsu | 2836 |
| AD-1334253 | usgscccuAfgGfGfAfccacccacsasa | 2479 | VPusUfsgugGfgUfGfguccCfuAfgggcasgsa | 2803 |
| AD-1334287 | csascacaCfgGfGfCfgaucccugsusa | 2513 | VPusAfscagGfgAfUfcgccCfgUfgugugsgsu | 2837 |
| AD-1334255 | asgsccugGfaCfUfUfcggccaccsusa | 2481 | VPusAfsgguGfgCfCfgaagUfcCfaggcusgsu | 2805 |
| AD-1334256 | ascsccacAfuCfAfCfagagccuuscsa | 2482 | VPusGfsaagGfcUfCfugugAfuGfugggusgsg | 2806 |
| AD-1334288 | cscsacccAfgCfAfCfucgacuccsasa | 2514 | VPusUfsggaGfuCfGfagugCfuGfgguggsusa | 2838 |
| AD-1334289 | csasgcccUfcAfCfCfcuagcagcsasa | 2515 | VPusUfsgcuGfcUfAfggguGfaGfggcugsgsa | 2839 |
| AD-1334261 | ascsccagCfaAfGfAfcccgcaccsusa | 2487 | VPusAfsgguGfcGfGfgucuUfgCfugggusgsu | 2811 |
| AD-1334262 | csgsguggUfgAfCfCfaugggcugsusa | 2488 | VPusAfscagCfcCfAfugguCfaCfcaccgsusg | 2812 |
| AD-1334263 | gsusggcuGfgAfCfUfacagcuacscsa | 2489 | VPusGfsguaGfcUfGfuaguCfcAfgccacsusc | 2813 |
| AD-1334264 | ususgacaCfcUfAfCfuccaacauscsa | 2490 | VPusGfsaugUfuGfGfaguaGfgUfgucaasasg | 2814 |
| AD-1334265 | ususgggcCfaGfGfUfcguggaausgsa | 2491 | VPusCfsauuCfcAfCfgaccUfgGfcccaascsu | 2815 |
| AD-1334266 | cscsuggaCfuUfUfGfgccuggucsusa | 2492 | VPusAfsgacCfaGfGfccaaAfgUfccaggscsu | 2816 |
| AD-1334267 | asusgugcUfuCfAfAfcuaugaaasusa | 2493 | VPusAfsuuuCfaUfAfguugAfaGfcacauscsu | 2817 |
| AD-1334268 | usgsuguuCfuGfCfUfgcaacuacsgsa | 2494 | VPusCfsguaGfuUfGfcagcAfgAfacacascsg | 2818 |
| AD-1334290 | csusggauCfcUfCfAfcagagcagsasa | 2516 | VPusUfscugCfuCfUfgugaGfgAfuccagsgsu | 2840 |
| AD-1334291 | csasgccaCfuAfCfGfaccgcaacscsa | 2517 | VPusGfsguuGfcGfGfucguAfgUfggcugscsu | 2841 |
| AD-1334292 | uscsccaaAfgUfGfCfugaccagcsasa | 2518 | VPusUfsgcuGfgUfCfagcaCfuUfugggasgsg | 2842 |
| AD-1334293 | csasguucCfaAfAfGfccacuuccsusa | 2519 | VPusAfsggaAfgUfGfgcuuUfgGfaacugsgsu | 2843 |
| AD-1334294 | csasaggaCfuGfCfAfaccacccususa | 2520 | VPusAfsaggGfuGfGfuugcAfgUfccuugsgsa | 2844 |
| AD-1334295 | gsusgcugAfcAfAfGfcacagccascsa | 2521 | VPusGfsuggCfuGfUfgcuuGfuCfagcacsusg | 2845 |
| AD-1334296 | csascagcUfaCfCfAfgcuuuacascsa | 2522 | VPusGfsuguAfaAfGfcuggUfaGfcugugsgsa | 2846 |
| AD-1334297 | csusccuuCfaCfCfCfuugggaccsasa | 2523 | VPusUfsgguCfcCfAfagggUfgAfaggagsgsg | 2847 |
| AD-1334298 | cscscagaAfcAfGfAfccaccacascsa | 2524 | VPusGfsuguGfgUfGfgucuGfuUfcugggsasg | 2848 |
| AD-1334299 | csasccauGfuCfCfAfcaauccacscsa | 2525 | VPusGfsgugGfaUfUfguggAfcAfuggugsgsc | 2849 |
| AD-1334300 | csusccacAfgUfGfCfugaccacgsasa | 2526 | VPusUfscguGfgUfCfagcaCfuGfuggagsgsu | 2850 |
| AD-1334301 | gsgsccacCfaGfUfUfccauguccsasa | 2527 | VPusUfsggaCfaUfGfgaacUfgGfuggccscsu | 2851 |
| AD-1334270 | asusccucAfcAfGfAfgcugaccascsa | 2496 | VPusGfsuggUfcAfGfcucuGfuGfaggauscsc | 2820 |
| AD-1334302 | cscsacuaCfaAfCfUfgcagccacsusa | 2528 | VPusAfsgugGfcUfGfcaguUfgUfaguggscsu | 2852 |
| AD-1334272 | gsasccacCfuGfGfAfuccucacasgsa | 2498 | VPusCfsuguGfaGfGfauccAfgGfuggucscsc | 2822 |
| AD-1334303 | csasgcacUfaCfAfGfccaccgugsasa | 2529 | VPusUfscacGfgUfGfgcugUfaGfugcugsgsg | 2853 |
| AD-1334304 | ascsccucAfaAfGfUfgcugaccasgsa | 2530 | VPusCfsuggUfcAfGfcacuUfuGfagggusgsc | 2854 |
| AD-1334305 | ascsccacAfgUfCfAfucagcuccsasa | 2531 | VPusUfsggaGfcUfGfaugaCfuGfugggusgsu | 2855 |
| AD-1334306 | cscsacucCfcUfCfCfuccaguccsasa | 2532 | VPusUfsggaCfuGfGfaggaGfgGfaguggscsu | 2856 |
| AD-1334236 | asgscacuGfaGfAfAfgcacagccsasa | 2462 | VPusUfsggcUfgUfGfcuucUfcAfgugcusgsg | 2786 |
| AD-1334307 | csusaccaGfcGfUfUfacagccauscsa | 2533 | VPusGfsaugGfcUfGfuaacGfcUfgguagscsu | 2857 |
| AD-1334239 | cscsuaucAfcAfGfAfccaccacascsa | 2465 | VPusGfsuguGfgUfGfgucuGfuGfauaggscsg | 2789 |
| AD-1334240 | cscsaccaUfgUfCfCfacagccacsasa | 2466 | VPusUfsgugGfcUfGfuggaCfaUfgguggscsc | 2790 |
| AD-1334308 | cscsucuaCfuCfCfAfgagacuguscsa | 2534 | VPusGfsacaGfuCfUfcuggAfgUfagaggsasg | 2858 |
| AD-1334279 | cscsacagUfgCfUfUfaccaccacsgsa | 2505 | VPusCfsgugGfuGfGfuaagCfaCfuguggsasg | 2829 |
| AD-1334309 | asgscucaCfaCfUfAfccaaagugscsa | 2535 | VPusGfscacUfuUfGfguagUfgUfgagcusgsu | 2859 |
| AD-1334310 | csusaccaCfaAfCfCfacgggcuuscsa | 2536 | VPusGfsaagCfcCfGfugguUfgUfgguagsusc | 2860 |
| AD-1334245 | uscscaguGfuGfGfAfucagcacasasa | 2471 | VPusUfsuguGfcUfGfauccAfcAfcuggasgsg | 2795 |
| AD-1334246 | ascsccacAfaCfCfAfgaggcuccsasa | 2472 | VPusUfsggaGfcCfUfcuggUfuGfugggusgsu | 2796 |
| AD-1334247 | csgsccacAfgUfGfCfugaccaccsasa | 2473 | VPusUfsgguGfgUfCfagcaCfuGfuggcgsgsu | 2797 |
| AD-1334248 | gscscacuGfgUfUfCfuauggcaascsa | 2474 | VPusGfsuugCfcAfUfagaaCfcAfguggcscsa | 2798 |
| AD-1334249 | csusccucUfaGfCfAfcacagaccsasa | 2475 | VPusUfsgguCfuGfUfgugcUfaGfaggagsgsg | 2799 |
| AD-1334311 | gsgsccacUfaCfGfAfucacagccsasa | 2537 | VPusUfsggcUfgUfGfaucgUfaGfuggccsgsu | 2861 |
| AD-1334285 | csusccucAfaCfUfCfcagggacasasa | 2511 | VPusUfsuguCfcCfUfggagUfuGfaggagsgsg | 2835 |
| AD-1334286 | csasgcagCfaCfAfGfugacucccsusa | 2512 | VPusAfsgggAfgUfCfacugUfgCfugcugsgsu | 2836 |
| AD-1334253 | usgscccuAfgGfGfAfccacccacsasa | 2479 | VPusUfsgugGfgUfGfguccCfuAfgggcasgsa | 2803 |
| AD-1334312 | csasccacGfgCfCfAfccacacacsgsa | 2538 | VPusCfsgugUfgUfGfguggCfcGfuggugsusu | 2862 |
| AD-1334255 | asgsccugGfaCfUfUfcggccaccsusa | 2481 | VPusAfsgguGfgCfCfgaagUfcCfaggcusgsu | 2805 |
| AD-1334256 | ascsccacAfuCfAfCfagagccuuscsa | 2482 | VPusGfsaagGfcUfCfugugAfuGfugggusgsg | 2806 |
| AD-1334313 | csasgcagCfaAfCfCfaccaguacscsa | 2539 | VPusGfsguaCfuGfGfugguUfgCfugcugsgsg | 2863 |
| AD-1334289 | csasgcccUfcAfCfCfcuagcagcsasa | 2515 | VPusUfsgcuGfcUfAfggguGfaGfggcugsgsa | 2839 |
| AD-1334314 | cscsuccaGfgAfCfCfacagccacsasa | 2540 | VPusUfsgugGfcUfGfugguCfcUfggaggsusg | 2864 |
| AD-1334261 | ascsccagCfaAfGfAfcccgcaccsusa | 2487 | VPusAfsgguGfcGfGfgucuUfgCfugggusgsu | 2811 |
| AD-1334315 | ascscacgGfuGfGfUfgaccacggsgsa | 2541 | VPusCfsccgUfgGfUfcaccAfcCfguggususa | 2865 |
| AD-1334263 | gsusggcuGfgAfCfUfacagcuacscsa | 2489 | VPusGfsguaGfcUfGfuaguCfcAfgccacsusc | 2813 |
| AD-1334264 | ususgacaCfcUfAfCfuccaacauscsa | 2490 | VPusGfsaugUfuGfGfaguaGfgUfgucaasasg | 2814 |
| AD-1334265 | ususgggcCfaGfGfUfcguggaausgsa | 2491 | VPusCfsauuCfcAfCfgaccUfgGfcccaascsu | 2815 |
| AD-1334266 | cscsuggaCfuUfUfGfgccuggucsusa | 2492 | VPusAfsgacCfaGfGfccaaAfgUfccaggscsu | 2816 |
| AD-1334267 | asusgugcUfuCfAfAfcuaugaaasusa | 2493 | VPusAfsuuuCfaUfAfguugAfaGfcacauscsu | 2817 |
| AD-1334268 | usgsuguuCfuGfCfUfgcaacuacsgsa | 2494 | VPusCfsguaGfuUfGfcagcAfgAfacacascsg | 2818 |
| AD-1334316 | csgsgccaCfgCfCfCfuccucaacsusa | 2542 | VPusAfsguuGfaGfGfagggCfgUfggccgsusa | 2866 |
| AD-1334317 | csusggauCfcUfCfAfcaaagcugsasa | 2543 | VPusUfscagCfuUfUfgugaGfgAfuccagsgsu | 2867 |
| AD-1334271 | cscsacuaCfgAfCfUfgaguccacsusa | 2497 | VPusAfsgugGfaCfUfcaguCfgUfaguggscsu | 2821 |
| AD-1334272 | gsasccacCfuGfGfAfuccucacasgsa | 2498 | VPusCfsuguGfaGfGfauccAfgGfuggucscsc | 2822 |
| AD-1334273 | gsasgcacUfaCfAfGfccaccgugsasa | 2499 | VPusUfscacGfgUfGfgcugUfaGfugcucsgsg | 2823 |
| AD-1334274 | cscsuccaCfcCfAfGfgcaacugcsusa | 2500 | VPusAfsgcaGfuUfGfccugGfgUfggaggsasg | 2824 |
| AD-1334275 | gsgsccacGfaCfAfCfccacagucsasa | 2501 | VPusUfsgacUfgUfGfggugUfcGfuggccsgsu | 2825 |
| AD-1334276 | gscsuccaAfaGfCfCfacucccuuscsa | 2502 | VPusGfsaagGfgAfGfuggcUfuUfggagcsusg | 2826 |
| AD-1334236 | asgscacuGfaGfAfAfgcacagccsasa | 2462 | VPusUfsggcUfgUfGfcuucUfcAfgugcusgsg | 2786 |
| AD-1334277 | ascsagcuAfcCfAfGfcuuuacagscsa | 2503 | VPusGfscugUfaAfAfgcugGfuAfgcugusgsg | 2827 |
| AD-1334239 | cscsuaucAfcAfGfAfccaccacascsa | 2465 | VPusGfsuguGfgUfGfgucuGfuGfauaggscsg | 2789 |
| AD-1334240 | cscsaccaUfgUfCfCfacagccacsasa | 2466 | VPusUfsgugGfcUfGfuggaCfaUfgguggscsc | 2790 |
| AD-1334241 | uscscuccAfcUfCfCfagagacugscsa | 2467 | VPusGfscagUfcUfCfuggaGfuGfgaggasgsg | 2791 |
| AD-1334279 | cscsacagUfgCfUfUfaccaccacsgsa | 2505 | VPusCfsgugGfuGfGfuaagCfaCfuguggsasg | 2829 |
| AD-1334309 | asgscucaCfaCfUfAfccaaagugscsa | 2535 | VPusGfscacUfuUfGfguagUfgUfgagcusgsu | 2859 |
| AD-1334310 | csusaccaCfaAfCfCfacgggcuuscsa | 2536 | VPusGfsaagCfcCfGfugguUfgUfgguagsusc | 2860 |
| AD-1334245 | uscscaguGfuGfGfAfucagcacasasa | 2471 | VPusUfsuguGfcUfGfauccAfcAfcuggasgsg | 2795 |
| AD-1334318 | ascsccacAfaCfCfAfguggcuccsasa | 2544 | VPusUfsggaGfcCfAfcuggUfuGfugggusgsu | 2868 |
| AD-1334284 | usgsaccaCfcAfCfCfaccacaacsusa | 2510 | VPusAfsguuGfuGfGfugguGfgUfggucasgsc | 2834 |
| AD-1334248 | gscscacuGfgUfUfCfuauggcaascsa | 2474 | VPusGfsuugCfcAfUfagaaCfcAfguggcscsa | 2798 |
| AD-1334249 | csusccucUfaGfCfAfcacagaccsasa | 2475 | VPusUfsgguCfuGfUfgugcUfaGfaggagsgsg | 2799 |
| AD-1334250 | gsgsccacUfaCfGfAfucacggccsasa | 2476 | VPusUfsggcCfgUfGfaucgUfaGfuggccsgsu | 2800 |
| AD-1334285 | csusccucAfaCfUfCfcagggacasasa | 2511 | VPusUfsuguCfcCfUfggagUfuGfaggagsgsg | 2835 |
| AD-1334286 | csasgcagCfaCfAfGfugacucccsusa | 2512 | VPusAfsgggAfgUfCfacugUfgCfugcugsgsu | 2836 |
| AD-1334253 | usgscccuAfgGfGfAfccacccacsasa | 2479 | VPusUfsgugGfgUfGfguccCfuAfgggcasgsa | 2803 |
| AD-1334287 | csascacaCfgGfGfCfgaucccugsusa | 2513 | VPusAfscagGfgAfUfcgccCfgUfgugugsgsu | 2837 |
| AD-1334255 | asgsccugGfaCfUfUfcggccaccsusa | 2481 | VPusAfsgguGfgCfCfgaagUfcCfaggcusgsu | 2805 |
| AD-1334256 | ascsccacAfuCfAfCfagagccuuscsa | 2482 | VPusGfsaagGfcUfCfugugAfuGfugggusgsg | 2806 |
| AD-1334288 | cscsacccAfgCfAfCfucgacuccsasa | 2514 | VPusUfsggaGfuCfGfagugCfuGfgguggsusa | 2838 |
| AD-1334289 | csasgcccUfcAfCfCfcuagcagcsasa | 2515 | VPusUfsgcuGfcUfAfggguGfaGfggcugsgsa | 2839 |
| AD-1334261 | ascsccagCfaAfGfAfcccgcaccsusa | 2487 | VPusAfsgguGfcGfGfgucuUfgCfugggusgsu | 2811 |
| AD-1334315 | ascscacgGfuGfGfUfgaccacggsgsa | 2541 | VPusCfsccgUfgGfUfcaccAfcCfguggususa | 2865 |
| AD-1334263 | gsusggcuGfgAfCfUfacagcuacscsa | 2489 | VPusGfsguaGfcUfGfuaguCfcAfgccacsusc | 2813 |
| AD-1334264 | ususgacaCfcUfAfCfuccaacauscsa | 2490 | VPusGfsaugUfuGfGfaguaGfgUfgucaasasg | 2814 |
| AD-1334265 | ususgggcCfaGfGfUfcguggaausgsa | 2491 | VPusCfsauuCfcAfCfgaccUfgGfcccaascsu | 2815 |
| AD-1334266 | cscsuggaCfuUfUfGfgccuggucsusa | 2492 | VPusAfsgacCfaGfGfccaaAfgUfccaggscsu | 2816 |
| AD-1334267 | asusgugcUfuCfAfAfcuaugaaasusa | 2493 | VPusAfsuuuCfaUfAfguugAfaGfcacauscsu | 2817 |
| AD-1334268 | usgsuguuCfuGfCfUfgcaacuacsgsa | 2494 | VPusCfsguaGfuUfGfcagcAfgAfacacascsg | 2818 |
| AD-1334269 | csasgcucUfaCfGfGfccaugcccsusa | 2495 | VPusAfsgggCfaUfGfgccgUfaGfagcugsgsu | 2819 |
| AD-1334319 | gsascgacCfuGfGfAfuccucacasgsa | 2545 | VPusCfsuguGfaGfGfauccAfgGfucgucscsc | 2869 |
| AD-1334320 | usgsaccaCfaAfCfAfgccacuacsgsa | 2546 | VPusCfsguaGfuGfGfcuguUfgUfggucasgsc | 2870 |
| AD-1334321 | asusccacUfgGfAfUfccacggccsasa | 2547 | VPusUfsggcCfgUfGfgaucCfaGfuggausgsc | 2871 |
| AD-1334322 | csuscccaAfaGfUfGfcugaccagscsa | 2548 | VPusGfscugGfuCfAfgcacUfuUfgggagsgsg | 2872 |
| AD-1334293 | csasguucCfaAfAfGfccacuuccsusa | 2519 | VPusAfsggaAfgUfGfgcuuUfgGfaacugsgsu | 2843 |
| AD-1334294 | csasaggaCfuGfCfAfaccacccususa | 2520 | VPusAfsaggGfuGfGfuugcAfgUfccuugsgsa | 2844 |
| AD-1334323 | cscsaccaAfaUfCfCfacagcuacscsa | 2549 | VPusGfsguaGfcUfGfuggaUfuUfgguggscsu | 2873 |
| AD-1334298 | cscscagaAfcAfGfAfccaccacascsa | 2524 | VPusGfsuguGfgUfGfgucuGfuUfcugggsasg | 2848 |
| AD-1334299 | csasccauGfuCfCfAfcaauccacscsa | 2525 | VPusGfsgugGfaUfUfguggAfcAfuggugsgsc | 2849 |
| AD-1334300 | csusccacAfgUfGfCfugaccacgsasa | 2526 | VPusUfscguGfgUfCfagcaCfuGfuggagsgsu | 2850 |
| AD-1334324 | gsgsccacCfaGfUfUfccacguccsasa | 2550 | VPusUfsggaCfgUfGfgaacUfgGfuggccscsu | 2874 |
| AD-1334270 | asusccucAfcAfGfAfgcugaccascsa | 2496 | VPusGfsuggUfcAfGfcucuGfuGfaggauscsc | 2820 |
| AD-1334302 | cscsacuaCfaAfCfUfgcagccacsusa | 2528 | VPusAfsgugGfcUfGfcaguUfgUfaguggscsu | 2852 |
| AD-1334272 | gsasccacCfuGfGfAfuccucacasgsa | 2498 | VPusCfsuguGfaGfGfauccAfgGfuggucscsc | 2822 |
| AD-1334320 | usgsaccaCfaAfCfAfgccacuacsgsa | 2546 | VPusCfsguaGfuGfGfcuguUfgUfggucasgsc | 2870 |
| AD-1334272 | gsasccacCfuGfGfAfuccucacasgsa | 2498 | VPusCfsuguGfaGfGfauccAfgGfuggucscsc | 2822 |
| AD-1334273 | gsasgcacUfaCfAfGfccaccgugsasa | 2499 | VPusUfscacGfgUfGfgcugUfaGfugcucsgsg | 2823 |
| AD-1334274 | cscsuccaCfcCfAfGfgcaacugcsusa | 2500 | VPusAfsgcaGfuUfGfccugGfgUfggaggsasg | 2824 |
| AD-1334325 | usgsagcaCfcAfCfGfgccacgacsasa | 2551 | VPusUfsgucGfuGfGfccguGfgUfgcucascsa | 2875 |
| AD-1334234 | csasgcucCfaAfAfGfccacucccsusa | 2460 | VPusAfsgggAfgUfGfgcuuUfgGfagcugsgsu | 2784 |
| AD-1334326 | cscsagggAfcUfGfCfaacugcccsusa | 2552 | VPusAfsgggCfaGfUfugcaGfuCfccuggsasc | 2876 |
| AD-1334236 | asgscacuGfaGfAfAfgcacagccsasa | 2462 | VPusUfsggcUfgUfGfcuucUfcAfgugcusgsg | 2786 |
| AD-1334277 | ascsagcuAfcCfAfGfcuuuacagscsa | 2503 | VPusGfscugUfaAfAfgcugGfuAfgcugusgsg | 2827 |
| AD-1334239 | cscsuaucAfcAfGfAfccaccacascsa | 2465 | VPusGfsuguGfgUfGfgucuGfuGfauaggscsg | 2789 |
| AD-1334240 | cscsaccaUfgUfCfCfacagccacsasa | 2466 | VPusUfsgugGfcUfGfuggaCfaUfgguggscsc | 2790 |
| AD-1334278 | uscscuccAfcUfCfCfagagacugsusa | 2504 | VPusAfscagUfcUfCfuggaGfuGfgaggasgsg | 2828 |
| AD-1334242 | csusccacAfgUfGfCfuuaccgccsasa | 2468 | VPusUfsggcGfgUfAfagcaCfuGfuggagsgsu | 2792 |
| AD-1334309 | asgscucaCfaCfUfAfccaaagugscsa | 2535 | VPusGfscacUfuUfGfguagUfgUfgagcusgsu | 2859 |
| AD-1334310 | csusaccaCfaAfCfCfacgggcuuscsa | 2536 | VPusGfsaagCfcCfGfugguUfgUfgguagsusc | 2860 |
| AD-1334245 | uscscaguGfuGfGfAfucagcacasasa | 2471 | VPusUfsuguGfcUfGfauccAfcAfcuggasgsg | 2795 |
| AD-1334318 | ascsccacAfaCfCfAfguggcuccsasa | 2544 | VPusUfsggaGfcCfAfcuggUfuGfugggusgsu | 2868 |
| AD-1334327 | csgsccagAfgUfGfCfugaccaccsasa | 2553 | VPusUfsgguGfgUfCfagcaCfuCfuggcgsgsu | 2877 |
| AD-1334248 | gscscacuGfgUfUfCfuauggcaascsa | 2474 | VPusGfsuugCfcAfUfagaaCfcAfguggcscsa | 2798 |
| AD-1334249 | csusccucUfaGfCfAfcacagaccsasa | 2475 | VPusUfsgguCfuGfUfgugcUfaGfaggagsgsg | 2799 |
| AD-1334250 | gsgsccacUfaCfGfAfucacggccsasa | 2476 | VPusUfsggcCfgUfGfaucgUfaGfuggccsgsu | 2800 |
| AD-1334328 | csasgggaCfaAfCfAfcccaucacscsa | 2554 | VPusGfsgugAfuGfGfguguUfgUfcccugsgsa | 2878 |
| AD-1334329 | csusccaaAfgCfCfAfcuuccuccsusa | 2555 | VPusAfsggaGfgAfAfguggCfuUfuggagscsu | 2879 |
| AD-1334294 | csasaggaCfuGfCfAfaccacccususa | 2520 | VPusAfsaggGfuGfGfuugcAfgUfccuugsgsa | 2844 |
| AD-1334330 | usgscugaCfaAfGfCfacagccacsasa | 2556 | VPusUfsgugGfcUfGfugcuUfgUfcagcascsu | 2880 |
| AD-1334296 | csascagcUfaCfCfAfgcuuuacascsa | 2522 | VPusGfsuguAfaAfGfcuggUfaGfcugugsgsa | 2846 |
| AD-1334331 | csusccacCfcUfGfUfggaccacgsusa | 2557 | VPusAfscguGfgUfCfcacaGfgGfuggagsgsa | 2881 |
| AD-1334332 | cscscagcAfcAfGfAfccaccacascsa | 2558 | VPusGfsuguGfgUfGfgucuGfuGfcugggsasc | 2882 |
| AD-1334333 | gsusccacCfaUfGfUfccacaaucscsa | 2559 | VPusGfsgauUfgUfGfgacaUfgGfuggacsasu | 2883 |
| AD-1334334 | csusccucUfaCfUfCfcagagaccsasa | 2560 | VPusUfsgguCfuCfUfggagUfaGfaggagsgsu | 2884 |
| AD-1334335 | csusccacAfgUfGfCfugaccaccsasa | 2561 | VPusUfsgguGfgUfCfagcaCfuGfuggagsgsu | 2885 |
| AD-1334336 | gsgsccacCfaAfUfUfccacggccsasa | 2562 | VPusUfsggcCfgUfGfgaauUfgGfuggccscsu | 2886 |
| AD-1334337 | usgsaccaCfaAfCfAfgccacuacsasa | 2563 | VPusUfsguaGfuGfGfcuguUfgUfggucasgsc | 2887 |
| AD-1334338 | usgsgaucCfaCfGfGfccacccugsusa | 2564 | VPusAfscagGfgUfGfgccgUfgGfauccasgsu | 2888 |
| AD-1334272 | gsasccacCfuGfGfAfuccucacasgsa | 2498 | VPusCfsuguGfaGfGfauccAfgGfuggucscsc | 2822 |
| AD-1334339 | gsasgcacUfaUfAfGfccaccgugsasa | 2565 | VPusUfscacGfgUfGfgcuaUfaGfugcucsgsg | 2889 |
| AD-1334340 | cscsacucUfgGfGfAfacagcucascsa | 2566 | VPusGfsugaGfcUfGfuuccCfaGfaguggsasg | 2890 |
| AD-1334341 | csasuggcCfaCfUfAfugcccacasgsa | 2567 | VPusCfsuguGfgGfCfauagUfgGfccaugsgsu | 2891 |
| AD-1334342 | usgsccucCfaCfGfGfuucccagcsusa | 2568 | VPusAfsgcuGfgGfAfaccgUfgGfaggcasgsu | 2892 |
| AD-1334343 | gscscaacCfuUfCfAfgcguguccsasa | 2569 | VPusUfsggaCfaCfGfcugaAfgGfuuggcsasg | 2893 |
| AD-1334344 | uscscuccUfcAfGfUfccucaccascsa | 2570 | VPusGfsuggUfgAfGfgacuGfaGfgaggascsa | 2894 |
| AD-1334345 | uscsccacUfuCfUfCfuacucccusgsa | 2571 | VPusCfsaggGfaGfUfagagAfaGfugggasgsc | 2895 |
| AD-1334346 | gscsauuuGfgAfCfAfguuuuucuscsa | 2572 | VPusGfsagaAfaAfAfcuguCfcAfaaugescsc | 2896 |
| AD-1334347 | gsasagucAfuCfUfAfcaauaagascsa | 2573 | VPusGfsucuUfaUfUfguagAfuGfacuucscsc | 2897 |
| AD-1334348 | csusgccaUfuUfCfUfacgcagugsusa | 2574 | VPusAfscacUfgCfGfuagaAfaUfggcagscsc | 2898 |
| AD-1334349 | csascuguGfaCfAfUfugaccgcususa | 2575 | VPusAfsagcGfgUfCfaaugUfcAfcagugscsu | 2899 |
| AD-1334350 | usgsugacAfaUfGfCfcaucccucsusa | 2576 | VPusAfsgagGfgAfUfggcaUfuGfucacasgsc | 2900 |
| AD-1334351 | ascsccugGfaGfAfAfcugcacggsusa | 2577 | VPusAfsccgUfgCfAfguucUfcCfaggguscsc | 2901 |
| AD-1334352 | gsusggguGfaCfAfAfccgugucgsusa | 2578 | VPusAfscgaCfaCfGfguugUfcAfcccacsgsc | 2902 |
| AD-1334353 | gsascccaAfaGfCfCfuguggccasasa | 2579 | VPusUfsuggCfcAfCfaggcUfuUfgggucscsa | 2903 |
| AD-1334354 | csusgcguGfaAfCfAfagcaccugscsa | 2580 | VPusGfscagGfuGfCfuuguUfcAfcgcagsgsu | 2904 |
| AD-1334355 | uscsaaagUfgUfCfGfgacccgagscsa | 2581 | VPusGfscucGfgGfUfccgaCfaCfuuugasusg | 2905 |
| AD-1334356 | cscsugugAfcUfUfCfcacuaugasgsa | 2582 | VPusCfsucaUfaGfUfggaaGfuCfacaggsgsc | 2906 |
| AD-1334357 | gsasgugcAfuCfUfGfcagcaugusgsa | 2583 | VPusCfsacaUfgCfUfgcagAfuGfcacucsgsc | 2907 |
| AD-1334358 | cscscacuAfuUfCfCfaccuuugascsa | 2584 | VPusGfsucaAfaGfGfuggaAfuAfgugggsasg | 2908 |
| AD-1334359 | ascscuauGfuCfCfUfcaugagagsasa | 2585 | VPusUfscucUfcAfUfgaggAfcAfuaggusgsc | 2909 |
| AD-1334360 | csascgcuUfuGfGfGfaaucucagscsa | 2586 | VPusGfscugAfgAfUfucccAfaAfgcgugscsa | 2910 |
| AD-1334361 | csusggacAfaCfCfAfcuacugcascsa | 2587 | VPusGfsugcAfgUfAfguggUfuGfuccagsgsu | 2911 |
| AD-1334362 | csuscagcAfuCfCfAfcuacaaguscsa | 2588 | VPusGfsacuUfgUfAfguggAfuGfcugagsgsg | 2912 |
| AD-1334363 | gsusccucAfcUfGfUfcaccauggsusa | 2589 | VPusAfsccaUfgGfUfgacaGfuGfaggacsgsa | 2913 |
| AD-1334364 | cscsugauCfcUfGfUfuugaccaasasa | 2590 | VPusUfsuugGfuCfAfaacaGfgAfucaggscsc | 2914 |
| AD-1334365 | asgscgguUfuCfAfGfcaagaacgsgsa | 2591 | VPusCfscguUfcUfUfgcugAfaAfccgcusgsc | 2915 |
| AD-1334366 | csgsugugGfaCfAfUfuccugcccsusa | 2592 | VPusAfsgggCfaGfGfaaugUfcCfacacgscsa | 2916 |
| AD-1334367 | gsusgagcGfuCfAfCfcuucaaugsgsa | 2593 | VPusCfscauUfgAfAfggugAfcGfcucacsgsc | 2917 |
| AD-1334368 | asgsccucUfuCfCfAfcaacaacascsa | 2594 | VPusGfsuguUfgUfUfguggAfaGfaggcusgsu | 2918 |
| AD-1334369 | usgscaccAfaCfAfAfccagagggsasa | 2595 | VPusUfscccUfcUfGfguugUfuGfgugcasgsg | 2919 |
| AD-1334370 | usgsucucCfaGfCfGfggacggaascsa | 2596 | VPusGfsuucCfgUfCfccgcUfgGfagacasgsu | 2920 |
| AD-1334371 | csgsccagUfuGfCfAfaggacaugsgsa | 2597 | VPusCfscauGfuCfCfuugcAfaCfuggcgsgsc | 2921 |
| AD-1334372 | csgsacagCfaGfAfAfaggauggcsusa | 2598 | VPusAfsgccAfuCfCfuuucUfgCfugucgsgsg | 2922 |
| AD-1334373 | cscsgcucUfgUfGfAfucugaugcsusa | 2599 | VPusAfsgcaUfcAfGfaucaCfaGfageggscsu | 2923 |
| AD-1334374 | csasggucUfuUfGfCfugagugccsasa | 2600 | VPusUfsggcAfcUfCfagcaAfaGfaccugsgsc | 2924 |
| AD-1334375 | gsgsgcccAfuUfCfUfucaacgccsusa | 2601 | VPusAfsggcGfuUfGfaagaAfuGfggcccsgsg | 2925 |
| AD-1334376 | gsasggcuUfaCfGfCfagagcucusgsa | 2602 | VPusCfsagaGfcUfCfugcgUfaAfgccucscsa | 2926 |
| AD-1334377 | asgsugugCfaGfUfGfacuggcgasgsa | 2603 | VPusCfsucgCfcAfGfucacUfgCfacacuscsc | 2927 |
| AD-1334378 | cscsaccaAfaGfUfGfuacaagccsasa | 2604 | VPusUfsggcUfuGfUfacacUfuUfgguggsgsu | 2928 |
| AD-1334379 | csusgcaaCfuCfUfAfggaaccagsasa | 2605 | VPusUfscugGfuUfCfcuagAfgUfugcagsgsu | 2929 |
| AD-1334380 | csasgaucCfuCfUfUfcaacgcacsasa | 2606 | VPusUfsgugCfgUfUfgaagAfgGfaucugsgsu | 2930 |
| AD-1334381 | gsgsgcauCfuGfCfGfugcaggccsusa | 2607 | VPusAfsggcCfuGfCfacgcAfgAfugcccsasu | 2931 |
| AD-1334382 | csgsauggGfuUfUfCfcuaaauuuscsa | 2608 | VPusGfsaaaUfuUfAfggaaAfcCfcaucgsgsg | 2932 |
| AD-1334383 | gsgsucagCfaAfCfUfgccaguccsusa | 2609 | VPusAfsggaCfuGfGfcaguUfgCfugaccscsa | 2933 |
| AD-1334384 | gsasggguUfcAfGfUfgucggugcsasa | 2610 | VPusUfsgcaCfcGfAfcacuGfaAfcccucsgsu | 2934 |
| AD-1334385 | csgsgcuuCfgUfAfAfccgugaccsasa | 2611 | VPusUfsgguCfaCfGfguuaCfgAfagccgsgsg | 2935 |
| AD-1334386 | csgsugugCfaAfCfAfcaaccaccsusa | 2612 | VPusAfsgguGfgUfUfguguUfgCfacacgscsa | 2936 |
| AD-1334387 | csasggagUfcCfAfUfcugcacccsasa | 2613 | VPusUfsgggUfgCfAfgaugGfaCfuccugscsc | 2937 |
| AD-1334388 | csusguccCfaCfCfUfuccgcugcsasa | 2614 | VPusUfsgcaGfcGfGfaaggUfgGfgacagscsa | 2938 |
| AD-1334389 | uscsagcuGfuGfUfUfcguacaausgsa | 2615 | VPusCfsauuGfuAfCfgaacAfcAfgcugasgsg | 2939 |
| AD-1334390 | ususggugCfaAfCfCfuucccaggscsa | 2616 | VPusGfsccuGfgGfAfagguUfgCfaccaascsc | 2940 |
| AD-1334391 | uscsccugCfcAfCfAfuguguaccsusa | 2617 | VPusAfsgguAfcAfCfauguGfgCfagggasasg | 2941 |
| AD-1334392 | ascsggugCfaAfUfGfucaggaggsasa | 2618 | VPusUfsccuCfcUfGfacauUfgCfaccgususg | 2942 |
| AD-1334393 | csusgcaaCfaAfUfAfcuaccuguscsa | 2619 | VPusGfsacaGfgUfAfguauUfgUfugcagsgsc | 2943 |
| AD-1334394 | gsgsgcuuUfgAfGfUfacaagagasgsa | 2620 | VPusCfsucuCfuUfGfuacuCfaAfagcccsusg | 2944 |
| AD-1334395 | gsusccagCfuGfAfAfugaaaccusgsa | 2621 | VPusCfsaggUfuUfCfauucAfgCfuggacsusg | 2945 |
| AD-1334396 | csasacagCfcAfUfGfuggacaacsusa | 2622 | VPusAfsguuGfuCfCfacauGfgCfuguugsasc | 2946 |
| AD-1334397 | cscsguguAfcCfUfCfugugaggcsusa | 2623 | VPusAfsgccUfcAfCfagagGfuAfcacggsusg | 2947 |
| AD-1334398 | gsgsuggaGfuCfCfAfuuugcugascsa | 2624 | VPusGfsucaGfcAfAfauggAfcUfccaccscsu | 2948 |
| AD-1334399 | csusgcccAfgAfUfGfuguccagcsusa | 2625 | VPusAfsgcuGfgAfCfacauCfuGfggcagsgsa | 2949 |
| AD-1334400 | gscsugcuAfcUfCfCfugugaggasgsa | 2626 | VPusCfsuccUfcAfCfaggaGfuAfgcagcsasg | 2950 |
| AD-1334401 | uscscuguCfaAfGfUfccgcaucasasa | 2627 | VPusUfsugaUfgCfGfgacuUfgAfcaggasgsu | 2951 |
| AD-1334402 | gsasccauCfcUfGfUfggcaccagsgsa | 2628 | VPusCfscugGfuGfCfcacaGfgAfuggucsgsu | 2952 |
| AD-1334403 | gsgsucaaCfaUfCfAfccuucugcsgsa | 2629 | VPusCfsgcaGfaAfGfgugaUfgUfugaccsusc | 2953 |
| AD-1334404 | csgsuccaAfgUfAfCfucagcagasgsa | 2630 | VPusCfsucuGfcUfGfaguaCfuUfggacgscsu | 2954 |
| AD-1334405 | asusgcagCfaCfCfAfgugcaccusgsa | 2631 | VPusCfsaggUfgCfAfcuggUfgCfugcausgsg | 2955 |
| AD-1334406 | gscsccuuGfcAfCfUfguccuaacsgsa | 2632 | VPusCfsguuAfgGfAfcaguGfcAfagggcsasc | 2956 |
| AD-1334407 | csusgcacAfcCfUfAfcacccacgsusa | 2633 | VPusAfscguGfgGfUfguagGfuGfugcagsgsa | 2957 |
| AD-1334408 | gscsacgcCfcUfUfCfugugucccsusa | 2634 | VPusAfsgggAfcAfCfagaaGfgGfcgugcsasg | 2958 |
| AD-1334409 | ascsugcuGfuCfUfGfagaacguuscsa | 2635 | VPusGfsaacGfuUfCfucagAfcAfgcagusgsg | 2959 |
| AD-1334410 | csasugcuCfuGfUfCfcaccuggasgsa | 2636 | VPusCfsuccAfgGfUfggacAfgAfgcaugsgsg | 2960 |
| AD-1334411 | gscsauugUfcUfGfAfucaugaaasasa | 2637 | VPusUfsuuuCfaUfGfaucaGfaCfaaugcsasc | 2961 |
| AD-1334412 | gsgscgccAfcUfCfAfggaguccusasa | 2638 | VPusUfsaggAfcUfCfcugaGfuGfgcgccscsu | 2962 |
| AD-1334413 | csuscccuGfaUfGfUfcacugggascsa | 2639 | VPusGfsuccCfaGfUfgacaUfcAfgggagsgsg | 2963 |
| AD-1334414 | csusggaaCfaAfAfCfuaagcaugsusa | 2640 | VPusAfscauGfcUfUfaguuUfgUfuccagsgsg | 2964 |
| AD-1334415 | gscsacggAfuUfCfCfagcuggccsasa | 2641 | VPusUfsggcCfaGfCfuggaAfuCfcgugcsusg | 2965 |
| AD-1334416 | gsascaggCfuGfGfUfccaggcaasgsa | 2642 | VPusCfsuugCfcUfGfgaccAfgCfcugucsusg | 2966 |
| AD-1334417 | gscsugccAfgGfAfAfgcugcgacsasa | 2643 | VPusUfsgucGfcAfGfcuucCfuGfgcagcsasg | 2967 |
| AD-1334418 | gscsagggUfaAfCfUfcagggcugsasa | 2644 | VPusUfscagCfcCfUfgaguUfaCfccugcsasg | 2968 |
| AD-1334419 | gscsaacgGfcCfAfGfgucagagasgsa | 2645 | VPusCfsucuCfuGfAfccugGfcCfguugcsgsa | 2969 |
| AD-1334420 | asgscccaGfuUfUfUfgcaaauaasasa | 2646 | VPusUfsuuaUfuUfGfcaaaAfcUfgggcusgsg | 2970 |
| | | | | SEQ |
| | | | mRNA Target Sequence | ID |
| | | Duplex Name | 5′ to 3′ | NO: |
| | | AD-1334097 | TGTTGGCTCTGGCGGCCATGCTC | 2971 |
| | | AD-1334098 | AGCTGGGAGAATGCAGGGCACAC | 2972 |
| | | AD-1334099 | CGGCGCGTGAGCTTTGTTCCACC | 2973 |
| | | AD-1334100 | AATGGGCGGGTGTGCAGCACCTG | 2974 |
| | | AD-1334101 | TTCCACTACAAGACCTTCGACGG | 2975 |
| | | AD-1334102 | GGCCTTTGCAACTACGTGTTCTC | 2976 |
| | | AD-1334103 | ACGAGGACTTCAACGTCCAGCTA | 2977 |
| | | AD-1334104 | TCACCCGTGTTGTCATCAAGGCC | 2978 |
| | | AD-1334105 | ACGGCTCCGTCCTCATCAATGGG | 2979 |
| | | AD-1334106 | GAGCTGCCTTACAGCCGCACTGG | 2980 |
| | | AD-1334107 | GGGACTACATCAAGGTCAGCATC | 2981 |
| | | AD-1334108 | GTGCTGACATTCCTGTGGAACGG | 2982 |
| | | AD-1334109 | AGCTGGATCCCAAATACGCCAAC | 2983 |
| | | AD-1334110 | CGGCCTTCAACGAGTTCTATGCC | 2984 |
| | | AD-1334111 | GGAACCTGCAGAAGTTGGATGGG | 2985 |
| | | AD-1334112 | ACTGCACGGACGAGGAGGGCATC | 2986 |
| | | AD-1334113 | CCTTTGCGGAGTGCCACGCACTG | 2987 |
| | | AD-1334114 | TGGACAGCACTGCGTACCTGGCC | 2988 |
| | | AD-1334115 | GTGCCACCTTTGTGGAATACTCA | 2989 |
| | | AD-1334116 | AACTGGAGGTGCCCTGAGCTCTG | 2990 |
| | | AD-1334117 | CCCTCAACATGCAGCACCAGGAG | 2991 |
| | | AD-1334118 | TCACCCTGCACGGACACCTGCTC | 2992 |
| | | AD-1334119 | GAGGACCACTGTGTGGACGGCTG | 2993 |
| | | AD-1334120 | GTGCTGGATGACATCACGCACTC | 2994 |
| | | AD-1334121 | ACCTCCTTCAACACCACCTGCAG | 2995 |
| | | AD-1334122 | GGCTATGGCAGTGCCAGGACCTG | 2996 |
| | | AD-1334123 | CCACCTATGATGAGAAACTCTAC | 2997 |
| | | AD-1334124 | GCAGCTACGTTCTGTCCAAGAAA | 2998 |
| | | AD-1334125 | CCGACAGCAGCTTCACCGTGCTG | 2999 |
| | | AD-1334126 | ACGGACAACGAGAACTGCCTGAA | 3000 |
| | | AD-1334127 | GTTCCTCAACTCCATCTACACGC | 3001 |
| | | AD-1334128 | CAGCCAACATCACCCTGTTCACA | 3002 |
| | | AD-1334129 | CCTCGAGCTTCTTCATCGTGGTG | 3003 |
| | | AD-1334130 | GTGCCACTCATGCAGGTGTTTGT | 3004 |
| | | AD-1334131 | GTGGGAACTTCAACCAGAACCAG | 3005 |
| | | AD-1334132 | GCTGACGACTTCACGGCCCTCAG | 3006 |
| | | AD-1334133 | GCAGCCTTCGCCAACACCTGGAA | 3007 |
| | | AD-1334134 | TGCCAGGAACAGCTTTGAGGACC | 3008 |
| | | AD-1334135 | GTGTGGAGAATGAGAACTACGCC | 3009 |
| | | AD-1334136 | CCCAACAGTGCCTTCTCGCGCTG | 3010 |
| | | AD-1334137 | CCCTTCCACTCGAACTGCATGTT | 3011 |
| | | AD-1334138 | GACACCTGCAACTGTGAGCGGAG | 3012 |
| | | AD-1334139 | GTCCTCCTATGTGCACGCCTGTG | 3013 |
| | | AD-1334140 | AGGGCGTACAGCTCAGCGACTGG | 3014 |
| | | AD-1334141 | GCACCAAGTACATGCAGAACTGC | 3015 |
| | | AD-1334142 | GCTACGCCTACGTGGTGGATGCC | 3016 |
| | | AD-1334143 | CTGCAGCGTTTCCTTCGTGCCTG | 3017 |
| | | AD-1334144 | GGGCACCTTCCTCAATGACGCGG | 3018 |
| | | AD-1334145 | TCCTGGAGAGGTGGTGCACGACG | 3019 |
| | | AD-1334146 | CGCCGTGTGTTCATGTACGGGTG | 3020 |
| | | AD-1334147 | AGCCTCTCTGCAGAAAAGCACAG | 3021 |
| | | AD-1334148 | CTGGACTGCAGCAACAGCTCGGC | 3022 |
| | | AD-1334149 | GGCTGTTTCAGCACACACTGCGT | 3023 |
| | | AD-1334150 | GGCTGCATTGCCGAGGAGGACTG | 3024 |
| | | AD-1334151 | GCCACCTACAAGCCTGGAGAGAC | 3025 |
| | | AD-1334152 | GTCGACTGCAACACCTGCACCTG | 3026 |
| | | AD-1334153 | AGGAACCGGAGGTGGGAGTGCAG | 3027 |
| | | AD-1334154 | GATGGCCACTTCATCACCTTTGA | 3028 |
| | | AD-1334155 | GGCGATCGCTACAGCTTTGAAGG | 3029 |
| | | AD-1334156 | CAGCTGCGAGTACATCTTGGCCC | 3030 |
| | | AD-1334157 | ACCTTCCGCATCGTCACCGAGAA | 3031 |
| | | AD-1334158 | AGGCCATCAAGCTCTTCGTGGAG | 3032 |
| | | AD-1334159 | GCTACGAGCTGATCCTCCAAGAG | 3033 |
| | | AD-1334160 | GGGACCTTTAAGGCGGTGGCGAG | 3034 |
| | | AD-1334161 | CCACCCTACAAGATACGCTACAT | 3035 |
| | | AD-1334162 | TCTTCCTGGTCATCGAGACCCAC | 3036 |
| | | AD-1334163 | GACCAGCGTGTTCATCCGACTGC | 3037 |
| | | AD-1334164 | ACCAGGACTACAAGGGCAGGGTC | 3038 |
| | | AD-1334165 | GCGGGAACTTCGACGACAATGCC | 3039 |
| | | AD-1334166 | ATCAATGACTTTGCCACGCGTAG | 3040 |
| | | AD-1334167 | ACGCACTGGAGTTTGGGAACAGC | 3041 |
| | | AD-1334168 | TGGGCCCAGAAGCAGTGCAGCAT | 3042 |
| | | AD-1334169 | TCCCAGGTTGACTCCACCAAGTA | 3043 |
| | | AD-1334170 | TACGAGGCCTGCGTGAACGACGC | 3044 |
| | | AD-1334171 | CGACTGCGAGTGTTTCTGCACGG | 3045 |
| | | AD-1334172 | CCTGTGTGTGTCCTGGCGGACTC | 3046 |
| | | AD-1334173 | CTTGTTCTGTGACTTCTACAACC | 3047 |
| | | AD-1334174 | GCTGTGAGTGGCACTACCAGCCC | 3048 |
| | | AD-1334175 | AGGCTGCTACCCGAAGTGCCCAC | 3049 |
| | | AD-1334176 | CCAGCCCTTCTTCAATGAGGACC | 3050 |
| | | AD-1334177 | TGAAGTGCGTGGCCCAGTGTGGC | 3051 |
| | | AD-1334178 | TGCTACGACAAGGACGGAAACTA | 3052 |
| | | AD-1334179 | TATGACGTCGGTGCAAGGGTCCC | 3053 |
| | | AD-1334180 | TGCCAGAGCTGTAACTGCACACC | 3054 |
| | | AD-1334181 | TCCAGTGCGCTCACAGCCTTGAG | 3055 |
| | | AD-1334182 | ACCTGCACCTATGAGGACAGGAC | 3056 |
| | | AD-1334183 | ACCAGGACGTCATCTACAACACC | 3057 |
| | | AD-1334184 | GGCGCCTGCTTGATCGCCATCTG | 3058 |
| | | AD-1334185 | GCACCATCATCAGGAAGGCTGTG | 3059 |
| | | AD-1334186 | GCCACAACGCCATTCACCTTCAC | 3060 |
| | | AD-1334187 | TCTCCACCGTGTGTGTCCGCGAG | 3061 |
| | | AD-1334188 | GGTCCAGCTGGTACAATGGGCAC | 3062 |
| | | AD-1334189 | GGCGGAGACTTTGAGACGTTTGA | 3063 |
| | | AD-1334190 | GAGAGGGTACCAGGTATGCCCTG | 3064 |
| | | AD-1334191 | TGCTGGCTGACATCGAGTGCCGG | 3065 |
| | | AD-1334192 | AGCTTCCCGACATGCCGCTGGAG | 3066 |
| | | AD-1334193 | AGCAGGTGGACTGTGACCGCATG | 3067 |
| | | AD-1334194 | TGCGCCAACAGCCAACAGAGTCC | 3068 |
| | | AD-1334195 | GCTCTGTCACGACTACGAGCTGC | 3069 |
| | | AD-1334196 | GTTCTCTGCTGCGAATACGTGCC | 3070 |
| | | AD-1334197 | AGCACGGAGCCTGCTGTGCCTAC | 3071 |
| | | AD-1334198 | CCAGACCACAGCAACCGAAAAGA | 1445 |
| | | AD-1334199 | CTCACCTCGCAGACTGGGTCCAG | 3072 |
| | | AD-1334200 | GGACAGAGTGGTTTGATGAGGAC | 3073 |
| | | AD-1334201 | GGGACGTTGAGTCCTACGATAAG | 3074 |
| | | AD-1334202 | AGGGCCGCTGGAGGGCACTTATG | 3075 |
| | | AD-1334203 | AGCAGCCTAAGGACATAGAGTGC | 3076 |
| | | AD-1334204 | CCAACTGGACCCTGGCACAGGTG | 3077 |
| | | AD-1334205 | AGGTGCACTGTGACGTCCACTTC | 3078 |
| | | AD-1334206 | GTGTGCAGGAACTGGGAGCAGGA | 3079 |
| | | AD-1334207 | GGCGTCTTCAAGATGTGCTACAA | 3080 |
| | | AD-1334208 | CTCTGCTGCAGTGACGACCACTG | 3081 |
| | | AD-1334209 | ACCGACCACAGAGCTGGAGACGG | 3082 |
| | | AD-1334210 | AGGCCCTGTTCTCAACGCCGCAG | 3083 |
| | | AD-1334211 | ACCCTCTCAGAAGGACTGACATC | 3084 |
| | | AD-1334212 | CCCAGATACACAAGCACCCTTGG | 3085 |
| | | AD-1334213 | AGGCTCCACAGAACCCACTGTCC | 3086 |
| | | AD-1334214 | TCCACCCTTCCAACACGCTCAGC | 3087 |
| | | AD-1334215 | CCCAACAACAATGGCAACCTCCA | 3088 |
| | | AD-1334216 | ACCGCTTCCAAAGAGCCGCTGAC | 3089 |
| | | AD-1334217 | TGGCGCCAACACTCACGAGCGAG | 3090 |
| | | AD-1334218 | CTGTCCACCTCTCAGGCCGAGAC | 3091 |
| | | AD-1334219 | CCCAGGACAGAGACGACAATGAG | 3092 |
| | | AD-1334220 | CCCTTGACTAACACCACCACCAG | 3093 |
| | | AD-1334221 | CGCTGTCAACCGAAGTGTGAGTG | 3094 |
| | | AD-1334222 | ACAGAGTGGTTTGACGTGGACTT | 3095 |
| | | AD-1334223 | ATGGAAACTTTTGAAAACATCAG | 3096 |
| | | AD-1334224 | GGGCACCAAAGAGCATAGAGTGC | 3097 |
| | | AD-1334225 | CCCGAGGTAAGCATCGACCAGGT | 3098 |
| | | AD-1334226 | TGCTGACCTGCAGCCTGGAGACG | 3099 |
| | | AD-1334227 | ACCTGCAAGAACGAAGACCAGAC | 3100 |
| | | AD-1334228 | TGTGCTTCAACTACAACGTGCGT | 3101 |
| | | AD-1334229 | CTTTGCTGTGACGACTACAGCCA | 3102 |
| | | AD-1334230 | GGGACGACCTGGATCCTCACAAA | 3103 |
| | | AD-1334231 | GCCGACCACAACAGCCACTACGA | 3104 |
| | | AD-1334232 | CCTCCACCCTGAGAACAGCTCCC | 3105 |
| | | AD-1334233 | CCTCCCAAAGTGCTGACCACCAC | 3106 |
| | | AD-1334234 | ACCAGCTCCAAAGCCACTCCCTC | 3107 |
| | | AD-1334235 | CTCCAGTCCAGGGACTGCAACCG | 3108 |
| | | AD-1334236 | CCAGCACTGAGAAGCACAGCCAC | 3109 |
| | | AD-1334237 | AGCTACCAGCGTTACACCCATCC | 3110 |
| | | AD-1334238 | TCTTCCTCCCTGGGCACCACCTG | 3111 |
| | | AD-1334239 | CGCCTATCACAGACCACCACACC | 3112 |
| | | AD-1334240 | GGCCACCATGTCCACAGCCACAC | 3113 |
| | | AD-1334241 | CCTCCTCCACTCCAGAGACTGCC | 3114 |
| | | AD-1334242 | ACCTCCACAGTGCTTACCGCCAC | 3115 |
| | | AD-1334243 | CCCAGGAACAGCTCACACTACCA | 3116 |
| | | AD-1334244 | AGTGCCAACTACCACAACCACGG | 3117 |
| | | AD-1334245 | CCTCCAGTGTGGATCAGCACAAC | 3118 |
| | | AD-1334246 | ACACCCACAACCAGAGGCTCCAC | 3119 |
| | | AD-1334247 | ACCGCCACAGTGCTGACCACCAC | 3120 |
| | | AD-1334248 | TGGCCACTGGTTCTATGGCAACA | 3121 |
| | | AD-1334249 | CCCTCCTCTAGCACACAGACCAG | 3122 |
| | | AD-1334250 | ACGGCCACTACGATCACGGCCAC | 3123 |
| | | AD-1334251 | CCCTCCTCAACTCCTGGGACAAC | 3124 |
| | | AD-1334252 | ACCAGCAACACAGTGACTCCCTC | 3125 |
| | | AD-1334253 | TCTGCCCTAGGGACCACCCACAC | 3126 |
| | | AD-1334254 | CCAGTGCCGAACACCATGGCCAC | 3127 |
| | | AD-1334255 | ACAGCCTGGACTTCGGCCACCTC | 3128 |
| | | AD-1334256 | CCACCCACATCACAGAGCCTTCC | 3129 |
| | | AD-1334257 | ACGGTGACTTCCCACACCCTAGC | 3130 |
| | | AD-1334258 | AGCAACCACCGGTACCACCCAGC | 3131 |
| | | AD-1334259 | CTCGACTCCAGCCCTTTCCAGCC | 3132 |
| | | AD-1334260 | CCTAGCAGCAGAACCACCGAGTC | 3133 |
| | | AD-1334261 | ACACCCAGCAAGACCCGCACCTC | 3134 |
| | | AD-1334262 | CACGGTGGTGACCATGGGCTGTG | 3135 |
| | | AD-1334263 | GAGTGGCTGGACTACAGCTACCC | 3136 |
| | | AD-1334264 | CTTTGACACCTACTCCAACATCC | 3137 |
| | | AD-1334265 | AGTTGGGCCAGGTCGTGGAATGC | 3138 |
| | | AD-1334266 | AGCCTGGACTTTGGCCTGGTCTG | 3139 |
| | | AD-1334267 | AGATGTGCTTCAACTATGAAATC | 3140 |
| | | AD-1334268 | CGTGTGTTCTGCTGCAACTACGG | 3141 |
| | | AD-1334269 | ACCAGCTCTACGGCCATGCCCTC | 3142 |
| | | AD-1334270 | GGATCCTCACAGAGCTGACCACA | 3143 |
| | | AD-1334271 | AGCCACTACGACTGAGTCCACTG | 3144 |
| | | AD-1334272 | GGGACCACCTGGATCCTCACAGA | 3145 |
| | | AD-1334273 | CCGAGCACTACAGCCACCGTGAC | 3146 |
| | | AD-1334274 | CTCCTCCACCCAGGCAACTGCTG | 3147 |
| | | AD-1334275 | ACGGCCACGACACCCACAGTCAC | 3148 |
| | | AD-1334276 | CAGCTCCAAAGCCACTCCCTTCT | 3149 |
| | | AD-1334236 | CCAGCACTGAGAAGCACAGCCAC | 3109 |
| | | AD-1334277 | CCACAGCTACCAGCTTTACAGCC | 3150 |
| | | AD-1334239 | CGCCTATCACAGACCACCACACC | 3112 |
| | | AD-1334240 | GGCCACCATGTCCACAGCCACAC | 3113 |
| | | AD-1334278 | CCTCCTCCACTCCAGAGACTGTC | 3151 |
| | | AD-1334279 | CTCCACAGTGCTTACCACCACGG | 3152 |
| | | AD-1334280 | CAGCTCACACTACCAAAGTGCTG | 3153 |
| | | AD-1334281 | ACTACCACAACCACGGGCTTCAC | 3154 |
| | | AD-1334282 | CGCACGCTTCCAGTGTGGATCAG | 3155 |
| | | AD-1334283 | ACACCCACAACCAGAGGTTCCAC | 3156 |
| | | AD-1334284 | GCTGACCACCACCACCACAACTG | 3157 |
| | | AD-1334248 | TGGCCACTGGTTCTATGGCAACA | 3121 |
| | | AD-1334249 | CCCTCCTCTAGCACACAGACCAG | 3122 |
| | | AD-1334250 | ACGGCCACTACGATCACGGCCAC | 3123 |
| | | AD-1334285 | CCCTCCTCAACTCCAGGGACAAC | 3158 |
| | | AD-1334286 | ACCAGCAGCACAGTGACTCCCTC | 3159 |
| | | AD-1334253 | TCTGCCCTAGGGACCACCCACAC | 3126 |
| | | AD-1334287 | ACCACACACGGGCGATCCCTGTC | 3160 |
| | | AD-1334255 | ACAGCCTGGACTTCGGCCACCTC | 3128 |
| | | AD-1334256 | CCACCCACATCACAGAGCCTTCC | 3129 |
| | | AD-1334288 | TACCACCCAGCACTCGACTCCAG | 3161 |
| | | AD-1334289 | TCCAGCCCTCACCCTAGCAGCAG | 3162 |
| | | AD-1334261 | ACACCCAGCAAGACCCGCACCTC | 3134 |
| | | AD-1334262 | CACGGTGGTGACCATGGGCTGTG | 3135 |
| | | AD-1334263 | GAGTGGCTGGACTACAGCTACCC | 3136 |
| | | AD-1334264 | CTTTGACACCTACTCCAACATCC | 3137 |
| | | AD-1334265 | AGTTGGGCCAGGTCGTGGAATGC | 3138 |
| | | AD-1334266 | AGCCTGGACTTTGGCCTGGTCTG | 3139 |
| | | AD-1334267 | AGATGTGCTTCAACTATGAAATC | 3140 |
| | | AD-1334268 | CGTGTGTTCTGCTGCAACTACGG | 3141 |
| | | AD-1334290 | ACCTGGATCCTCACAGAGCAGAC | 3163 |
| | | AD-1334291 | AGCAGCCACTACGACCGCAACCA | 3164 |
| | | AD-1334292 | CCTCCCAAAGTGCTGACCAGCAC | 3165 |
| | | AD-1334293 | ACCAGTTCCAAAGCCACTTCCTC | 3166 |
| | | AD-1334294 | TCCAAGGACTGCAACCACCCTTC | 3167 |
| | | AD-1334295 | CAGTGCTGACAAGCACAGCCACC | 3168 |
| | | AD-1334296 | TCCACAGCTACCAGCTTTACACC | 3169 |
| | | AD-1334297 | CCCTCCTTCACCCTTGGGACCAC | 3170 |
| | | AD-1334298 | CTCCCAGAACAGACCACCACACC | 3171 |
| | | AD-1334299 | GCCACCATGTCCACAATCCACCC | 3172 |
| | | AD-1334300 | ACCTCCACAGTGCTGACCACGAA | 3173 |
| | | AD-1334301 | AGGGCCACCAGTTCCATGTCCAC | 3174 |
| | | AD-1334270 | GGATCCTCACAGAGCTGACCACA | 3143 |
| | | AD-1334302 | AGCCACTACAACTGCAGCCACTG | 3175 |
| | | AD-1334272 | GGGACCACCTGGATCCTCACAGA | 3145 |
| | | AD-1334303 | CCCAGCACTACAGCCACCGTGAC | 3176 |
| | | AD-1334304 | GCACCCTCAAAGTGCTGACCAGC | 3177 |
| | | AD-1334305 | ACACCCACAGTCATCAGCTCCAG | 3178 |
| | | AD-1334306 | AGCCACTCCCTCCTCCAGTCCAG | 3179 |
| | | AD-1334236 | CCAGCACTGAGAAGCACAGCCAC | 3109 |
| | | AD-1334307 | AGCTACCAGCGTTACAGCCATCC | 3180 |
| | | AD-1334239 | CGCCTATCACAGACCACCACACC | 3112 |
| | | AD-1334240 | GGCCACCATGTCCACAGCCACAC | 3113 |
| | | AD-1334308 | CTCCTCTACTCCAGAGACTGTCC | 3181 |
| | | AD-1334279 | CTCCACAGTGCTTACCACCACGA | 3182 |
| | | AD-1334309 | ACAGCTCACACTACCAAAGTGCC | 3183 |
| | | AD-1334310 | GACTACCACAACCACGGGCTTCA | 3184 |
| | | AD-1334245 | CCTCCAGTGTGGATCAGCACAAC | 3118 |
| | | AD-1334246 | ACACCCACAACCAGAGGCTCCAC | 3119 |
| | | AD-1334247 | ACCGCCACAGTGCTGACCACCAC | 3120 |
| | | AD-1334248 | TGGCCACTGGTTCTATGGCAACA | 3121 |
| | | AD-1334249 | CCCTCCTCTAGCACACAGACCAG | 3122 |
| | | AD-1334311 | ACGGCCACTACGATCACAGCCAC | 3185 |
| | | AD-1334285 | CCCTCCTCAACTCCAGGGACAAC | 3158 |
| | | AD-1334286 | ACCAGCAGCACAGTGACTCCCTC | 3159 |
| | | AD-1334253 | TCTGCCCTAGGGACCACCCACAC | 3126 |
| | | AD-1334312 | AACACCACGGCCACCACACACGG | 1551 |
| | | AD-1334255 | ACAGCCTGGACTTCGGCCACCTC | 3128 |
| | | AD-1334256 | CCACCCACATCACAGAGCCTTCC | 3129 |
| | | AD-1334313 | CCCAGCAGCAACCACCAGTACCA | 3186 |
| | | AD-1334289 | TCCAGCCCTCACCCTAGCAGCAG | 3162 |
| | | AD-1334314 | CACCTCCAGGACCACAGCCACAG | 3187 |
| | | AD-1334261 | ACACCCAGCAAGACCCGCACCTC | 3134 |
| | | AD-1334315 | TAACCACGGTGGTGACCACGGGC | 3188 |
| | | AD-1334263 | GAGTGGCTGGACTACAGCTACCC | 3136 |
| | | AD-1334264 | CTTTGACACCTACTCCAACATCC | 3137 |
| | | AD-1334265 | AGTTGGGCCAGGTCGTGGAATGC | 3138 |
| | | AD-1334266 | AGCCTGGACTTTGGCCTGGTCTG | 3139 |
| | | AD-1334267 | AGATGTGCTTCAACTATGAAATC | 3140 |
| | | AD-1334268 | CGTGTGTTCTGCTGCAACTACGG | 3141 |
| | | AD-1334316 | TACGGCCACGCCCTCCTCAACTC | 3189 |
| | | AD-1334317 | ACCTGGATCCTCACAAAGCTGAC | 3190 |
| | | AD-1334271 | AGCCACTACGACTGAGTCCACTG | 3144 |
| | | AD-1334272 | GGGACCACCTGGATCCTCACAGA | 3145 |
| | | AD-1334273 | CCGAGCACTACAGCCACCGTGAC | 3146 |
| | | AD-1334274 | CTCCTCCACCCAGGCAACTGCTG | 3147 |
| | | AD-1334275 | ACGGCCACGACACCCACAGTCAC | 3148 |
| | | AD-1334276 | CAGCTCCAAAGCCACTCCCTTCT | 3149 |
| | | AD-1334236 | CCAGCACTGAGAAGCACAGCCAC | 3109 |
| | | AD-1334277 | CCACAGCTACCAGCTTTACAGCC | 3150 |
| | | AD-1334239 | CGCCTATCACAGACCACCACACC | 3112 |
| | | AD-1334240 | GGCCACCATGTCCACAGCCACAC | 3113 |
| | | AD-1334241 | CCTCCTCCACTCCAGAGACTGCC | 3114 |
| | | AD-1334279 | CTCCACAGTGCTTACCACCACGG | 3152 |
| | | AD-1334309 | ACAGCTCACACTACCAAAGTGCC | 3183 |
| | | AD-1334310 | GACTACCACAACCACGGGCTTCA | 3184 |
| | | AD-1334245 | CCTCCAGTGTGGATCAGCACAAC | 3118 |
| | | AD-1334318 | ACACCCACAACCAGTGGCTCCAC | 3191 |
| | | AD-1334284 | GCTGACCACCACCACCACAACTG | 3157 |
| | | AD-1334248 | TGGCCACTGGTTCTATGGCAACA | 3121 |
| | | AD-1334249 | CCCTCCTCTAGCACACAGACCAG | 3122 |
| | | AD-1334250 | ACGGCCACTACGATCACGGCCAC | 3123 |
| | | AD-1334285 | CCCTCCTCAACTCCAGGGACAAC | 3158 |
| | | AD-1334286 | ACCAGCAGCACAGTGACTCCCTC | 3159 |
| | | AD-1334253 | TCTGCCCTAGGGACCACCCACAC | 3126 |
| | | AD-1334287 | ACCACACACGGGCGATCCCTGTC | 3160 |
| | | AD-1334255 | ACAGCCTGGACTTCGGCCACCTC | 3128 |
| | | AD-1334256 | CCACCCACATCACAGAGCCTTCC | 3129 |
| | | AD-1334288 | TACCACCCAGCACTCGACTCCAG | 3161 |
| | | AD-1334289 | TCCAGCCCTCACCCTAGCAGCAG | 3162 |
| | | AD-1334261 | ACACCCAGCAAGACCCGCACCTC | 3134 |
| | | AD-1334315 | TAACCACGGTGGTGACCACGGGC | 3188 |
| | | AD-1334263 | GAGTGGCTGGACTACAGCTACCC | 3136 |
| | | AD-1334264 | CTTTGACACCTACTCCAACATCC | 3137 |
| | | AD-1334265 | AGTTGGGCCAGGTCGTGGAATGC | 3138 |
| | | AD-1334266 | AGCCTGGACTTTGGCCTGGTCTG | 3139 |
| | | AD-1334267 | AGATGTGCTTCAACTATGAAATC | 3140 |
| | | AD-1334268 | CGTGTGTTCTGCTGCAACTACGG | 3141 |
| | | AD-1334269 | ACCAGCTCTACGGCCATGCCCTC | 3142 |
| | | AD-1334319 | GGGACGACCTGGATCCTCACAGA | 3192 |
| | | AD-1334320 | GCTGACCACAACAGCCACTACGA | 3193 |
| | | AD-1334321 | GCATCCACTGGATCCACGGCCAC | 3194 |
| | | AD-1334322 | CCCTCCCAAAGTGCTGACCAGCC | 3195 |
| | | AD-1334293 | ACCAGTTCCAAAGCCACTTCCTC | 3166 |
| | | AD-1334294 | TCCAAGGACTGCAACCACCCTTC | 3167 |
| | | AD-1334323 | AGCCACCAAATCCACAGCTACCA | 3196 |
| | | AD-1334298 | CTCCCAGAACAGACCACCACACC | 3171 |
| | | AD-1334299 | GCCACCATGTCCACAATCCACCC | 3172 |
| | | AD-1334300 | ACCTCCACAGTGCTGACCACGAA | 3173 |
| | | AD-1334324 | AGGGCCACCAGTTCCACGTCCAC | 3197 |
| | | AD-1334270 | GGATCCTCACAGAGCTGACCACA | 3143 |
| | | AD-1334302 | AGCCACTACAACTGCAGCCACTG | 3175 |
| | | AD-1334272 | GGGACCACCTGGATCCTCACAGA | 3145 |
| | | AD-1334320 | GCTGACCACAACAGCCACTACGA | 3193 |
| | | AD-1334272 | GGGACCACCTGGATCCTCACAGA | 3145 |
| | | AD-1334273 | CCGAGCACTACAGCCACCGTGAC | 3146 |
| | | AD-1334274 | CTCCTCCACCCAGGCAACTGCTG | 3147 |
| | | AD-1334325 | TGTGAGCACCACGGCCACGACAC | 3198 |
| | | AD-1334234 | ACCAGCTCCAAAGCCACTCCCTC | 3107 |
| | | AD-1334326 | GTCCAGGGACTGCAACTGCCCTT | 3199 |
| | | AD-1334236 | CCAGCACTGAGAAGCACAGCCAC | 3109 |
| | | AD-1334277 | CCACAGCTACCAGCTTTACAGCC | 3150 |
| | | AD-1334239 | CGCCTATCACAGACCACCACACC | 3112 |
| | | AD-1334240 | GGCCACCATGTCCACAGCCACAC | 3113 |
| | | AD-1334278 | CCTCCTCCACTCCAGAGACTGTC | 3151 |
| | | AD-1334242 | ACCTCCACAGTGCTTACCGCCAC | 3115 |
| | | AD-1334309 | ACAGCTCACACTACCAAAGTGCC | 3183 |
| | | AD-1334310 | GACTACCACAACCACGGGCTTCA | 3184 |
| | | AD-1334245 | CCTCCAGTGTGGATCAGCACAAC | 3118 |
| | | AD-1334318 | ACACCCACAACCAGTGGCTCCAC | 3191 |
| | | AD-1334327 | ACCGCCAGAGTGCTGACCACCAC | 3200 |
| | | AD-1334248 | TGGCCACTGGTTCTATGGCAACA | 3121 |
| | | AD-1334249 | CCCTCCTCTAGCACACAGACCAG | 3122 |
| | | AD-1334250 | ACGGCCACTACGATCACGGCCAC | 3123 |
| | | AD-1334328 | TCCAGGGACAACACCCATCACCC | 3201 |
| | | AD-1334329 | AGCTCCAAAGCCACTTCCTCCTC | 3202 |
| | | AD-1334294 | TCCAAGGACTGCAACCACCCTTC | 3167 |
| | | AD-1334330 | AGTGCTGACAAGCACAGCCACAA | 3203 |
| | | AD-1334296 | TCCACAGCTACCAGCTTTACACC | 3169 |
| | | AD-1334331 | TCCTCCACCCTGTGGACCACGTG | 3204 |
| | | AD-1334332 | GTCCCAGCACAGACCACCACACC | 3205 |
| | | AD-1334333 | ATGTCCACCATGTCCACAATCCA | 3206 |
| | | AD-1334334 | ACCTCCTCTACTCCAGAGACCAC | 3207 |
| | | AD-1334335 | ACCTCCACAGTGCTGACCACCAC | 3208 |
| | | AD-1334336 | AGGGCCACCAATTCCACGGCCAC | 3209 |
| | | AD-1334337 | GCTGACCACAACAGCCACTACAA | 3210 |
| | | AD-1334338 | ACTGGATCCACGGCCACCCTGTC | 3211 |
| | | AD-1334272 | GGGACCACCTGGATCCTCACAGA | 3145 |
| | | AD-1334339 | CCGAGCACTATAGCCACCGTGAT | 3212 |
| | | AD-1334340 | CTCCACTCTGGGAACAGCTCACA | 3213 |
| | | AD-1334341 | ACCATGGCCACTATGCCCACAGC | 3214 |
| | | AD-1334342 | ACTGCCTCCACGGTTCCCAGCTC | 3215 |
| | | AD-1334343 | CTGCCAACCTTCAGCGTGTCCAC | 3216 |
| | | AD-1334344 | TGTCCTCCTCAGTCCTCACCACC | 3217 |
| | | AD-1334345 | GCTCCCACTTCTCTACTCCCTGC | 3218 |
| | | AD-1334346 | GGGCATTTGGACAGTTTTTCTCG | 3219 |
| | | AD-1334347 | GGGAAGTCATCTACAATAAGACC | 3220 |
| | | AD-1334348 | GGCTGCCATTTCTACGCAGTGTG | 3221 |
| | | AD-1334349 | AGCACTGTGACATTGACCGCTTC | 3222 |
| | | AD-1334350 | GCTGTGACAATGCCATCCCTCTC | 3223 |
| | | AD-1334351 | GGACCCTGGAGAACTGCACGGTG | 3224 |
| | | AD-1334352 | GCGTGGGTGACAACCGTGTCGTC | 3225 |
| | | AD-1334353 | TGGACCCAAAGCCTGTGGCCAAC | 3226 |
| | | AD-1334354 | ACCTGCGTGAACAAGCACCTGCC | 3227 |
| | | AD-1334355 | CATCAAAGTGTCGGACCCGAGCC | 3228 |
| | | AD-1334356 | GCCCTGTGACTTCCACTATGAGT | 3229 |
| | | AD-1334357 | GCGAGTGCATCTGCAGCATGTGG | 3230 |
| | | AD-1334358 | CTCCCACTATTCCACCTTTGACG | 3231 |
| | | AD-1334359 | GCACCTATGTCCTCATGAGAGAG | 3232 |
| | | AD-1334360 | TGCACGCTTTGGGAATCTCAGCC | 3233 |
| | | AD-1334361 | ACCTGGACAACCACTACTGCACG | 3234 |
| | | AD-1334362 | CCCTCAGCATCCACTACAAGTCC | 3235 |
| | | AD-1334363 | TCGTCCTCACTGTCACCATGGTG | 3236 |
| | | AD-1334364 | GGCCTGATCCTGTTTGACCAAAT | 3237 |
| | | AD-1334365 | GCAGCGGTTTCAGCAAGAACGGC | 3238 |
| | | AD-1334366 | TGCGTGTGGACATTCCTGCCCTG | 3239 |
| | | AD-1334367 | GCGTGAGCGTCACCTTCAATGGC | 3240 |
| | | AD-1334368 | ACAGCCTCTTCCACAACAACACC | 3241 |
| | | AD-1334369 | CCTGCACCAACAACCAGAGGGAC | 3242 |
| | | AD-1334370 | ACTGTCTCCAGCGGGACGGAACC | 3243 |
| | | AD-1334371 | GCCGCCAGTTGCAAGGACATGGC | 3244 |
| | | AD-1334372 | CCCGACAGCAGAAAGGATGGCTG | 3245 |
| | | AD-1334373 | AGCCGCTCTGTGATCTGATGCTG | 3246 |
| | | AD-1334374 | GCCAGGTCTTTGCTGAGTGCCAC | 3247 |
| | | AD-1334375 | CCGGGCCCATTCTTCAACGCCTG | 3248 |
| | | AD-1334376 | TGGAGGCTTACGCAGAGCTCTGC | 3249 |
| | | AD-1334377 | GGAGTGTGCAGTGACTGGCGAGG | 3250 |
| | | AD-1334378 | ACCCACCAAAGTGTACAAGCCAT | 3251 |
| | | AD-1334379 | ACCTGCAACTCTAGGAACCAGAG | 3252 |
| | | AD-1334380 | ACCAGATCCTCTTCAACGCACAC | 3253 |
| | | AD-1334381 | ATGGGCATCTGCGTGCAGGCCTG | 3254 |
| | | AD-1334382 | CCCGATGGGTTTCCTAAATTTCC | 3255 |
| | | AD-1334383 | TGGGTCAGCAACTGCCAGTCCTG | 3256 |
| | | AD-1334384 | ACGAGGGTTCAGTGTCGGTGCAG | 3257 |
| | | AD-1334385 | CCCGGCTTCGTAACCGTGACCAG | 3258 |
| | | AD-1334386 | TGCGTGTGCAACACAACCACCTG | 3259 |
| | | AD-1334387 | GGCAGGAGTCCATCTGCACCCAG | 3260 |
| | | AD-1334388 | TGCTGTCCCACCTTCCGCTGCAG | 3261 |
| | | AD-1334389 | CCTCAGCTGTGTTCGTACAATGG | 3262 |
| | | AD-1334390 | GGTTGGTGCAACCTTCCCAGGCG | 3263 |
| | | AD-1334391 | CTTCCCTGCCACATGTGTACCTG | 3264 |
| | | AD-1334392 | CAACGGTGCAATGTCAGGAGGAT | 3265 |
| | | AD-1334393 | GCCTGCAACAATACTACCTGTCC | 3266 |
| | | AD-1334394 | CAGGGCTTTGAGTACAAGAGAGT | 3267 |
| | | AD-1334395 | CAGTCCAGCTGAATGAAACCTGG | 3268 |
| | | AD-1334396 | GTCAACAGCCATGTGGACAACTG | 3269 |
| | | AD-1334397 | CACCGTGTACCTCTGTGAGGCTG | 3270 |
| | | AD-1334398 | AGGGTGGAGTCCATTTGCTGACC | 3271 |
| | | AD-1334399 | TCCTGCCCAGATGTGTCCAGCTG | 3272 |
| | | AD-1334400 | CTGCTGCTACTCCTGTGAGGAGG | 3273 |
| | | AD-1334401 | ACTCCTGTCAAGTCCGCATCAAC | 3274 |
| | | AD-1334402 | ACGACCATCCTGTGGCACCAGGG | 3275 |
| | | AD-1334403 | GAGGTCAACATCACCTTCTGCGA | 3276 |
| | | AD-1334404 | AGCGTCCAAGTACTCAGCAGAGG | 3277 |
| | | AD-1334405 | CCATGCAGCACCAGTGCACCTGC | 3278 |
| | | AD-1334406 | GTGCCCTTGCACTGTCCTAACGG | 3279 |
| | | AD-1334407 | TCCTGCACACCTACACCCACGTG | 3280 |
| | | AD-1334408 | CTGCACGCCCTTCTGTGTCCCTG | 3281 |
| | | AD-1334409 | CCACTGCTGTCTGAGAACGTTCT | 3282 |
| | | AD-1334410 | CCCATGCTCTGTCCACCTGGAGC | 3283 |
| | | AD-1334411 | GTGCATTGTCTGATCATGAAAAC | 3284 |
| | | AD-1334412 | AGGGCGCCACTCAGGAGTCCTAC | 3285 |
| | | AD-1334413 | CCCTCCCTGATGTCACTGGGACG | 3286 |
| | | AD-1334414 | CCCTGGAACAAACTAAGCATGTG | 3287 |
| | | AD-1334415 | CAGCACGGATTCCAGCTGGCCAC | 3288 |
| | | AD-1334416 | CAGACAGGCTGGTCCAGGCAAGG | 3289 |
| | | AD-1334417 | CTGCTGCCAGGAAGCTGCGACAG | 3290 |
| | | AD-1334418 | CTGCAGGGTAACTCAGGGCTGAG | 3291 |
| | | AD-1334419 | TCGCAACGGCCAGGTCAGAGAGG | 3292 |
| | | AD-1334420 | CCAGCCCAGTTTTGCAAATAAAC | 3293 |

TABLE 6
Unmodified Sense and Antisense Strand MUC5B dsRNA Sequences

| | | | | SEQ | | |
|---|---|---|---|---|---|---|
| Duplex | | SEQ ID | | ID | Start Site in | End Site in |
| Name | Sense Sequence 5′ to 3′ | NO: | Antisense Sequence 5′ to 3′ | NO: | NM_002458.3 | NM_002458.3 |
| AD-1334421 | UUGGCUCUGGCGGCCAUGCUC | 3294 | GAGCAUGGCCGCCAGAGCCAACA | 3581 | 90 | 112 |
| AD-1334422 | CUGGGAGAAUGCAGGGCACAC | 3295 | GUGUGCCCUGCAUUCUCCCAGCU | 3582 | 152 | 174 |
| AD-1334423 | GCGCGUGAGCUUUGUUCCACC | 3296 | GGUGGAACAAAGCUCACGCGCCG | 3583 | 209 | 231 |
| AD-1334424 | UGGGCGGGUGUGCAGCACCUG | 3297 | CAGGUGCUGCACACCCGCCCAUU | 3584 | 275 | 297 |
| AD-1334425 | CCACUACAAGACCUUCGACGG | 3298 | CCGUCGAAGGUCUUGUAGUGGAA | 3585 | 305 | 327 |
| AD-1334426 | CCUUUGCAACUACGUGUUCUC | 3299 | GAGAACACGUAGUUGCAAAGGCC | 3586 | 347 | 369 |
| AD-1334427 | GAGGACUUCAACGUCCAGCUA | 1681 | UAGCUGGACGUUGAAGUCCUCGU | 2005 | 390 | 412 |
| AD-1334428 | ACCCGUGUUGUCAUCAAGGCC | 3300 | GGCCUUGAUGACAACACGGGUGA | 3587 | 444 | 466 |
| AD-1334429 | GGCUCCGUCCUCAUCAAUGGG | 3301 | CCCAUUGAUGAGGACGGAGCCGU | 3588 | 492 | 514 |
| AD-1334430 | GCUGCCUUACAGCCGCACUGG | 3302 | CCAGUGCGGCUGUAAGGCAGCUC | 3589 | 524 | 546 |
| AD-1334431 | GACUACAUCAAGGUCAGCAUC | 3303 | GAUGCUGACCUUGAUGUAGUCCC | 3590 | 567 | 589 |
| AD-1334432 | GCUGACAUUCCUGUGGAACGG | 3304 | CCGUUCCACAGGAAUGUCAGCAC | 3591 | 596 | 618 |
| AD-1334433 | CUGGAUCCCAAAUACGCCAAC | 3305 | GUUGGCGUAUUUGGGAUCCAGCU | 3592 | 639 | 661 |
| AD-1334434 | GCCUUCAACGAGUUCUAUGCC | 3306 | GGCAUAGAACUCGUUGAAGGCCG | 3593 | 699 | 721 |
| AD-1334435 | AACCUGCAGAAGUUGGAUGGG | 3307 | CCCAUCCAACUUCUGCAGGUUCC | 3594 | 753 | 775 |
| AD-1334436 | UGCACGGACGAGGAGGGCAUC | 3308 | GAUGCCCUCCUCGUCCGUGCAGU | 3595 | 819 | 841 |
| AD-1334437 | UUUGCGGAGUGCCACGCACUG | 3309 | CAGUGCGUGGCACUCCGCAAAGG | 3596 | 867 | 889 |
| AD-1334438 | GACAGCACUGCGUACCUGGCC | 3310 | GGCCAGGUACGCAGUGCUGUCCA | 3597 | 891 | 913 |
| AD-1334439 | GCCACCUUUGUGGAAUACUCA | 1693 | UGAGUAUUCCACAAAGGUGGCAC | 2017 | 954 | 976 |
| AD-1334440 | CUGGAGGUGCCCUGAGCUCUG | 3311 | CAGAGCUCAGGGCACCUCCAGUU | 3598 | 1010 | 1032 |
| AD-1334441 | CUCAACAUGCAGCACCAGGAG | 3312 | CUCCUGGUGCUGCAUGUUGAGGG | 3599 | 1047 | 1069 |
| AD-1334442 | ACCCUGCACGGACACCUGCUC | 3313 | GAGCAGGUGUCCGUGCAGGGUGA | 3600 | 1076 | 1098 |
| AD-1334443 | GGACCACUGUGUGGACGGCUG | 3314 | CAGCCGUCCACACAGUGGUCCUC | 3601 | 1124 | 1146 |
| AD-1334444 | GCUGGAUGACAUCACGCACUC | 3315 | GAGUGCGUGAUGUCAUCCAGCAC | 3602 | 1166 | 1188 |
| AD-1334445 | CUCCUUCAACACCACCUGCAG | 3316 | CUGCAGGUGGUGUUGAAGGAGGU | 3603 | 1250 | 1272 |
| AD-1334446 | CUAUGGCAGUGCCAGGACCUG | 3317 | CAGGUCCUGGCACUGCCAUAGCC | 3604 | 1293 | 1315 |
| AD-1334447 | ACCUAUGAUGAGAAACUCUAC | 3318 | GUAGAGUUUCUCAUCAUAGGUGG | 3605 | 1359 | 1381 |
| AD-1334448 | AGCUACGUUCUGUCCAAGAAA | 1702 | UUUCUUGGACAGAACGUAGCUGC | 2026 | 1398 | 1420 |
| AD-1334449 | GACAGCAGCUUCACCGUGCUG | 3319 | CAGCACGGUGAAGCUGCUGUCGG | 3606 | 1425 | 1447 |
| AD-1334450 | GGACAACGAGAACUGCCUGAA | 1704 | UUCAGGCAGUUCUCGUUGUCCGU | 2028 | 1472 | 1494 |
| AD-1334451 | UCCUCAACUCCAUCUACACGC | 3320 | GCGUGUAGAUGGAGUUGAGGAAC | 3607 | 1558 | 1580 |
| AD-1334452 | GCCAACAUCACCCUGUUCACA | 1706 | UGUGAACAGGGUGAUGUUGGCUG | 2030 | 1596 | 1618 |
| AD-1334453 | UCGAGCUUCUUCAUCGUGGUG | 3321 | CACCACGAUGAAGAAGCUCGAGG | 3608 | 1620 | 1642 |
| AD-1334454 | GCCACUCAUGCAGGUGUUUGU | 3322 | ACAAACACCUGCAUGAGUGGCAC | 3609 | 1679 | 1701 |
| AD-1334455 | GGGAACUUCAACCAGAACCAG | 3323 | CUGGUUCUGGUUGAAGUUCCCAC | 3610 | 1743 | 1765 |
| AD-1334456 | UGACGACUUCACGGCCCUCAG | 3324 | CUGAGGGCCGUGAAGUCGUCAGC | 3611 | 1766 | 1788 |
| AD-1334457 | AGCCUUCGCCAACACCUGGAA | 1711 | UUCCAGGUGUUGGCGAAGGCUGC | 2035 | 1811 | 1833 |
| AD-1334458 | CCAGGAACAGCUUUGAGGACC | 3325 | GGUCCUCAAAGCUGUUCCUGGCA | 3612 | 1855 | 1877 |
| AD-1334459 | GUGGAGAAUGAGAACUACGCC | 3326 | GGCGUAGUUCUCAUUCUCCACAC | 3613 | 1890 | 1912 |
| AD-1334460 | CAACAGUGCCUUCUCGCGCUG | 3327 | CAGCGCGAGAAGGCACUGUUGGG | 3614 | 1940 | 1962 |
| AD-1334461 | CUUCCACUCGAACUGCAUGUU | 58 | AACAUGCAGUUCGAGUGGAAGGG | 389 | 1985 | 2007 |
| AD-1334462 | CACCUGCAACUGUGAGCGGAG | 3328 | CUCCGCUCACAGUUGCAGGUGUC | 3615 | 2009 | 2031 |
| AD-1334463 | CCUCCUAUGUGCACGCCUGUG | 3329 | CACAGGCGUGCACAUAGGAGGAC | 3616 | 2056 | 2078 |
| AD-1334464 | GGCGUACAGCUCAGCGACUGG | 3330 | CCAGUCGCUGAGCUGUACGCCCU | 3617 | 2085 | 2107 |
| AD-1334465 | ACCAAGUACAUGCAGAACUGC | 3331 | GCAGUUCUGCAUGUACUUGGUGC | 3618 | 2121 | 2143 |
| AD-1334466 | UACGCCUACGUGGUGGAUGCC | 3332 | GGCAUCCACCACGUAGGCGUAGC | 3619 | 2157 | 2179 |
| AD-1334467 | GCAGCGUUUCCUUCGUGCCUG | 3333 | CAGGCACGAAGGAAACGCUGCAG | 3620 | 2221 | 2243 |
| AD-1334468 | GCACCUUCCUCAAUGACGCGG | 3334 | CCGCGUCAUUGAGGAAGGUGCCC | 3621 | 2266 | 2288 |
| AD-1334469 | CUGGAGAGGUGGUGCACGACG | 3335 | CGUCGUGCACCACCUCUCCAGGA | 3622 | 2344 | 2366 |
| AD-1334470 | CCGUGUGUUCAUGUACGGGUG | 3336 | CACCCGUACAUGAACACACGGCG | 3623 | 2371 | 2393 |
| AD-1334471 | CCUCUCUGCAGAAAAGCACAG | 3337 | CUGUGCUUUUCUGCAGAGAGGCU | 3624 | 2413 | 2435 |
| AD-1334472 | GGACUGCAGCAACAGCUCGGC | 3338 | GCCGAGCUGUUGCUGCAGUCCAG | 3625 | 2459 | 2481 |
| AD-1334473 | CUGUUUCAGCACACACUGCGU | 3339 | ACGCAGUGUGUGCUGAAACAGCC | 3626 | 2531 | 2553 |
| AD-1334474 | CUGCAUUGCCGAGGAGGACUG | 3340 | CAGUCCUCCUCGGCAAUGCAGCC | 3627 | 2600 | 2622 |
| AD-1334475 | CACCUACAAGCCUGGAGAGAC | 334 | GUCUCUCCAGGCUUGUAGGUGGC | 3628 | 2642 | 2664 |
| AD-1334476 | CGACUGCAACACCUGCACCUG | 3342 | CAGGUGCAGGUGUUGCAGUCGAC | 3629 | 2672 | 2694 |
| AD-1334477 | GAACCGGAGGUGGGAGUGCAG | 3343 | CUGCACUCCCACCUCCGGUUCCU | 3630 | 2696 | 2718 |
| AD-1334478 | UGGCCACUUCAUCACCUUUGA | 1732 | UCAAAGGUGAUGAAGUGGCCAUC | 2056 | 2756 | 2778 |
| AD-1334479 | CGAUCGCUACAGCUUUGAAGG | 3344 | CCUUCAAAGCUGUAGCGAUCGCC | 3631 | 2780 | 2802 |
| AD-1334480 | GCUGCGAGUACAUCUUGGCCC | 3345 | GGGCCAAGAUGUACUCGCAGCUG | 3632 | 2803 | 2825 |
| AD-1334481 | CUUCCGCAUCGUCACCGAGAA | 1735 | UUCUCGGUGACGAUGCGGAAGGU | 2059 | 2858 | 2880 |
| AD-1334482 | GCCAUCAAGCUCUUCGUGGAG | 3346 | CUCCACGAAGAGCUUGAUGGCCU | 3633 | 2916 | 2938 |
| AD-1334483 | UACGAGCUGAUCCUCCAAGAG | 3347 | CUCUUGGAGGAUCAGCUCGUAGC | 3634 | 2940 | 2962 |
| AD-1334484 | GACCUUUAAGGCGGUGGCGAG | 3348 | CUCGCCACCGCCUUAAAGGUCCC | 3635 | 2963 | 2985 |
| AD-1334485 | ACCCUACAAGAUACGCUACAU | 3349 | AUGUAGCGUAUCUUGUAGGGUGG | 3636 | 3002 | 3024 |
| AD-1334486 | UUCCUGGUCAUCGAGACCCAC | 3350 | GUGGGUCUCGAUGACCAGGAAGA | 3637 | 3030 | 3052 |
| AD-1334487 | CCAGCGUGUUCAUCCGACUGC | 3351 | GCAGUCGGAUGAACACGCUGGUC | 3638 | 3079 | 3101 |
| AD-1334488 | CAGGACUACAAGGGCAGGGUC | 3352 | GACCCUGCCCUUGUAGUCCUGGU | 3639 | 3102 | 3124 |
| AD-1334489 | GGGAACUUCGACGACAAUGCC | 3353 | GGCAUUGUCGUCGAAGUUCCCGC | 3640 | 3135 | 3157 |
| AD-1334490 | CAAUGACUUUGCCACGCGUAG | 3354 | CUACGCGUGGCAAAGUCAUUGAU | 3641 | 3158 | 3180 |
| AD-1334491 | GCACUGGAGUUUGGGAACAGC | 3355 | GCUGUUCCCAAACUCCAGUGCGU | 3642 | 3198 | 3220 |
| AD-1334492 | GGCCCAGAAGCAGUGCAGCAU | 3356 | AUGCUGCACUGCUUCUGGGCCCA | 3643 | 3296 | 3318 |
| AD-1334493 | CCAGGUUGACUCCACCAAGUA | 174 | UACUUGGUGGAGUCAACCUGGGA | 2071 | 3350 | 3372 |
| AD-1334494 | CGAGGCCUGCGUGAACGACGC | 3357 | GCGUCGUUCACGCAGGCCUCGUA | 3644 | 3374 | 3396 |
| AD-1334495 | ACUGCGAGUGUUUCUGCACGG | 3358 | CCGUGCAGAAACACUCGCAGUCG | 3645 | 3418 | 3440 |
| AD-1334496 | UGUGUGUGUCCUGGCGGACUC | 3359 | GAGUCCGCCAGGACACACACAGG | 3646 | 3478 | 3500 |
| AD-1334497 | UGUUCUGUGACUUCUACAACC | 3360 | GGUUGUAGAAGUCACAGAACAAG | 3647 | 3514 | 3536 |
| AD-1334498 | UGUGAGUGGCACUACCAGCCC | 3361 | GGGCUGGUAGUGCCACUCACAGC | 3648 | 3546 | 3568 |
| AD-1334499 | GCUGCUACCCGAAGUGCCCAC | 3362 | GUGGGCACUUCGGGUAGCAGCCU | 3649 | 3640 | 3662 |
| AD-1314302 | AGCCCUUCUUCAAUGAGGACC | 3363 | GGUCCUCAUUGAAGAAGGGCUGG | 3650 | 3667 | 3689 |
| AD-1334500 | AAGUGCGUGGCCCAGUGUGGC | 3364 | GCCACACUGGGCCACGCACUUCA | 3651 | 3693 | 3715 |
| AD-1334501 | CUACGACAAGGACGGAAACUA | 1756 | UAGUUUCCGUCCUUGUCGUAGCA | 2080 | 3716 | 3738 |
| AD-1334502 | UGACGUCGGUGCAAGGGUCCC | 3365 | GGGACCCUUGCACCGACGUCAUA | 3652 | 3740 | 3762 |
| AD-1334503 | CCAGAGCUGUAACUGCACACC | 3366 | GGUGUGCAGUUACAGCUCUGGCA | 3653 | 3776 | 3798 |
| AD-1334504 | CAGUGCGCUCACAGCCUUGAG | 3367 | CUCAAGGCUGUGAGCGCACUGGA | 3654 | 3807 | 3829 |
| AD-1334505 | CUGCACCUAUGAGGACAGGAC | 3368 | GUCCUGUCCUCAUAGGUGCAGGU | 3655 | 3836 | 3858 |
| AD-1334506 | CAGGACGUCAUCUACAACACC | 3369 | GGUGUUGUAGAUGACGUCCUGGU | 3656 | 3867 | 3889 |
| AD-1334507 | CGCCUGCUUGAUCGCCAUCUG | 3370 | CAGAUGGCGAUCAAGCAGGCGCC | 3657 | 3902 | 3924 |
| AD-1334508 | ACCAUCAUCAGGAAGGCUGUG | 3371 | CACAGCCUUCCUGAUGAUGGUGC | 3658 | 3936 | 3958 |
| AD-1334509 | CACAACGCCAUUCACCUUCAC | 3372 | GUGAAGGUGAAUGGCGUUGUGGC | 3659 | 3977 | 3999 |
| AD-1334510 | UCCACCGUGUGUGUCCGCGAG | 3373 | CUCGCGGACACACACGGUGGAGA | 3660 | 4044 | 4066 |
| AD-1334511 | UCCAGCUGGUACAAUGGGCAC | 3374 | GUGCCCAUUGUACCAGCUGGACC | 3661 | 4077 | 4099 |
| AD-1334512 | CGGAGACUUUGAGACGUUUGA | 1767 | UCAAACGUCUCAAAGUCUCCGCC | 2091 | 4121 | 4143 |
| AD-1334513 | GAGGGUACCAGGUAUGCCCUG | 3375 | CAGGGCAUACCUGGUACCCUCUC | 3662 | 4156 | 4178 |
| AD-1334514 | CUGGCUGACAUCGAGUGCCGG | 3376 | CCGGCACUCGAUGUCAGCCAGCA | 3663 | 4179 | 4201 |
| AD-1334515 | CUUCCCGACAUGCCGCUGGAG | 3377 | CUCCAGCGGCAUGUCGGGAAGCU | 3664 | 4209 | 4231 |
| AD-1334516 | CAGGUGGACUGUGACCGCAUG | 3378 | CAUGCGGUCACAGUCCACCUGCU | 3665 | 4242 | 4264 |
| AD-1334517 | CGCCAACAGCCAACAGAGUCC | 3379 | GGACUCUGUUGGCUGUUGGCGCA | 3666 | 4277 | 4299 |
| AD-1334518 | UCUGUCACGACUACGAGCUGC | 3380 | GCAGCUCGUAGUCGUGACAGAGC | 3667 | 4303 | 4325 |
| AD-1334519 | UCUCUGCUGCGAAUACGUGCC | 3381 | GGCACGUAUUCGCAGCAGAGAAC | 3668 | 4328 | 4350 |
| AD-1334520 | CACGGAGCCUGCUGUGCCUAC | 3382 | GUAGGCACAGCAGGCUCCGUGCU | 3669 | 4403 | 4425 |
| AD-1334521 | AGACCACAGCAACCGAAAAGA | 1776 | UCUUUUCGGUUGCUGUGGUCUGG | 2100 | 4432 | 4454 |
| AD-1334522 | CACCUCGCAGACUGGGUCCAG | 3383 | CUGGACCCAGUCUGCGAGGUGAG | 3670 | 4496 | 4518 |
| AD-1334523 | ACAGAGUGGUUUGAUGAGGAC | 3384 | GUCCUCAUCAAACCACUCUGUCC | 3671 | 4584 | 4606 |
| AD-1334524 | GACGUUGAGUCCUACGAUAAG | 3385 | CUUAUCGUAGGACUCAACGUCCC | 3672 | 4632 | 4654 |
| AD-1334525 | GGCCGCUGGAGGGCACUUAUG | 3386 | CAUAAGUGCCCUCCAGCGGCCCU | 3673 | 4658 | 4680 |
| AD-1334526 | CAGCCUAAGGACAUAGAGUGC | 3387 | GCACUCUAUGUCCUUAGGCUGCU | 3674 | 4683 | 4705 |
| AD-1334527 | AACUGGACCCUGGCACAGGUG | 3388 | CACCUGUGCCAGGGUCCAGUUGG | 3675 | 4722 | 4744 |
| AD-1334528 | GUGCACUGUGACGUCCACUUC | 3389 | GAAGUGGACGUCACAGUGCACCU | 3676 | 4752 | 4774 |
| AD-1334529 | GUGCAGGAACUGGGAGCAGGA | 1784 | UCCUGCUCCCAGUUCCUGCACAC | 2108 | 4781 | 4803 |
| AD-1334530 | CGUCUUCAAGAUGUGCUACAA | 1785 | UUGUAGCACAUCUUGAAGACGCC | 2109 | 4805 | 4827 |
| AD-1334531 | CUGCUGCAGUGACGACCACUG | 3390 | CAGUGGUCGUCACUGCAGCAGAG | 3677 | 4844 | 4866 |
| AD-1334532 | CGACCACAGAGCUGGAGACGG | 3391 | CCGUCUCCAGCUCUGUGGUCGGU | 3678 | 4891 | 4913 |
| AD-1334533 | GCCCUGUUCUCAACGCCGCAG | 3392 | CUGCGGCGUUGAGAACAGGGCCU | 3679 | 4932 | 4954 |
| AD-1334534 | CCUCUCAGAAGGACUGACAUC | 3393 | GAUGUCAGUCCUUCUGAGAGGGU | 3680 | 5012 | 5034 |
| AD-1334535 | CAGAUACACAAGCACCCUUGG | 3394 | CCAAGGGUGCUUGUGUAUCUGGG | 3681 | 5036 | 5058 |
| AD-1334536 | GCUCCACAGAACCCACUGUCC | 3395 | GGACAGUGGGUUCUGUGGAGCCU | 3682 | 5092 | 5114 |
| AD-1334537 | CACCCUUCCAACACGCUCAGC | 3396 | GCUGAGCGUGUUGGAAGGGUGGA | 3683 | 5129 | 5151 |
| AD-1334538 | CAACAACAAUGGCAACCUCCA | 1793 | UGGAGGUUGCCAUUGUUGUUGGG | 2117 | 5212 | 5234 |
| AD-1334539 | CGCUUCCAAAGAGCCGCUGAC | 3397 | GUCAGCGGCUCUUUGGAAGCGGU | 3684 | 5261 | 5283 |
| AD-1334540 | GCGCCAACACUCACGAGCGAG | 3398 | CUCGCUCGUGAGUGUUGGCGCCA | 3685 | 5292 | 5314 |
| AD-1334541 | GUCCACCUCUCAGGCCGAGAC | 3399 | GUCUCGGCCUGAGAGGUGGACAG | 3686 | 5315 | 5337 |
| AD-1334542 | CAGGACAGAGACGACAAUGAG | 3400 | CUCAUUGUCGUCUCUGUCCUGGG | 3687 | 5345 | 5367 |
| AD-1334543 | CUUGACUAACACCACCACCAG | 3401 | CUGGUGGUGGUGUUAGUCAAGGG | 3688 | 5369 | 5391 |
| AD-1334544 | CUGUCAACCGAAGUGUGAGUG | 3402 | CACUCACACUUCGGUUGACAGCG | 3689 | 5405 | 5427 |
| AD-1334545 | AGAGUGGUUUGACGUGGACUU | 3403 | AAGUCCACGUCAAACCACUCUGU | 3690 | 5429 | 5451 |
| AD-1334546 | GGAAACUUUUGAAAACAUCAG | 3404 | CUGAUGUUUUCAAAAGUUUCCAU | 3691 | 5480 | 5502 |
| AD-1334547 | GCACCAAAGAGCAUAGAGUGC | 3405 | GCACUCUAUGCUCUUUGGUGCCC | 3692 | 5526 | 5548 |
| AD-1334548 | CGAGGUAAGCAUCGACCAGGU | 3406 | ACCUGGUCGAUGCUUACCUCGGG | 3693 | 5564 | 5586 |
| AD-1334549 | CUGACCUGCAGCCUGGAGACG | 3407 | CGUCUCCAGGCUGCAGGUCAGCA | 3694 | 5595 | 5617 |
| AD-1334550 | CUGCAAGAACGAAGACCAGAC | 3408 | GUCUGGUCUUCGUUCUUGCAGGU | 3695 | 5624 | 5646 |
| AD-1334551 | UGCUUCAACUACAACGUGCGU | 3409 | ACGCACGUUGUAGUUGAAGCACA | 3696 | 5661 | 5683 |
| AD-1334552 | UUGCUGUGACGACUACAGCCA | 1807 | UGGCUGUAGUCGUCACAGCAAAG | 2131 | 5687 | 5709 |
| AD-1334553 | GACGACCUGGAUCCUCACAAA | 1808 | UUUGUGAGGAUCCAGGUCGUCCC | 2132 | 5762 | 5784 |
| AD-1334554 | CGACCACAACAGCCACUACGA | 1809 | UCGUAGUGGCUGUUGUGGUCGGC | 2133 | 5785 | 5807 |
| AD-1334555 | UCCACCCUGAGAACAGCUCCC | 3410 | GGGAGCUGUUCUCAGGGUGGAGG | 3697 | 5838 | 5860 |
| AD-1334556 | UCCCAAAGUGCUGACCACCAC | 3411 | GUGGUGGUCAGCACUUUGGGAGG | 3698 | 5861 | 5883 |
| AD-1334557 | CAGCUCCAAAGCCACUCCCUC | 3412 | GAGGGAGUGGCUUUGGAGCUGGU | 3699 | 5903 | 5925 |
| AD-1334558 | CCAGUCCAGGGACUGCAACCG | 3413 | CGGUUGCAGUCCCUGGACUGGAG | 3700 | 5926 | 5948 |
| AD-1334559 | AGCACUGAGAAGCACAGCCAC | 3414 | GUGGCUGUGCUUCUCAGUGCUGG | 3701 | 5954 | 5976 |
| AD-1334560 | CUACCAGCGUUACACCCAUCC | 3415 | GGAUGGGUGUAACGCUGGUAGCU | 3702 | 5986 | 6008 |
| AD-1334561 | UUCCUCCCUGGGCACCACCUG | 3416 | CAGGUGGUGCCCAGGGAGGAAGA | 3703 | 6011 | 6033 |
| AD-1334562 | CCUAUCACAGACCACCACACC | 3417 | GGUGUGGUGGUCUGUGAUAGGCG | 3704 | 6038 | 6060 |
| AD-1334563 | CCACCAUGUCCACAGCCACAC | 3418 | GUGUGGCUGUGGACAUGGUGGCC | 3705 | 6064 | 6086 |
| AD-1334564 | UCCUCCACUCCAGAGACUGCC | 3419 | GGCAGUCUCUGGAGUGGAGGAGG | 3706 | 6087 | 6109 |
| AD-1334565 | CUCCACAGUGCUUACCGCCAC | 3420 | GUGGCGGUAAGCACUGUGGAGGU | 3707 | 6113 | 6135 |
| AD-1334566 | CAGGAACAGCUCACACUACCA | 1821 | UGGUAGUGUGAGCUGUUCCUGGG | 2145 | 6184 | 6206 |
| AD-1334567 | UGCCAACUACCACAACCACGG | 3421 | CCGUGGUUGUGGUAGUUGGCACU | 3708 | 6208 | 6230 |
| AD-1334568 | UCCAGUGUGGAUCAGCACAAC | 3422 | GUUGUGCUGAUCCACACUGGAGG | 3709 | 6275 | 6297 |
| AD-1334569 | ACCCACAACCAGAGGCUCCAC | 3423 | GUGGAGCCUCUGGUUGUGGGUGU | 3710 | 6302 | 6324 |
| AD-1334570 | CGCCACAGUGCUGACCACCAC | 3424 | GUGGUGGUCAGCACUGUGGCGGU | 3711 | 6359 | 6381 |
| AD-1334571 | GCCACUGGUUCUAUGGCAACA | 1826 | UGUUGCCAUAGAACCAGUGGCCA | 2150 | 6393 | 6415 |
| AD-1334572 | CUCCUCUAGCACACAGACCAG | 3425 | CUGGUCUGUGUGCUAGAGGAGGG | 3712 | 6416 | 6438 |
| AD-1334573 | GGCCACUACGAUCACGGCCAC | 3426 | GUGGCCGUGAUCGUAGUGGCCGU | 3713 | 6464 | 6486 |
| AD-1334574 | CUCCUCAACUCCUGGGACAAC | 3427 | GUUGUCCCAGGAGUUGAGGAGGG | 3714 | 6503 | 6525 |
| AD-1334575 | CAGCAACACAGUGACUCCCUC | 3428 | GAGGGAGUCACUGUGUUGCUGGU | 3715 | 6572 | 6594 |
| AD-1334576 | UGCCCUAGGGACCACCCACAC | 3429 | GUGUGGGUGGUCCCUAGGGCAGA | 3716 | 6596 | 6618 |
| AD-1334577 | AGUGCCGAACACCAUGGCCAC | 3430 | GUGGCCAUGGUGUUCGGCACUGG | 3717 | 6623 | 6645 |
| AD-1334578 | AGCCUGGACUUCGGCCACCUC | 3431 | GAGGUGGCCGAAGUCCAGGCUGU | 3718 | 6692 | 6714 |
| AD-1334579 | ACCCACAUCACAGAGCCUUCC | 3432 | GGAAGGCUCUGUGAUGUGGGUGG | 3719 | 6729 | 6751 |
| AD-1334580 | GGUGACUUCCCACACCCUAGC | 3433 | GCUAGGGUGUGGGAAGUCACCGU | 3720 | 6752 | 6774 |
| AD-1334581 | CAACCACCGGUACCACCCAGC | 3434 | GCUGGGUGGUACCGGUGGUUGCU | 3721 | 6775 | 6797 |
| AD-1334582 | CGACUCCAGCCCUUUCCAGCC | 3435 | GGCUGGAAAGGGCUGGAGUCGAG | 3722 | 6799 | 6821 |
| AD-1334583 | UAGCAGCAGAACCACCGAGUC | 3436 | GACUCGGUGGUUCUGCUGCUAGG | 3723 | 6827 | 6849 |
| AD-1334584 | ACCCAGCAAGACCCGCACCUC | 3437 | GAGGUGCGGGUCUUGCUGGGUGU | 3724 | 6917 | 6939 |
| AD-1334585 | CGGUGGUGACCAUGGGCUGUG | 3438 | CACAGCCCAUGGUCACCACCGUG | 3725 | 6979 | 7001 |
| AD-1334586 | GUGGCUGGACUACAGCUACCC | 3439 | GGGUAGCUGUAGUCCAGCCACUC | 3726 | 7022 | 7044 |
| AD-1334587 | UUGACACCUACUCCAACAUCC | 3440 | GGAUGUUGGAGUAGGUGUCAAAG | 3727 | 7069 | 7091 |
| AD-1334588 | UUGGGCCAGGUCGUGGAAUGC | 3441 | GCAUUCCACGACCUGGCCCAACU | 3728 | 7173 | 7195 |
| AD-1334589 | CCUGGACUUUGGCCUGGUCUG | 3442 | CAGACCAGGCCAAAGUCCAGGCU | 3729 | 7196 | 7218 |
| AD-1334590 | AUGUGCUUCAACUAUGAAAUC | 3443 | GAUUUCAUAGUUGAAGCACAUCU | 3730 | 7248 | 7270 |
| AD-1334591 | UGUGUUCUGCUGCAACUACGG | 3444 | CCGUAGUUGCAGCAGAACACACG | 3731 | 7271 | 7293 |
| AD-1334592 | CAGCUCUACGGCCAUGCCCUC | 3445 | GAGGGCAUGGCCGUAGAGCUGGU | 3732 | 7316 | 7338 |
| AD-1334593 | AUCCUCACAGAGCUGACCACA | 1848 | UGUGGUCAGCUCUGUGAGGAUCC | 2172 | 7359 | 7381 |
| AD-1334594 | CCACUACGACUGAGUCCACUG | 3446 | CAGUGGACUCAGUCGUAGUGGCU | 3733 | 7384 | 7406 |
| AD-1334595 | GACCACCUGGAUCCUCACAGA | 1850 | UCUGUGAGGAUCCAGGUGGUCCC | 2174 | 7436 | 7458 |
| AD-1334596 | GAGCACUACAGCCACCGUGAC | 3447 | GUCACGGUGGCUGUAGUGCUCGG | 3734 | 7460 | 7482 |
| AD-1334597 | CCUCCACCCAGGCAACUGCUG | 3448 | CAGCAGUUGCCUGGGUGGAGGAG | 3735 | 7510 | 7532 |
| AD-1334598 | GGCCACGACACCCACAGUCAC | 3449 | GUGACUGUGGGUGUCGUGGCCGU | 3736 | 7553 | 7575 |
| AD-1334599 | GCUCCAAAGCCACUCCCUUCU | 179 | AGAAGGGAGUGGCUUUGGAGCUG | 510 | 7576 | 7598 |
| AD-1334559 | AGCACUGAGAAGCACAGCCAC | 3414 | GUGGCUGUGCUUCUCAGUGCUGG | 3701 | 7625 | 7647 |
| AD-1334600 | ACAGCUACCAGCUUUACAGCC | 3450 | GGCUGUAAAGCUGGUAGCUGUGG | 3737 | 7653 | 7675 |
| AD-1334562 | CCUAUCACAGACCACCACACC | 3417 | GGUGUGGUGGUCUGUGAUAGGCG | 3704 | 7709 | 7731 |
| AD-1334563 | CCACCAUGUCCACAGCCACAC | 3418 | GUGUGGCUGUGGACAUGGUGGCC | 3705 | 7735 | 7757 |
| AD-1334601 | UCCUCCACUCCAGAGACUGUC | 3451 | GACAGUCUCUGGAGUGGAGGAGG | 3738 | 7758 | 7780 |
| AD-1334602 | CCACAGUGCUUACCACCACGG | 3452 | CCGUGGUGGUAAGCACUGUGGAG | 3739 | 7786 | 7808 |
| AD-1334603 | GCUCACACUACCAAAGUGCUG | 3453 | CAGCACUUUGGUAGUGUGAGCUG | 3740 | 7863 | 7885 |
| AD-1334604 | UACCACAACCACGGGCUUCAC | 3454 | GUGAAGCCCGUGGUUGUGGUAGU | 3741 | 7886 | 7908 |
| AD-1334605 | CACGCUUCCAGUGUGGAUCAG | 3455 | CUGAUCCACACUGGAAGCGUGCG | 3742 | 7940 | 7962 |
| AD-1334606 | ACCCACAACCAGAGGUUCCAC | 3456 | GUGGAACCUCUGGUUGUGGGUGU | 3743 | 7973 | 7995 |
| AD-1334607 | UGACCACCACCACCACAACUG | 3457 | CAGUUGUGGUGGUGGUGGUCAGC | 3744 | 8041 | 8063 |
| AD-1334571 | GCCACUGGUUCUAUGGCAACA | 1826 | UGUUGCCAUAGAACCAGUGGCCA | 2150 | 8064 | 8086 |
| AD-1334572 | CUCCUCUAGCACACAGACCAG | 3425 | CUGGUCUGUGUGCUAGAGGAGGG | 3712 | 8087 | 8109 |
| AD-1334573 | GGCCACUACGAUCACGGCCAC | 3426 | GUGGCCGUGAUCGUAGUGGCCGU | 3713 | 8135 | 8157 |
| AD-1334608 | CUCCUCAACUCCAGGGACAAC | 3458 | GUUGUCCCUGGAGUUGAGGAGGG | 3745 | 8174 | 8196 |
| AD-1334609 | CAGCAGCACAGUGACUCCCUC | 3459 | GAGGGAGUCACUGUGCUGCUGGU | 3746 | 8243 | 8265 |
| AD-1334576 | UGCCCUAGGGACCACCCACAC | 3429 | GUGUGGGUGGUCCCUAGGGCAGA | 3716 | 8267 | 8289 |
| AD-1334610 | CACACACGGGCGAUCCCUGUC | 3460 | GACAGGGAUCGCCCGUGUGUGGU | 3747 | 8315 | 8337 |
| AD-1334578 | AGCCUGGACUUCGGCCACCUC | 3431 | GAGGUGGCCGAAGUCCAGGCUGU | 3718 | 8363 | 8385 |
| AD-1334579 | ACCCACAUCACAGAGCCUUCC | 3432 | GGAAGGCUCUGUGAUGUGGGUGG | 3719 | 8400 | 8422 |
| AD-1334611 | CCACCCAGCACUCGACUCCAG | 3461 | CUGGAGUCGAGUGCUGGGUGGUA | 3748 | 8458 | 8480 |
| AD-1334612 | CAGCCCUCACCCUAGCAGCAG | 3462 | CUGCUGCUAGGGUGAGGGCUGGA | 3749 | 8486 | 8508 |
| AD-1334584 | ACCCAGCAAGACCCGCACCUC | 3437 | GAGGUGCGGGUCUUGCUGGGUGU | 3724 | 8588 | 8610 |
| AD-1334585 | CGGUGGUGACCAUGGGCUGUG | 3438 | CACAGCCCAUGGUCACCACCGUG | 3725 | 8650 | 8672 |
| AD-1334586 | GUGGCUGGACUACAGCUACCC | 3439 | GGGUAGCUGUAGUCCAGCCACUC | 3726 | 8693 | 8715 |
| AD-1334587 | UUGACACCUACUCCAACAUCC | 3440 | GGAUGUUGGAGUAGGUGUCAAAG | 3727 | 8740 | 8762 |
| AD-1334588 | UUGGGCCAGGUCGUGGAAUGC | 3441 | GCAUUCCACGACCUGGCCCAACU | 3728 | 8844 | 8866 |
| AD-1334589 | CCUGGACUUUGGCCUGGUCUG | 3442 | CAGACCAGGCCAAAGUCCAGGCU | 3729 | 8867 | 8889 |
| AD-1334590 | AUGUGCUUCAACUAUGAAAUC | 3443 | GAUUUCAUAGUUGAAGCACAUCU | 3730 | 8919 | 8941 |
| AD-1334591 | UGUGUUCUGCUGCAACUACGG | 3444 | CCGUAGUUGCAGCAGAACACACG | 3731 | 8942 | 8964 |
| AD-1334613 | CUGGAUCCUCACAGAGCAGAC | 3463 | GUCUGCUCUGUGAGGAUCCAGGU | 3750 | 9026 | 9048 |
| AD-1334614 | CAGCCACUACGACCGCAACCA | 1869 | UGGUUGCGGUCGUAGUGGCUGCU | 2193 | 9052 | 9074 |
| AD-1334615 | UCCCAAAGUGCUGACCAGCAC | 3464 | GUGCUGGUCAGCACUUUGGGAGG | 3751 | 9119 | 9141 |
| AD-1334616 | CAGUUCCAAAGCCACUUCCUC | 3465 | GAGGAAGUGGCUUUGGAACUGGU | 3752 | 9161 | 9183 |
| AD-1334617 | CAAGGACUGCAACCACCCUUC | 3466 | GAAGGGUGGUUGCAGUCCUUGGA | 3753 | 9190 | 9212 |
| AD-1334618 | GUGCUGACAAGCACAGCCACC | 3467 | GGUGGCUGUGCUUGUCAGCACUG | 3754 | 9213 | 9235 |
| AD-1334619 | CACAGCUACCAGCUUUACACC | 3468 | GGUGUAAAGCUGGUAGCUGUGGA | 3755 | 9239 | 9261 |
| AD-1334620 | CUCCUUCACCCUUGGGACCAC | 3469 | GUGGUCCCAAGGGUGAAGGAGGG | 3756 | 9266 | 9288 |
| AD-1334621 | CCCAGAACAGACCACCACACC | 3470 | GGUGUGGUGGUCUGUUCUGGGAG | 3757 | 9296 | 9318 |
| AD-1334622 | CACCAUGUCCACAAUCCACCC | 3471 | GGGUGGAUUGUGGACAUGGUGGC | 3758 | 9323 | 9345 |
| AD-1334623 | CUCCACAGUGCUGACCACGAA | 1878 | UUCGUGGUCAGCACUGUGGAGGU | 2202 | 9371 | 9393 |
| AD-1334624 | GGCCACCAGUUCCAUGUCCAC | 3472 | GUGGACAUGGAACUGGUGGCCCU | 3759 | 9407 | 9429 |
| AD-1334593 | AUCCUCACAGAGCUGACCACA | 1848 | UGUGGUCAGCUCUGUGAGGAUCC | 2172 | 9456 | 9478 |
| AD-1334625 | CCACUACAACUGCAGCCACUG | 3473 | CAGUGGCUGCAGUUGUAGUGGCU | 3760 | 9481 | 9503 |
| AD-1334595 | GACCACCUGGAUCCUCACAGA | 1850 | UCUGUGAGGAUCCAGGUGGUCCC | 2174 | 9533 | 9555 |
| AD-1334626 | CAGCACUACAGCCACCGUGAC | 3474 | GUCACGGUGGCUGUAGUGCUGGG | 3761 | 9557 | 9579 |
| AD-1334627 | ACCCUCAAAGUGCUGACCAGC | 3475 | GCUGGUCAGCACUUUGAGGGUGC | 3762 | 9630 | 9652 |
| AD-1334628 | ACCCACAGUCAUCAGCUCCAG | 3476 | CUGGAGCUGAUGACUGUGGGUGU | 3763 | 9662 | 9684 |
| AD-1334629 | CCACUCCCUCCUCCAGUCCAG | 3477 | CUGGACUGGAGGAGGGAGUGGCU | 3764 | 9685 | 9707 |
| AD-1334559 | AGCACUGAGAAGCACAGCCAC | 3414 | GUGGCUGUGCUUCUCAGUGCUGG | 3701 | 9725 | 9747 |
| AD-1334630 | CUACCAGCGUUACAGCCAUCC | 3478 | GGAUGGCUGUAACGCUGGUAGCU | 3765 | 9757 | 9779 |
| AD-1334562 | CCUAUCACAGACCACCACACC | 3417 | GGUGUGGUGGUCUGUGAUAGGCG | 3704 | 9809 | 9831 |
| AD-1334563 | CCACCAUGUCCACAGCCACAC | 3418 | GUGUGGCUGUGGACAUGGUGGCC | 3705 | 9835 | 9857 |
| AD-1334631 | CCUCUACUCCAGAGACUGUCC | 3479 | GGACAGUCUCUGGAGUAGAGGAG | 3766 | 9859 | 9881 |
| AD-1334602 | CCACAGUGCUUACCACCACGA | 1857 | UCGUGGUGGUAAGCACUGUGGAG | 2181 | 9886 | 9908 |
| AD-1334632 | AGCUCACACUACCAAAGUGCC | 3480 | GGCACUUUGGUAGUGUGAGCUGU | 3767 | 9962 | 9984 |
| AD-1334633 | CUACCACAACCACGGGCUUCA | 1888 | UGAAGCCCGUGGUUGUGGUAGUC | 2212 | 9985 | 10007 |
| AD-1334568 | UCCAGUGUGGAUCAGCACAAC | 3422 | GUUGUGCUGAUCCACACUGGAGG | 3709 | 10046 | 10068 |
| AD-1334569 | ACCCACAACCAGAGGCUCCAC | 3423 | GUGGAGCCUCUGGUUGUGGGUGU | 3710 | 10073 | 10095 |
| AD-1334570 | CGCCACAGUGCUGACCACCAC | 3424 | GUGGUGGUCAGCACUGUGGCGGU | 3711 | 10130 | 10152 |
| AD-1334571 | GCCACUGGUUCUAUGGCAACA | 1826 | UGUUGCCAUAGAACCAGUGGCCA | 2150 | 10164 | 10186 |
| AD-1334572 | CUCCUCUAGCACACAGACCAG | 3425 | CUGGUCUGUGUGCUAGAGGAGGG | 3712 | 10187 | 10209 |
| AD-1334634 | GGCCACUACGAUCACAGCCAC | 3481 | GUGGCUGUGAUCGUAGUGGCCGU | 3768 | 10235 | 10257 |
| AD-1334608 | CUCCUCAACUCCAGGGACAAC | 3458 | GUUGUCCCUGGAGUUGAGGAGGG | 3745 | 10274 | 10296 |
| AD-1334609 | CAGCAGCACAGUGACUCCCUC | 3459 | GAGGGAGUCACUGUGCUGCUGGU | 3746 | 10343 | 10365 |
| AD-1334576 | UGCCCUAGGGACCACCCACAC | 3429 | GUGUGGGUGGUCCCUAGGGCAGA | 3716 | 10367 | 10389 |
| AD-1334635 | CACCACGGCCACCACACACGG | 3482 | CCGUGUGUGGUGGCCGUGGUGUU | 3769 | 10403 | 10425 |
| AD-1334578 | AGCCUGGACUUCGGCCACCUC | 3431 | GAGGUGGCCGAAGUCCAGGCUGU | 3718 | 10463 | 10485 |
| AD-1334579 | ACCCACAUCACAGAGCCUUCC | 3432 | GGAAGGCUCUGUGAUGUGGGUGG | 3719 | 10500 | 10522 |
| AD-1334636 | CAGCAGCAACCACCAGUACCA | 1891 | UGGUACUGGUGGUUGCUGCUGGG | 2215 | 10540 | 10562 |
| AD-1334612 | CAGCCCUCACCCUAGCAGCAG | 3462 | CUGCUGCUAGGGUGAGGGCUGGA | 3749 | 10586 | 10608 |
| AD-1334637 | CCUCCAGGACCACAGCCACAG | 3483 | CUGUGGCUGUGGUCCUGGAGGUG | 3770 | 10663 | 10685 |
| AD-1334584 | ACCCAGCAAGACCCGCACCUC | 3437 | GAGGUGCGGGUCUUGCUGGGUGU | 3724 | 10688 | 10710 |
| AD-1334638 | ACCACGGUGGUGACCACGGGC | 3484 | GCCCGUGGUCACCACCGUGGUUA | 3771 | 10746 | 10768 |
| AD-1334586 | GUGGCUGGACUACAGCUACCC | 3439 | GGGUAGCUGUAGUCCAGCCACUC | 3726 | 10793 | 10815 |
| AD-1334587 | UUGACACCUACUCCAACAUCC | 3440 | GGAUGUUGGAGUAGGUGUCAAAG | 3727 | 10840 | 10862 |
| AD-1334588 | UUGGGCCAGGUCGUGGAAUGC | 3441 | GCAUUCCACGACCUGGCCCAACU | 3728 | 10944 | 10966 |
| AD-1334589 | CCUGGACUUUGGCCUGGUCUG | 3442 | CAGACCAGGCCAAAGUCCAGGCU | 3729 | 10967 | 10989 |
| AD-1334590 | AUGUGCUUCAACUAUGAAAUC | 3443 | GAUUUCAUAGUUGAAGCACAUCU | 3730 | 11019 | 11041 |
| AD-1334591 | UGUGUUCUGCUGCAACUACGG | 3444 | CCGUAGUUGCAGCAGAACACACG | 3731 | 11042 | 11064 |
| AD-1334639 | CGGCCACGCCCUCCUCAACUC | 3485 | GAGUUGAGGAGGGCGUGGCCGUA | 3772 | 11095 | 11117 |
| AD-1334640 | CUGGAUCCUCACAAAGCUGAC | 3486 | GUCAGCUUUGUGAGGAUCCAGGU | 3773 | 11126 | 11148 |
| AD-1334594 | CCACUACGACUGAGUCCACUG | 3446 | CAGUGGACUCAGUCGUAGUGGCU | 3733 | 11155 | 11177 |
| AD-1334595 | GACCACCUGGAUCCUCACAGA | 1850 | UCUGUGAGGAUCCAGGUGGUCCC | 2174 | 11207 | 11229 |
| AD-1334596 | GAGCACUACAGCCACCGUGAC | 3447 | GUCACGGUGGCUGUAGUGCUCGG | 3734 | 11231 | 11253 |
| AD-1334597 | CCUCCACCCAGGCAACUGCUG | 3448 | CAGCAGUUGCCUGGGUGGAGGAG | 3735 | 11281 | 11303 |
| AD-1334598 | GGCCACGACACCCACAGUCAC | 3449 | GUGACUGUGGGUGUCGUGGCCGU | 3736 | 11324 | 11346 |
| AD-1334599 | GCUCCAAAGCCACUCCCUUCU | 179 | AGAAGGGAGUGGCUUUGGAGCUG | 510 | 11347 | 11369 |
| AD-1334559 | AGCACUGAGAAGCACAGCCAC | 3414 | GUGGCUGUGCUUCUCAGUGCUGG | 3701 | 11396 | 11418 |
| AD-1334600 | ACAGCUACCAGCUUUACAGCC | 3450 | GGCUGUAAAGCUGGUAGCUGUGG | 3737 | 11424 | 11446 |
| AD-1334562 | CCUAUCACAGACCACCACACC | 3417 | GGUGUGGUGGUCUGUGAUAGGCG | 3704 | 11480 | 11502 |
| AD-1334563 | CCACCAUGUCCACAGCCACAC | 3418 | GUGUGGCUGUGGACAUGGUGGCC | 3705 | 11506 | 11528 |
| AD-1334564 | UCCUCCACUCCAGAGACUGCC | 3419 | GGCAGUCUCUGGAGUGGAGGAGG | 3706 | 11529 | 11551 |
| AD-1334602 | CCACAGUGCUUACCACCACGG | 3452 | CCGUGGUGGUAAGCACUGUGGAG | 3739 | 11557 | 11579 |
| AD-1334632 | AGCUCACACUACCAAAGUGCC | 3480 | GGCACUUUGGUAGUGUGAGCUGU | 3767 | 11633 | 11655 |
| AD-1334633 | CUACCACAACCACGGGCUUCA | 1888 | UGAAGCCCGUGGUUGUGGUAGUC | 2212 | 11656 | 11678 |
| AD-1334568 | UCCAGUGUGGAUCAGCACAAC | 3422 | GUUGUGCUGAUCCACACUGGAGG | 3709 | 11717 | 11739 |
| AD-1334641 | ACCCACAACCAGUGGCUCCAC | 3487 | GUGGAGCCACUGGUUGUGGGUGU | 3774 | 11744 | 11766 |
| AD-1334607 | UGACCACCACCACCACAACUG | 3457 | CAGUUGUGGUGGUGGUGGUCAGC | 3744 | 11812 | 11834 |
| AD-1334571 | GCCACUGGUUCUAUGGCAACA | 1826 | UGUUGCCAUAGAACCAGUGGCCA | 2150 | 11835 | 11857 |
| AD-1334572 | CUCCUCUAGCACACAGACCAG | 3425 | CUGGUCUGUGUGCUAGAGGAGGG | 3712 | 11858 | 11880 |
| AD-1334573 | GGCCACUACGAUCACGGCCAC | 3426 | GUGGCCGUGAUCGUAGUGGCCGU | 3713 | 11906 | 11928 |
| AD-1334608 | CUCCUCAACUCCAGGGACAAC | 3458 | GUUGUCCCUGGAGUUGAGGAGGG | 3745 | 11945 | 11967 |
| AD-1334609 | CAGCAGCACAGUGACUCCCUC | 3459 | GAGGGAGUCACUGUGCUGCUGGU | 3746 | 12014 | 12036 |
| AD-1334576 | UGCCCUAGGGACCACCCACAC | 3429 | GUGUGGGUGGUCCCUAGGGCAGA | 3716 | 12038 | 12060 |
| AD-1334610 | CACACACGGGCGAUCCCUGUC | 3460 | GACAGGGAUCGCCCGUGUGUGGU | 3747 | 12086 | 12108 |
| AD-1334578 | AGCCUGGACUUCGGCCACCUC | 3431 | GAGGUGGCCGAAGUCCAGGCUGU | 3718 | 12134 | 12156 |
| AD-1334579 | ACCCACAUCACAGAGCCUUCC | 3432 | GGAAGGCUCUGUGAUGUGGGUGG | 3719 | 12171 | 12193 |
| AD-1334611 | CCACCCAGCACUCGACUCCAG | 3461 | CUGGAGUCGAGUGCUGGGUGGUA | 3748 | 12229 | 12251 |
| AD-1334612 | CAGCCCUCACCCUAGCAGCAG | 3462 | CUGCUGCUAGGGUGAGGGCUGGA | 3749 | 12257 | 12279 |
| AD-1334584 | ACCCAGCAAGACCCGCACCUC | 3437 | GAGGUGCGGGUCUUGCUGGGUGU | 3724 | 12359 | 12381 |
| AD-1334638 | ACCACGGUGGUGACCACGGGC | 3484 | GCCCGUGGUCACCACCGUGGUUA | 3771 | 12417 | 12439 |
| AD-1334586 | GUGGCUGGACUACAGCUACCC | 3439 | GGGUAGCUGUAGUCCAGCCACUC | 3726 | 12464 | 12486 |
| AD-1334587 | UUGACACCUACUCCAACAUCC | 3440 | GGAUGUUGGAGUAGGUGUCAAAG | 3727 | 12511 | 12533 |
| AD-1334588 | UUGGGCCAGGUCGUGGAAUGC | 3441 | GCAUUCCACGACCUGGCCCAACU | 3728 | 12615 | 12637 |
| AD-1334589 | CCUGGACUUUGGCCUGGUCUG | 3442 | CAGACCAGGCCAAAGUCCAGGCU | 3729 | 12638 | 12660 |
| AD-1334590 | AUGUGCUUCAACUAUGAAAUC | 3443 | GAUUUCAUAGUUGAAGCACAUCU | 3730 | 12690 | 12712 |
| AD-1334591 | UGUGUUCUGCUGCAACUACGG | 3444 | CCGUAGUUGCAGCAGAACACACG | 3731 | 12713 | 12735 |
| AD-1334592 | CAGCUCUACGGCCAUGCCCUC | 3445 | GAGGGCAUGGCCGUAGAGCUGGU | 3732 | 12758 | 12780 |
| AD-1334642 | GACGACCUGGAUCCUCACAGA | 1897 | UCUGUGAGGAUCCAGGUCGUCCC | 2221 | 12791 | 12813 |
| AD-1334643 | UGACCACAACAGCCACUACGA | 1898 | UCGUAGUGGCUGUUGUGGUCAGC | 2222 | 12814 | 12836 |
| AD-1334644 | AUCCACUGGAUCCACGGCCAC | 3488 | GUGGCCGUGGAUCCAGUGGAUGC | 3775 | 12839 | 12861 |
| AD-1334645 | CUCCCAAAGUGCUGACCAGCC | 3489 | GGCUGGUCAGCACUUUGGGAGGG | 3776 | 12889 | 12911 |
| AD-1334616 | CAGUUCCAAAGCCACUUCCUC | 3465 | GAGGAAGUGGCUUUGGAACUGGU | 3752 | 12932 | 12954 |
| AD-1334617 | CAAGGACUGCAACCACCCUUC | 3466 | GAAGGGUGGUUGCAGUCCUUGGA | 3753 | 12961 | 12983 |
| AD-1334646 | CCACCAAAUCCACAGCUACCA | 1901 | UGGUAGCUGUGGAUUUGGUGGCU | 2225 | 13000 | 13022 |
| AD-1334621 | CCCAGAACAGACCACCACACC | 3470 | GGUGUGGUGGUCUGUUCUGGGAG | 3757 | 13067 | 13089 |
| AD-1334622 | CACCAUGUCCACAAUCCACCC | 3471 | GGGUGGAUUGUGGACAUGGUGGC | 3758 | 13094 | 13116 |
| AD-1334623 | CUCCACAGUGCUGACCACGAA | 1878 | UUCGUGGUCAGCACUGUGGAGGU | 2202 | 13142 | 13164 |
| AD-1334647 | GGCCACCAGUUCCACGUCCAC | 3490 | GUGGACGUGGAACUGGUGGCCCU | 3777 | 13178 | 13200 |
| AD-1334593 | AUCCUCACAGAGCUGACCACA | 1848 | UGUGGUCAGCUCUGUGAGGAUCC | 2172 | 13227 | 13249 |
| AD-1334625 | CCACUACAACUGCAGCCACUG | 3473 | CAGUGGCUGCAGUUGUAGUGGCU | 3760 | 13252 | 13274 |
| AD-1334595 | GACCACCUGGAUCCUCACAGA | 1850 | UCUGUGAGGAUCCAGGUGGUCCC | 2174 | 13304 | 13326 |
| AD-1334643 | UGACCACAACAGCCACUACGA | 1898 | UCGUAGUGGCUGUUGUGGUCAGC | 2222 | 13327 | 13349 |
| AD-1334595 | GACCACCUGGAUCCUCACAGA | 1850 | UCUGUGAGGAUCCAGGUGGUCCC | 2174 | 13391 | 13413 |
| AD-1334596 | GAGCACUACAGCCACCGUGAC | 3447 | GUCACGGUGGCUGUAGUGCUCGG | 3734 | 13415 | 13437 |
| AD-1334597 | CCUCCACCCAGGCAACUGCUG | 3448 | CAGCAGUUGCCUGGGUGGAGGAG | 3735 | 13465 | 13487 |
| AD-1334648 | UGAGCACCACGGCCACGACAC | 3491 | GUGUCGUGGCCGUGGUGCUCACA | 3778 | 13498 | 13520 |
| AD-1334557 | CAGCUCCAAAGCCACUCCCUC | 3412 | GAGGGAGUGGCUUUGGAGCUGGU | 3699 | 13529 | 13551 |
| AD-1334649 | CCAGGGACUGCAACUGCCCUU | 3492 | AAGGGCAGUUGCAGUCCCUGGAC | 3779 | 13557 | 13579 |
| AD-1334559 | AGCACUGAGAAGCACAGCCAC | 3414 | GUGGCUGUGCUUCUCAGUGCUGG | 3701 | 13580 | 13602 |
| AD-1334600 | ACAGCUACCAGCUUUACAGCC | 3450 | GGCUGUAAAGCUGGUAGCUGUGG | 3737 | 13608 | 13630 |
| AD-1334562 | CCUAUCACAGACCACCACACC | 3417 | GGUGUGGUGGUCUGUGAUAGGCG | 3704 | 13664 | 13686 |
| AD-1334563 | CCACCAUGUCCACAGCCACAC | 3418 | GUGUGGCUGUGGACAUGGUGGCC | 3705 | 13690 | 13712 |
| AD-1334601 | UCCUCCACUCCAGAGACUGUC | 3451 | GACAGUCUCUGGAGUGGAGGAGG | 3738 | 13713 | 13735 |
| AD-1334565 | CUCCACAGUGCUUACCGCCAC | 3420 | GUGGCGGUAAGCACUGUGGAGGU | 3707 | 13739 | 13761 |
| AD-1334632 | AGCUCACACUACCAAAGUGCC | 3480 | GGCACUUUGGUAGUGUGAGCUGU | 3767 | 13817 | 13839 |
| AD-1334633 | CUACCACAACCACGGGCUUCA | 1888 | UGAAGCCCGUGGUUGUGGUAGUC | 2212 | 13840 | 13862 |
| AD-1334568 | UCCAGUGUGGAUCAGCACAAC | 3422 | GUUGUGCUGAUCCACACUGGAGG | 3709 | 13901 | 13923 |
| AD-1334641 | ACCCACAACCAGUGGCUCCAC | 3487 | GUGGAGCCACUGGUUGUGGGUGU | 3774 | 13943 | 13965 |
| AD-1334650 | CGCCAGAGUGCUGACCACCAC | 3493 | GUGGUGGUCAGCACUCUGGCGGU | 3780 | 14000 | 14022 |
| AD-1334571 | GCCACUGGUUCUAUGGCAACA | 1826 | UGUUGCCAUAGAACCAGUGGCCA | 2150 | 14034 | 14056 |
| AD-1334572 | CUCCUCUAGCACACAGACCAG | 3425 | CUGGUCUGUGUGCUAGAGGAGGG | 3712 | 14057 | 14079 |
| AD-1334573 | GGCCACUACGAUCACGGCCAC | 3426 | GUGGCCGUGAUCGUAGUGGCCGU | 3713 | 14105 | 14127 |
| AD-1334651 | CAGGGACAACACCCAUCACCC | 3494 | GGGUGAUGGGUGUUGUCCCUGGA | 3781 | 14155 | 14177 |
| AD-1334652 | CUCCAAAGCCACUUCCUCCUC | 3495 | GAGGAGGAAGUGGCUUUGGAGCU | 3782 | 14216 | 14238 |
| AD-1334617 | CAAGGACUGCAACCACCCUUC | 3466 | GAAGGGUGGUUGCAGUCCUUGGA | 3753 | 14242 | 14264 |
| AD-1334653 | UGCUGACAAGCACAGCCACAA | 1908 | UUGUGGCUGUGCUUGUCAGCACU | 2232 | 14266 | 14288 |
| AD-1334619 | CACAGCUACCAGCUUUACACC | 3468 | GGUGUAAAGCUGGUAGCUGUGGA | 3755 | 14291 | 14313 |
| AD-1334654 | CUCCACCCUGUGGACCACGUG | 3496 | CACGUGGUCCACAGGGUGGAGGA | 3783 | 14321 | 14343 |
| AD-1334655 | CCCAGCACAGACCACCACACC | 3497 | GGUGUGGUGGUCUGUGCUGGGAC | 3784 | 14348 | 14370 |
| AD-1334656 | GUCCACCAUGUCCACAAUCCA | 1911 | UGGAUUGUGGACAUGGUGGACAU | 2235 | 14372 | 14394 |
| AD-1334657 | CUCCUCUACUCCAGAGACCAC | 3498 | GUGGUCUCUGGAGUAGAGGAGGU | 3785 | 14396 | 14418 |
| AD-1334658 | CUCCACAGUGCUGACCACCAC | 3499 | GUGGUGGUCAGCACUGUGGAGGU | 3786 | 14423 | 14445 |
| AD-1334659 | GGCCACCAAUUCCACGGCCAC | 3500 | GUGGCCGUGGAAUUGGUGGCCCU | 3787 | 14459 | 14481 |
| AD-1334660 | UGACCACAACAGCCACUACAA | 1915 | UUGUAGUGGCUGUUGUGGUCAGC | 2239 | 14521 | 14543 |
| AD-1334661 | UGGAUCCACGGCCACCCUGUC | 3501 | GACAGGGUGGCCGUGGAUCCAGU | 3788 | 14552 | 14574 |
| AD-1334595 | GACCACCUGGAUCCUCACAGA | 1850 | UCUGUGAGGAUCCAGGUGGUCCC | 2174 | 14585 | 14607 |
| AD-1334662 | GAGCACUAUAGCCACCGUGAU | 3502 | AUCACGGUGGCUAUAGUGCUCGG | 3789 | 14609 | 14631 |
| AD-1334663 | CCACUCUGGGAACAGCUCACA | 1918 | UGUGAGCUGUUCCCAGAGUGGAG | 2242 | 14662 | 14684 |
| AD-1334664 | CAUGGCCACUAUGCCCACAGC | 3503 | GCUGUGGGCAUAGUGGCCAUGGU | 3790 | 14702 | 14724 |
| AD-1334665 | UGCCUCCACGGUUCCCAGCUC | 3504 | GAGCUGGGAACCGUGGAGGCAGU | 3791 | 14726 | 14748 |
| AD-1334666 | GCCAACCUUCAGCGUGUCCAC | 3505 | GUGGACACGCUGAAGGUUGGCAG | 3792 | 14795 | 14817 |
| AD-1334667 | UCCUCCUCAGUCCUCACCACC | 3506 | GGUGGUGAGGACUGAGGAGGACA | 3793 | 14820 | 14842 |
| AD-1334668 | UCCCACUUCUCUACUCCCUGC | 3507 | GCAGGGAGUAGAGAAGUGGGAGC | 3794 | 14865 | 14887 |
| AD-1334669 | GCAUUUGGACAGUUUUUCUCG | 3508 | CGAGAAAAACUGUCCAAAUGCCC | 3795 | 14895 | 14917 |
| AD-1334670 | GAAGUCAUCUACAAUAAGACC | 3509 | GGUCUUAUUGUAGAUGACUUCCC | 3796 | 14922 | 14944 |
| AD-1334671 | CUGCCAUUUCUACGCAGUGUG | 3510 | CACACUGCGUAGAAAUGGCAGCC | 3797 | 14954 | 14976 |
| AD-1334672 | CACUGUGACAUUGACCGCUUC | 3511 | GAAGCGGUCAAUGUCACAGUGCU | 3798 | 14982 | 15004 |
| AD-1334673 | UGUGACAAUGCCAUCCCUCUC | 3512 | GAGAGGGAUGGCAUUGUCACAGC | 3799 | 15075 | 15097 |
| AD-1334674 | ACCCUGGAGAACUGCACGGUG | 3513 | CACCGUGCAGUUCUCCAGGGUCC | 3800 | 15117 | 15139 |
| AD-1334675 | GUGGGUGACAACCGUGUCGUC | 3514 | GACGACACGGUUGUCACCCACGC | 3801 | 15147 | 15169 |
| AD-1334676 | GACCCAAAGCCUGUGGCCAAC | 3515 | GUUGGCCACAGGCUUUGGGUCCA | 3802 | 15174 | 15196 |
| AD-1334677 | CUGCGUGAACAAGCACCUGCC | 3516 | GGCAGGUGCUUGUUCACGCAGGU | 3803 | 15200 | 15222 |
| AD-1334678 | UCAAAGUGUCGGACCCGAGCC | 3517 | GGCUCGGGUCCGACACUUUGAUG | 3804 | 15223 | 15245 |
| AD-1334679 | CCUGUGACUUCCACUAUGAGU | 3518 | ACUCAUAGUGGAAGUCACAGGGC | 3805 | 15247 | 15269 |
| AD-1334680 | GAGUGCAUCUGCAGCAUGUGG | 3519 | CCACAUGCUGCAGAUGCACUCGC | 3806 | 15270 | 15292 |
| AD-1334681 | CCCACUAUUCCACCUUUGACG | 3520 | CGUCAAAGGUGGAAUAGUGGGAG | 3807 | 15298 | 15320 |
| AD-1334682 | ACCUAUGUCCUCAUGAGAGAG | 3521 | CUCUCUCAUGAGGACAUAGGUGC | 3808 | 15348 | 15370 |
| AD-1334683 | CACGCUUUGGGAAUCUCAGCC | 3522 | GGCUGAGAUUCCCAAAGCGUGCA | 3809 | 15376 | 15398 |
| AD-1334684 | CUGGACAACCACUACUGCACG | 3523 | CGUGCAGUAGUGGUUGUCCAGGU | 3810 | 15402 | 15424 |
| AD-1334685 | CUCAGCAUCCACUACAAGUCC | 3524 | GGACUUGUAGUGGAUGCUGAGGG | 3811 | 15462 | 15484 |
| AD-1334686 | GUCCUCACUGUCACCAUGGUG | 3525 | CACCAUGGUGACAGUGAGGACGA | 3812 | 15492 | 15514 |
| AD-1334687 | CCUGAUCCUGUUUGACCAAAU | 3526 | AUUUGGUCAAACAGGAUCAGGCC | 3813 | 15530 | 15552 |
| AD-1334688 | AGCGGUUUCAGCAAGAACGGC | 3527 | GCCGUUCUUGCUGAAACCGCUGC | 3814 | 15561 | 15583 |
| AD-1334689 | CGUGUGGACAUUCCUGCCCUG | 3528 | CAGGGCAGGAAUGUCCACACGCA | 3815 | 15615 | 15637 |
| AD-1334690 | GUGAGCGUCACCUUCAAUGGC | 3529 | GCCAUUGAAGGUGACGCUCACGC | 3816 | 15639 | 15661 |
| AD-1334691 | AGCCUCUUCCACAACAACACC | 3530 | GGUGUUGUUGUGGAAGAGGCUGU | 3817 | 15687 | 15709 |
| AD-1334692 | UGCACCAACAACCAGAGGGAC | 3531 | GUCCCUCUGGUUGUUGGUGCAGG | 3818 | 15726 | 15748 |
| AD-1334693 | UGUCUCCAGCGGGACGGAACC | 3532 | GGUUCCGUCCCGCUGGAGACAGU | 3819 | 15750 | 15772 |
| AD-1334694 | CGCCAGUUGCAAGGACAUGGC | 3533 | GCCAUGUCCUUGCAACUGGCGGC | 3820 | 15776 | 15798 |
| AD-1334695 | CGACAGCAGAAAGGAUGGCUG | 3534 | CAGCCAUCCUUUCUGCUGUCGGG | 3821 | 15815 | 15837 |
| AD-1334696 | CCGCUCUGUGAUCUGAUGCUG | 3535 | CAGCAUCAGAUCACAGAGCGGCU | 3822 | 15921 | 15943 |
| AD-1334697 | CAGGUCUUUGCUGAGUGCCAC | 3536 | GUGGCACUCAGCAAAGACCUGGC | 3823 | 15945 | 15967 |
| AD-1334698 | GGGCCCAUUCUUCAACGCCUG | 3537 | CAGGCGUUGAAGAAUGGGCCCGG | 3824 | 15980 | 16002 |
| AD-1334699 | GAGGCUUACGCAGAGCUCUGC | 3538 | GCAGAGCUCUGCGUAAGCCUCCA | 3825 | 16050 | 16072 |
| AD-1334700 | AGUGUGCAGUGACUGGCGAGG | 3539 | CCUCGCCAGUCACUGCACACUCC | 3826 | 16082 | 16104 |
| AD-1334701 | CCACCAAAGUGUACAAGCCAU | 3540 | AUGGCUUGUACACUUUGGUGGGU | 3827 | 16138 | 16160 |
| AD-1334702 | CUGCAACUCUAGGAACCAGAG | 3541 | CUCUGGUUCCUAGAGUUGCAGGU | 3828 | 16181 | 16203 |
| AD-1334703 | CAGAUCCUCUUCAACGCACAC | 3542 | GUGUGCGUUGAAGAGGAUCUGGU | 3829 | 16248 | 16270 |
| AD-1334704 | GGGCAUCUGCGUGCAGGCCUG | 3543 | CAGGCCUGCACGCAGAUGCCCAU | 3830 | 16271 | 16293 |
| AD-1334705 | CGAUGGGUUUCCUAAAUUUCC | 3544 | GGAAAUUUAGGAAACCCAUCGGG | 3831 | 16307 | 16329 |
| AD-1334706 | GGUCAGCAACUGCCAGUCCUG | 3545 | CAGGACUGGCAGUUGCUGACCCA | 3832 | 16340 | 16362 |
| AD-1334707 | GAGGGUUCAGUGUCGGUGCAG | 3546 | CUGCACCGACACUGAACCCUCGU | 3833 | 16371 | 16393 |
| AD-1334708 | CGGCUUCGUAACCGUGACCAG | 3547 | CUGGUCACGGUUACGAAGCCGGG | 3834 | 16445 | 16467 |
| AD-1334709 | CGUGUGCAACACAACCACCUG | 3548 | CAGGUGGUUGUGUUGCACACGCA | 3835 | 16505 | 16527 |
| AD-1334710 | CAGGAGUCCAUCUGCACCCAG | 3549 | CUGGGUGCAGAUGGACUCCUGCC | 3836 | 16557 | 16579 |
| AD-1334711 | CUGUCCCACCUUCCGCUGCAG | 3550 | CUGCAGCGGAAGGUGGGACAGCA | 3837 | 16592 | 16614 |
| AD-1334712 | UCAGCUGUGUUCGUACAAUGG | 3551 | CCAUUGUACGAACACAGCUGAGG | 3838 | 16616 | 16638 |
| AD-1334713 | UUGGUGCAACCUUCCCAGGCG | 3552 | CGCCUGGGAAGGUUGCACCAACC | 3839 | 16651 | 16673 |
| AD-1334714 | UCCCUGCCACAUGUGUACCUG | 3553 | CAGGUACACAUGUGGCAGGGAAG | 3840 | 16676 | 16698 |
| AD-1334715 | ACGGUGCAAUGUCAGGAGGAU | 3554 | AUCCUCCUGACAUUGCACCGUUG | 3841 | 16722 | 16744 |
| AD-1334716 | CUGCAACAAUACUACCUGUCC | 3555 | GGACAGGUAGUAUUGUUGCAGGC | 3842 | 16745 | 16767 |
| AD-1334717 | GGGCUUUGAGUACAAGAGAGU | 3556 | ACUCUCUUGUACUCAAAGCCCUG | 3843 | 16769 | 16791 |
| AD-1334718 | GUCCAGCUGAAUGAAACCUGG | 3557 | CCAGGUUUCAUUCAGCUGGACUG | 3844 | 16851 | 16873 |
| AD-1334719 | CAACAGCCAUGUGGACAACUG | 3558 | CAGUUGUCCACAUGGCUGUUGAC | 3845 | 16874 | 16896 |
| AD-1334720 | CCGUGUACCUCUGUGAGGCUG | 3559 | CAGCCUCACAGAGGUACACGGUG | 3846 | 16897 | 16919 |
| AD-1334721 | GGUGGAGUCCAUUUGCUGACC | 3560 | GGUCAGCAAAUGGACUCCACCCU | 3847 | 16920 | 16942 |
| AD-1334722 | CUGCCCAGAUGUGUCCAGCUG | 3561 | CAGCUGGACACAUCUGGGCAGGA | 3848 | 16955 | 16977 |
| AD-1334723 | GCUGCUACUCCUGUGAGGAGG | 3562 | CCUCCUCACAGGAGUAGCAGCAG | 3849 | 17002 | 17024 |
| AD-1334724 | UCCUGUCAAGUCCGCAUCAAC | 3563 | GUUGAUGCGGACUUGACAGGAGU | 3850 | 17025 | 17047 |
| AD-1334725 | GACCAUCCUGUGGCACCAGGG | 3564 | CCCUGGUGCCACAGGAUGGUCGU | 3851 | 17048 | 17070 |
| AD-1320631 | GGUCAACAUCACCUUCUGCGA | 1981 | UCGCAGAAGGUGAUGUUGACCUC | 2305 | 17081 | 17103 |
| AD-1334726 | CGUCCAAGUACUCAGCAGAGG | 3565 | CCUCUGCUGAGUACUUGGACGCU | 3852 | 17119 | 17141 |
| AD-1334727 | AUGCAGCACCAGUGCACCUGC | 3566 | GCAGGUGCACUGGUGCUGCAUGG | 3853 | 17148 | 17170 |
| AD-1334728 | GCCCUUGCACUGUCCUAACGG | 3567 | CCGUUAGGACAGUGCAAGGGCAC | 3854 | 17201 | 17223 |
| AD-1334729 | CUGCACACCUACACCCACGUG | 3568 | CACGUGGGUGUAGGUGUGCAGGA | 3855 | 17232 | 17254 |
| AD-1334730 | GCACGCCCUUCUGUGUCCCUG | 3569 | CAGGGACACAGAAGGGCGUGCAG | 3856 | 17266 | 17288 |
| AD-1334731 | ACUGCUGUCUGAGAACGUUCU | 336 | AGAACGUUCUCAGACAGCAGUGG | 668 | 17334 | 17356 |
| AD-1334732 | CAUGCUCUGUCCACCUGGAGC | 3570 | GCUCCAGGUGGACAGAGCAUGGG | 3857 | 17366 | 17388 |
| AD-1334733 | GCAUUGUCUGAUCAUGAAAAC | 3571 | GUUUUCAUGAUCAGACAAUGCAC | 3858 | 17395 | 17417 |
| AD-1334734 | GGCGCCACUCAGGAGUCCUAC | 3572 | GUAGGACUCCUGAGUGGCGCCCU | 3859 | 17542 | 17564 |
| AD-1334735 | CUCCCUGAUGUCACUGGGACG | 3573 | CGUCCCAGUGACAUCAGGGAGGG | 3860 | 17598 | 17620 |
| AD-1334736 | CUGGAACAAACUAAGCAUGUG | 3574 | CACAUGCUUAGUUUGUUCCAGGG | 3861 | 17621 | 17643 |
| AD-1334737 | GCACGGAUUCCAGCUGGCCAC | 3575 | GUGGCCAGCUGGAAUCCGUGCUG | 3862 | 17682 | 17704 |
| AD-1334738 | GACAGGCUGGUCCAGGCAAGG | 3576 | CCUUGCCUGGACCAGCCUGUCUG | 3863 | 17720 | 17742 |
| AD-1334739 | GCUGCCAGGAAGCUGCGACAG | 3577 | CUGUCGCAGCUUCCUGGCAGCAG | 3864 | 17747 | 17769 |
| AD-1334740 | GCAGGGUAACUCAGGGCUGAG | 3578 | CUCAGCCCUGAGUUACCCUGCAG | 3865 | 17796 | 17818 |
| AD-1334741 | GCAACGGCCAGGUCAGAGAGG | 3579 | CCUCUCUGACCUGGCCGUUGCGA | 3866 | 17820 | 17842 |
| AD-1334742 | AGCCCAGUUUUGCAAAUAAAC | 3580 | GUUUAUUUGCAAAACUGGGCUGG | 3867 | 17874 | 17896 |

TABLE 7
Modified Sense and Antisense Strand MUC5B dsRNA Sequences

| | | SEQ | | SEQ | mRNA Target | SEQ |
|---|---|---|---|---|---|---|
| Duplex | Sense Sequence | ID | Antisense Sequence | ID | Sequence | ID |
| Name | 5′ to 3′ | NO: | 5′ to 3′ | NO: | 5′ to 3′ | NO: |
| AD-1334421 | ususggc(Uhd)CfuGfG | 3868 | VPusAfsgcaUfgGfCfc | 2647 | TGTTGGCTCTGGCGGCCA | 2971 |
| | fCfggccaugcsusa | | gccAfgAfgccaascsa | | TGCTC | |
| AD-1334422 | csusggg(Ahd)GfaAfU | 3869 | VPusUfsgugCfcCfUfg | 2648 | AGCTGGGAGAATGCAGGG | 2972 |
| | fGfcagggcacsasa | | cauUfcUfcccagscsu | | CACAC | |
| AD-1334423 | gscsgcg(Uhd)GfaGfC | 3870 | VPusGfsuggAfaCfAfa | 2649 | CGGCGCGTGAGCTTTGTT | 2973 |
| | fUfuuguuccascsa | | agcUfcAfcgcgcscsg | | CCACC | |
| AD-1334424 | usgsggc(Ghd)GfgUfG | 3871 | VPusAfsgguGfcUfGfc | 2650 | AATGGGCGGGTGTGCAGC | 2974 |
| | fUfgcagcaccsusa | | acaCfcCfgcccasusu | | ACCTG | |
| AD-1334425 | cscsacu(Ahd)CfaAfG | 3872 | VPusCfsgucGfaAfGfg | 2651 | TTCCACTACAAGACCTTC | 2975 |
| | fAfccuucgacsgsa | | ucuUfgUfaguggsasa | | GACGG | |
| AD-1334426 | cscsuuu(Ghd)CfaAfC | 3873 | VPusAfsgaaCfaCfGfu | 2652 | GGCCTTTGCAACTACGTG | 2976 |
| | fUfacguguucsusa | | aguUfgCfaaaggscsc | | TTCTC | |
| AD-1334427 | gsasgga(Chd)UfuCfA | 3874 | VPusAfsgcuGfgAfCfg | 2653 | ACGAGGACTTCAACGTCC | 2977 |
| | fAfcguccagcsusa | | uugAfaGfuccucsgsu | | AGCTA | |
| AD-1334428 | ascsccg(Uhd)GfuUfG | 3875 | VPusGfsccuUfgAfUfg | 2654 | TCACCCGTGTTGTCATCA | 2978 |
| | fUfcaucaaggscsa | | acaAfcAfcgggusgsa | | AGGCC | |
| AD-1334429 | gsgscuc(Chd)GfuCfC | 3876 | VPusCfscauUfgAfUfg | 2655 | ACGGCTCCGTCCTCATCA | 2979 |
| | fUfcaucaaugsgsa | | aggAfcGfgagccsgsu | | ATGGG | |
| AD-1334430 | gscsugc(Chd)UfuAfC | 3877 | VPusCfsaguGfcGfGfc | 2656 | GAGCTGCCTTACAGCCGC | 2980 |
| | fAfgccgcacusgsa | | uguAfaGfgcagcsusc | | ACTGG | |
| AD-1334431 | gsascua(Chd)AfuCfA | 3878 | VPusAfsugcUfgAfCfc | 2657 | GGGACTACATCAAGGTCA | 2981 |
| | fAfggucagcasusa | | uugAfuGfuagucscsc | | GCATC | |
| AD-1334432 | gscsuga(Chd)AfuUfC | 3879 | VPusCfsguuCfcAfCfa | 2658 | GTGCTGACATTCCTGTGG | 2982 |
| | fCfuguggaacsgsa | | ggaAfuGfucagcsasc | | AACGG | |
| AD-1334433 | csusgga(Uhd)CfcCfA | 3880 | VPusUfsuggCfgUfAfu | 2659 | AGCTGGATCCCAAATACG | 2983 |
| | fAfauacgccasasa | | uugGfgAfuccagscsu | | CCAAC | |
| AD-1334434 | gscscuu(Chd)AfaCfG | 3881 | VPusGfscauAfgAfAfc | 2660 | CGGCCTTCAACGAGTTCT | 2984 |
| | fAfguucuaugscsa | | ucgUfuGfaaggcscsg | | ATGCC | |
| AD-1334435 | asasccu(Ghd)CfaGfA | 3882 | VPusCfscauCfcAfAfc | 2661 | GGAACCTGCAGAAGTTGG | 2985 |
| | fAfguuggaugsgsa | | uucUfgCfagguuscsc | | ATGGG | |
| AD-1334436 | usgscac(Ghd)GfaCfG | 3883 | VPusAfsugcCfcUfCfc | 2662 | ACTGCACGGACGAGGAGG | 2986 |
| | fAfggagggcasusa | | ucgUfcCfgugcasgsu | | GCATC | |
| AD-1334437 | ususugc(Ghd)GfaGfU | 3884 | VPusAfsgugCfgUfGfg | 2663 | CCTTTGCGGAGTGCCACG | 2987 |
| | fGfccacgcacsusa | | cacUfcCfgcaaasgsg | | CACTG | |
| AD-1334438 | gsascag(Chd)AfcUfG | 3885 | VPusGfsccaGfgUfAfc | 2664 | TGGACAGCACTGCGTACC | 2988 |
| | fCfguaccuggscsa | | gcaGfuGfcugucscsa | | TGGCC | |
| AD-1334439 | gscscac(Chd)UfuUfG | 3886 | VPusGfsaguAfuUfCfc | 2665 | GTGCCACCTTTGTGGAAT | 2989 |
| | fUfggaauacuscsa | | acaAfaGfguggcsasc | | ACTCA | |
| AD-1334440 | csusgga(Ghd)GfuGfC | 3887 | VPusAfsgagCfuCfAfg | 2666 | AACTGGAGGTGCCCTGAG | 2990 |
| | fCfcugagcucsusa | | ggcAfcCfuccagsusu | | CTCTG | |
| AD-1334441 | csuscaa(Chd)AfuGfC | 3888 | VPusUfsccuGfgUfGfc | 2667 | CCCTCAACATGCAGCACC | 2991 |
| | fAfgcaccaggsasa | | ugcAfuGfuugagsgsg | | AGGAG | |
| AD-1334442 | ascsccu(Ghd)CfaCfG | 3889 | VPusAfsgcaGfgUfGfu | 2668 | TCACCCTGCACGGACACC | 2992 |
| | fGfacaccugcsusa | | ccgUfgCfagggusgsa | | TGCTC | |
| AD-1334443 | gsgsacc(Ahd)CfuGfU | 3890 | VPusAfsgccGfuCfCfa | 2669 | GAGGACCACTGTGTGGAC | 2993 |
| | fGfuggacggcsusa | | cacAfgUfgguccsusc | | GGCTG | |
| AD-1334444 | gscsugg(Ahd)UfgAfC | 3891 | VPusAfsgugCfgUfGfa | 2670 | GTGCTGGATGACATCACG | 2994 |
| | fAfucacgcacsusa | | uguCfaUfccagcsasc | | CACTC | |
| AD-1334445 | csusccu(Uhd)CfaAfC | 3892 | VPusUfsgcaGfgUfGfg | 2671 | ACCTCCTTCAACACCACC | 2995 |
| | fAfccaccugcsasa | | uguUfgAfaggagsgsu | | TGCAG | |
| AD-1334446 | csusaug(Ghd)CfaGfU | 3893 | VPusAfsgguCfcUfGfg | 2672 | GGCTATGGCAGTGCCAGG | 2996 |
| | fGfccaggaccsusa | | cacUfgCfcauagscsc | | ACCTG | |
| AD-1334447 | ascscua(Uhd)GfaUfG | 3894 | VPusUfsagaGfuUfUfc | 2673 | CCACCTATGATGAGAAAC | 2997 |
| | fAfgaaacucusasa | | ucaUfcAfuaggusgsg | | TCTAC | |
| AD-1334448 | asgscua(Chd)GfuUfC | 3895 | VPusUfsucuUfgGfAfc | 2674 | GCAGCTACGTTCTGTCCA | 2998 |
| | fUfguccaagasasa | | agaAfcGfuagcusgsc | | AGAAA | |
| AD-1334449 | gsascag(Chd)AfgCfU | 3896 | VPusAfsgcaCfgGfUfg | 2675 | CCGACAGCAGCTTCACCG | 2999 |
| | fUfcaccgugcsusa | | aagCfuGfcugucsgsg | | TGCTG | |
| AD-1334450 | gsgsaca(Ahd)CfgAfG | 3897 | VPusUfscagGfcAfGfu | 2676 | ACGGACAACGAGAACTGC | 3000 |
| | fAfacugccugsasa | | ucuCfgUfuguccsgsu | | CTGAA | |
| AD-1334451 | uscscuc(Ahd)AfcUfC | 3898 | VPusCfsgugUfaGfAfu | 2677 | GTTCCTCAACTCCATCTA | 3001 |
| | fCfaucuacacsgsa | | ggaGfuUfgaggasasc | | CACGC | |
| AD-1334452 | gscscaa(Chd)AfuCfA | 3899 | VPusGfsugaAfcAfGfg | 2678 | CAGCCAACATCACCCTGT | 3002 |
| | fCfccuguucascsa | | gugAfuGfuuggcsusg | | TCACA | |
| AD-1334453 | uscsgag(Chd)UfuCfU | 3900 | VPusAfsccaCfgAfUfg | 2679 | CCTCGAGCTTCTTCATCG | 3003 |
| | fUfcaucguggsusa | | aagAfaGfcucgasgsg | | TGGTG | |
| AD-1334454 | gscscac(Uhd)CfaUfG | 3901 | VPusCfsaaaCfaCfCfu | 2680 | GTGCCACTCATGCAGGTG | 3004 |
| | fCfagguguuusgsa | | gcaUfgAfguggcsasc | | TTTGT | |
| AD-1334455 | gsgsgaa(Chd)UfuCfA | 3902 | VPusUfsgguUfcUfGfg | 2681 | GTGGGAACTTCAACCAGA | 3005 |
| | fAfccagaaccsasa | | uugAfaGfuucccsasc | | ACCAG | |
| AD-1334456 | usgsacg(Ahd)CfuUfC | 3903 | VPusUfsgagGfgCfCfg | 2682 | GCTGACGACTTCACGGCC | 3006 |
| | fAfcggcccucsasa | | ugaAfgUfcgucasgsc | | CTCAG | |
| AD-1334457 | asgsccu(Uhd)CfgCfC | 3904 | VPusUfsccaGfgUfGfu | 2683 | GCAGCCTTCGCCAACACC | 3007 |
| | fAfacaccuggsasa | | uggCfgAfaggcusgsc | | TGGAA | |
| AD-1334458 | cscsagg(Ahd)AfcAfG | 3905 | VPusGfsuccUfcAfAfa | 2684 | TGCCAGGAACAGCTTTGA | 3008 |
| | fCfuuugaggascsa | | gcuGfuUfccuggscsa | | GGACC | |
| AD-1334459 | gsusgga(Ghd)AfaUfG | 3906 | VPusGfscguAfgUfUfc | 2685 | GTGTGGAGAATGAGAACT | 3009 |
| | fAfgaacuacgscsa | | ucaUfuCfuccacsasc | | ACGCC | |
| AD-1334460 | csasaca(Ghd)UfgCfC | 3907 | VPusAfsgcgCfgAfGfa | 2686 | CCCAACAGTGCCTTCTCG | 3010 |
| | fUfucucgcgcsusa | | aggCfaCfuguugsgsg | | CGCTG | |
| AD-1334461 | csusucc(Ahd)CfuCfG | 3908 | VPusAfscauGfcAfGfu | 2687 | CCCTTCCACTCGAACTGC | 3011 |
| | fAfacugcaugsusa | | ucgAfgUfggaagsgsg | | ATGTT | |
| AD-1334462 | csasccu(Ghd)CfaAfC | 3909 | VPusUfsccgCfuCfAfc | 2688 | GACACCTGCAACTGTGAG | 3012 |
| | fUfgugagcggsasa | | aguUfgCfaggugsusc | | CGGAG | |
| AD-1334463 | cscsucc(Uhd)AfuGfU | 3910 | VPusAfscagGfcGfUfg | 2689 | GTCCTCCTATGTGCACGC | 3013 |
| | fGfcacgccugsusa | | cacAfuAfggaggsasc | | CTGTG | |
| AD-1334464 | gsgscgu(Ahd)CfaGfC | 3911 | VPusCfsaguCfgCfUfg | 2690 | AGGGCGTACAGCTCAGCG | 3014 |
| | fUfcagcgacusgsa | | agcUfgUfacgccscsu | | ACTGG | |
| AD-1334465 | ascscaa(Ghd)UfaCfA | 3912 | VPusCfsaguUfcUfGfc | 2691 | GCACCAAGTACATGCAGA | 3015 |
| | fUfgcagaacusgsa | | augUfaCfuuggusgsc | | ACTGC | |
| AD-1334466 | usascgc(Chd)UfaCfG | 3913 | VPusGfscauCfcAfCfc | 2692 | GCTACGCCTACGTGGTGG | 3016 |
| | fUfgguggaugscsa | | acgUfaGfgcguasgsc | | ATGCC | |
| AD-1334467 | gscsagc(Ghd)UfuUfC | 3914 | VPusAfsggcAfcGfAfa | 2693 | CTGCAGCGTTTCCTTCGT | 3017 |
| | fCfuucgugccsusa | | ggaAfaCfgcugcsasg | | GCCTG | |
| AD-1334468 | gscsacc(Uhd)UfcCfU | 3915 | VPusCfsgcgUfcAfUfu | 2694 | GGGCACCTTCCTCAATGA | 3018 |
| | fCfaaugacgcsgsa | | gagGfaAfggugcscsc | | CGCGG | |
| AD-1334469 | csusgga(Ghd)AfgGfU | 3916 | VPusGfsucgUfgCfAfc | 2695 | TCCTGGAGAGGTGGTGCA | 3019 |
| | fGfgugcacgascsa | | cacCfuCfuccagsgsa | | CGACG | |
| AD-1334470 | cscsgug(Uhd)GfuUfC | 3917 | VPusAfscccGfuAfCfa | 2696 | CGCCGTGTGTTCATGTAC | 3020 |
| | fAfuguacgggsusa | | ugaAfcAfcacggscsg | | GGGTG | |
| AD-1334471 | cscsucu(Chd)UfgCfA | 3918 | VPusUfsgugCfuUfUfu | 2697 | AGCCTCTCTGCAGAAAAG | 3021 |
| | fGfaaaagcacsasa | | cugCfaGfagaggscsu | | CACAG | |
| AD-1334472 | gsgsacu(Ghd)CfaGfC | 3919 | VPusCfscgaGfcUfGfu | 2698 | CTGGACTGCAGCAACAGC | 3022 |
| | fAfacagcucgsgsa | | ugcUfgCfaguccsasg | | TCGGC | |
| AD-1334473 | csusguu(Uhd)CfaGfC | 3920 | VPusCfsgcaGfuGfUfg | 2699 | GGCTGTTTCAGCACACAC | 3023 |
| | fAfcacacugcsgsa | | ugcUfgAfaacagscsc | | TGCGT | |
| AD-1334474 | csusgca(Uhd)UfgCfC | 3921 | VPusAfsgucCfuCfCfu | 2700 | GGCTGCATTGCCGAGGAG | 3024 |
| | fGfaggaggacsusa | | cggCfaAfugcagscsc | | GACTG | |
| AD-1334475 | csasccu(Ahd)CfaAfG | 3922 | VPusUfscucUfcCfAfg | 2701 | GCCACCTACAAGCCTGGA | 3025 |
| | fCfcuggagagsasa | | gcuUfgUfaggugsgsc | | GAGAC | |
| AD-1334476 | csgsacu(Ghd)CfaAfC | 3923 | VPusAfsgguGfcAfGfg | 2702 | GTCGACTGCAACACCTGC | 3026 |
| | fAfccugcaccsusa | | uguUfgCfagucgsasc | | ACCTG | |
| AD-1334477 | gsasacc(Ghd)GfaGfG | 3924 | VPusUfsgcaCfuCfCfc | 2703 | AGGAACCGGAGGTGGGAG | 3027 |
| | fUfgggagugcsasa | | accUfcCfgguucscsu | | TGCAG | |
| AD-1334478 | usgsgcc(Ahd)CfuUfC | 3925 | VPusCfsaaaGfgUfGfa | 2704 | GATGGCCACTTCATCACC | 3028 |
| | fAfucaccuuusgsa | | ugaAfgUfggccasusc | | TTTGA | |
| AD-1334479 | csgsauc(Ghd)CfuAfC | 3926 | VPusCfsuucAfaAfGfc | 2705 | GGCGATCGCTACAGCTTT | 3029 |
| | fAfgcuuugaasgsa | | uguAfgCfgaucgscsc | | GAAGG | |
| AD-1334480 | gscsugc(Ghd)AfgUfA | 3927 | VPusGfsgccAfaGfAfu | 2706 | CAGCTGCGAGTACATCTT | 3030 |
| | fCfaucuuggcscsa | | guaCfuCfgcagcsusg | | GGCCC | |
| AD-1334481 | csusucc(Ghd)CfaUfC | 3928 | VPusUfscucGfgUfGfa | 2707 | ACCTTCCGCATCGTCACC | 3031 |
| | fGfucaccgagsasa | | cgaUfgCfggaagsgsu | | GAGAA | |
| AD-1334482 | gscscau(Chd)AfaGfC | 3929 | VPusUfsccaCfgAfAfg | 2708 | AGGCCATCAAGCTCTTCG | 3032 |
| | fUfcuucguggsasa | | agcUfuGfauggcscsu | | TGGAG | |
| AD-1334483 | usascga(Ghd)CfuGfA | 3930 | VPusUfscuuGfgAfGfg | 2709 | GCTACGAGCTGATCCTCC | 3033 |
| | fUfccuccaagsasa | | aucAfgCfucguasgsc | | AAGAG | |
| AD-1334484 | gsasccu(Uhd)UfaAfG | 3931 | VPusUfscgcCfaCfCfg | 2710 | GGGACCTTTAAGGCGGTG | 3034 |
| | fGfcgguggcgsasa | | ccuUfaAfaggucscsc | | GCGAG | |
| AD-1334485 | ascsccu(Ahd)CfaAfG | 3932 | VPusUfsguaGfcGfUfa | 2711 | CCACCCTACAAGATACGC | 3035 |
| | fAfuacgcuacsasa | | ucuUfgUfagggusgsg | | TACAT | |
| AD-1334486 | ususccu(Ghd)GfuCfA | 3933 | VPusUfsgggUfcUfCfg | 2712 | TCTTCCTGGTCATCGAGA | 3036 |
| | fUfcgagacccsasa | | augAfcCfaggaasgsa | | CCCAC | |
| AD-1334487 | cscsagc(Ghd)UfgUfU | 3934 | VPusCfsaguCfgGfAfu | 2713 | GACCAGCGTGTTCATCCG | 3037 |
| | fCfauccgacusgsa | | gaaCfaCfgcuggsusc | | ACTGC | |
| AD-1334488 | csasgga(Chd)UfaCfA | 3935 | VPusAfscccUfgCfCfc | 2714 | ACCAGGACTACAAGGGCA | 3038 |
| | fAfgggcagggsusa | | uugUfaGfuccugsgsu | | GGGTC | |
| AD-1334489 | gsgsgaa(Chd)UfuCfG | 3936 | VPusGfscauUfgUfCfg | 2715 | GCGGGAACTTCGACGACA | 3039 |
| | fAfcgacaaugscsa | | ucgAfaGfuucccsgsc | | ATGCC | |
| AD-1334490 | csasaug(Ahd)CfuUfU | 3937 | VPusUfsacgCfgUfGfg | 2716 | ATCAATGACTTTGCCACG | 3040 |
| | fGfccacgcgusasa | | caaAfgUfcauugsasu | | CGTAG | |
| AD-1334491 | gscsacu(Ghd)GfaGfU | 3938 | VPusCfsuguUfcCfCfa | 2717 | ACGCACTGGAGTTTGGGA | 3041 |
| | fUfugggaacasgsa | | aacUfcCfagugcsgsu | | ACAGC | |
| AD-1334492 | gsgsccc(Ahd)GfaAfG | 3939 | VPusUfsgcuGfcAfCfu | 2718 | TGGGCCCAGAAGCAGTGC | 3042 |
| | fCfagugcagcsasa | | gcuUfcUfgggccscsa | | AGCAT | |
| AD-1334493 | cscsagg(Uhd)UfgAfC | 3940 | VPusAfscuuGfgUfGfg | 2719 | TCCCAGGTTGACTCCACC | 3043 |
| | fUfccaccaagsusa | | aguCfaAfccuggsgsa | | AAGTA | |
| AD-1334494 | csgsagg(Chd)CfuGfC | 3941 | VPusCfsgucGfuUfCfa | 2720 | TACGAGGCCTGCGTGAAC | 3044 |
| | fGfugaacgacsgsa | | cgcAfgGfccucgsusa | | GACGC | |
| AD-1334495 | ascsugc(Ghd)AfgUfG | 3942 | VPusCfsgugCfaGfAfa | 2721 | CGACTGCGAGTGTTTCTG | 3045 |
| | fUfuucugcacsgsa | | acaCfuCfgcaguscsg | | CACGG | |
| AD-1334496 | usgsugu(Ghd)UfgUfC | 3943 | VPusAfsgucCfgCfCfa | 2722 | CCTGTGTGTGTCCTGGCG | 3046 |
| | fCfuggcggacsusa | | ggaCfaCfacacasgsg | | GACTC | |
| AD-1334497 | usgsuuc(Uhd)GfuGfA | 3944 | VPusGfsuugUfaGfAfa | 2723 | CTTGTTCTGTGACTTCTA | 3047 |
| | fCfuucuacaascsa | | gucAfcAfgaacasasg | | CAACC | |
| AD-1334498 | usgsuga(Ghd)UfgGfC | 3945 | VPusGfsgcuGfgUfAfg | 2724 | GCTGTGAGTGGCACTACC | 3048 |
| | fAfcuaccagcscsa | | ugcCfaCfucacasgsc | | AGCCC | |
| AD-1334499 | gscsugc(Uhd)AfcCfC | 3946 | VPusUfsgggCfaCfUfu | 2725 | AGGCTGCTACCCGAAGTG | 3049 |
| | fGfaagugcccsasa | | cggGfuAfgcagescsu | | CCCAC | |
| AD-1314302 | asgsccc(Uhd)UfcUfU | 3947 | VPusGfsuccUfcAfUfu | 2726 | CCAGCCCTTCTTCAATGA | 3050 |
| | fCfaaugaggascsa | | gaaGfaAfgggcusgsg | | GGACC | |
| AD-1334500 | asasgug(Chd)GfuGfG | 3948 | VPusCfscacAfcUfGfg | 2727 | TGAAGTGCGTGGCCCAGT | 3051 |
| | fCfccagugugsgsa | | gccAfcGfcacuuscsa | | GTGGC | |
| AD-1334501 | csusacg(Ahd)CfaAfG | 3949 | VPusAfsguuUfcCfGfu | 2728 | TGCTACGACAAGGACGGA | 3052 |
| | fGfacggaaacsusa | | ccuUfgUfcguagscsa | | AACTA | |
| AD-1334502 | usgsacg(Uhd)CfgGfU | 3950 | VPusGfsgacCfcUfUfg | 2729 | TATGACGTCGGTGCAAGG | 3053 |
| | fGfcaagggucscsa | | cacCfgAfcgucasusa | | GTCCC | |
| AD-1334503 | cscsaga(Ghd)CfuGfU | 3951 | VPusGfsuguGfcAfGfu | 2730 | TGCCAGAGCTGTAACTGC | 3054 |
| | fAfacugcacascsa | | uacAfgCfucuggscsa | | ACACC | |
| AD-1334504 | csasgug(Chd)GfcUfC | 3952 | VPusUfscaaGfgCfUfg | 2731 | TCCAGTGCGCTCACAGCC | 3055 |
| | fAfcagccuugsasa | | ugaGfcGfcacugsgsa | | TTGAG | |
| AD-1334505 | csusgca(Chd)CfuAfU | 3953 | VPusUfsccuGfuCfCfu | 2732 | ACCTGCACCTATGAGGAC | 3056 |
| | fGfaggacaggsasa | | cauAfgGfugcagsgsu | | AGGAC | |
| AD-1334506 | csasgga(Chd)GfuCfA | 3954 | VPusGfsuguUfgUfAfg | 2733 | ACCAGGACGTCATCTACA | 3057 |
| | fUfcuacaacascsa | | augAfcGfuccugsgsu | | ACACC | |
| AD-1334507 | csgsccu(Ghd)CfuUfG | 3955 | VPusAfsgauGfgCfGfa | 2734 | GGCGCCTGCTTGATCGCC | 3058 |
| | fAfucgccaucsusa | | ucaAfgCfaggcgscsc | | ATCTG | |
| AD-1334508 | ascscau(Chd)AfuCfA | 3956 | VPusAfscagCfcUfUfc | 2735 | GCACCATCATCAGGAAGG | 3059 |
| | fGfgaaggcugsusa | | cugAfuGfauggusgsc | | CTGTG | |
| AD-1334509 | csascaa(Chd)GfcCfA | 3957 | VPusUfsgaaGfgUfGfa | 2736 | GCCACAACGCCATTCACC | 3060 |
| | fUfucaccuucsasa | | augGfcGfuugugsgsc | | TTCAC | |
| AD-1334510 | uscscac(Chd)GfuGfU | 3958 | VPusUfscgcGfgAfCfa | 2737 | TCTCCACCGTGTGTGTCC | 3061 |
| | fGfuguccgcgsasa | | cacAfcGfguggasgsa | | GCGAG | |
| AD-1334511 | uscscag(Chd)UfgGfU | 3959 | VPusUfsgccCfaUfUfg | 2738 | GGTCCAGCTGGTACAATG | 3062 |
| | fAfcaaugggcsasa | | uacCfaGfcuggascsc | | GGCAC | |
| AD-1334512 | csgsgag(Ahd)CfuUfU | 3960 | VPusCfsaaaCfgUfCfu | 2739 | GGCGGAGACTTTGAGACG | 3063 |
| | fGfagacguuusgsa | | caaAfgUfcuccgscsc | | TTTGA | |
| AD-1334513 | gsasggg(Uhd)AfcCfA | 3961 | VPusAfsgggCfaUfAfc | 2740 | GAGAGGGTACCAGGTATG | 3064 |
| | fGfguaugcccsusa | | cugGfuAfcccucsusc | | CCCTG | |
| AD-1334514 | csusggc(Uhd)GfaCfA | 3962 | VPusCfsggcAfcUfCfg | 2741 | TGCTGGCTGACATCGAGT | 3065 |
| | fUfcgagugccsgsa | | augUfcAfgccagscsa | | GCCGG | |
| AD-1334515 | csusucc(Chd)GfaCfA | 3963 | VPusUfsccaGfcGfGfc | 2742 | AGCTTCCCGACATGCCGC | 3066 |
| | fUfgccgcuggsasa | | augUfcGfggaagscsu | | TGGAG | |
| AD-1334516 | csasggu(Ghd)GfaCfU | 3964 | VPusAfsugcGfgUfCfa | 2743 | AGCAGGTGGACTGTGACC | 3067 |
| | fGfugaccgcasusa | | cagUfcCfaccugscsu | | GCATG | |
| AD-1334517 | csgscca(Ahd)CfaGfC | 3965 | VPusGfsacuCfuGfUfu | 2744 | TGCGCCAACAGCCAACAG | 3068 |
| | fCfaacagaguscsa | | ggcUfgUfuggcgscsa | | AGTCC | |
| AD-1334518 | uscsugu(Chd)AfcGfA | 3966 | VPusCfsagcUfcGfUfa | 2745 | GCTCTGTCACGACTACGA | 3069 |
| | fCfuacgagcusgsa | | gucGfuGfacagasgsc | | GCTGC | |
| AD-1334519 | uscsucu(Ghd)CfuGfC | 3967 | VPusGfscacGfuAfUfu | 2746 | GTTCTCTGCTGCGAATAC | 3070 |
| | fGfaauacgugscsa | | cgcAfgCfagagasasc | | GTGCC | |
| AD-1334520 | csascgg(Ahd)GfcCfU | 3968 | VPusUfsaggCfaCfAfg | 2747 | AGCACGGAGCCTGCTGTG | 3071 |
| | fGfcugugccusasa | | cagGfcUfccgugscsu | | CCTAC | |
| AD-1334521 | asgsacc(Ahd)CfaGfC | 3969 | VPusCfsuuuUfcGfGfu | 2748 | CCAGACCACAGCAACCGA | 1445 |
| | fAfaccgaaaasgsa | | ugcUfgUfggucusgsg | | AAAGA | |
| AD-1334522 | csasccu(Chd)GfcAfG | 3970 | VPusUfsggaCfcCfAfg | 2749 | CTCACCTCGCAGACTGGG | 3072 |
| | fAfcuggguccsasa | | ucuGfcGfaggugsasg | | TCCAG | |
| AD-1334523 | ascsaga(Ghd)UfgGfU | 3971 | VPusUfsccuCfaUfCfa | 2750 | GGACAGAGTGGTTTGATG | 3073 |
| | fUfugaugaggsasa | | aacCfaCfucuguscsc | | AGGAC | |
| AD-1334524 | gsascgu(Uhd)GfaGfU | 3972 | VPusUfsuauCfgUfAfg | 2751 | GGGACGTTGAGTCCTACG | 3074 |
| | fCfcuacgauasasa | | gacUfcAfacgucscsc | | ATAAG | |
| AD-1334525 | gsgsccg(Chd)UfgGfA | 3973 | VPusAfsuaaGfuGfCfc | 2752 | AGGGCCGCTGGAGGGCAC | 3075 |
| | fGfggcacuuasusa | | cucCfaGfcggccscsu | | TTATG | |
| AD-1334526 | csasgcc(Uhd)AfaGfG | 3974 | VPusCfsacuCfuAfUfg | 2753 | AGCAGCCTAAGGACATAG | 3076 |
| | fAfcauagagusgsa | | uccUfuAfggcugscsu | | AGTGC | |
| AD-1334527 | asascug(Ghd)AfcCfC | 3975 | VPusAfsccuGfuGfCfc | 2754 | CCAACTGGACCCTGGCAC | 3077 |
| | fUfggcacaggsusa | | aggGfuCfcaguusgsg | | AGGTG | |
| AD-1334528 | gsusgca(Chd)UfgUfG | 3976 | VPusAfsaguGfgAfCfg | 2755 | AGGTGCACTGTGACGTCC | 3078 |
| | fAfcguccacususa | | ucaCfaGfugcacscsu | | ACTTC | |
| AD-1334529 | gsusgca(Ghd)GfaAfC | 3977 | VPusCfscugCfuCfCfc | 2756 | GTGTGCAGGAACTGGGAG | 3079 |
| | fUfgggagcagsgsa | | aguUfcCfugcacsasc | | CAGGA | |
| AD-1334530 | csgsucu(Uhd)CfaAfG | 3978 | VPusUfsguaGfcAfCfa | 2757 | GGCGTCTTCAAGATGTGC | 3080 |
| | fAfugugcuacsasa | | ucuUfgAfagacgscsc | | TACAA | |
| AD-1334531 | csusgcu(Ghd)CfaGfU | 3979 | VPusAfsgugGfuCfGfu | 2758 | CTCTGCTGCAGTGACGAC | 3081 |
| | fGfacgaccacsusa | | cacUfgCfagcagsasg | | CACTG | |
| AD-1334532 | csgsacc(Ahd)CfaGfA | 3980 | VPusCfsgucUfcCfAfg | 2759 | ACCGACCACAGAGCTGGA | 3082 |
| | fGfcuggagacsgsa | | cucUfgUfggucgsgsu | | GACGG | |
| AD-1334533 | gscsccu(Ghd)UfuCfU | 3981 | VPusUfsgcgGfcGfUfu | 2760 | AGGCCCTGTTCTCAACGC | 3083 |
| | fCfaacgccgcsasa | | gagAfaCfagggcscsu | | CGCAG | |
| AD-1334534 | cscsucu(Chd)AfgAfA | 3982 | VPusAfsuguCfaGfUfc | 2761 | ACCCTCTCAGAAGGACTG | 3084 |
| | fGfgacugacasusa | | cuuCfuGfagaggsgsu | | ACATC | |
| AD-1334535 | csasgau(Ahd)CfaCfA | 3983 | VPusCfsaagGfgUfGfc | 2762 | CCCAGATACACAAGCACC | 3085 |
| | fAfgcacccuusgsa | | uugUfgUfaucugsgsg | | CTTGG | |
| AD-1334536 | gscsucc(Ahd)CfaGfA | 3984 | VPusGfsacaGfuGfGfg | 2763 | AGGCTCCACAGAACCCAC | 3086 |
| | fAfcccacuguscsa | | uucUfgUfggagcscsu | | TGTCC | |
| AD-1334537 | csasccc(Uhd)UfcCfA | 3985 | VPusCfsugaGfcGfUfg | 2764 | TCCACCCTTCCAACACGC | 3087 |
| | fAfcacgcucasgsa | | uugGfaAfgggugsgsa | | TCAGC | |
| AD-1334538 | csasaca(Ahd)CfaAfU | 3986 | VPusGfsgagGfuUfGfc | 2765 | CCCAACAACAATGGCAAC | 3088 |
| | fGfgcaaccucscsa | | cauUfgUfuguugsgsg | | CTCCA | |
| AD-1334539 | csgscuu(Chd)CfaAfA | 3987 | VPusUfscagCfgGfCfu | 2766 | ACCGCTTCCAAAGAGCCG | 3089 |
| | fGfagccgcugsasa | | cuuUfgGfaagcgsgsu | | CTGAC | |
| AD-1334540 | gscsgcc(Ahd)AfcAfC | 3988 | VPusUfscgcUfcGfUfg | 2767 | TGGCGCCAACACTCACGA | 3090 |
| | fUfcacgagcgsasa | | aguGfuUfggcgcscsa | | GCGAG | |
| AD-1334541 | gsuscca(Chd)CfuCfU | 3989 | VPusUfscucGfgCfCfu | 2768 | CTGTCCACCTCTCAGGCC | 3091 |
| | fCfaggccgagsasa | | gagAfgGfuggacsasg | | GAGAC | |
| AD-1334542 | csasgga(Chd)AfgAfG | 3990 | VPusUfscauUfgUfCfg | 2769 | CCCAGGACAGAGACGACA | 3092 |
| | fAfcgacaaugsasa | | ucuCfuGfuccugsgsg | | ATGAG | |
| AD-1334543 | csusuga(Chd)UfaAfC | 3991 | VPusUfsgguGfgUfGfg | 2770 | CCCTTGACTAACACCACC | 3093 |
| | fAfccaccaccsasa | | uguUfaGfucaagsgsg | | ACCAG | |
| AD-1334544 | csusguc(Ahd)AfcCfG | 3992 | VPusAfscucAfcAfCfu | 2771 | CGCTGTCAACCGAAGTGT | 3094 |
| | fAfagugugagsusa | | ucgGfuUfgacagscsg | | GAGTG | |
| AD-1334545 | asgsagu(Ghd)GfuUfU | 3993 | VPusAfsgucCfaCfGfu | 2772 | ACAGAGTGGTTTGACGTG | 3095 |
| | fGfacguggacsusa | | caaAfcCfacucusgsu | | GACTT | |
| AD-1334546 | gsgsaaa(Chd)UfuUfU | 3994 | VPusUfsgauGfuUfUfu | 2773 | ATGGAAACTTTTGAAAAC | 3096 |
| | fGfaaaacaucsasa | | caaAfaGfuuuccsasu | | ATCAG | |
| AD-1334547 | gscsacc(Ahd)AfaGfA | 3995 | VPusCfsacuCfuAfUfg | 2774 | GGGCACCAAAGAGCATAG | 3097 |
| | fGfcauagagusgsa | | cucUfuUfggugcscsc | | AGTGC | |
| AD-1334548 | csgsagg(Uhd)AfaGfC | 3996 | VPusCfscugGfuCfGfa | 2775 | CCCGAGGTAAGCATCGAC | 3098 |
| | fAfucgaccagsgsa | | ugcUfuAfccucgsgsg | | CAGGT | |
| AD-1334549 | csusgac(Chd)UfgCfA | 3997 | VPusGfsucuCfcAfGfg | 2776 | TGCTGACCTGCAGCCTGG | 3099 |
| | fGfccuggagascsa | | cugCfaGfgucagscsa | | AGACG | |
| AD-1334550 | csusgca(Ahd)GfaAfC | 3998 | VPusUfscugGfuCfUfu | 2777 | ACCTGCAAGAACGAAGAC | 3100 |
| | fGfaagaccagsasa | | cguUfcUfugcagsgsu | | CAGAC | |
| AD-1334551 | usgscuu(Chd)AfaCfU | 3999 | VPusCfsgcaCfgUfUfg | 2778 | TGTGCTTCAACTACAACG | 3101 |
| | fAfcaacgugcsgsa | | uagUfuGfaagcascsa | | TGCGT | |
| AD-1334552 | ususgcu(Ghd)UfgAfC | 4000 | VPusGfsgcuGfuAfGfu | 2779 | CTTTGCTGTGACGACTAC | 3102 |
| | fGfacuacagcscsa | | cguCfaCfagcaasasg | | AGCCA | |
| AD-1334553 | gsascga(Chd)CfuGfG | 4001 | VPusUfsuguGfaGfGfa | 2780 | GGGACGACCTGGATCCTC | 3103 |
| | fAfuccucacasasa | | uccAfgGfucgucscsc | | ACAAA | |
| AD-1334554 | csgsacc(Ahd)CfaAfC | 4002 | VPusCfsguaGfuGfGfc | 2781 | GCCGACCACAACAGCCAC | 3104 |
| | fAfgccacuacsgsa | | uguUfgUfggucgsgsc | | TACGA | |
| AD-1334555 | uscscac(Chd)CfuGfA | 4003 | VPusGfsgagCfuGfUfu | 2782 | CCTCCACCCTGAGAACAG | 3105 |
| | fGfaacagcucscsa | | cucAfgGfguggasgsg | | CTCCC | |
| AD-1334556 | uscscca(Ahd)AfgUfG | 4004 | VPusUfsgguGfgUfCfa | 2783 | CCTCCCAAAGTGCTGACC | 3106 |
| | fCfugaccaccsasa | | gcaCfuUfugggasgsg | | ACCAC | |
| AD-1334557 | csasgcu(Chd)CfaAfA | 4005 | VPusAfsgggAfgUfGfg | 2784 | ACCAGCTCCAAAGCCACT | 3107 |
| | fGfccacucccsusa | | cuuUfgGfagcugsgsu | | CCCTC | |
| AD-1334558 | cscsagu(Chd)CfaGfG | 4006 | VPusGfsguuGfcAfGfu | 2785 | CTCCAGTCCAGGGACTGC | 3108 |
| | fGfacugcaacscsa | | cccUfgGfacuggsasg | | AACCG | |
| AD-1334559 | asgscac(Uhd)GfaGfA | 4007 | VPusUfsggcUfgUfGfc | 2786 | CCAGCACTGAGAAGCACA | 3109 |
| | fAfgcacagccsasa | | uucUfcAfgugcusgsg | | GCCAC | |
| AD-1334560 | csusacc(Ahd)GfcGfU | 4008 | VPusGfsaugGfgUfGfu | 2787 | AGCTACCAGCGTTACACC | 3110 |
| | fUfacacccauscsa | | aacGfcUfgguagscsu | | CATCC | |
| AD-1334561 | ususccu(Chd)CfcUfG | 4009 | VPusAfsgguGfgUfGfc | 2788 | TCTTCCTCCCTGGGCACC | 3111 |
| | fGfgcaccaccsusa | | ccaGfgGfaggaasgsa | | ACCTG | |
| AD-1334562 | cscsuau(Chd)AfcAfG | 4010 | VPusGfsuguGfgUfGfg | 2789 | CGCCTATCACAGACCACC | 3112 |
| | fAfccaccacascsa | | ucuGfuGfauaggscsg | | ACACC | |
| AD-1334563 | cscsacc(Ahd)UfgUfC | 4011 | VPusUfsgugGfcUfGfu | 2790 | GGCCACCATGTCCACAGC | 3113 |
| | fCfacagccacsasa | | ggaCfaUfgguggscsc | | CACAC | |
| AD-1334564 | uscscuc(Chd)AfcUfC | 4012 | VPusGfscagUfcUfCfu | 2791 | CCTCCTCCACTCCAGAGA | 3114 |
| | fCfagagacugscsa | | ggaGfuGfgaggasgsg | | CTGCC | |
| AD-1334565 | csuscca(Chd)AfgUfG | 4013 | VPusUfsggcGfgUfAfa | 2792 | ACCTCCACAGTGCTTACC | 3115 |
| | fCfuuaccgccsasa | | gcaCfuGfuggagsgsu | | GCCAC | |
| AD-1334566 | csasgga(Ahd)CfaGfC | 4014 | VPusGfsguaGfuGfUfg | 2793 | CCCAGGAACAGCTCACAC | 3116 |
| | fUfcacacuacscsa | | agcUfgUfuccugsgsg | | TACCA | |
| AD-1334567 | usgscca(Ahd)CfuAfC | 4015 | VPusCfsgugGfuUfGfu | 2794 | AGTGCCAACTACCACAAC | 3117 |
| | fCfacaaccacsgsa | | gguAfgUfuggcascsu | | CACGG | |
| AD-1334568 | uscscag(Uhd)GfuGfG | 4016 | VPusUfsuguGfcUfGfa | 2795 | CCTCCAGTGTGGATCAGC | 3118 |
| | fAfucagcacasasa | | uccAfcAfcuggasgsg | | ACAAC | |
| AD-1334569 | ascscca(Chd)AfaCfC | 4017 | VPusUfsggaGfcCfUfc | 2796 | ACACCCACAACCAGAGGC | 3119 |
| | fAfgaggcuccsasa | | uggUfuGfugggusgsu | | TCCAC | |
| AD-1334570 | csgscca(Chd)AfgUfG | 4018 | VPusUfsgguGfgUfCfa | 2797 | ACCGCCACAGTGCTGACC | 3120 |
| | fCfugaccaccsasa | | gcaCfuGfuggcgsgsu | | ACCAC | |
| AD-1334571 | gscscac(Uhd)GfgUfU | 4019 | VPusGfsuugCfcAfUfa | 2798 | TGGCCACTGGTTCTATGG | 3121 |
| | fCfuauggcaascsa | | gaaCfcAfguggcscsa | | CAACA | |
| AD-1334572 | csusccu(Chd)UfaGfC | 4020 | VPusUfsgguCfuGfUfg | 2799 | CCCTCCTCTAGCACACAG | 3122 |
| | fAfcacagaccsasa | | ugcUfaGfaggagsgsg | | ACCAG | |
| AD-1334573 | gsgscca(Chd)UfaCfG | 4021 | VPusUfsggcCfgUfGfa | 2800 | ACGGCCACTACGATCACG | 3123 |
| | fAfucacggccsasa | | ucgUfaGfuggccsgsu | | GCCAC | |
| AD-1334574 | csusccu(Chd)AfaCfU | 4022 | VPusUfsuguCfcCfAfg | 2801 | CCCTCCTCAACTCCTGGG | 3124 |
| | fCfcugggacasasa | | gagUfuGfaggagsgsg | | ACAAC | |
| AD-1334575 | csasgca(Ahd)CfaCfA | 4023 | VPusAfsgggAfgUfCfa | 2802 | ACCAGCAACACAGTGACT | 3125 |
| | fGfugacucccsusa | | cugUfgUfugcugsgsu | | CCCTC | |
| AD-1334576 | usgsccc(Uhd)AfgGfG | 4024 | VPusUfsgugGfgUfGfg | 2803 | TCTGCCCTAGGGACCACC | 3126 |
| | fAfccacccacsasa | | uccCfuAfgggcasgsa | | CACAC | |
| AD-1334577 | asgsugc(Chd)GfaAfC | 4025 | VPusUfsggcCfaUfGfg | 2804 | CCAGTGCCGAACACCATG | 3127 |
| | fAfccauggccsasa | | uguUfcGfgcacusgsg | | GCCAC | |
| AD-1334578 | asgsccu(Ghd)GfaCfU | 4026 | VPusAfsgguGfgCfCfg | 2805 | ACAGCCTGGACTTCGGCC | 3128 |
| | fUfcggccaccsusa | | aagUfcCfaggcusgsu | | ACCTC | |
| AD-1334579 | ascscca(Chd)AfuCfA | 4027 | VPusGfsaagGfcUfCfu | 2806 | CCACCCACATCACAGAGC | 3129 |
| | fCfagagccuuscsa | | gugAfuGfugggusgsg | | CTTCC | |
| AD-1334580 | gsgsuga(Chd)UfuCfC | 4028 | VPusCfsuagGfgUfGfu | 2807 | ACGGTGACTTCCCACACC | 3130 |
| | fCfacacccuasgsa | | gggAfaGfucaccsgsu | | CTAGC | |
| AD-1334581 | csasacc(Ahd)CfcGfG | 4029 | VPusCfsuggGfuGfGfu | 2808 | AGCAACCACCGGTACCAC | 3131 |
| | fUfaccacccasgsa | | accGfgUfgguugscsu | | CCAGC | |
| AD-1334582 | csgsacu(Chd)CfaGfC | 4030 | VPusGfscugGfaAfAfg | 2809 | CTCGACTCCAGCCCTTTC | 3132 |
| | fCfcuuuccagscsa | | ggcUfgGfagucgsasg | | CAGCC | |
| AD-1334583 | usasgca(Ghd)CfaGfA | 4031 | VPusAfscucGfgUfGfg | 2810 | CCTAGCAGCAGAACCACC | 3133 |
| | fAfccaccgagsusa | | uucUfgCfugcuasgsg | | GAGTC | |
| AD-1334584 | ascscca(Ghd)CfaAfG | 4032 | VPusAfsgguGfcGfGfg | 2811 | ACACCCAGCAAGACCCGC | 3134 |
| | fAfcccgcaccsusa | | ucuUfgCfugggusgsu | | ACCTC | |
| AD-1334585 | csgsgug(Ghd)UfgAfC | 4033 | VPusAfscagCfcCfAfu | 2812 | CACGGTGGTGACCATGGG | 3135 |
| | fCfaugggcugsusa | | gguCfaCfcaccgsusg | | CTGTG | |
| AD-1334586 | gsusggc(Uhd)GfgAfC | 4034 | VPusGfsguaGfcUfGfu | 2813 | GAGTGGCTGGACTACAGC | 3136 |
| | fUfacagcuacscsa | | aguCfcAfgccacsusc | | TACCC | |
| AD-1334587 | ususgac(Ahd)CfcUfA | 4035 | VPusGfsaugUfuGfGfa | 2814 | CTTTGACACCTACTCCAA | 3137 |
| | fCfuccaacauscsa | | guaGfgUfgucaasasg | | CATCC | |
| AD-1334588 | ususggg(Chd)CfaGfG | 4036 | VPusCfsauuCfcAfCfg | 2815 | AGTTGGGCCAGGTCGTGG | 3138 |
| | fUfcguggaausgsa | | accUfgGfcccaascsu | | AATGC | |
| AD-1334589 | cscsugg(Ahd)CfuUfU | 4037 | VPusAfsgacCfaGfGfc | 2816 | AGCCTGGACTTTGGCCTG | 3139 |
| | fGfgccuggucsusa | | caaAfgUfccaggscsu | | GTCTG | |
| AD-1334590 | asusgug(Chd)UfuCfA | 4038 | VPusAfsuuuCfaUfAfg | 2817 | AGATGTGCTTCAACTATG | 3140 |
| | fAfcuaugaaasusa | | uugAfaGfcacauscsu | | AAATC | |
| AD-1334591 | usgsugu(Uhd)CfuGfC | 4039 | VPusCfsguaGfuUfGfc | 2818 | CGTGTGTTCTGCTGCAAC | 3141 |
| | fUfgcaacuacsgsa | | agcAfgAfacacascsg | | TACGG | |
| AD-1334592 | csasgcu(Chd)UfaCfG | 4040 | VPusAfsgggCfaUfGfg | 2819 | ACCAGCTCTACGGCCATG | 3142 |
| | fGfccaugcccsusa | | ccgUfaGfagcugsgsu | | CCCTC | |
| AD-1334593 | asusccu(Chd)AfcAfG | 4041 | VPusGfsuggUfcAfGfc | 2820 | GGATCCTCACAGAGCTGA | 3143 |
| | fAfgcugaccascsa | | ucuGfuGfaggauscsc | | CCACA | |
| AD-1334594 | cscsacu(Ahd)CfgAfC | 4042 | VPusAfsgugGfaCfUfc | 2821 | AGCCACTACGACTGAGTC | 3144 |
| | fUfgaguccacsusa | | aguCfgUfaguggscsu | | CACTG | |
| AD-1334595 | gsascca(Chd)CfuGfG | 4043 | VPusCfsuguGfaGfGfa | 2822 | GGGACCACCTGGATCCTC | 3145 |
| | fAfuccucacasgsa | | uccAfgGfuggucscsc | | ACAGA | |
| AD-1334596 | gsasgca(Chd)UfaCfA | 4044 | VPusUfscacGfgUfGfg | 2823 | CCGAGCACTACAGCCACC | 3146 |
| | fGfccaccgugsasa | | cugUfaGfugcucsgsg | | GTGAC | |
| AD-1334597 | cscsucc(Ahd)CfcCfA | 4045 | VPusAfsgcaGfuUfGfc | 2824 | CTCCTCCACCCAGGCAAC | 3147 |
| | fGfgcaacugcsusa | | cugGfgUfggaggsasg | | TGCTG | |
| AD-1334598 | gsgscca(Chd)GfaCfA | 4046 | VPusUfsgacUfgUfGfg | 2825 | ACGGCCACGACACCCACA | 3148 |
| | fCfccacagucsasa | | gugUfcGfuggccsgsu | | GTCAC | |
| AD-1334599 | gscsucc(Ahd)AfaGfC | 4047 | VPusGfsaagGfgAfGfu | 2826 | CAGCTCCAAAGCCACTCC | 3149 |
| | fCfacucccuuscsa | | ggcUfuUfggagcsusg | | CTTCT | |
| AD-1334559 | asgscac(Uhd)GfaGfA | 4007 | VPusUfsggcUfgUfGfc | 2786 | CCAGCACTGAGAAGCACA | 3109 |
| | fAfgcacagccsasa | | uucUfcAfgugcusgsg | | GCCAC | |
| AD-1334600 | ascsagc(Uhd)AfcCfA | 4048 | VPusGfscugUfaAfAfg | 2827 | CCACAGCTACCAGCTTTA | 3150 |
| | fGfcuuuacagscsa | | cugGfuAfgcugusgsg | | CAGCC | |
| AD-1334562 | cscsuau(Chd)AfcAfG | 4010 | VPusGfsuguGfgUfGfg | 2789 | CGCCTATCACAGACCACC | 3112 |
| | fAfccaccacascsa | | ucuGfuGfauaggscsg | | ACACC | |
| AD-1334563 | cscsacc(Ahd)UfgUfC | 4011 | VPusUfsgugGfcUfGfu | 2790 | GGCCACCATGTCCACAGC | 3113 |
| | fCfacagccacsasa | | ggaCfaUfgguggscsc | | CACAC | |
| AD-1334601 | uscscuc(Chd)AfcUfC | 4049 | VPusAfscagUfcUfCfu | 2828 | CCTCCTCCACTCCAGAGA | 3151 |
| | fCfagagacugsusa | | ggaGfuGfgaggasgsg | | CTGTC | |
| AD-1334602 | cscsaca(Ghd)UfgCfU | 4050 | VPusCfsgugGfuGfGfu | 2829 | CTCCACAGTGCTTACCAC | 3152 |
| | fUfaccaccacsgsa | | aagCfaCfuguggsasg | | CACGG | |
| AD-1334603 | gscsuca(Chd)AfcUfA | 4051 | VPusAfsgcaCfuUfUfg | 2830 | CAGCTCACACTACCAAAG | 3153 |
| | fCfcaaagugcsusa | | guaGfuGfugagcsusg | | TGCTG | |
| AD-1334604 | usascca(Chd)AfaCfC | 4052 | VPusUfsgaaGfcCfCfg | 2831 | ACTACCACAACCACGGGC | 3154 |
| | fAfcgggcuucsasa | | uggUfuGfugguasgsu | | TTCAC | |
| AD-1334605 | csascgc(Uhd)UfcCfA | 4053 | VPusUfsgauCfcAfCfa | 2832 | CGCACGCTTCCAGTGTGG | 3155 |
| | fGfuguggaucsasa | | cugGfaAfgcgugscsg | | ATCAG | |
| AD-1334606 | ascscca(Chd)AfaCfC | 4054 | VPusUfsggaAfcCfUfc | 2833 | ACACCCACAACCAGAGGT | 3156 |
| | fAfgagguuccsasa | | uggUfuGfugggusgsu | | TCCAC | |
| AD-1334607 | usgsacc(Ahd)CfcAfC | 4055 | VPusAfsguuGfuGfGfu | 2834 | GCTGACCACCACCACCAC | 3157 |
| | fCfaccacaacsusa | | gguGfgUfggucasgsc | | AACTG | |
| AD-1334571 | gscscac(Uhd)GfgUfU | 4019 | VPusGfsuugCfcAfUfa | 2798 | TGGCCACTGGTTCTATGG | 3121 |
| | fCfuauggcaascsa | | gaaCfcAfguggcscsa | | CAACA | |
| AD-1334572 | csusccu(Chd)UfaGfC | 4020 | VPusUfsgguCfuGfUfg | 2799 | CCCTCCTCTAGCACACAG | 3122 |
| | fAfcacagaccsasa | | ugcUfaGfaggagsgsg | | ACCAG | |
| AD-1334573 | gsgscca(Chd)UfaCfG | 4021 | VPusUfsggcCfgUfGfa | 2800 | ACGGCCACTACGATCACG | 3123 |
| | fAfucacggccsasa | | ucgUfaGfuggccsgsu | | GCCAC | |
| AD-1334608 | csusccu(Chd)AfaCfU | 4056 | VPusUfsuguCfcCfUfg | 2835 | CCCTCCTCAACTCCAGGG | 3158 |
| | fCfcagggacasasa | | gagUfuGfaggagsgsg | | ACAAC | |
| AD-1334609 | csasgca(Ghd)CfaCfA | 4057 | VPusAfsgggAfgUfCfa | 2836 | ACCAGCAGCACAGTGACT | 3159 |
| | fGfugacucccsusa | | cugUfgCfugcugsgsu | | CCCTC | |
| AD-1334576 | usgsccc(Uhd)AfgGfG | 4024 | VPusUfsgugGfgUfGfg | 2803 | TCTGCCCTAGGGACCACC | 3126 |
| | fAfccacccacsasa | | uccCfuAfgggcasgsa | | CACAC | |
| AD-1334610 | csascac(Ahd)CfgGfG | 4058 | VPusAfscagGfgAfUfc | 2837 | ACCACACACGGGCGATCC | 3160 |
| | fCfgaucccugsusa | | gccCfgUfgugugsgsu | | CTGTC | |
| AD-1334578 | asgsccu(Ghd)GfaCfU | 4026 | VPusAfsgguGfgCfCfg | 2805 | ACAGCCTGGACTTCGGCC | 3128 |
| | fUfcggccaccsusa | | aagUfcCfaggcusgsu | | ACCTC | |
| AD-1334579 | ascscca(Chd)AfuCfA | 4027 | VPusGfsaagGfcUfCfu | 2806 | CCACCCACATCACAGAGC | 3129 |
| | fCfagagccuuscsa | | gugAfuGfugggusgsg | | CTTCC | |
| AD-1334611 | cscsacc(Chd)AfgCfA | 4059 | VPusUfsggaGfuCfGfa | 2838 | TACCACCCAGCACTCGAC | 3161 |
| | fCfucgacuccsasa | | gugCfuGfgguggsusa | | TCCAG | |
| AD-1334612 | csasgcc(Chd)UfcAfC | 4060 | VPusUfsgcuGfcUfAfg | 2839 | TCCAGCCCTCACCCTAGC | 3162 |
| | fCfcuagcagcsasa | | gguGfaGfggcugsgsa | | AGCAG | |
| AD-1334584 | ascscca(Ghd)CfaAfG | 4032 | VPusAfsgguGfcGfGfg | 2811 | ACACCCAGCAAGACCCGC | 3134 |
| | fAfcccgcaccsusa | | ucuUfgCfugggusgsu | | ACCTC | |
| AD-1334585 | csgsgug(Ghd)UfgAfC | 4033 | VPusAfscagCfcCfAfu | 2812 | CACGGTGGTGACCATGGG | 3135 |
| | fCfaugggcugsusa | | gguCfaCfcaccgsusg | | CTGTG | |
| AD-1334586 | gsusggc(Uhd)GfgAfC | 4034 | VPusGfsguaGfcUfGfu | 2813 | GAGTGGCTGGACTACAGC | 3136 |
| | fUfacagcuacscsa | | aguCfcAfgccacsusc | | TACCC | |
| AD-1334587 | ususgac(Ahd)CfcUfA | 4035 | VPusGfsaugUfuGfGfa | 2814 | CTTTGACACCTACTCCAA | 3137 |
| | fCfuccaacauscsa | | guaGfgUfgucaasasg | | CATCC | |
| AD-1334588 | ususggg(Chd)CfaGfG | 4036 | VPusCfsauuCfcAfCfg | 2815 | AGTTGGGCCAGGTCGTGG | 3138 |
| | fUfcguggaausgsa | | accUfgGfcccaascsu | | AATGC | |
| AD-1334589 | cscsugg(Ahd)CfuUfU | 4037 | VPusAfsgacCfaGfGfc | 2816 | AGCCTGGACTTTGGCCTG | 3139 |
| | fGfgccuggucsusa | | caaAfgUfccaggscsu | | GTCTG | |
| AD-1334590 | asusgug(Chd)UfuCfA | 4038 | VPusAfsuuuCfaUfAfg | 2817 | AGATGTGCTTCAACTATG | 3140 |
| | fAfcuaugaaasusa | | uugAfaGfcacauscsu | | AAATC | |
| AD-1334591 | usgsugu(Uhd)CfuGfC | 4039 | VPusCfsguaGfuUfGfc | 2818 | CGTGTGTTCTGCTGCAAC | 3141 |
| | fUfgcaacuacsgsa | | agcAfgAfacacascsg | | TACGG | |
| AD-1334613 | csusgga(Uhd)CfcUfC | 4061 | VPusUfscugCfuCfUfg | 2840 | ACCTGGATCCTCACAGAG | 3163 |
| | fAfcagagcagsasa | | ugaGfgAfuccagsgsu | | CAGAC | |
| AD-1334614 | csasgcc(Ahd)CfuAfC | 4062 | VPusGfsguuGfcGfGfu | 2841 | AGCAGCCACTACGACCGC | 3164 |
| | fGfaccgcaacscsa | | cguAfgUfggcugscsu | | AACCA | |
| AD-1334615 | uscscca(Ahd)AfgUfG | 4063 | VPusUfsgcuGfgUfCfa | 2842 | CCTCCCAAAGTGCTGACC | 3165 |
| | fCfugaccagcsasa | | gcaCfuUfugggasgsg | | AGCAC | |
| AD-1334616 | csasguu(Chd)CfaAfA | 4064 | VPusAfsggaAfgUfGfg | 2843 | ACCAGTTCCAAAGCCACT | 3166 |
| | fGfccacuuccsusa | | cuuUfgGfaacugsgsu | | TCCTC | |
| AD-1334617 | csasagg(Ahd)CfuGfC | 4065 | VPusAfsaggGfuGfGfu | 2844 | TCCAAGGACTGCAACCAC | 3167 |
| | fAfaccacccususa | | ugcAfgUfccuugsgsa | | CCTTC | |
| AD-1334618 | gsusgcu(Ghd)AfcAfA | 4066 | VPusGfsuggCfuGfUfg | 2845 | CAGTGCTGACAAGCACAG | 3168 |
| | fGfcacagccascsa | | cuuGfuCfagcacsusg | | CCACC | |
| AD-1334619 | csascag(Chd)UfaCfC | 4067 | VPusGfsuguAfaAfGfc | 2846 | TCCACAGCTACCAGCTTT | 3169 |
| | fAfgcuuuacascsa | | uggUfaGfcugugsgsa | | ACACC | |
| AD-1334620 | csusccu(Uhd)CfaCfC | 4068 | VPusUfsgguCfcCfAfa | 2847 | CCCTCCTTCACCCTTGGG | 3170 |
| | fCfuugggaccsasa | | gggUfgAfaggagsgsg | | ACCAC | |
| AD-1334621 | cscscag(Ahd)AfcAfG | 4069 | VPusGfsuguGfgUfGfg | 2848 | CTCCCAGAACAGACCACC | 3171 |
| | fAfccaccacascsa | | ucuGfuUfcugggsasg | | ACACC | |
| AD-1334622 | csascca(Uhd)GfuCfC | 4070 | VPusGfsgugGfaUfUfg | 2849 | GCCACCATGTCCACAATC | 3172 |
| | fAfcaauccacscsa | | uggAfcAfuggugsgsc | | CACCC | |
| AD-1334623 | csuscca(Chd)AfgUfG | 4071 | VPusUfscguGfgUfCfa | 2850 | ACCTCCACAGTGCTGACC | 3173 |
| | fCfugaccacgsasa | | gcaCfuGfuggagsgsu | | ACGAA | |
| AD-1334624 | gsgscca(Chd)CfaGfU | 4072 | VPusUfsggaCfaUfGfg | 2851 | AGGGCCACCAGTTCCATG | 3174 |
| | fUfccauguccsasa | | aacUfgGfuggccscsu | | TCCAC | |
| AD-1334593 | asusccu(Chd)AfcAfG | 4041 | VPusGfsuggUfcAfGfc | 2820 | GGATCCTCACAGAGCTGA | 3143 |
| | fAfgcugaccascsa | | ucuGfuGfaggauscsc | | CCACA | |
| AD-1334625 | cscsacu(Ahd)CfaAfC | 4073 | VPusAfsgugGfcUfGfc | 2852 | AGCCACTACAACTGCAGC | 3175 |
| | fUfgcagccacsusa | | aguUfgUfaguggscsu | | CACTG | |
| AD-1334595 | gsascca(Chd)CfuGfG | 4043 | VPusCfsuguGfaGfGfa | 2822 | GGGACCACCTGGATCCTC | 3145 |
| | fAfuccucacasgsa | | uccAfgGfuggucscsc | | ACAGA | |
| AD-1334626 | csasgca(Chd)UfaCfA | 4074 | VPusUfscacGfgUfGfg | 2853 | CCCAGCACTACAGCCACC | 3176 |
| | fGfccaccgugsasa | | cugUfaGfugcugsgsg | | GTGAC | |
| AD-1334627 | ascsccu(Chd)AfaAfG | 4075 | VPusCfsuggUfcAfGfc | 2854 | GCACCCTCAAAGTGCTGA | 3177 |
| | fUfgcugaccasgsa | | acuUfuGfagggusgsc | | CCAGC | |
| AD-1334628 | ascscca(Chd)AfgUfC | 4076 | VPusUfsggaGfcUfGfa | 2855 | ACACCCACAGTCATCAGC | 3178 |
| | fAfucagcuccsasa | | ugaCfuGfugggusgsu | | TCCAG | |
| AD-1334629 | cscsacu(Chd)CfcUfC | 4077 | VPusUfsggaCfuGfGfa | 2856 | AGCCACTCCCTCCTCCAG | 3179 |
| | fCfuccaguccsasa | | ggaGfgGfaguggscsu | | TCCAG | |
| AD-1334559 | asgscac(Uhd)GfaGfA | 4007 | VPusUfsggcUfgUfGfc | 2786 | CCAGCACTGAGAAGCACA | 3109 |
| | fAfgcacagccsasa | | uucUfcAfgugcusgsg | | GCCAC | |
| AD-1334630 | csusacc(Ahd)GfcGfU | 4078 | VPusGfsaugGfcUfGfu | 2857 | AGCTACCAGCGTTACAGC | 3180 |
| | fUfacagccauscsa | | aacGfcUfgguagscsu | | CATCC | |
| AD-1334562 | cscsuau(Chd)AfcAfG | 4010 | VPusGfsuguGfgUfGfg | 2789 | CGCCTATCACAGACCACC | 3112 |
| | fAfccaccacascsa | | ucuGfuGfauaggscsg | | ACACC | |
| AD-1334563 | cscsacc(Ahd)UfgUfC | 4011 | VPusUfsgugGfcUfGfu | 2790 | GGCCACCATGTCCACAGC | 3113 |
| | fCfacagccacsasa | | ggaCfaUfgguggscsc | | CACAC | |
| AD-1334631 | cscsucu(Ahd)CfuCfC | 4079 | VPusGfsacaGfuCfUfc | 2858 | CTCCTCTACTCCAGAGAC | 3181 |
| | fAfgagacuguscsa | | uggAfgUfagaggsasg | | TGTCC | |
| AD-1334602 | cscsaca(Ghd)UfgCfU | 4050 | VPusCfsgugGfuGfGfu | 2829 | CTCCACAGTGCTTACCAC | 3182 |
| | fUfaccaccacsgsa | | aagCfaCfuguggsasg | | CACGA | |
| AD-1334632 | asgscuc(Ahd)CfaCfU | 4080 | VPusGfscacUfuUfGfg | 2859 | ACAGCTCACACTACCAAA | 3183 |
| | fAfccaaagugscsa | | uagUfgUfgagcusgsu | | GTGCC | |
| AD-1334633 | csusacc(Ahd)CfaAfC | 4081 | VPusGfsaagCfcCfGfu | 2860 | GACTACCACAACCACGGG | 3184 |
| | fCfacgggcuuscsa | | gguUfgUfgguagsusc | | CTTCA | |
| AD-1334568 | uscscag(Uhd)GfuGfG | 4016 | VPusUfsuguGfcUfGfa | 2795 | CCTCCAGTGTGGATCAGC | 3118 |
| | fAfucagcacasasa | | uccAfcAfcuggasgsg | | ACAAC | |
| AD-1334569 | ascscca(Chd)AfaCfC | 4017 | VPusUfsggaGfcCfUfc | 2796 | ACACCCACAACCAGAGGC | 3119 |
| | fAfgaggcuccsasa | | uggUfuGfugggusgsu | | TCCAC | |
| AD-1334570 | csgscca(Chd)AfgUfG | 4018 | VPusUfsgguGfgUfCfa | 2797 | ACCGCCACAGTGCTGACC | 3120 |
| | fCfugaccaccsasa | | gcaCfuGfuggcgsgsu | | ACCAC | |
| AD-1334571 | gscscac(Uhd)GfgUfU | 4019 | VPusGfsuugCfcAfUfa | 2798 | TGGCCACTGGTTCTATGG | 3121 |
| | fCfuauggcaascsa | | gaaCfcAfguggcscsa | | CAACA | |
| AD-1334572 | csusccu(Chd)UfaGfC | 4020 | VPusUfsgguCfuGfUfg | 2799 | CCCTCCTCTAGCACACAG | 3122 |
| | fAfcacagaccsasa | | ugcUfaGfaggagsgsg | | ACCAG | |
| AD-1334634 | gsgscca(Chd)UfaCfG | 4082 | VPusUfsggcUfgUfGfa | 2861 | ACGGCCACTACGATCACA | 3185 |
| | fAfucacagccsasa | | ucgUfaGfuggccsgsu | | GCCAC | |
| AD-1334608 | csusccu(Chd)AfaCfU | 4056 | VPusUfsuguCfcCfUfg | 2835 | CCCTCCTCAACTCCAGGG | 3158 |
| | fCfcagggacasasa | | gagUfuGfaggagsgsg | | ACAAC | |
| AD-1334609 | csasgca(Ghd)CfaCfA | 4057 | VPusAfsgggAfgUfCfa | 2836 | ACCAGCAGCACAGTGACT | 3159 |
| | fGfugacucccsusa | | cugUfgCfugcugsgsu | | CCCTC | |
| AD-1334576 | usgsccc(Uhd)AfgGfG | 4024 | VPusUfsgugGfgUfGfg | 2803 | TCTGCCCTAGGGACCACC | 3126 |
| | fAfccacccacsasa | | uccCfuAfgggcasgsa | | CACAC | |
| AD-1334635 | csascca(Chd)GfgCfC | 4083 | VPusCfsgugUfgUfGfg | 2862 | AACACCACGGCCACCACA | 1551 |
| | fAfccacacacsgsa | | uggCfcGfuggugsusu | | CACGG | |
| AD-1334578 | asgsccu(Ghd)GfaCfU | 4026 | VPusAfsgguGfgCfCfg | 2805 | ACAGCCTGGACTTCGGCC | 3128 |
| | fUfcggccaccsusa | | aagUfcCfaggcusgsu | | ACCTC | |
| AD-1334579 | ascscca(Chd)AfuCfA | 4027 | VPusGfsaagGfcUfCfu | 2806 | CCACCCACATCACAGAGC | 3129 |
| | fCfagagccuuscsa | | gugAfuGfugggusgsg | | CTTCC | |
| AD-1334636 | csasgca(Ghd)CfaAfC | 4084 | VPusGfsguaCfuGfGfu | 2863 | CCCAGCAGCAACCACCAG | 3186 |
| | fCfaccaguacscsa | | gguUfgCfugcugsgsg | | TACCA | |
| AD-1334612 | csasgcc(Chd)UfcAfC | 4060 | VPusUfsgcuGfcUfAfg | 2839 | TCCAGCCCTCACCCTAGC | 3162 |
| | fCfcuagcagcsasa | | gguGfaGfggcugsgsa | | AGCAG | |
| AD-1334637 | cscsucc(Ahd)GfgAfC | 4085 | VPusUfsgugGfcUfGfu | 2864 | CACCTCCAGGACCACAGC | 3187 |
| | fCfacagccacsasa | | gguCfcUfggaggsusg | | CACAG | |
| AD-1334584 | ascscca(Ghd)CfaAfG | 4032 | VPusAfsgguGfcGfGfg | 2811 | ACACCCAGCAAGACCCGC | 3134 |
| | fAfcccgcaccsusa | | ucuUfgCfugggusgsu | | ACCTC | |
| AD-1334638 | ascscac(Ghd)GfuGfG | 4086 | VPusCfsccgUfgGfUfc | 2865 | TAACCACGGTGGTGACCA | 3188 |
| | fUfgaccacggsgsa | | accAfcCfguggususa | | CGGGC | |
| AD-1334586 | gsusggc(Uhd)GfgAfC | 4034 | VPusGfsguaGfcUfGfu | 2813 | GAGTGGCTGGACTACAGC | 3136 |
| | fUfacagcuacscsa | | aguCfcAfgccacsusc | | TACCC | |
| AD-1334587 | ususgac(Ahd)CfcUfA | 4035 | VPusGfsaugUfuGfGfa | 2814 | CTTTGACACCTACTCCAA | 3137 |
| | fCfuccaacauscsa | | guaGfgUfgucaasasg | | CATCC | |
| AD-1334588 | ususggg(Chd)CfaGfG | 4036 | VPusCfsauuCfcAfCfg | 2815 | AGTTGGGCCAGGTCGTGG | 3138 |
| | fUfcguggaausgsa | | accUfgGfcccaascsu | | AATGC | |
| AD-1334589 | cscsugg(Ahd)CfuUfU | 4037 | VPusAfsgacCfaGfGfc | 2816 | AGCCTGGACTTTGGCCTG | 3139 |
| | fGfgccuggucsusa | | caaAfgUfccaggscsu | | GTCTG | |
| AD-1334590 | asusgug(Chd)UfuCfA | 4038 | VPusAfsuuuCfaUfAfg | 2817 | AGATGTGCTTCAACTATG | 3140 |
| | fAfcuaugaaasusa | | uugAfaGfcacauscsu | | AAATC | |
| AD-1334591 | usgsugu(Uhd)CfuGfC | 4039 | VPusCfsguaGfuUfGfc | 2818 | CGTGTGTTCTGCTGCAAC | 3141 |
| | fUfgcaacuacsgsa | | agcAfgAfacacascsg | | TACGG | |
| AD-1334639 | csgsgcc(Ahd)CfgCfC | 4087 | VPusAfsguuGfaGfGfa | 2866 | TACGGCCACGCCCTCCTC | 3189 |
| | fCfuccucaacsusa | | gggCfgUfggccgsusa | | AACTC | |
| AD-1334640 | csusgga(Uhd)CfcUfC | 4088 | VPusUfscagCfuUfUfg | 2867 | ACCTGGATCCTCACAAAG | 3190 |
| | fAfcaaagcugsasa | | ugaGfgAfuccagsgsu | | CTGAC | |
| AD-1334594 | cscsacu(Ahd)CfgAfC | 4042 | VPusAfsgugGfaCfUfc | 2821 | AGCCACTACGACTGAGTC | 3144 |
| | fUfgaguccacsusa | | aguCfgUfaguggscsu | | CACTG | |
| AD-1334595 | gsascca(Chd)CfuGfG | 4043 | VPusCfsuguGfaGfGfa | 2822 | GGGACCACCTGGATCCTC | 3145 |
| | fAfuccucacasgsa | | uccAfgGfuggucscsc | | ACAGA | |
| AD-1334596 | gsasgca(Chd)UfaCfA | 4044 | VPusUfscacGfgUfGfg | 2823 | CCGAGCACTACAGCCACC | 3146 |
| | fGfccaccgugsasa | | cugUfaGfugcucsgsg | | GTGAC | |
| AD-1334597 | cscsucc(Ahd)CfcCfA | 4045 | VPusAfsgcaGfuUfGfc | 2824 | CTCCTCCACCCAGGCAAC | 3147 |
| | fGfgcaacugcsusa | | cugGfgUfggaggsasg | | TGCTG | |
| AD-1334598 | gsgscca(Chd)GfaCfA | 4046 | VPusUfsgacUfgUfGfg | 2825 | ACGGCCACGACACCCACA | 3148 |
| | fCfccacagucsasa | | gugUfcGfuggccsgsu | | GTCAC | |
| AD-1334599 | gscsucc(Ahd)AfaGfC | 4047 | VPusGfsaagGfgAfGfu | 2826 | CAGCTCCAAAGCCACTCC | 3149 |
| | fCfacucccuuscsa | | ggcUfuUfggagcsusg | | CTTCT | |
| AD-1334559 | asgscac(Uhd)GfaGfA | 4007 | VPusUfsggcUfgUfGfc | 2786 | CCAGCACTGAGAAGCACA | 3109 |
| | fAfgcacagccsasa | | uucUfcAfgugcusgsg | | GCCAC | |
| AD-1334600 | ascsagc(Uhd)AfcCfA | 4048 | VPusGfscugUfaAfAfg | 2827 | CCACAGCTACCAGCTTTA | 3150 |
| | fGfcuuuacagscsa | | cugGfuAfgcugusgsg | | CAGCC | |
| AD-1334562 | cscsuau(Chd)AfcAfG | 4010 | VPusGfsuguGfgUfGfg | 2789 | CGCCTATCACAGACCACC | 3112 |
| | fAfccaccacascsa | | ucuGfuGfauaggscsg | | ACACC | |
| AD-1334563 | cscsacc(Ahd)UfgUfC | 4011 | VPusUfsgugGfcUfGfu | 2790 | GGCCACCATGTCCACAGC | 3113 |
| | fCfacagccacsasa | | ggaCfaUfgguggscsc | | CACAC | |
| AD-1334564 | uscscuc(Chd)AfcUfC | 4012 | VPusGfscagUfcUfCfu | 2791 | CCTCCTCCACTCCAGAGA | 3114 |
| | fCfagagacugscsa | | ggaGfuGfgaggasgsg | | CTGCC | |
| AD-1334602 | cscsaca(Ghd)UfgCfU | 4050 | VPusCfsgugGfuGfGfu | 2829 | CTCCACAGTGCTTACCAC | 3152 |
| | fUfaccaccacsgsa | | aagCfaCfuguggsasg | | CACGG | |
| AD-1334632 | asgscuc(Ahd)CfaCfU | 4080 | VPusGfscacUfuUfGfg | 2859 | ACAGCTCACACTACCAAA | 3183 |
| | fAfccaaagugscsa | | uagUfgUfgagcusgsu | | GTGCC | |
| AD-1334633 | csusacc(Ahd)CfaAfC | 4081 | VPusGfsaagCfcCfGfu | 2860 | GACTACCACAACCACGGG | 3184 |
| | fCfacgggcuuscsa | | gguUfgUfgguagsusc | | CTTCA | |
| AD-1334568 | uscscag(Uhd)GfuGfG | 4016 | VPusUfsuguGfcUfGfa | 2795 | CCTCCAGTGTGGATCAGC | 3118 |
| | fAfucagcacasasa | | uccAfcAfcuggasgsg | | ACAAC | |
| AD-1334641 | ascscca(Chd)AfaCfC | 4089 | VPusUfsggaGfcCfAfc | 2868 | ACACCCACAACCAGTGGC | 3191 |
| | fAfguggcuccsasa | | uggUfuGfugggusgsu | | TCCAC | |
| AD-1334607 | usgsacc(Ahd)CfcAfC | 4055 | VPusAfsguuGfuGfGfu | 2834 | GCTGACCACCACCACCAC | 3157 |
| | fCfaccacaacsusa | | gguGfgUfggucasgsc | | AACTG | |
| AD-1334571 | gscscac(Uhd)GfgUfU | 4019 | VPusGfsuugCfcAfUfa | 2798 | TGGCCACTGGTTCTATGG | 3121 |
| | fCfuauggcaascsa | | gaaCfcAfguggcscsa | | CAACA | |
| AD-1334572 | csusccu(Chd)UfaGfC | 4020 | VPusUfsgguCfuGfUfg | 2799 | CCCTCCTCTAGCACACAG | 3122 |
| | fAfcacagaccsasa | | ugcUfaGfaggagsgsg | | ACCAG | |
| AD-1334573 | gsgscca(Chd)UfaCfG | 4021 | VPusUfsggcCfgUfGfa | 2800 | ACGGCCACTACGATCACG | 3123 |
| | fAfucacggccsasa | | ucgUfaGfuggccsgsu | | GCCAC | |
| AD-1334608 | csusccu(Chd)AfaCfU | 4056 | VPusUfsuguCfcCfUfg | 2835 | CCCTCCTCAACTCCAGGG | 3158 |
| | fCfcagggacasasa | | gagUfuGfaggagsgsg | | ACAAC | |
| AD-1334609 | csasgca(Ghd)CfaCfA | 4057 | VPusAfsgggAfgUfCfa | 2836 | ACCAGCAGCACAGTGACT | 3159 |
| | fGfugacucccsusa | | cugUfgCfugcugsgsu | | CCCTC | |
| AD-1334576 | usgsccc(Uhd)AfgGfG | 4024 | VPusUfsgugGfgUfGfg | 2803 | TCTGCCCTAGGGACCACC | 3126 |
| | fAfccacccacsasa | | uccCfuAfgggcasgsa | | CACAC | |
| AD-1334610 | csascac(Ahd)CfgGfG | 4058 | VPusAfscagGfgAfUfc | 2837 | ACCACACACGGGCGATCC | 3160 |
| | fCfgaucccugsusa | | gccCfgUfgugugsgsu | | CTGTC | |
| AD-1334578 | asgsccu(Ghd)GfaCfU | 4026 | VPusAfsgguGfgCfCfg | 2805 | ACAGCCTGGACTTCGGCC | 3128 |
| | fUfcggccaccsusa | | aagUfcCfaggcusgsu | | ACCTC | |
| AD-1334579 | ascscca(Chd)AfuCfA | 4027 | VPusGfsaagGfcUfCfu | 2806 | CCACCCACATCACAGAGC | 3129 |
| | fCfagagccuuscsa | | gugAfuGfugggusgsg | | CTTCC | |
| AD-1334611 | cscsacc(Chd)AfgCfA | 4059 | VPusUfsggaGfuCfGfa | 2838 | TACCACCCAGCACTCGAC | 3161 |
| | fCfucgacuccsasa | | gugCfuGfgguggsusa | | TCCAG | |
| AD-1334612 | csasgcc(Chd)UfcAfC | 4060 | VPusUfsgcuGfcUfAfg | 2839 | TCCAGCCCTCACCCTAGC | 3162 |
| | fCfcuagcagcsasa | | gguGfaGfggcugsgsa | | AGCAG | |
| AD-1334584 | ascscca(Ghd)CfaAfG | 4032 | VPusAfsgguGfcGfGfg | 2811 | ACACCCAGCAAGACCCGC | 3134 |
| | fAfcccgcaccsusa | | ucuUfgCfugggusgsu | | ACCTC | |
| AD-1334638 | ascscac(Ghd)GfuGfG | 4086 | VPusCfsccgUfgGfUfc | 2865 | TAACCACGGTGGTGACCA | 3188 |
| | fUfgaccacggsgsa | | accAfcCfguggususa | | CGGGC | |
| AD-1334586 | gsusggc(Uhd)GfgAfC | 4034 | VPusGfsguaGfcUfGfu | 2813 | GAGTGGCTGGACTACAGC | 3136 |
| | fUfacagcuacscsa | | aguCfcAfgccacsusc | | TACCC | |
| AD-1334587 | ususgac(Ahd)CfcUfA | 4035 | VPusGfsaugUfuGfGfa | 2814 | CTTTGACACCTACTCCAA | 3137 |
| | fCfuccaacauscsa | | guaGfgUfgucaasasg | | CATCC | |
| AD-1334588 | ususggg(Chd)CfaGfG | 4036 | VPusCfsauuCfcAfCfg | 2815 | AGTTGGGCCAGGTCGTGG | 3138 |
| | fUfcguggaausgsa | | accUfgGfcccaascsu | | AATGC | |
| AD-1334589 | cscsugg(Ahd)CfuUfU | 4037 | VPusAfsgacCfaGfGfc | 2816 | AGCCTGGACTTTGGCCTG | 3139 |
| | fGfgccuggucsusa | | caaAfgUfccaggscsu | | GTCTG | |
| AD-1334590 | asusgug(Chd)UfuCfA | 4038 | VPusAfsuuuCfaUfAfg | 2817 | AGATGTGCTTCAACTATG | 3140 |
| | fAfcuaugaaasusa | | uugAfaGfcacauscsu | | AAATC | |
| AD-1334591 | usgsugu(Uhd)CfuGfC | 4039 | VPusCfsguaGfuUfGfc | 2818 | CGTGTGTTCTGCTGCAAC | 3141 |
| | fUfgcaacuacsgsa | | agcAfgAfacacascsg | | TACGG | |
| AD-1334592 | csasgcu(Chd)UfaCfG | 4040 | VPusAfsgggCfaUfGfg | 2819 | ACCAGCTCTACGGCCATG | 3142 |
| | fGfccaugcccsusa | | ccgUfaGfagcugsgsu | | CCCTC | |
| AD-1334642 | gsascga(Chd)CfuGfG | 4090 | VPusCfsuguGfaGfGfa | 2869 | GGGACGACCTGGATCCTC | 3192 |
| | fAfuccucacasgsa | | uccAfgGfucgucscsc | | ACAGA | |
| AD-1334643 | usgsacc(Ahd)CfaAfC | 4091 | VPusCfsguaGfuGfGfc | 2870 | GCTGACCACAACAGCCAC | 3193 |
| | fAfgccacuacsgsa | | uguUfgUfggucasgsc | | TACGA | |
| AD-1334644 | asuscca(Chd)UfgGfA | 4092 | VPusUfsggcCfgUfGfg | 2871 | GCATCCACTGGATCCACG | 3194 |
| | fUfccacggccsasa | | aucCfaGfuggausgsc | | GCCAC | |
| AD-1334645 | csusccc(Ahd)AfaGfU | 4093 | VPusGfscugGfuCfAfg | 2872 | CCCTCCCAAAGTGCTGAC | 3195 |
| | fGfcugaccagscsa | | cacUfuUfgggagsgsg | | CAGCC | |
| AD-1334616 | csasguu(Chd)CfaAfA | 4064 | VPusAfsggaAfgUfGfg | 2843 | ACCAGTTCCAAAGCCACT | 3166 |
| | fGfccacuuccsusa | | cuuUfgGfaacugsgsu | | TCCTC | |
| AD-1334617 | csasagg(Ahd)CfuGfC | 4065 | VPusAfsaggGfuGfGfu | 2844 | TCCAAGGACTGCAACCAC | 3167 |
| | fAfaccacccususa | | ugcAfgUfccuugsgsa | | CCTTC | |
| AD-1334646 | cscsacc(Ahd)AfaUfC | 4094 | VPusGfsguaGfcUfGfu | 2873 | AGCCACCAAATCCACAGC | 3196 |
| | fCfacagcuacscsa | | ggaUfuUfgguggscsu | | TACCA | |
| AD-1334621 | cscscag(Ahd)AfcAfG | 4069 | VPusGfsuguGfgUfGfg | 2848 | CTCCCAGAACAGACCACC | 3171 |
| | fAfccaccacascsa | | ucuGfuUfcugggsasg | | ACACC | |
| AD-1334622 | csascca(Uhd)GfuCfC | 4070 | VPusGfsgugGfaUfUfg | 2849 | GCCACCATGTCCACAATC | 3172 |
| | fAfcaauccacscsa | | uggAfcAfuggugsgsc | | CACCC | |
| AD-1334623 | csuscca(Chd)AfgUfG | 4071 | VPusUfscguGfgUfCfa | 2850 | ACCTCCACAGTGCTGACC | 3173 |
| | fCfugaccacgsasa | | gcaCfuGfuggagsgsu | | ACGAA | |
| AD-1334647 | gsgscca(Chd)CfaGfU | 4095 | VPusUfsggaCfgUfGfg | 2874 | AGGGCCACCAGTTCCACG | 3197 |
| | fUfccacguccsasa | | aacUfgGfuggccscsu | | TCCAC | |
| AD-1334593 | asusccu(Chd)AfcAfG | 4041 | VPusGfsuggUfcAfGfc | 2820 | GGATCCTCACAGAGCTGA | 3143 |
| | fAfgcugaccascsa | | ucuGfuGfaggauscsc | | CCACA | |
| AD-1334625 | cscsacu(Ahd)CfaAfC | 4073 | VPusAfsgugGfcUfGfc | 2852 | AGCCACTACAACTGCAGC | 3175 |
| | fUfgcagccacsusa | | aguUfgUfaguggscsu | | CACTG | |
| AD-1334595 | gsascca(Chd)CfuGfG | 4043 | VPusCfsuguGfaGfGfa | 2822 | GGGACCACCTGGATCCTC | 3145 |
| | fAfuccucacasgsa | | uccAfgGfuggucscsc | | ACAGA | |
| AD-1334643 | usgsacc(Ahd)CfaAfC | 4091 | VPusCfsguaGfuGfGfc | 2870 | GCTGACCACAACAGCCAC | 3193 |
| | fAfgccacuacsgsa | | uguUfgUfggucasgsc | | TACGA | |
| AD-1334595 | gsascca(Chd)CfuGfG | 4043 | VPusCfsuguGfaGfGfa | 2822 | GGGACCACCTGGATCCTC | 3145 |
| | fAfuccucacasgsa | | uccAfgGfuggucscsc | | ACAGA | |
| AD-1334596 | gsasgca(Chd)UfaCfA | 4044 | VPusUfscacGfgUfGfg | 2823 | CCGAGCACTACAGCCACC | 3146 |
| | fGfccaccgugsasa | | cugUfaGfugcucsgsg | | GTGAC | |
| AD-1334597 | cscsucc(Ahd)CfcCfA | 4045 | VPusAfsgcaGfuUfGfc | 2824 | CTCCTCCACCCAGGCAAC | 3147 |
| | fGfgcaacugcsusa | | cugGfgUfggaggsasg | | TGCTG | |
| AD-1334648 | usgsagc(Ahd)CfcAfC | 4096 | VPusUfsgucGfuGfGfc | 2875 | TGTGAGCACCACGGCCAC | 3198 |
| | fGfgccacgacsasa | | cguGfgUfgcucascsa | | GACAC | |
| AD-1334557 | csasgcu(Chd)CfaAfA | 4005 | VPusAfsgggAfgUfGfg | 2784 | ACCAGCTCCAAAGCCACT | 3107 |
| | fGfccacucccsusa | | cuuUfgGfagcugsgsu | | CCCTC | |
| AD-1334649 | cscsagg(Ghd)AfcUfG | 4097 | VPusAfsgggCfaGfUfu | 2876 | GTCCAGGGACTGCAACTG | 3199 |
| | fCfaacugcccsusa | | gcaGfuCfccuggsasc | | CCCTT | |
| AD-1334559 | asgscac(Uhd)GfaGfA | 4007 | VPusUfsggcUfgUfGfc | 2786 | CCAGCACTGAGAAGCACA | 3109 |
| | fAfgcacagccsasa | | uucUfcAfgugcusgsg | | GCCAC | |
| AD-1334600 | ascsagc(Uhd)AfcCfA | 4048 | VPusGfscugUfaAfAfg | 2827 | CCACAGCTACCAGCTTTA | 3150 |
| | fGfcuuuacagscsa | | cugGfuAfgcugusgsg | | CAGCC | |
| AD-1334562 | cscsuau(Chd)AfcAfG | 4010 | VPusGfsuguGfgUfGfg | 2789 | CGCCTATCACAGACCACC | 3112 |
| | fAfccaccacascsa | | ucuGfuGfauaggscsg | | ACACC | |
| AD-1334563 | cscsacc(Ahd)UfgUfC | 4011 | VPusUfsgugGfcUfGfu | 2790 | GGCCACCATGTCCACAGC | 3113 |
| | fCfacagccacsasa | | ggaCfaUfgguggscsc | | CACAC | |
| AD-1334601 | uscscuc(Chd)AfcUfC | 4049 | VPusAfscagUfcUfCfu | 2828 | CCTCCTCCACTCCAGAGA | 3151 |
| | fCfagagacugsusa | | ggaGfuGfgaggasgsg | | CTGTC | |
| AD-1334565 | csuscca(Chd)AfgUfG | 4013 | VPusUfsggcGfgUfAfa | 2792 | ACCTCCACAGTGCTTACC | 3115 |
| | fCfuuaccgccsasa | | gcaCfuGfuggagsgsu | | GCCAC | |
| AD-1334632 | asgscuc(Ahd)CfaCfU | 4080 | VPusGfscacUfuUfGfg | 2859 | ACAGCTCACACTACCAAA | 3183 |
| | fAfccaaagugscsa | | uagUfgUfgagcusgsu | | GTGCC | |
| AD-1334633 | csusacc(Ahd)CfaAfC | 4081 | VPusGfsaagCfcCfGfu | 2860 | GACTACCACAACCACGGG | 3184 |
| | fCfacgggcuuscsa | | gguUfgUfgguagsusc | | CTTCA | |
| AD-1334568 | uscscag(Uhd)GfuGfG | 4016 | VPusUfsuguGfcUfGfa | 2795 | CCTCCAGTGTGGATCAGC | 3118 |
| | fAfucagcacasasa | | uccAfcAfcuggasgsg | | ACAAC | |
| AD-1334641 | ascscca(Chd)AfaCfC | 4089 | VPusUfsggaGfcCfAfc | 2868 | ACACCCACAACCAGTGGC | 3191 |
| | fAfguggcuccsasa | | uggUfuGfugggusgsu | | TCCAC | |
| AD-1334650 | csgscca(Ghd)AfgUfG | 4098 | VPusUfsgguGfgUfCfa | 2877 | ACCGCCAGAGTGCTGACC | 3200 |
| | fCfugaccaccsasa | | gcaCfuCfuggcgsgsu | | ACCAC | |
| AD-1334571 | gscscac(Uhd)GfgUfU | 4019 | VPusGfsuugCfcAfUfa | 2798 | TGGCCACTGGTTCTATGG | 3121 |
| | fCfuauggcaascsa | | gaaCfcAfguggcscsa | | CAACA | |
| AD-1334572 | csusccu(Chd)UfaGfC | 4020 | VPusUfsgguCfuGfUfg | 2799 | CCCTCCTCTAGCACACAG | 3122 |
| | fAfcacagaccsasa | | ugcUfaGfaggagsgsg | | ACCAG | |
| AD-1334573 | gsgscca(Chd)UfaCfG | 4021 | VPusUfsggcCfgUfGfa | 2800 | ACGGCCACTACGATCACG | 3123 |
| | fAfucacggccsasa | | ucgUfaGfuggccsgsu | | GCCAC | |
| AD-1334651 | csasggg(Ahd)CfaAfC | 4099 | VPusGfsgugAfuGfGfg | 2878 | TCCAGGGACAACACCCAT | 3201 |
| | fAfcccaucacscsa | | uguUfgUfcccugsgsa | | CACCC | |
| AD-1334652 | csuscca(Ahd)AfgCfC | 4100 | VPusAfsggaGfgAfAfg | 2879 | AGCTCCAAAGCCACTTCC | 3202 |
| | fAfcuuccuccsusa | | uggCfuUfuggagscsu | | TCCTC | |
| AD-1334617 | csasagg(Ahd)CfuGfC | 4065 | VPusAfsaggGfuGfGfu | 2844 | TCCAAGGACTGCAACCAC | 3167 |
| | fAfaccacccususa | | ugcAfgUfccuugsgsa | | CCTTC | |
| AD-1334653 | usgscug(Ahd)CfaAfG | 4101 | VPusUfsgugGfcUfGfu | 2880 | AGTGCTGACAAGCACAGC | 3203 |
| | fCfacagccacsasa | | gcuUfgUfcagcascsu | | CACAA | |
| AD-1334619 | csascag(Chd)UfaCfC | 4067 | VPusGfsuguAfaAfGfc | 2846 | TCCACAGCTACCAGCTTT | 3169 |
| | fAfgcuuuacascsa | | uggUfaGfcugugsgsa | | ACACC | |
| AD-1334654 | csuscca(Chd)CfcUfG | 4102 | VPusAfscguGfgUfCfc | 2881 | TCCTCCACCCTGTGGACC | 3204 |
| | fUfggaccacgsusa | | acaGfgGfuggagsgsa | | ACGTG | |
| AD-1334655 | cscscag(Chd)AfcAfG | 4103 | VPusGfsuguGfgUfGfg | 2882 | GTCCCAGCACAGACCACC | 3205 |
| | fAfccaccacascsa | | ucuGfuGfcugggsasc | | ACACC | |
| AD-1334656 | gsuscca(Chd)CfaUfG | 4104 | VPusGfsgauUfgUfGfg | 2883 | ATGTCCACCATGTCCACA | 3206 |
| | fUfccacaaucscsa | | acaUfgGfuggacsasu | | ATCCA | |
| AD-1334657 | csusccu(Chd)UfaCfU | 4105 | VPusUfsgguCfuCfUfg | 2884 | ACCTCCTCTACTCCAGAG | 3207 |
| | fCfcagagaccsasa | | gagUfaGfaggagsgsu | | ACCAC | |
| AD-1334658 | csuscca(Chd)AfgUfG | 4106 | VPusUfsgguGfgUfCfa | 2885 | ACCTCCACAGTGCTGACC | 3208 |
| | fCfugaccaccsasa | | gcaCfuGfuggagsgsu | | ACCAC | |
| AD-1334659 | gsgscca(Chd)CfaAfU | 4107 | VPusUfsggcCfgUfGfg | 2886 | AGGGCCACCAATTCCACG | 3209 |
| | fUfccacggccsasa | | aauUfgGfuggccscsu | | GCCAC | |
| AD-1334660 | usgsacc(Ahd)CfaAfC | 4108 | VPusUfsguaGfuGfGfc | 2887 | GCTGACCACAACAGCCAC | 3210 |
| | fAfgccacuacsasa | | uguUfgUfggucasgsc | | TACAA | |
| AD-1334661 | usgsgau(Chd)CfaCfG | 4109 | VPusAfscagGfgUfGfg | 2888 | ACTGGATCCACGGCCACC | 3211 |
| | fGfccacccugsusa | | ccgUfgGfauccasgsu | | CTGTC | |
| AD-1334595 | gsascca(Chd)CfuGfG | 4043 | VPusCfsuguGfaGfGfa | 2822 | GGGACCACCTGGATCCTC | 3145 |
| | fAfuccucacasgsa | | uccAfgGfuggucscsc | | ACAGA | |
| AD-1334662 | gsasgca(Chd)UfaUfA | 4110 | VPusUfscacGfgUfGfg | 2889 | CCGAGCACTATAGCCACC | 3212 |
| | fGfccaccgugsasa | | cuaUfaGfugcucsgsg | | GTGAT | |
| AD-1334663 | cscsacu(Chd)UfgGfG | 4111 | VPusGfsugaGfcUfGfu | 2890 | CTCCACTCTGGGAACAGC | 3213 |
| | fAfacagcucascsa | | uccCfaGfaguggsasg | | TCACA | |
| AD-1334664 | csasugg(Chd)CfaCfU | 4112 | VPusCfsuguGfgGfCfa | 2891 | ACCATGGCCACTATGCCC | 3214 |
| | fAfugcccacasgsa | | uagUfgGfccaugsgsu | | ACAGC | |
| AD-1334665 | usgsccu(Chd)CfaCfG | 4113 | VPusAfsgcuGfgGfAfa | 2892 | ACTGCCTCCACGGTTCCC | 3215 |
| | fGfuucccagcsusa | | ccgUfgGfaggcasgsu | | AGCTC | |
| AD-1334666 | gscscaa(Chd)CfuUfC | 4114 | VPusUfsggaCfaCfGfc | 2893 | CTGCCAACCTTCAGCGTG | 3216 |
| | fAfgcguguccsasa | | ugaAfgGfuuggcsasg | | TCCAC | |
| AD-1334667 | uscscuc(Chd)UfcAfG | 4115 | VPusGfsuggUfgAfGfg | 2894 | TGTCCTCCTCAGTCCTCA | 3217 |
| | fUfccucaccascsa | | acuGfaGfgaggascsa | | CCACC | |
| AD-1334668 | uscscca(Chd)UfuCfU | 4116 | VPusCfsaggGfaGfUfa | 2895 | GCTCCCACTTCTCTACTC | 3218 |
| | fCfuacucccusgsa | | gagAfaGfugggasgsc | | CCTGC | |
| AD-1334669 | gscsauu(Uhd)GfgAfC | 4117 | VPusGfsagaAfaAfAfc | 2896 | GGGCATTTGGACAGTTTT | 3219 |
| | fAfguuuuucuscsa | | uguCfcAfaaugescsc | | TCTCG | |
| AD-1334670 | gsasagu(Chd)AfuCfU | 4118 | VPusGfsucuUfaUfUfg | 2897 | GGGAAGTCATCTACAATA | 3220 |
| | fAfcaauaagascsa | | uagAfuGfacuucscsc | | AGACC | |
| AD-1334671 | csusgcc(Ahd)UfuUfC | 4119 | VPusAfscacUfgCfGfu | 2898 | GGCTGCCATTTCTACGCA | 3221 |
| | fUfacgcagugsusa | | agaAfaUfggcagscsc | | GTGTG | |
| AD-1334672 | csascug(Uhd)GfaCfA | 4120 | VPusAfsagcGfgUfCfa | 2899 | AGCACTGTGACATTGACC | 3222 |
| | fUfugaccgcususa | | augUfcAfcagugscsu | | GCTTC | |
| AD-1334673 | usgsuga(Chd)AfaUfG | 4121 | VPusAfsgagGfgAfUfg | 2900 | GCTGTGACAATGCCATCC | 3223 |
| | fCfcaucccucsusa | | gcaUfuGfucacasgsc | | CTCTC | |
| AD-1334674 | ascsccu(Ghd)GfaGfA | 4122 | VPusAfsccgUfgCfAfg | 2901 | GGACCCTGGAGAACTGCA | 3224 |
| | fAfcugcacggsusa | | uucUfcCfaggguscsc | | CGGTG | |
| AD-1334675 | gsusggg(Uhd)GfaCfA | 4123 | VPusAfscgaCfaCfGfg | 2902 | GCGTGGGTGACAACCGTG | 3225 |
| | fAfccgugucgsusa | | uugUfcAfcccacsgsc | | TCGTC | |
| AD-1334676 | gsasccc(Ahd)AfaGfC | 4124 | VPusUfsuggCfcAfCfa | 2903 | TGGACCCAAAGCCTGTGG | 3226 |
| | fCfuguggccasasa | | ggcUfuUfgggucscsa | | CCAAC | |
| AD-1334677 | csusgcg(Uhd)GfaAfC | 4125 | VPusGfscagGfuGfCfu | 2904 | ACCTGCGTGAACAAGCAC | 3227 |
| | fAfagcaccugscsa | | uguUfcAfcgcagsgsu | | CTGCC | |
| AD-1334678 | uscsaaa(Ghd)UfgUfC | 4126 | VPusGfscucGfgGfUfc | 2905 | CATCAAAGTGTCGGACCC | 3228 |
| | fGfgacccgagscsa | | cgaCfaCfuuugasusg | | GAGCC | |
| AD-1334679 | cscsugu(Ghd)AfcUfU | 4127 | VPusCfsucaUfaGfUfg | 2906 | GCCCTGTGACTTCCACTA | 3229 |
| | fCfcacuaugasgsa | | gaaGfuCfacaggsgsc | | TGAGT | |
| AD-1334680 | gsasgug(Chd)AfuCfU | 4128 | VPusCfsacaUfgCfUfg | 2907 | GCGAGTGCATCTGCAGCA | 3230 |
| | fGfcagcaugusgsa | | cagAfuGfcacucsgsc | | TGTGG | |
| AD-1334681 | cscscac(Uhd)AfuUfC | 4129 | VPusGfsucaAfaGfGfu | 2908 | CTCCCACTATTCCACCTT | 3231 |
| | fCfaccuuugascsa | | ggaAfuAfgugggsasg | | TGACG | |
| AD-1334682 | ascscua(Uhd)GfuCfC | 4130 | VPusUfscucUfcAfUfg | 2909 | GCACCTATGTCCTCATGA | 3232 |
| | fUfcaugagagsasa | | aggAfcAfuaggusgsc | | GAGAG | |
| AD-1334683 | csascgc(Uhd)UfuGfG | 4131 | VPusGfscugAfgAfUfu | 2910 | TGCACGCTTTGGGAATCT | 3233 |
| | fGfaaucucagscsa | | cccAfaAfgcgugscsa | | CAGCC | |
| AD-1334684 | csusgga(Chd)AfaCfC | 4132 | VPusGfsugcAfgUfAfg | 2911 | ACCTGGACAACCACTACT | 3234 |
| | fAfcuacugcascsa | | uggUfuGfuccagsgsu | | GCACG | |
| AD-1334685 | csuscag(Chd)AfuCfC | 4133 | VPusGfsacuUfgUfAfg | 2912 | CCCTCAGCATCCACTACA | 3235 |
| | fAfcuacaaguscsa | | uggAfuGfcugagsgsg | | AGTCC | |
| AD-1334686 | gsusccu(Chd)AfcUfG | 4134 | VPusAfsccaUfgGfUfg | 2913 | TCGTCCTCACTGTCACCA | 3236 |
| | fUfcaccauggsusa | | acaGfuGfaggacsgsa | | TGGTG | |
| AD-1334687 | cscsuga(Uhd)CfcUfG | 4135 | VPusUfsuugGfuCfAfa | 2914 | GGCCTGATCCTGTTTGAC | 3237 |
| | fUfuugaccaasasa | | acaGfgAfucaggscsc | | CAAAT | |
| AD-1334688 | asgscgg(Uhd)UfuCfA | 4136 | VPusCfscguUfcUfUfg | 2915 | GCAGCGGTTTCAGCAAGA | 3238 |
| | fGfcaagaacgsgsa | | cugAfaAfccgcusgsc | | ACGGC | |
| AD-1334689 | csgsugu(Ghd)GfaCfA | 4137 | VPusAfsgggCfaGfGfa | 2916 | TGCGTGTGGACATTCCTG | 3239 |
| | fUfuccugcccsusa | | augUfcCfacacgscsa | | CCCTG | |
| AD-1334690 | gsusgag(Chd)GfuCfA | 4138 | VPusCfscauUfgAfAfg | 2917 | GCGTGAGCGTCACCTTCA | 3240 |
| | fCfcuucaaugsgsa | | gugAfcGfcucacsgsc | | ATGGC | |
| AD-1334691 | asgsccu(Chd)UfuCfC | 4139 | VPusGfsuguUfgUfUfg | 2918 | ACAGCCTCTTCCACAACA | 3241 |
| | fAfcaacaacascsa | | uggAfaGfaggcusgsu | | ACACC | |
| AD-1334692 | usgscac(Chd)AfaCfA | 4140 | VPusUfscccUfcUfGfg | 2919 | CCTGCACCAACAACCAGA | 3242 |
| | fAfccagagggsasa | | uugUfuGfgugcasgsg | | GGGAC | |
| AD-1334693 | usgsucu(Chd)CfaGfC | 4141 | VPusGfsuucCfgUfCfc | 2920 | ACTGTCTCCAGCGGGACG | 3243 |
| | fGfggacggaascsa | | cgcUfgGfagacasgsu | | GAACC | |
| AD-1334694 | csgscca(Ghd)UfuGfC | 4142 | VPusCfscauGfuCfCfu | 2921 | GCCGCCAGTTGCAAGGAC | 3244 |
| | fAfaggacaugsgsa | | ugcAfaCfuggcgsgsc | | ATGGC | |
| AD-1334695 | csgsaca(Ghd)CfaGfA | 4143 | VPusAfsgccAfuCfCfu | 2922 | CCCGACAGCAGAAAGGAT | 3245 |
| | fAfaggauggcsusa | | uucUfgCfugucgsgsg | | GGCTG | |
| AD-1334696 | cscsgcu(Chd)UfgUfG | 4144 | VPusAfsgcaUfcAfGfa | 2923 | AGCCGCTCTGTGATCTGA | 3246 |
| | fAfucugaugcsusa | | ucaCfaGfageggscsu | | TGCTG | |
| AD-1334697 | csasggu(Chd)UfuUfG | 4145 | VPusUfsggcAfcUfCfa | 2924 | GCCAGGTCTTTGCTGAGT | 3247 |
| | fCfugagugccsasa | | gcaAfaGfaccugsgsc | | GCCAC | |
| AD-1334698 | gsgsgcc(Chd)AfuUfC | 4146 | VPusAfsggcGfuUfGfa | 2925 | CCGGGCCCATTCTTCAAC | 3248 |
| | fUfucaacgccsusa | | agaAfuGfggcccsgsg | | GCCTG | |
| AD-1334699 | gsasggc(Uhd)UfaCfG | 4147 | VPusCfsagaGfcUfCfu | 2926 | TGGAGGCTTACGCAGAGC | 3249 |
| | fCfagagcucusgsa | | gcgUfaAfgccucscsa | | TCTGC | |
| AD-1334700 | asgsugu(Ghd)CfaGfU | 4148 | VPusCfsucgCfcAfGfu | 2927 | GGAGTGTGCAGTGACTGG | 3250 |
| | fGfacuggcgasgsa | | cacUfgCfacacuscsc | | CGAGG | |
| AD-1334701 | cscsacc(Ahd)AfaGfU | 4149 | VPusUfsggcUfuGfUfa | 2928 | ACCCACCAAAGTGTACAA | 3251 |
| | fGfuacaagccsasa | | cacUfuUfgguggsgsu | | GCCAT | |
| AD-1334702 | csusgca(Ahd)CfuCfU | 4150 | VPusUfscugGfuUfCfc | 2929 | ACCTGCAACTCTAGGAAC | 3252 |
| | fAfggaaccagsasa | | uagAfgUfugcagsgsu | | CAGAG | |
| AD-1334703 | csasgau(Chd)CfuCfU | 4151 | VPusUfsgugCfgUfUfg | 2930 | ACCAGATCCTCTTCAACG | 3253 |
| | fUfcaacgcacsasa | | aagAfgGfaucugsgsu | | CACAC | |
| AD-1334704 | gsgsgca(Uhd)CfuGfC | 4152 | VPusAfsggcCfuGfCfa | 2931 | ATGGGCATCTGCGTGCAG | 3254 |
| | fGfugcaggccsusa | | cgcAfgAfugcccsasu | | GCCTG | |
| AD-1334705 | csgsaug(Ghd)GfuUfU | 4153 | VPusGfsaaaUfuUfAfg | 2932 | CCCGATGGGTTTCCTAAA | 3255 |
| | fCfcuaaauuuscsa | | gaaAfcCfcaucgsgsg | | TTTCC | |
| AD-1334706 | gsgsuca(Ghd)CfaAfC | 4154 | VPusAfsggaCfuGfGfc | 2933 | TGGGTCAGCAACTGCCAG | 3256 |
| | fUfgccaguccsusa | | aguUfgCfugaccscsa | | TCCTG | |
| AD-1334707 | gsasggg(Uhd)UfcAfG | 4155 | VPusUfsgcaCfcGfAfc | 2934 | ACGAGGGTTCAGTGTCGG | 3257 |
| | fUfgucggugcsasa | | acuGfaAfcccucsgsu | | TGCAG | |
| AD-1334708 | csgsgcu(Uhd)CfgUfA | 4156 | VPusUfsgguCfaCfGfg | 2935 | CCCGGCTTCGTAACCGTG | 3258 |
| | fAfccgugaccsasa | | uuaCfgAfagccgsgsg | | ACCAG | |
| AD-1334709 | csgsugu(Ghd)CfaAfC | 4157 | VPusAfsgguGfgUfUfg | 2936 | TGCGTGTGCAACACAACC | 3259 |
| | fAfcaaccaccsusa | | uguUfgCfacacgscsa | | ACCTG | |
| AD-1334710 | csasgga(Ghd)UfcCfA | 4158 | VPusUfsgggUfgCfAfg | 2937 | GGCAGGAGTCCATCTGCA | 3260 |
| | fUfcugcacccsasa | | augGfaCfuccugscsc | | CCCAG | |
| AD-1334711 | csusguc(Chd)CfaCfC | 4159 | VPusUfsgcaGfcGfGfa | 2938 | TGCTGTCCCACCTTCCGC | 3261 |
| | fUfuccgcugcsasa | | aggUfgGfgacagscsa | | TGCAG | |
| AD-1334712 | uscsagc(Uhd)GfuGfU | 4160 | VPusCfsauuGfuAfCfg | 2939 | CCTCAGCTGTGTTCGTAC | 3262 |
| | fUfcguacaausgsa | | aacAfcAfgcugasgsg | | AATGG | |
| AD-1334713 | ususggu(Ghd)CfaAfC | 4161 | VPusGfsccuGfgGfAfa | 2940 | GGTTGGTGCAACCTTCCC | 3263 |
| | fCfuucccaggscsa | | gguUfgCfaccaascsc | | AGGCG | |
| AD-1334714 | uscsccu(Ghd)CfcAfC | 4162 | VPusAfsgguAfcAfCfa | 2941 | CTTCCCTGCCACATGTGT | 3264 |
| | fAfuguguaccsusa | | uguGfgCfagggasasg | | ACCTG | |
| AD-1334715 | ascsggu(Ghd)CfaAfU | 4163 | VPusUfsccuCfcUfGfa | 2942 | CAACGGTGCAATGTCAGG | 3265 |
| | fGfucaggaggsasa | | cauUfgCfaccgususg | | AGGAT | |
| AD-1334716 | csusgca(Ahd)CfaAfU | 4164 | VPusGfsacaGfgUfAfg | 2943 | GCCTGCAACAATACTACC | 3266 |
| | fAfcuaccuguscsa | | uauUfgUfugcagsgsc | | TGTCC | |
| AD-1334717 | gsgsgcu(Uhd)UfgAfG | 4165 | VPusCfsucuCfuUfGfu | 2944 | CAGGGCTTTGAGTACAAG | 3267 |
| | fUfacaagagasgsa | | acuCfaAfagcccsusg | | AGAGT | |
| AD-1334718 | gsuscca(Ghd)CfuGfA | 4166 | VPusCfsaggUfuUfCfa | 2945 | CAGTCCAGCTGAATGAAA | 3268 |
| | fAfugaaaccusgsa | | uucAfgCfuggacsusg | | CCTGG | |
| AD-1334719 | csasaca(Ghd)CfcAfU | 4167 | VPusAfsguuGfuCfCfa | 2946 | GTCAACAGCCATGTGGAC | 3269 |
| | fGfuggacaacsusa | | cauGfgCfuguugsasc | | AACTG | |
| AD-1334720 | cscsgug(Uhd)AfcCfU | 4168 | VPusAfsgccUfcAfCfa | 2947 | CACCGTGTACCTCTGTGA | 3270 |
| | fCfugugaggcsusa | | gagGfuAfcacggsusg | | GGCTG | |
| AD-1334721 | gsgsugg(Ahd)GfuCfC | 4169 | VPusGfsucaGfcAfAfa | 2948 | AGGGTGGAGTCCATTTGC | 3271 |
| | fAfuuugcugascsa | | uggAfcUfccaccscsu | | TGACC | |
| AD-1334722 | csusgcc(Chd)AfgAfU | 4170 | VPusAfsgcuGfgAfCfa | 2949 | TCCTGCCCAGATGTGTCC | 3272 |
| | fGfuguccagcsusa | | cauCfuGfggcagsgsa | | AGCTG | |
| AD-1334723 | gscsugc(Uhd)AfcUfC | 4171 | VPusCfsuccUfcAfCfa | 2950 | CTGCTGCTACTCCTGTGA | 3273 |
| | fCfugugaggasgsa | | ggaGfuAfgcagcsasg | | GGAGG | |
| AD-1334724 | uscscug(Uhd)CfaAfG | 4172 | VPusUfsugaUfgCfGfg | 2951 | ACTCCTGTCAAGTCCGCA | 3274 |
| | fUfccgcaucasasa | | acuUfgAfcaggasgsu | | TCAAC | |
| AD-1334725 | gsascca(Uhd)CfcUfG | 4173 | VPusCfscugGfuGfCfc | 2952 | ACGACCATCCTGTGGCAC | 3275 |
| | fUfggcaccagsgsa | | acaGfgAfuggucsgsu | | CAGGG | |
| AD-1320631 | gsgsuca(Ahd)CfaUfC | 4174 | VPusCfsgcaGfaAfGfg | 2953 | GAGGTCAACATCACCTTC | 3276 |
| | fAfccuucugcsgsa | | ugaUfgUfugaccsusc | | TGCGA | |
| AD-1334726 | csgsucc(Ahd)AfgUfA | 4175 | VPusCfsucuGfcUfGfa | 2954 | AGCGTCCAAGTACTCAGC | 3277 |
| | fCfucagcagasgsa | | guaCfuUfggacgscsu | | AGAGG | |
| AD-1334727 | asusgca(Ghd)CfaCfC | 4176 | VPusCfsaggUfgCfAfc | 2955 | CCATGCAGCACCAGTGCA | 3278 |
| | fAfgugcaccusgsa | | uggUfgCfugcausgsg | | CCTGC | |
| AD-1334728 | gscsccu(Uhd)GfcAfC | 4177 | VPusCfsguuAfgGfAfc | 2956 | GTGCCCTTGCACTGTCCT | 3279 |
| | fUfguccuaacsgsa | | aguGfcAfagggcsasc | | AACGG | |
| AD-1334729 | csusgca(Chd)AfcCfU | 4178 | VPusAfscguGfgGfUfg | 2957 | TCCTGCACACCTACACCC | 3280 |
| | fAfcacccacgsusa | | uagGfuGfugcagsgsa | | ACGTG | |
| AD-1334730 | gscsacg(Chd)CfcUfU | 4179 | VPusAfsgggAfcAfCfa | 2958 | CTGCACGCCCTTCTGTGT | 3281 |
| | fCfugugucccsusa | | gaaGfgGfcgugcsasg | | CCCTG | |
| AD-1334731 | ascsugc(Uhd)GfuCfU | 4180 | VPusGfsaacGfuUfCfu | 2959 | CCACTGCTGTCTGAGAAC | 3282 |
| | fGfagaacguuscsa | | cagAfcAfgcagusgsg | | GTTCT | |
| AD-1334732 | csasugc(Uhd)CfuGfU | 4181 | VPusCfsuccAfgGfUfg | 2960 | CCCATGCTCTGTCCACCT | 3283 |
| | fCfcaccuggasgsa | | gacAfgAfgcaugsgsg | | GGAGC | |
| AD-1334733 | gscsauu(Ghd)UfcUfG | 4182 | VPusUfsuuuCfaUfGfa | 2961 | GTGCATTGTCTGATCATG | 3284 |
| | fAfucaugaaasasa | | ucaGfaCfaaugcsasc | | AAAAC | |
| AD-1334734 | gsgscgc(Chd)AfcUfC | 4183 | VPusUfsaggAfcUfCfc | 2962 | AGGGCGCCACTCAGGAGT | 3285 |
| | fAfggaguccusasa | | ugaGfuGfgcgccscsu | | CCTAC | |
| AD-1334735 | csusccc(Uhd)GfaUfG | 4184 | VPusGfsuccCfaGfUfg | 2963 | CCCTCCCTGATGTCACTG | 3286 |
| | fUfcacugggascsa | | acaUfcAfgggagsgsg | | GGACG | |
| AD-1334736 | csusgga(Ahd)CfaAfA | 4185 | VPusAfscauGfcUfUfa | 2964 | CCCTGGAACAAACTAAGC | 3287 |
| | fCfuaagcaugsusa | | guuUfgUfuccagsgsg | | ATGTG | |
| AD-1334737 | gscsacg(Ghd)AfuUfC | 4186 | VPusUfsggcCfaGfCfu | 2965 | CAGCACGGATTCCAGCTG | 3288 |
| | fCfagcuggccsasa | | ggaAfuCfcgugcsusg | | GCCAC | |
| AD-1334738 | gsascag(Ghd)CfuGfG | 4187 | VPusCfsuugCfcUfGfg | 2966 | CAGACAGGCTGGTCCAGG | 3289 |
| | fUfccaggcaasgsa | | accAfgCfcugucsusg | | CAAGG | |
| AD-1334739 | gscsugc(Chd)AfgGfA | 4188 | VPusUfsgucGfcAfGfc | 2967 | CTGCTGCCAGGAAGCTGC | 3290 |
| | fAfgcugcgacsasa | | uucCfuGfgcagcsasg | | GACAG | |
| AD-1334740 | gscsagg(Ghd)UfaAfC | 4189 | VPusUfscagCfcCfUfg | 2968 | CTGCAGGGTAACTCAGGG | 3291 |
| | fUfcagggcugsasa | | aguUfaCfccugcsasg | | CTGAG | |
| AD-1334741 | gscsaac(Ghd)GfcCfA | 4190 | VPusCfsucuCfuGfAfc | 2969 | TCGCAACGGCCAGGTCAG | 3292 |
| | fGfgucagagasgsa | | cugGfcCfguugcsgsa | | AGAGG | |
| AD-1334742 | asgsccc(Ahd)GfuUfU | 4191 | VPusUfsuuaUfuUfGfc | 2970 | CCAGCCCAGTTTTGCAAA | 3293 |
| | fUfgcaaauaasasa | | aaaAfcUfgggcusgsg | | TAAAC | |

TABLE 8
MUC5B Single Dose In Vitro Screen in A549 Cells.

MUC5B/gapdh
10 nM

| DUPLEX ID | mean | SD |
|---|---|---|
| AD-1334420.1 | 0.273 | 0.030 |
| AD-1334419.1 | 0.738 | 0.047 |
| AD-1334418.1 | 0.408 | 0.050 |
| AD-1334417.1 | 0.645 | 0.050 |
| AD-1334416.1 | 0.653 | 0.078 |
| AD-1334415.1 | 0.483 | 0.038 |
| AD-1334414.1 | 0.260 | 0.028 |
| AD-1334413.1 | 0.378 | 0.115 |
| AD-1334412.1 | 0.604 | 0.108 |
| AD-1334411.1 | 0.203 | 0.019 |
| AD-1334410.1 | 0.377 | 0.057 |
| AD-1334409.1 | 0.199 | 0.019 |
| AD-1334408.1 | 0.247 | 0.044 |
| AD-1334407.1 | 0.704 | 0.074 |
| AD-1334406.1 | 0.657 | 0.085 |
| AD-1334405.1 | 0.326 | 0.034 |
| AD-1334404.1 | 0.240 | 0.012 |
| AD-1334403.1 | 0.271 | 0.014 |
| AD-1334402.1 | 0.670 | 0.032 |
| AD-1334401.1 | 0.275 | 0.029 |
| AD-1334400.1 | 0.274 | 0.092 |
| AD-1334399.1 | 0.529 | 0.099 |
| AD-1334398.1 | 0.370 | 0.073 |
| AD-1334397.1 | 0.433 | 0.084 |
| AD-1334396.1 | 0.356 | 0.042 |
| AD-1334395.1 | 0.246 | 0.009 |
| AD-1334394.1 | 0.245 | 0.037 |
| AD-1334393.1 | 0.175 | 0.024 |
| AD-1334392.1 | 0.382 | 0.063 |
| AD-1334391.1 | 0.474 | 0.053 |
| AD-1334390.1 | 0.335 | 0.011 |
| AD-1334389.1 | 0.242 | 0.038 |
| AD-1334388.1 | 0.386 | 0.033 |
| AD-1334387.1 | 0.320 | 0.052 |
| AD-1334386.1 | 0.302 | 0.022 |
| AD-1334385.1 | 0.344 | 0.043 |
| AD-1334384.1 | 0.241 | 0.041 |
| AD-1334383.1 | 0.359 | 0.096 |
| AD-1334382.1 | 0.179 | 0.080 |
| AD-1334381.1 | 0.401 | 0.049 |
| AD-1334380.1 | 0.351 | 0.006 |
| AD-1334379.1 | 0.266 | 0.037 |
| AD-1334378.1 | 0.435 | 0.073 |
| AD-1334377.1 | 0.519 | 0.112 |
| AD-1334376.1 | 0.330 | 0.042 |
| AD-1334375.1 | 0.420 | 0.028 |
| AD-1334374.1 | 0.270 | 0.032 |
| AD-1334373.1 | 0.249 | 0.026 |
| AD-1334372.1 | 0.544 | 0.035 |
| AD-1334371.1 | 0.427 | 0.057 |
| AD-1334370.1 | 0.702 | 0.060 |
| AD-1334369.1 | 0.775 | 0.090 |
| AD-1334368.1 | 0.234 | 0.032 |
| AD-1334367.1 | 0.303 | 0.037 |
| AD-1334366.1 | 0.386 | 0.054 |
| AD-1334365.1 | 0.433 | 0.019 |
| AD-1334364.1 | 0.199 | 0.062 |
| AD-1334363.1 | 0.749 | 0.119 |
| AD-1334362.1 | 0.474 | 0.089 |
| AD-1334361.1 | 0.449 | 0.060 |
| AD-1334360.1 | 0.359 | 0.043 |
| AD-1334359.1 | 0.192 | 0.085 |
| AD-1334358.1 | 0.322 | 0.017 |
| AD-1334357.1 | 0.318 | 0.033 |
| AD-1334356.1 | 0.269 | 0.010 |
| AD-1334355.1 | 0.690 | 0.184 |
| AD-1334354.1 | 0.266 | 0.055 |
| AD-1334353.1 | 0.201 | 0.053 |
| AD-1334352.1 | 0.343 | 0.037 |
| AD-1334351.1 | 0.208 | 0.034 |
| AD-1334350.1 | 0.290 | 0.025 |
| AD-1334349.1 | 0.287 | 0.029 |
| AD-1334348.1 | 0.293 | 0.118 |
| AD-1334347.1 | 0.167 | 0.044 |
| AD-1334346.1 | 0.206 | 0.071 |
| AD-1334345.1 | 0.357 | 0.145 |
| AD-1334344.1 | 0.566 | 0.199 |
| AD-1334343.1 | 0.226 | 0.083 |
| AD-1334342.1 | 0.377 | 0.181 |
| AD-1334341.1 | 0.389 | 0.051 |
| AD-1334340.1 | 0.655 | 0.029 |
| AD-1334339.1 | 0.390 | 0.036 |
| AD-1334272.1 | 0.404 | 0.038 |
| AD-1334338.1 | 0.346 | 0.048 |
| AD-1334337.1 | 0.467 | 0.073 |
| AD-1334336.1 | 0.633 | 0.036 |
| AD-1334335.1 | 0.350 | 0.033 |
| AD-1334334.1 | 0.239 | 0.070 |
| AD-1334333.1 | 0.433 | 0.133 |
| AD-1334331.1 | 0.736 | 0.091 |
| AD-1334296.1 | 0.243 | 0.085 |
| AD-1334330.1 | 0.438 | 0.042 |
| AD-1334294.1 | 0.346 | 0.015 |
| AD-1334329.1 | 0.307 | 0.042 |
| AD-1334328.1 | 0.632 | 0.160 |
| AD-1334250.1 | 0.480 | 0.105 |
| AD-1334249.1 | 0.324 | 0.036 |
| AD-1334248.1 | 0.281 | 0.033 |
| AD-1334327.1 | 0.428 | 0.047 |
| AD-1334318.1 | 0.436 | 0.143 |
| AD-1334245.1 | 0.336 | 0.058 |
| AD-1334310.1 | 0.641 | 0.061 |
| AD-1334309.1 | 0.371 | 0.112 |
| AD-1334242.1 | 0.402 | 0.047 |
| AD-1334278.1 | 0.383 | 0.027 |
| AD-1334240.1 | 0.374 | 0.122 |
| AD-1334277.1 | 0.299 | 0.095 |
| AD-1334236.1 | 0.468 | 0.023 |
| AD-1334326.1 | 0.662 | 0.062 |
| AD-1334234.1 | 0.328 | 0.021 |
| AD-1334325.1 | 0.739 | 0.165 |
| AD-1334274.1 | 0.576 | 0.229 |
| AD-1334273.1 | 0.412 | 0.021 |
| AD-1334320.1 | 0.499 | 0.133 |
| AD-1334302.1 | 0.630 | 0.018 |
| AD-1334270.1 | 0.391 | 0.028 |
| AD-1334324.1 | 0.293 | 0.052 |
| AD-1334300.1 | 0.261 | 0.068 |
| AD-1334299.1 | 0.284 | 0.007 |
| AD-1334323.1 | 0.474 | 0.075 |
| AD-1334293.1 | 0.239 | 0.026 |
| AD-1334322.1 | 0.363 | 0.044 |
| AD-1334321.1 | 0.606 | 0.040 |
| AD-1334319.1 | 0.366 | 0.027 |
| AD-1334269.1 | 0.523 | 0.030 |
| AD-1334268.1 | 0.452 | 0.046 |
| AD-1334267.1 | 0.232 | 0.033 |
| AD-1334266.1 | 0.319 | 0.027 |
| AD-1334265.1 | 0.563 | 0.005 |
| AD-1334264.1 | 0.368 | 0.033 |
| AD-1334263.1 | 0.271 | 0.015 |
| AD-1334315.1 | 0.744 | 0.043 |
| AD-1334261.1 | 0.689 | 0.021 |
| AD-1334289.1 | 0.577 | 0.013 |
| AD-1334288.1 | 0.276 | 0.010 |
| AD-1334256.1 | 0.339 | 0.008 |
| AD-1334255.1 | 0.390 | 0.026 |
| AD-1334287.1 | 0.857 | 0.091 |
| AD-1334253.1 | 0.808 | 0.073 |
| AD-1334286.1 | 0.328 | 0.010 |
| AD-1334285.1 | 0.636 | 0.045 |
| AD-1334284.1 | 0.600 | 0.057 |
| AD-1334279.1 | 0.249 | 0.013 |
| AD-1334241.1 | 0.266 | 0.075 |
| AD-1334276.1 | 0.335 | 0.021 |
| AD-1334275.1 | 0.329 | 0.044 |
| AD-1334271.1 | 0.381 | 0.034 |
| AD-1334317.1 | 0.245 | 0.023 |
| AD-1334316.1 | 0.467 | 0.044 |
| AD-1334314.1 | 0.368 | 0.022 |
| AD-1334313.1 | 0.266 | 0.023 |
| AD-1334312.1 | 0.472 | 0.040 |
| AD-1334311.1 | 0.320 | 0.051 |
| AD-1334247.1 | 0.467 | 0.010 |
| AD-1334246.1 | 0.375 | 0.022 |
| AD-1334308.1 | 0.284 | 0.015 |
| AD-1334307.1 | 0.702 | 0.045 |
| AD-1334306.1 | 0.291 | 0.065 |
| AD-1334305.1 | 0.308 | 0.054 |
| AD-1334304.1 | 0.275 | 0.036 |
| AD-1334303.1 | 0.430 | 0.110 |
| AD-1334301.1 | 0.319 | 0.050 |
| AD-1334297.1 | 0.433 | 0.019 |
| AD-1334295.1 | 0.697 | 0.041 |
| AD-1334292.1 | 0.303 | 0.041 |
| AD-1334291.1 | 0.397 | 0.080 |
| AD-1334290.1 | 0.359 | 0.049 |
| AD-1334262.1 | 0.559 | 0.041 |
| AD-1334283.1 | 0.280 | 0.025 |
| AD-1334282.1 | 0.330 | 0.063 |
| AD-1334281.1 | 0.261 | 0.011 |
| AD-1334280.1 | 0.268 | 0.010 |
| AD-1334260.1 | 0.550 | 0.036 |
| AD-1334259.1 | 0.223 | 0.031 |
| AD-1334258.1 | 0.812 | 0.055 |
| AD-1334257.1 | 0.454 | 0.035 |
| AD-1334254.1 | 0.486 | 0.029 |
| AD-1334252.1 | 0.372 | 0.138 |
| AD-1334251.1 | 0.817 | 0.229 |
| AD-1334244.1 | 0.302 | 0.051 |
| AD-1334243.1 | 0.287 | 0.024 |
| AD-1334238.1 | 0.675 | 0.159 |
| AD-1334237.1 | 0.693 | 0.030 |
| AD-1334235.1 | 0.427 | 0.063 |
| AD-1334233.1 | 0.300 | 0.010 |
| AD-1334232.1 | 0.490 | 0.072 |
| AD-1334231.1 | 0.472 | 0.041 |
| AD-1334230.1 | 0.280 | 0.060 |
| AD-1334229.1 | 0.355 | 0.039 |
| AD-1334228.1 | 0.394 | 0.061 |
| AD-1334227.1 | 0.226 | 0.043 |
| AD-1334226.1 | 0.714 | 0.146 |
| AD-1334225.1 | 0.230 | 0.051 |
| AD-1334224.1 | 0.491 | 0.086 |
| AD-1334223.1 | 0.273 | 0.019 |
| AD-1334222.1 | 0.493 | 0.180 |
| AD-1334221.1 | 0.343 | 0.027 |
| AD-1334220.1 | 0.289 | 0.027 |
| AD-1334219.1 | 0.349 | 0.055 |
| AD-1334218.1 | 0.642 | 0.051 |
| AD-1334217.1 | 0.998 | 0.116 |
| AD-1334216.1 | 0.479 | 0.048 |
| AD-1334215.1 | 0.543 | 0.092 |
| AD-1334214.1 | 1.007 | 0.023 |
| AD-1334213.1 | 0.218 | 0.049 |
| AD-1334212.1 | 0.282 | 0.025 |
| AD-1334211.1 | 0.645 | 0.070 |
| AD-1334209.1 | 0.654 | 0.054 |
| AD-1334208.1 | 0.886 | 0.078 |
| AD-1334207.1 | 0.190 | 0.012 |
| AD-1334206.1 | 0.364 | 0.083 |
| AD-1334205.1 | 0.692 | 0.006 |
| AD-1334204.1 | 1.004 | 0.142 |
| AD-1334203.1 | 0.780 | 0.160 |
| AD-1334202.1 | 1.006 | 0.043 |
| AD-1334201.1 | 0.303 | 0.030 |
| AD-1334200.1 | 0.331 | 0.036 |
| AD-1334199.1 | 0.790 | 0.139 |
| AD-1334198.1 | 0.270 | 0.094 |
| AD-1334197.1 | 0.810 | 0.027 |
| AD-1334196.1 | 0.550 | 0.026 |
| AD-1334195.1 | 0.570 | 0.038 |
| AD-1334194.1 | 0.321 | 0.094 |
| AD-1334193.1 | 0.571 | 0.065 |
| AD-1334192.1 | 0.729 | 0.096 |
| AD-1334191.1 | 0.422 | 0.021 |
| AD-1334190.1 | 0.917 | 0.107 |
| AD-1334189.1 | 0.347 | 0.048 |
| AD-1334188.1 | 0.699 | 0.171 |
| AD-1334187.1 | 0.560 | 0.058 |
| AD-1334186.1 | 0.230 | 0.015 |
| AD-1334185.1 | 0.551 | 0.109 |
| AD-1334184.1 | 0.540 | 0.013 |
| AD-1334183.1 | 0.286 | 0.024 |
| AD-1334182.1 | 0.431 | 0.041 |
| AD-1334181.1 | 0.545 | 0.067 |
| AD-1334180.1 | 0.509 | 0.068 |
| AD-1334179.1 | 0.935 | 0.225 |
| AD-1334178.1 | 0.303 | 0.053 |
| AD-1334177.1 | 0.821 | 0.170 |
| AD-1334176.1 | 0.744 | 0.065 |
| AD-1334175.1 | 1.290 | 0.351 |
| AD-1334174.1 | 0.984 | 0.581 |
| AD-1334173.1 | 0.428 | 0.120 |
| AD-1334172.1 | 0.549 | 0.068 |
| AD-1334171.1 | 0.468 | 0.124 |
| AD-1334170.1 | 0.505 | 0.068 |
| AD-1334169.1 | 0.249 | 0.026 |
| AD-1334168.1 | 0.213 | 0.026 |
| AD-1334167.1 | 0.259 | 0.032 |
| AD-1334166.1 | 0.694 | 0.442 |
| AD-1334165.1 | 0.324 | 0.106 |
| AD-1334164.1 | 0.391 | 0.046 |
| AD-1334163.1 | 0.480 | 0.067 |
| AD-1334162.1 | 0.734 | 0.214 |
| AD-1334161.1 | 0.210 | 0.025 |
| AD-1334160.1 | 0.642 | 0.031 |
| AD-1334159.1 | 0.545 | 0.027 |
| AD-1334158.1 | 0.439 | 0.015 |
| AD-1334157.1 | 0.425 | 0.026 |
| AD-1334156.1 | 0.442 | 0.024 |
| AD-1334155.1 | 0.448 | 0.043 |
| AD-1334154.1 | 0.450 | 0.020 |
| AD-1334153.1 | 0.636 | 0.080 |
| AD-1334152.1 | 0.483 | 0.059 |
| AD-1334151.1 | 0.313 | 0.016 |
| AD-1334150.1 | 0.604 | 0.066 |
| AD-1334149.1 | 0.539 | 0.095 |
| AD-1334148.1 | 0.370 | 0.008 |
| AD-1334147.1 | 0.332 | 0.039 |
| AD-1334146.1 | 0.262 | 0.043 |
| AD-1334145.1 | 0.903 | 0.041 |
| AD-1334144.1 | 0.912 | 0.168 |
| AD-1334143.1 | 0.330 | 0.033 |
| AD-1334142.1 | 0.825 | 0.021 |
| AD-1334141.1 | 0.493 | 0.058 |
| AD-1334140.1 | 0.528 | 0.012 |
| AD-1334139.1 | 0.946 | 0.113 |
| AD-1334138.1 | 0.439 | 0.101 |
| AD-1334136.1 | 0.423 | 0.078 |
| AD-1334135.1 | 0.309 | 0.109 |
| AD-1334134.1 | 0.311 | 0.030 |
| AD-1334133.1 | 0.712 | 0.147 |
| AD-1334132.1 | 0.485 | 0.153 |
| AD-1334131.1 | 0.160 | 0.085 |
| AD-1334130.1 | 0.516 | 0.028 |
| AD-1334129.1 | 0.496 | 0.030 |
| AD-1334128.1 | 0.378 | 0.020 |
| AD-1334127.1 | 0.422 | 0.028 |
| AD-1334126.1 | 0.586 | 0.037 |
| AD-1334125.1 | 0.731 | 0.098 |
| AD-1334124.1 | 0.224 | 0.052 |
| AD-1334123.1 | 0.286 | 0.066 |
| AD-1334122.1 | 0.801 | 0.064 |
| AD-1334121.1 | 1.017 | 0.095 |
| AD-1334120.1 | 0.424 | 0.052 |
| AD-1334119.1 | 0.578 | 0.056 |
| AD-1334118.1 | 0.573 | 0.014 |
| AD-1334117.1 | 0.500 | 0.034 |
| AD-1334116.1 | 0.394 | 0.009 |
| AD-1334115.1 | 0.455 | 0.047 |
| AD-1334114.1 | 0.949 | 0.041 |
| AD-1334113.1 | 0.928 | 0.090 |
| AD-1334112.1 | 0.883 | 0.147 |
| AD-1334111.1 | 0.467 | 0.017 |
| AD-1334110.1 | 0.443 | 0.027 |
| AD-1334109.1 | 0.438 | 0.042 |
| AD-1334108.1 | 0.243 | 0.019 |
| AD-1334107.1 | 0.477 | 0.074 |
| AD-1334106.1 | 0.755 | 0.048 |
| AD-1334105.1 | 0.788 | 0.062 |
| AD-1334104.1 | 0.502 | 0.078 |
| AD-1334103.1 | 0.317 | 0.042 |
| AD-1334102.1 | 0.282 | 0.051 |
| AD-1334101.1 | 0.321 | 0.054 |
| AD-1334100.1 | 0.679 | 0.029 |
| AD-1334099.1 | 0.196 | 0.061 |
| AD-1334098.1 | 0.683 | 0.086 |
| AD-1334097.1 | 0.860 | 0.127 |

### Example 3. In Vivo Screening of dsRNA Duplexes in Mice

[0734] siRNA molecules targeting the MUC5B gene, identified from the above in vitro studies, are evaluated in vivo.

[0735] For example, the siRNA molecules may be assessed for theit ability to decrease MUC5B expression in a transgenic mouse overexpressing human MUC5b. Alternatively or in addition, suitable animal models of lung diseases may be used. Some examples of available models of pulmonary fibrosis include the bleomycin mouse model of pulmonary fibrosis (Muggia F M, et al. (1983). Cancer Treat Rev 10: 221-243); the FITC-induced model for pulmonary fibrosis (Roberts S N, et al. (1995). J Pathol 176: 309-318); irradiation-induced pulmonary fibrosis mice (Rube C E, et al. (2000) Int J Radiat Oncol Biol Phys 47: 1033-1042); and instillation of mineral fibers into the rodent lung (Davis G S, et al. (1998) J Environ Pathol Toxicol Oncol 17: 81-97). Exemplary animal models of cystic fibrosis include the CFTR knockout mouse models (Semaniakou A, et al. Front Pharmacol. 2018; 9: 1475). Some examples of animal models for chronic obstructive pulmonary disease (COPD) include cigarette/smoke-induced model for COPD, and lipopolysaccharide (LPS)-induced model for COPD (Ghorani, V et al, Tob Induc Dis. 2017; 15: 25). Many of the mouse models are commercially available from the Jackson Laboratory or Chrales River.

[0736] Selected dsRNA agents designed and assayed in Example 1 are assessed for their ability to reduce the level of MUC5B expression in these animal models and to clear pulmonary fibrosis or mucus buildup in the lung.

[0737] Mice are administered, via pulmonary or subcutaneous delivery, a dsRNA molecule at a dose of 0.1 mg/kg, 1 mg/kg or 10 mg/kg. Uptake of dsRNA in bronchioles and alveoli and expression level of MUC5B in whole lung of treated mice is measured. Expression levels of MUC5B are further evaluated by in situ hybridization in mice bronchus and bronchiole.

### Example 4. In Vitro Analysis of Duplexes Targeting MUC5B

[0738] Additional duplexes targeting mouse MUC5B (mouse NCBI refseqID: NM_028801.2; NCBI GeneID: 74180) were designed and synthesized as described above. The mouse NM_028801.2 REFSEQ mRNA has a length of 14963 bases.

[0739] A detailed list of a set of the unmodified dsRNA sense and antisense strand sequences targeting MUC5B is shown in Table 9.

[0740] A detailed list of a set of the modified dsRNA sense and antisense strand sequences targeting MUC5B is shown in Table 10.

[0741] These duplexes were assessed for activity in single dose screens using the dual luciferase screening assay described above.

[0742] Briefly, Cos7 cells were transfected by adding 50 μL of dsRNA duplexes and 75 ng per well of mouse MUC5B plasmid encoding a portion of the murine MUC5B gene targeted by the duplex being assessed along with 100 μL of Opti-MEM plus 0.5 μL of Lipofectamine 2000 per well (Invitrogen, Carlsbad CA. cat #13778-150) and then incubated at room temperature for 15 minutes. The mixture was then added to the cells which are re-suspended in 35 μL of fresh complete media. The transfected cells were incubated at 37° C. in an atmosphere of 5% CO2. Single-dose experiments were performed at 10 nM, 1.0 nM, and 0.1 nM.

[0743] Twenty-four hours after the siRNAs and psiCHECK2 plasmid were transfected, Firefly (transfection control) and Renilla (fused to MUC5B target sequence) luciferase were measured. First, media was removed from cells. Then Firefly luciferase activity was measured by adding 75 μL of Dual-Glo® Luciferase Reagent equal to the culture medium volume to each well and mixing. The mixture was incubated at room temperature for 30 minutes before luminescense (500 nm) was measured on a Spectramax (Molecular Devices) to detect the Firefly luciferase signal. Renilla luciferase activity was measured by adding 75 μL of room temperature of Dual-Glo® Stop & Glo® Reagent to each well and the plates were incubated for 10-15 minutes before luminescence was again measured to determine the Renilla luciferase signal. The Dual-Glo® Stop & Glo® Reagent quenches the firefly luciferase signal and sustained luminescence for the Renilla luciferase reaction. siRNA activity was determined by normalizing the Renilla (MUC5B) signal to the Firefly (control) signal within each well. The magnitude of siRNA activity was then assessed relative to cells that were transfected with the same vector but were not treated with siRNA or were treated with a non-targeting siRNA. All transfections were done with n=4.

[0744] The results of these assays are shown in Table 11 and in FIG. 1.

TABLE 9
Unmodified Sense and Antisense Strand MUC5B dsRNA Sequences

| | | SEQ | Range in | | SEQ | Range in |
|---|---|---|---|---|---|---|
| Duplex | Sense Sequence | ID | NM_ | Antisense Sequence | ID | NM_ |
| Name | 5′ to 3′ | NO: | 028801.2 | 5′ to 3′ | NO: | 028801.2 |
| AD- | CCAGCUGUCAGUGAGUUCUAA | 4192 | 697-717 | UUAGAACUCACUGACAGCUGGGA | 4214 | 695-717 |
| 1311859.1 | | | | | | |
| AD- | UGAACUCCAUCUUUACGCAGA | 4193 | 1562-1582 | UCUGCGUAAAGAUGGAGUUCAGG | 4215 | 1560-1582 |
| 1312581.1 | | | | | | |
| AD- | AUCCUUCUUCAUCAUAGUACA | 4194 | 1623-1643 | UGUACUAUGAUGAAGAAGGAUGA | 4216 | 1621-1643 |
| 1312642.1 | | | | | | |
| AD- | GGUUGACUCUACAAAAUACUA | 4195 | 3360-3380 | UAGUAUUUUGUAGAGUCAACCUG | 4217 | 3358-3380 |
| 1314054.1 | | | | | | |
| AD- | UGACUCUACAAAAUACUAUGA | 4196 | 3363-3383 | UCAUAGUAUUUUGUAGAGUCAAC | 4218 | 3361-3383 |
| 1314057.1 | | | | | | |
| AD- | ACUCUACAAAAUACUAUGAAA | 4197 | 3365-3385 | UUUCAUAGUAUUUUGUAGAGUCA | 4219 | 3363-3385 |
| 1314059.1 | | | | | | |
| AD- | CUCUACAAAAUACUAUGAAGA | 4198 | 3366-3386 | UCUUCAUAGUAUUUUGUAGAGUC | 4220 | 3364-3386 |
| 1314060.1 | | | | | | |
| AD- | UCACUUCAACUUCUAUGUCGA | 4199 | 4553-4573 | UCGACAUAGAAGUUGAAGUGAGU | 4221 | 4551-4573 |
| 1315057.1 | | | | | | |
| AD- | AGUCUCUCUACCUUUCCAGCA | 4200 | 8602-8622 | UGCUGGAAAGGUAGAGAGACUAG | 4222 | 8600-8622 |
| 1316271.1 | | | | | | |
| AD- | GGUCUCAACGACAGAAACUGA | 4201 | 5079-5099 | UCAGUUUCUGUCGUUGAGACCGA | 4223 | 5077-5099 |
| 1316856.1 | | | | | | |
| AD- | CCUCUUCCCAACACUAGUCUA | 4202 | 10549-10569 | UAGACUAGUGUUGGGAAGAGGCA | 4224 | 10547-10569 |
| 1317692.1 | | | | | | |
| AD- | GUGCUUUAACUACAAUAUACA | 4203 | 11154-11174 | UGUAUAUUGUAGUUAAAGCACAU | 4225 | 11152-11174 |
| 1318239.1 | | | | | | |
| AD- | UCCACCUUUCAGACUAACCGA | 4204 | 11278-11298 | UCGGUUAGUCUGAAAGGUGGACU | 4226 | 11276-11298 |
| 1318336.1 | | | | | | |
| AD- | CCACCUUUCAGACUAACCGUA | 4205 | 11279-11299 | UACGGUUAGUCUGAAAGGUGGAC | 4227 | 11277-11299 |
| 1318337.1 | | | | | | |
| AD- | CACCUUUCAGACUAACCGUCA | 4206 | 11280-11300 | UGACGGUUAGUCUGAAAGGUGGA | 4228 | 11278-11300 |
| 1318338.1 | | | | | | |
| AD- | GGAUAUCAUCUACAAUAAGAA | 4207 | 12054-12074 | UUCUUAUUGUAGAUGAUAUCCCC | 4229 | 12052-12074 |
| 1318879.1 | | | | | | |
| AD- | CUCUACCACUGUACCUUUGCA | 4208 | 12171-12191 | UGCAAAGGUACAGUGGUAGAGGA | 4230 | 12169-12191 |
| 1318976.1 | | | | | | |
| AD- | CUACCACUGUACCUUUGCCUA | 4209 | 12173-12193 | UAGGCAAAGGUACAGUGGUAGAG | 4231 | 12171-12193 |
| 1318978.1 | | | | | | |
| AD- | GGCAACAAUCAAAUCAUUCUA | 4210 | 12283-12303 | UAGAAUGAUUUGAUUGUUGCCCU | 4232 | 12281-12303 |
| 1319047.1 | | | | | | |
| AD- | UGCCACUUCCACUACGAGUGA | 4211 | 12379-12399 | UCACUCGUAGUGGAAGUGGCAAG | 4233 | 12377-12399 |
| 1319143.1 | | | | | | |
| AD- | CACUUCCACUACGAGUGUGAA | 4212 | 12382-12402 | UUCACACUCGUAGUGGAAGUGGC | 4234 | 12380-12402 |
| 1319146.1 | | | | | | |
| AD- | CCAGAUGCCUUCUUCAGAAGA | 4213 | 13105-13125 | UCUUCUGAAGAAGGCAUCUGGAG | 4235 | 13103-13125 |
| 1319731.1 | | | | | | |

TABLE 10
Modified Sense and Antisense Strand MUC5B dsRNA Sequences

| | | SEQ | Antisense | SEQ | | SEQ |
|---|---|---|---|---|---|---|
| Duplex | Sense Sequence | ID | Sequence | ID | mRNA Target | ID |
| Name | 5′ to 3′ | NO: | 5′ to 3′ | NO: | Sequence | NO: |
| AD- | cscsagc(Uhd)Gfu | 4236 | VPusUfsagaAfcUf | 4258 | UCCCAGCUGUCAGUG | 4280 |
| 1311859.1 | CfAfGfugaguucus | | CfacugAfcAfgcug | | AGUUCUAC | |
| | asa | | gsgsa | | | |
| AD- | usgsaac(Uhd)Cfc | 4237 | VPusCfsugcGfuAf | 4259 | CCUGAACUCCAUCUU | 4281 |
| 1312581.1 | AfUfCfuuuacgcas | | AfagauGfgAfguuc | | UACGCAGA | |
| | gsa | | asgsg | | | |
| AD- | asusccu(Uhd)Cfu | 4238 | VPusGfsuacUfaUf | 4260 | UCAUCCUUCUUCAUC | 4282 |
| 1312642.1 | UfCfAfucauaguas | | GfaugaAfgAfagga | | AUAGUACA | |
| | csa | | usgsa | | | |
| AD- | gsgsuug(Ahd)Cfu | 4239 | VPusAfsguaUfuUf | 4261 | CAGGUUGACUCUACA | 4283 |
| 1314054.1 | CfUfAfcaaaauacs | | UfguagAfgUfcaac | | AAAUACUA | |
| | usa | | csusg | | | |
| AD- | usgsacu(Chd)Ufa | 4240 | VPusCfsauaGfuAf | 4262 | GUUGACUCUACAAAA | 4284 |
| 1314057.1 | CfAfAfaauacuaus | | UfuuugUfaGfaguc | | UACUAUGA | |
| | gsa | | asasc | | | |
| AD- | ascsucu(Ahd)Cfa | 4241 | VPusUfsucaUfaGf | 4263 | UGACUCUACAAAAUA | 4285 |
| 1314059.1 | AfAfAfuacuaugas | | UfauuuUfgUfagag | | CUAUGAAG | |
| | asa | | uscsa | | | |
| AD- | csuscua(Chd)Afa | 4242 | VPusCfsuucAfuAf | 4264 | GACUCUACAAAAUAC | 4286 |
| 1314060.1 | AfAfUfacuaugaas | | GfuauuUfuGfuaga | | UAUGAAGC | |
| | gsa | | gsusc | | | |
| AD- | uscsacu(Uhd)Cfa | 4243 | VPusCfsgacAfuAf | 4265 | ACUCACUUCAACUUC | 4287 |
| 1315057.1 | AfCfUfucuaugucs | | GfaaguUfgAfagug | | UAUGUCGU | |
| | gsa | | asgsu | | | |
| AD- | asgsucu(Chd)Ufc | 4244 | VPusGfscugGfaAf | 4266 | CUAGUCUCUCUACCU | 4288 |
| 1316271.1 | UfAfCfcuuuccags | | AfgguaGfaGfagac | | UUCCAGCC | |
| | csa | | usasg | | | |
| AD- | gsgsucu(Chd)Afa | 4245 | VPusCfsaguUfuCf | 4267 | UCGGUCUCAACGACA | 4289 |
| 1316856.1 | CfGfAfcagaaacus | | UfgucgUfuGfagac | | GAAACUGC | |
| | gsa | | csgsa | | | |
| AD- | cscsucu(Uhd)Cfc | 4246 | VPusAfsgacUfaGf | 4268 | UGCCUCUUCCCAACA | 4290 |
| 1317692.1 | CfAfAfcacuagucs | | UfguugGfgAfagag | | CUAGUCUG | |
| | usa | | gscsa | | | |
| AD- | gsusgcu(Uhd)Ufa | 4247 | VPusGfsuauAfuUf | 4269 | AUGUGCUUUAACUAC | 4291 |
| 1318239.1 | AfCfUfacaauauas | | GfuaguUfaAfagca | | AAUAUACG | |
| | csa | | csasu | | | |
| AD- | uscscac(Chd)Ufu | 4248 | VPusCfsgguUfaGf | 4270 | AGUCCACCUUUCAGA | 4292 |
| 1318336.1 | UfCfAfgacuaaccs | | UfcugaAfaGfgugg | | CUAACCGU | |
| | gsa | | ascsu | | | |
| AD- | cscsacc(Uhd)Ufu | 4249 | VPusAfscggUfuAf | 4271 | GUCCACCUUUCAGAC | 4293 |
| 1318337.1 | CfAfGfacuaaccgs | | GfucugAfaAfggug | | UAACCGUC | |
| | usa | | gsasc | | | |
| AD- | csasccu(Uhd)Ufc | 4250 | VPusGfsacgGfuUf | 4272 | UCCACCUUUCAGACU | 4294 |
| 1318338.1 | AfGfAfcuaaccgus | | AfgucuGfaAfaggu | | AACCGUCC | |
| | csa | | gsgsa | | | |
| AD- | gsgsaua(Uhd)Cfa | 4251 | VPusUfscuuAfuUf | 4273 | GGGGAUAUCAUCUAC | 4295 |
| 1318879.1 | UfCfUfacaauaags | | GfuagaUfgAfuauc | | AAUAAGAC | |
| | asa | | csCSC | | | |
| AD- | csuscua(Chd)Cfa | 4252 | VPusGfscaaAfgGf | 4274 | UCCUCUACCACUGUA | 4296 |
| 1318976.1 | CfUfGfuaccuuugs | | UfacagUfgGfuaga | | CCUUUGCC | |
| | csa | | gsgsa | | | |
| AD- | csusacc(Ahd)Cfu | 4253 | VPusAfsggcAfaAf | 4275 | CUCUACCACUGUACC | 4297 |
| 1318978.1 | GfUfAfccuuugccs | | GfguacAfgUfggua | | UUUGCCUC | |
| | usa | | gsasg | | | |
| AD- | gsgscaa(Chd)Afa | 4254 | VPusAfsgaaUfgAf | 4276 | AGGGCAACAAUCAAA | 4298 |
| 1319047.1 | UfCfAfaaucauucs | | UfuugaUfuGfuugc | | UCAUUCUC | |
| | usa | | cscsu | | | |
| AD- | usgscca(Chd)Ufu | 4255 | VPusCfsacuCfgUf | 4277 | CUUGCCACUUCCACU | 4299 |
| 1319143.1 | CfCfAfcuacgagus | | AfguggAfaGfuggc | | ACGAGUGU | |
| | gsa | | asasg | | | |
| AD- | csascuu(Chd)Cfa | 4256 | VPusUfscacAfcUf | 4278 | GCCACUUCCACUACG | 4300 |
| 1319146.1 | CfUfAfcgagugugs | | CfguagUfgGfaagu | | AGUGUGAA | |
| | asa | | gsgsc | | | |
| AD- | cscsaga(Uhd)Gfc | 4257 | VPusCfsuucUfgAf | 4279 | CUCCAGAUGCCUUCU | 4301 |
| 1319731.1 | CfUfUfcuucagaas | | AfgaagGfcAfucug | | UCAGAAGC | |
| | gsa | | gsasg | | | |

TABLE 11
MUC5B Single Dose In Vitro Screen in Cos 7 Cells.

| Duplex Name | 10 nM | stdev | 1 nM | stdev | 0.1 nM | stdev |
|---|---|---|---|---|---|---|
| AD-1311859.1 | 19.1 | 2.9 | 31.2 | 2.9 | 64.0 | 2.8 |
| AD-1312581.1 | 46.7 | 2.6 | 64.3 | 3.8 | 97.4 | 4.8 |
| AD-1312642.1 | 36.3 | 2.1 | 46.0 | 4.1 | 72.1 | 5.3 |
| AD-1314054.1 | 14.9 | 1.7 | 26.4 | 2.9 | 64.0 | 3.5 |
| AD-1314057.1 | 19.7 | 2.4 | 41.3 | 4.5 | 74.1 | 7.0 |
| AD-1314059.1 | 25.2 | 2.5 | 36.5 | 4.7 | 74.7 | 5.7 |
| AD-1314060.1 | 23.6 | 3.4 | 51.8 | 6.3 | 85.1 | 9.9 |
| AD-1315057.1 | 20.2 | 2.3 | 43.5 | 2.5 | 77.5 | 5.9 |
| AD-1316856.1 | 27.5 | 2.2 | 41.6 | 1.4 | 73.0 | 6.7 |
| AD-1316271.1 | 9.3 | 1.9 | 14.4 | 4.0 | 44.1 | 7.2 |
| AD-1317692.1 | 16.4 | 2.6 | 31.6 | 3.5 | 64.3 | 2.0 |
| AD-1318239.1 | 4.7 | 1.4 | 8.4 | 2.5 | 20.5 | 5.4 |
| AD-1318336.1 | 13.6 | 1.2 | 51.3 | 21.6 | 64.4 | 3.2 |
| AD-1318337.1 | 7.6 | 1.4 | 18.3 | 3.8 | 52.0 | 4.9 |
| AD-1318338.1 | 11.6 | 0.9 | 22.5 | 3.9 | 59.1 | 7.0 |
| AD-1318879.1 | 79.8 | 9.0 | 99.2 | 3.2 | 101.9 | 3.5 |
| AD-1318976.1 | 13.7 | 2.3 | 40.0 | 3.6 | 74.7 | 0.9 |
| AD-1318978.1 | 32.7 | 3.1 | 48.7 | 2.6 | 85.6 | 10.7 |
| AD-1319047.1 | 26.2 | 3.2 | 37.3 | 3.4 | 66.4 | 6.1 |
| AD-1319143.1 | 60.6 | 9.6 | 71.0 | 3.4 | 96.3 | 7.6 |
| AD-1319146.1 | 77.7 | 8.7 | 89.9 | 6.0 | 98.4 | 5.3 |
| AD-1319731.1 | 14.3 | 2.6 | 38.0 | 5.6 | 65.0 | 4.2 |

### Example 5. In Vivo Screening of dsRNA Duplexes in Mice

[0745] A subset of the duplexes in Example 4, above, were assessed in vivo in 7 week old C57BL/6N female mice. Mice, n=4, were administered a single 10 mg/kg dose of AD-1318337, AD-1318338, AD-1314054, AD-1317692, or AD-1318239, or saline control by orotracheal application on Day 0. On Day 10, animals were sacrificed, whole lung samples were harvested, and the level of MUC5B mRNA in the sample was quantified as described above. The results of these assays are shown in FIG. 2 and demonstrate that orotracheal application of the indicated dsRNA agents can effectively inhibit MUC5B expression in vivo.

### EQUIVALENTS

[0746] Those skilled in the art will recognize, or be able to ascertain using no more than routine experimentation, many equivalents to the specific embodiments and methods described herein. Such equivalents are intended to be encompassed by the scope of the following claims.

The application's sequence listing, which the Patent Office published only in electronic form, follows.

SEQUENCE LISTING (4301 sequences)

SEQ ID NO: 1 - DNA, 17911 bp, Homo sapiens
  source 1..17911: mol_type = genomic DNA
acccggcccggctccctccctgcccgtccccgtccccccacccgtgccagcccccaggatgggtgccccgagcgcgtgccggacgctggtgttggctctggcggccatgctcgtggtgccgcaggcagagacccagggccctgtggagccgagctgggagaatgcagggcacaccatggatggcggtgccccgacgtcctcgcccacccggcgcgtgagctttgttccacccgtcactgtcttccccagcctgagccccctgaacccggcgcacaatgggcgggtgtgcagcacctggggtgacttccactacaagaccttcgacggcgacgtcttccgcttccctggcctttgcaactacgtgttctctgagcactgccgcgccgcctacgaggacttcaacgtccagctacgccgaggcctagtgggctccaggcctgtggtcacccgtgttgtcatcaaggcccaggggctggtgctggaggcgtccaacggctccgtcctcatcaatgggcagcgggaggagctgccttacagccgcactggcctcctggtggagcagagcggggactacatcaaggtcagcatccggctggtgctgacattcctgtggaacggagaggacagtgccctgctggagctggatcccaaatacgccaaccagacctgtggcctgtgtggggacttcaacggcctcccggccttcaacgagttctatgcccacaacgccaggctgaccccgctccagtttgggaacctgcagaagttggatgggcccacggagcagtgcccggacccgctgcccttgccggccggcaactgcacggacgaggagggcatctgccaccgcaccctgctggggccggcctttgcggagtgccacgcactggtggacagcactgcgtacctggccgcctgcgcccaggacctgtgccgctgccccacctgcccgtgtgccacctttgtggaatactcacgccagtgcgcccacgcggggggccagccgcggaactggaggtgccctgagctctgcccccggacctgccccctcaacatgcagcaccaggagtgtggctcaccctgcacggacacctgctccaacccccagcgcgcgcagctctgcgaggaccactgtgtggacggctgcttctgccccccaggcacggtgctggatgacatcacgcactctggctgcctgcccctcgggcagtgcccctgcacccacggcggccgcacctacagcccgggcacctccttcaacaccacctgcagctcctgcacctgctccggggggctatggcagtgccaggacctgccgtgccctggcacctgctctgtgcagggcggggcccacatctccacctatgatgagaaactctacgacctgcatggtgactgcagctacgttctgtccaagaaatgtgccgacagcagcttcaccgtgctggctgagctgcggaagtgcggcctgacggacaacgagaactgcctgaaagcggtgacgctcagcctggacggcggggacacggccatccgggtccaagcggacggcggcgtgttcctcaactccatctacacgcagctgcccctgtcggcagccaacatcaccctgttcacaccctcgagcttcttcatcgtggtgcagacaggcctggggctgcagctgctggtgcagctggtgccactcatgcaggtgtttgtcaggctggaccccgcccaccagggccagatgtgcggcctgtgtgggaacttcaaccagaaccaggctgacgacttcacggccctcagcggggtggtggaggccacgggcgcagccttcgccaacacctggaaggcccaggctgcctgtgccaatgccaggaacagctttgaggacccctgctccctcagtgtggagaatgagaactacgcccggcactggtgctcgcgcctgaccgatcccaacagtgccttctcgcgctgccactccatcatcaaccccaagcccttccactcgaactgcatgtttgacacctgcaactgtgagcggagcgaggactgcctgtgcgccgcgctgtcctcctatgtgcacgcctgtgccgccaagggcgtacagctcagcgactggagggacggcgtctgcaccaagtacatgcagaactgccccaagtcccagcgctacgcctacgtggtggatgcctgccagcccacttgccgcggcctgagtgaggccgacgtcacctgcagcgtttccttcgtgcctgtggacggctgcacctgccccgcgggcaccttcctcaatgacgcgggcgcctgtgtgcccgcccaggagtgcccctgctacgctcacggcaccgtgctggctcctggagaggtggtgcacgacgagggcgccgtgtgttcatgtacgggtgggaagctaagctgcctgggagcctctctgcagaaaagcacagggtgtgcagcccccatggtgtacctggactgcagcaacagctcggcgggcacccctggggccgagtgcctccggagctgccacacgctggacgtgggctgtttcagcacacactgcgtgtccggctgtgtctgtcccccggggctggtgtcggatgggagtgggggctgcattgccgaggaggactgcccctgtgtgcacaacgaggccacctacaagcctggagagaccatcagggtcgactgcaacacctgcacctgcaggaaccggaggtgggagtgcagccaccggctctgcctgggcacctgcgtggcctacggggatggccacttcatcacctttgatggcgatcgctacagctttgaaggcagctgcgagtacatcttggcccaggactactgtggggacaacaccacccacgggaccttccgcatcgtcaccgagaacatcccctgtgggaccaccggcaccacctgctccaaggccatcaagctcttcgtggagagctacgagctgatcctccaagaggggacctttaaggcggtggcgagagggccgggtggggacccaccctacaagatacgctacatggggatcttcctggtcatcgagacccacgggatggccgtgtcctgggaccggaagaccagcgtgttcatccgactgcaccaggactacaagggcagggtctgcggcctgtgcgggaacttcgacgacaatgccatcaatgactttgccacgcgtagccggtccgtggtgggggacgcactggagtttgggaacagctggaagctctccccctcctgcccggacgccctggcacccaaggacccctgcacggccaaccccttccgcaagtcctgggcccagaagcagtgcagcatcctccacggccccaccttcgccgcctgccgctcccaggttgactccaccaagtactacgaggcctgcgtgaacgacgcgtgtgcctgcgactcgggtggcgactgcgagtgtttctgcacggctgtggctgcctacgcccaggcctgccacgacgcgggcctgtgtgtgtcctggcggactccggacacctgccccttgttctgtgacttctacaacccacatgggggctgtgagtggcactaccagccctgcggggcaccctgcctaaaaacctgccggaaccccagtgggcactgcctggtggacctgcctggcctggaaggctgctacccgaagtgcccacccagccagcccttcttcaatgaggaccagatgaagtgcgtggcccagtgtggctgctacgacaaggacggaaactactatgacgtcggtgcaagggtccccacagcggagaactgccagagctgtaactgcacacccagtggcatccagtgcgctcacagccttgaggcctgcacctgcacctatgaggacaggacctacagctaccaggacgtcatctacaacaccaccgatgggcttggcgcctgcttgatcgccatctgcggaagcaacggcaccatcatcaggaaggctgtggcatgtcctggaactccagccacaacgccattcaccttcaccaccgcctgggtcccccactccacgacaagcccggccctcccggtctccaccgtgtgtgtccgcgaggtctgccgctggtccagctggtacaatgggcaccgcccagagcccggcctgggaggcggagactttgagacgtttgaaaacctgaggcagagagggtaccaggtatgccctgtgctggctgacatcgagtgccgggcggcgcagcttcccgacatgccgctggaggagctgggccagcaggtggactgtgaccgcatgcgggggctgatgtgcgccaacagccaacagagtcccccgctctgtcacgactacgagctgcgggttctctgctgcgaatacgtgccctgtggcccctccccggccccaggcaccagccctcagccctccctcagtgccagcacggagcctgctgtgcctaccccaacccagaccacagcaaccgaaaagaccaccctatgggtgaccccgagcatccggtcgacggcggccctcacctcgcagactgggtccagctcaggccccgtgacggtcaccccctcggccccaggtaccaccacctgccagccccggtgtcagtggacagagtggtttgatgaggactaccccaagtctgaacaacttggaggggacgttgagtcctacgataagatcagggccgctggagggcacttatgccagcagcctaaggacatagagtgccaggccgagagcttccccaactggaccctggcacaggtggggcagaaggtgcactgtgacgtccacttcggcctggtgtgcaggaactgggagcaggagggcgtcttcaagatgtgctacaactacaggatccgggtcctctgctgcagtgacgaccactgcaggggacgtgccacaaccccgccaccgaccacagagctggagacggccaccaccaccaccacccaggccctgttctcaacgccgcagcctacgagtagcccggggctgaccagggctcccccggccagcaccacagcagtccccaccctctcagaaggactgacatcccccagatacacaagcacccttggtacagccaccacgggaggccccacgacgcctgcaggctccacagaacccactgtcccaggggtggccacatccacccttccaacacgctcagcccttccagggacgacggggagcttgggcacatggcgcccctcacagccacccacgctggccccaacaacaatggcaacctccagagctcgcccgacaggcacagccagcaccgcttccaaagagccgctgaccacgagcctggcgccaacactcacgagcgagctgtccacctctcaggccgagaccagcacgcccaggacagagacgacaatgagccccttgactaacaccaccaccagccagggcacgacccgctgtcaaccgaagtgtgagtggacagagtggtttgacgtggacttcccaacctcaggggttgcaggcggggacatggaaacttttgaaaacatcagggctgctgggggcaagatgtgctgggcaccaaagagcatagagtgccgggcggagaactaccccgaggtaagcatcgaccaggtcgggcaggtgctgacctgcagcctggagacggggctgacctgcaagaacgaagaccagacaggcaggttcaacatgtgcttcaactacaacgtgcgtgtgctttgctgtgacgactacagccactgccccagtaccccagccaccagctccacggccacgccctcctcaactccggggacgacctggatcctcacaaagccgaccacaacagccactacgactgcgtccactggatccacggccaccccgacctccaccctgagaacagctccccctcccaaagtgctgaccaccacggccaccacacccacagtcaccagctccaaagccactccctcctccagtccagggactgcaaccgcccttccagcactgagaagcacagccaccacacccacagctaccagcgttacacccatcccctcttcctccctgggcaccacctggacccgcctatcacagaccaccacacccacggccaccatgtccacagccacaccctcctccactccagagactgcccacacctccacagtgcttaccgccacggccaccacaactggggccaccggctctgtggccaccccctcctccaccccaggaacagctcacactaccaaagtgccaactaccacaaccacgggcttcacagccaccccctcctccagcccagggacggcactcacgcctccagtgtggatcagcacaaccaccacacccacaaccagaggctccacggtgaccccctcctccatcccggggaccacccacaccgccacagtgctgaccaccaccaccacaactgtggccactggttctatggcaacaccctcctctagcacacagaccagtggtactcccccatcactgaccaccacggccactacgatcacggccaccggctccaccaccaacccctcctcaactcctgggacaactcccatccccccagtgctgaccaccaccgccaccacacctgcagccaccagcaacacagtgactccctcctctgccctagggaccacccacacacccccagtgccgaacaccatggccaccacacacgggcgatccctgccccccagcagtccccacacggtgcgcacagcctggacttcggccacctcgggcatcttgggcaccacccacatcacagagccttccacggtgacttcccacaccctagcagcaaccaccggtaccacccagcactcgactccagccctttccagccctcaccctagcagcagaaccaccgagtcacccccttctccagggacgaccaccccgggccacaccacggccacctccaggaccacagccacggccacacccagcaagacccgcacctcgaccctgctgcccagcagccccacatcggcccccataaccacggtggtgaccatgggctgtgagccccagtgtgcctggtcagagtggctggactacagctaccccatgccggggccctctggcggggactttgacacctactccaacatccgtgcggccggaggggccgtctgtgagcagcccctgggcctcgagtgccgtgcccaggcccagcctggtgtccccctgcgggagttgggccaggtcgtggaatgcagcctggactttggcctggtctgcaggaaccgtgagcaggtggggaagttcaagatgtgcttcaactatgaaatccgtgtgttctgctgcaactacggccactgccccagcaccccggccaccagctctacggccatgccctcctccactccggggacgacctggatcctcacagagctgaccacaacagccactacgactgagtccactggatccacggccaccccgtcctccaccccagggaccacctggatcctcacagagccgagcactacagccaccgtgacggtgcccaccggatccacggccaccgcctcctccacccaggcaactgctggcaccccacatgtgagcaccacggccacgacacccacagtcaccagctccaaagccactcccttctccagtccagggactgcaaccgcccttccagcactgagaagcacagccaccacacccacagctaccagctttacagccatcccctcctcctccctgggcaccacctggacccgcctatcacagaccaccacacccacggccaccatgtccacagccacaccctcctccactccagagactgtccacacctccacagtgcttaccaccacggccaccacaaccggggccaccggctctgtggccaccccctcctccaccccaggaacagctcacactaccaaagtgctgactaccacaaccacgggcttcacagccaccccctcctccagcccagggacggcacgcacgcttccagtgtggatcagcacaaccaccacacccacaaccagaggttccacggtgaccccctcctccatcccggggaccacccacacccccacagtgctgaccaccaccaccacaactgtggccactggttctatggcaacaccctcctctagcacacagaccagtggtactcccccatcactgaccaccacggccactacgatcacggccaccggctccaccaccaacccctcctcaactccagggacaacacctatccccccagtgctgaccaccaccgccaccacacctgcagccaccagcagcacagtgactccctcctctgccctagggaccacccacacacccccagtgccgaacaccacggccaccacacacgggcgatccctgtcccccagcagtccccacacggtgcgcacagcctggacttcggccacctcaggcaccttgggcaccacccacatcacagagccttccacggggacttcccacaccccagcagcaaccaccggtaccacccagcactcgactccagccctgtccagccctcaccctagcagcaggaccaccgagtcacccccttctccagggacgaccaccccgggccacaccagggccacctccaggaccacggccacggccacacccagcaagacccgcacctcgaccctgctgcccagcagccccacatcggccccaataaccacggtggtgaccatgggctgtgagccccagtgtgcctggtcagagtggctggactacagctaccccatgccggggccctctggcggggactttgacacctactccaacatccgtgcggccggaggggccgtctgtgagcagcccctgggcctcgagtgccgtgcccaggcccagcctggtgtccccctgcgggagttgggccaggtcgtggaatgcagcctggactttggcctggtctgcaggaaccgtgagcaggtggggaagttcaagatgtgcttcaactatgaaatccgtgtgttctgctgcaactacggccactgccccagcaccccggccaccagctctacggccacgccctcctccactccagggacgacctggatcctcacagagcagaccacagcagccactacgaccgcaaccactggatccacggccatcccgtcctccaccccgggaacagctccccctcccaaagtgctgaccagcacggccaccacacccacagccaccagttccaaagccacttcctcctccagtccaaggactgcaaccacccttccagtgctgacaagcacagccaccaaatccacagctaccagctttacacccatcccctccttcacccttgggaccaccgggaccctcccagaacagaccaccacacccatggccaccatgtccacaatccacccctcctccactccggagaccacccacacctccacagtgctgaccacgaaggccaccacgacaagggccaccagttccatgtccaccccctcctccactccggggacgacctggatcctcacagagctgaccacagcagccactacaactgcagccactggccccacggccaccccgtcctccaccccagggaccacctggatcctcacagagcccagcactacagccaccgtgacggtgcccaccggatccacggccaccgcctcctccacccgggcaactgctggcaccctcaaagtgctgaccagcacggccaccacacccacagtcatcagctccagagccactccctcctccagtccagggactgcaaccgcccttccagcactgagaagcacagccaccacacccacagctaccagcgttacagccatcccctcttcctccctgggcaccgcctggacccgcctatcacagaccaccacacccacggccaccatgtccacagccacaccctcctctactccagagactgtccacacctccacagtgcttaccaccacgaccaccacaaccagggccaccggctctgtggccaccccctcctccaccccaggaacagctcacactaccaaagtgccgactaccacaaccacgggcttcacagccaccccctcctccagcccagggacggcactcacgcctccagtgtggatcagcacaaccaccacacccacaaccagaggctccacggtgaccccctcctccatcccggggaccacccacaccgccacagtgctgaccaccaccaccacaactgtggccactggttctatggcaacaccctcctctagcacacagaccagtggtactcccccatcactgaccaccacggccactacgatcacagccaccggctccaccaccaacccctcctcaactccagggacaactcccatccccccagtgctgaccaccaccgccaccacacctgcagccaccagcagcacagtgactccctcctctgccctagggaccacccacacacccccagtgccgaacaccacggccaccacacacgggcggtccctgccccccagcagtccccacacggtgcgcacagcctggacttcggccacctcgggcatcttgggcaccacccacatcacagagccttccacggtgacttcccacaccccagcagcaaccaccagtaccacccagcactcgactccagccctgtccagccctcaccctagcagcaggaccaccgagtcacccccttctccagggacgaccaccccgggccacaccaggggcacctccaggaccacagccacagccacacccagcaagacccgcacctcgaccctgctgcccagcagccccacatcggcccccataaccacggtggtgaccacgggctgtgagccccagtgtgcctggtcagagtggctggactacagctaccccatgccggggccctctggcggggactttgacacctactccaacatccgtgcggccggaggggcagtctgtgagcagcccctgggcctcgagtgccgtgcccaggcccagcctggtgtccccctgcgggagttgggccaggtcgtggaatgcagcctggactttggcctggtctgcaggaaccgtgagcaggtggggaagttcaagatgtgcttcaactatgaaatccgtgtgttctgctgcaactacggccactgccccagcaccccggccaccagctctacggccacgccctcctcaactccggggacgacctggatcctcacaaagctgaccacaacagccactacgactgagtccactggatccacggccaccccgtcctccaccccagggaccacctggatcctcacagagccgagcactacagccaccgtgacggtgcccaccggatccacggccaccgcctcctccacccaggcaactgctggcaccccacatgtgagcaccacggccacgacacccacagtcaccagctccaaagccactcccttctccagtccagggactgcaaccgcccttccagcactgagaagcacagccaccacacccacagctaccagctttacagccatcccctcctcctccctgggcaccacctggacccgcctatcacagaccaccacacccacggccaccatgtccacagccacaccctcctccactccagagactgcccacacctccacagtgcttaccaccacggccaccacaaccagggccaccggctctgtggccaccccctcttccaccccaggaacagctcacactaccaaagtgccgactaccacaaccacgggcttcacagtcaccccctcctccagcccagggacggcacgcacgcctccagtgtggatcagcacaaccaccacacccacaaccagtggctccacggtgaccccctcctccgtcccggggaccacccacacccccacagtgctgaccaccaccaccacaactgtggccactggttctatggcaacaccctcctctagcacacagaccagtggtactcccccatcactgatcaccacggccactacgatcacggccaccggctccaccaccaacccctcctcaactccagggacaacacctatccccccagtgctgaccaccaccgccaccacacctgcagccaccagcagcacagtgactccctcctctgccctagggaccacccacacacccccagtgccgaacaccacggccaccacacacgggcgatccctgtcccccagcagtccccacacggtgcgcacagcctggacttcggccacctcaggcaccttgggcaccacccacatcacagagccttccacggggacttcccacaccccagcagcaaccaccggtaccacccagcactcgactccagccctgtccagccctcaccctagcagcaggaccaccgagtcacccccttccccagggacgaccaccccgggccacaccacggccacctccaggaccacggccacggccacacccagcaagacccgcacctcgaccctgctgcccagcagccccacatcggcccccataaccacggtggtgaccacgggctgtgagccccagtgtgcctggtcagagtggctggactacagctaccccatgccggggccctctggcggggactttgacacctactccaacatccgtgcggccggaggggccgtctgtgagcagcccctgggcctcgagtgccgtgcccaggcccagcctggtgtccccctgggggagttgggccaggtcgtggaatgcagcctggactttggcctggtctgcaggaaccgtgagcaggtggggaagttcaagatgtgcttcaactatgaaatccgtgtgttctgctgcaactacggccactgccccagcaccccggccaccagctctacggccatgccctcctccactccggggacgacctggatcctcacagagctgaccacaacagccactacgactgcatccactggatccacggccaccccgtcctccaccccgggaacagctccccctcccaaagtgctgaccagcccggccaccacacccacagccaccagttccaaagccacttcctcctccagtccaaggactgcaaccacccttccagtgctgacaagcacagccaccaaatccacagctaccagcgttacacccatcccctcctccacccttgggaccaccgggaccctcccagaacagaccaccacacccgtggccaccatgtccacaatccacccctcctccactccggagaccacccacacctccacagtgctgaccacgaaggccaccacgacaagggccaccagttccacgtccaccccctcctccactccggggacgacctggatcctcacagagctgaccacagcagccactacaactgcagccactggccccacggccaccccgtcctccaccccagggaccacctggatcctcacagagctgaccacaacagccactacgactgcgtccactggatccacggccaccccgtcctccaccccagggaccacctggatcctcacagagccgagcactacagccaccgtgacggtgcccaccggatccacggccaccgcctcctccacccaggcaactgctggcaccccacatgtgagcaccacggccacgacacccacagtcaccagctccaaagccactccctcctccagtccagggactgcaactgcccttccagcactgagaagcacagccaccacacccacagctaccagctttacagccatcccctcctcctccctgggcaccacctggacccgcctatcacagaccaccacacccacggccaccatgtccacagccacaccctcctccactccagagactgtccacacctccacagtgcttaccgccacggccaccacaaccggggccaccggctctgtggccaccccctcctccaccccaggaacagctcacactaccaaagtgccgactaccacaaccacgggcttcacagccaccccctcctccagcccagggacggcactcacgcctccagtgtggatcagcacaaccaccacacccacaaccaccacacccacaaccagtggctccacggtgaccccctcctccatcccggggaccacccacaccgccagagtgctgaccaccaccaccacaactgtggccactggttctatggcaacaccctcctctagcacacagaccagtggtactcccccatcactgaccaccacggccactacgatcacggccaccggctccaccaccaacccctcctcaactccagggacaacacccatcaccccagtgctgaccagcacggccaccacacccgcagccaccagctccaaagccacttcctcctccagtccaaggactgcaaccacccttccagtgctgacaagcacagccacaaaatccacagctaccagctttacacccatcccctcctccaccctgtggaccacgtggaccgtcccagcacagaccaccacacccatgtccaccatgtccacaatccacacctcctctactccagagaccacccacacctccacagtgctgaccaccacagccaccatgacaagggccaccaattccacggccacaccctcctccactctggggacgacccggatcctcactgagctgaccacaacagccactacaactgcagccactggatccacggccaccctgtcctccaccccagggaccacctggatcctcacagagccgagcactatagccaccgtgatggtgcccaccggttccacggccaccgcctcctccactctgggaacagctcacacccccaaagtggtgaccaccatggccactatgcccacagccactgcctccacggttcccagctcgtccaccgtggggaccacccgcacccctgcagtgctccccagcagcctgccaaccttcagcgtgtccactgtgtcctcctcagtcctcaccaccctgagacccactggcttccccagctcccacttctctactccctgcttctgcagggcatttggacagtttttctcgcccggggaagtcatctacaataagaccgaccgagccggctgccatttctacgcagtgtgcaatcagcactgtgacattgaccgcttccagggcgcctgtcccacctccccaccgccagtgtcctccgccccgctgtcctcgccctcccctgcccctggctgtgacaatgccatccctctccggcaggtgaatgagacctggaccctggagaactgcacggtggccaggtgcgtgggtgacaaccgtgtcgtcctgctggacccaaagcctgtggccaacgtcacctgcgtgaacaagcacctgcccatcaaagtgtcggacccgagccagccctgtgacttccactatgagtgcgagtgcatctgcagcatgtggggcggctcccactattccacctttgacggcacctcttacaccttccggggcaactgcacctatgtcctcatgagagagatccatgcacgctttgggaatctcagcctctacctggacaaccactactgcacggcctctgccactgccgctgccgcccgctgcccccgcgccctcagcatccactacaagtccatggatatcgtcctcactgtcaccatggtgcatgggaaggaggagggcctgatcctgtttgaccaaattccggtgagcagcggtttcagcaagaacggcgtgcttgtgtctgtgctggggaccaccaccatgcgtgtggacattcctgccctgggcgtgagcgtcaccttcaatggccaagtcttccaggcccggctgccctacagcctcttccacaacaacaccgagggccagtgcggcacctgcaccaacaaccagagggacgactgtctccagcgggacggaaccactgccgccagttgcaaggacatggccaagacgtggctggtccccgacagcagaaaggatggctgctgggccccgactggcacaccccccactgccagccccgcagccccggtgtctagcacacccacccccaccccatgcccaccacagccgctctgtgatctgatgctgagccaggtctttgctgagtgccacaaccttgtgcccccgggcccattcttcaacgcctgcatcagcgaccactgcaggggccgccttgaggtgccctgccagagcctggaggcttacgcagagctctgccgcgcccggggagtgtgcagtgactggcgaggtgcaaccggtggcctgtgcgacctcacctgcccacccaccaaagtgtacaagccatgcggccccatacagcctgccacctgcaactctaggaaccagagcccacagctggaggggatggcggagggctgcttctgccctgaggaccagatcctcttcaacgcacacatgggcatctgcgtgcaggcctgcccctgcgtgggacccgatgggtttcctaaatttcccggggagcggtgggtcagcaactgccagtcctgcgtgtgtgacgagggttcagtgtcggtgcagtgcaagcccctgccctgtgacgcccagggtcagcccccgccgtgcaaccgtcccggcttcgtaaccgtgaccaggccccgggccgagaacccctgctgccccgagacggtgtgcgtgtgcaacacaaccacctgcccccagagcctgcctgtgtgcccgccagggcaggagtccatctgcacccaggaggagggcgactgctgtcccaccttccgctgcagacctcagctgtgttcgtacaatggcaccttctacggggttggtgcaaccttcccaggcgcccttccctgccacatgtgtacctgcctctctggggacacccaggacccaacggtgcaatgtcaggaggatgcctgcaacaatactacctgtccccagggctttgagtacaagagagtggccgggcagtgctgtggggagtgcgtccagaccgcctgcctcacgcccgatggccagccagtccagctgaatgaaacctgggtcaacagccatgtggacaactgcaccgtgtacctctgtgaggctgagggtggagtccatttgctgaccccacagcctgcatcctgcccagatgtgtccagctgcagggggagcctcaggaaaaccggctgctgctactcctgtgaggaggactcctgtcaagtccgcatcaacacgaccatcctgtggcaccagggctgcgagaccgaggtcaacatcaccttctgcgagggctcctgccccggagcgtccaagtactcagcagaggcccaggccatgcagcaccagtgcacctgctgccaggagaggcgggtccacgaggagacggtgcccttgcactgtcctaacggctcagccatcctgcacacctacacccacgtggatgagtgtggctgcacgcccttctgtgtccctgcgcccatggctcccccacacacccgtggcttcccggcccaggaggccactgctgtctgagaacgttctgcctccatccccatgctctgtccacctggagccaggatgtgcattgtctgatcatgaaaaccttgggcctcctctgcggagccccccggcctgtgtgtggcaccccgcgctccgtgctcctgctgcccaccccgtgggtgaaaccggccccagaagggtgaggggccagcaggacccctttcgggagggcgccactcaggagtcctaccctgggagagcctgtggcccaccttggccttgcccctccctgatgtcactgggacgccctggaacaaactaagcatgtgcgggcctatgtgtccctgccacggccggagcgcccgcgcagcacggattccagctggccacgtccggccgctggggcagacaggctggtccaggcaaggccagctgctgccaggaagctgcgacaggcaaggcggccgcctgtccatgcctgctgcagggtaactcagggctgaggtcgcaacggccaggtcagagaggggtcagcatcccaaagccccctctgctcaacccagcccagttttgcaaataaaccctgagcattgagta

SEQ ID NO: 2 - DNA, 14963 bp, Mus musculus
  source 1..14963: mol_type = genomic DNA
gccttgtctcagtccctcctgcctgccctctgtactgcccccaggatgggcagcagaaactggagctgggctctggtctgggcctccgtggccttgctcatggtgtggccagcagagagccagggtcaggcagagctgagctcagaacatctagaactcaccggagacagtcagagagtgtatagtgactccatatcctcatccacaaggcatgtcaccttcatcccacctatcactgtcttccctagcatgagcgccttacacctggcacacaatgggagagtgtgcagcacgtggggtgacttccattacaagacctttgatggtgacgtgttccgcttccctggcctctgtaactatgtcttctcttcacactgcggggccacctacgaggacttcaacatccaactgcgtcgtggtcttgagggttccaggcccacagtcacctatgtgctcctcagggcccaggggctggtgattgagctgtccaatggctctgtcctggtgaatggacatcgggagaagctgccctacagtcgtgcaggtctcctgatggagaagagcagtggctatgtgaaaatcagcatccgcctagtcctcaccttcctgtggaatgaagaagacagcgccctgctggagctggactccaaatacatcaaccagacgtgtgggctgtgcggtgacttcaacgggctcccagctgtcagtgagttctacacccacaacactaggctgacccctgtgcagtttggaaacttgcagaagctggatggtcctacagagcagtgccaggatgtcctaccctcagctgtcagcaactgcacagatacggaggacatctgccgtcgcaccctgcttggtcctgcctttgacaagtgcaccgctctggtagatgtcagcatgtacttggatgcctgtgtccaggacctgtgccgctgtcccacctgcccatgtgccacttttgccgaatattcccgccagtgtgcccacgcagggggctacccacagaactggaggcatcctgatctctgcaattggacatgccctttcaacatggaataccgagagtgcagttcaccctgtgtggatacctgctctaacccccagcgctctcaactctgcgaggaccactgcatggatggctgcttctgtcccccaggaactgtgctggacgatgtcagacacttgggatgcctgcccctggagcagtgccactgtacacacggtggccgaatttatgcccctggagagtccttcaacaccagctgtaggtcctgcacctgcttcggaggactgtggaagtgcaaagacctgccatgccctggcacctgctctgtgcaaggcgggtcccacatctttacctttgacgagaaactctacaatgtgcatggagactgcagctacatcctgaccaagaaatgtgcagatagtagcttcactgtgctggtcgatcttcggaagtgtggagtgacagatacggagaactgcctcaaagcagtgacactaaacctcaatagtggggacacggtcatccggatccaggtcaacggtgctgtgttcctgaactccatctttacgcagatgcccttgtcagcaggcaacattaccatcttcaagccatcatccttcttcatcatagtacagacgggcatggggctgcagcttcaagtgcagctggtgcccctcatgcaggtgtttgtccggctggaccgctcctaccaaggccagatgtgtggtctgtgtggaaacttcaaccagaaccaggctgatgacttcacagccctcagtggggtggtggagggcacaggagcagccttctccaacacctggaagactcaagcctcctgccccaactccaagaacacctatgaagacccctgctcatacagtgtggagaatgagaacttcgcccgggagtggtgctccatgctcacggaaagctcaggagttttctcagcctgccatgccactgttagcccggtgcccttctactcgaactgcttgtttgacacgtgcaactgtgagaacagtgaggactgcatgtgtgcagccctgtcctcctatgtgtttgcctgtgctgccaaaggcgtgctgctcagtggctggagggacaaagtttgctacaagtacacgaacaactgcccccaaaccaagggctacttctattcagtgagttcttgccagcctacctgccgctctctgagtgaggccgatgtcacctgcagcgtcccctttgtgacggtggatggctgcacctgccctgaaggcaccttcctgaatgacaaggaccactgtgtgccagtggaggagtgcccttgctacttccatggaactgtggtggctcccagagaggttgttacggacaacggtgtggtgtgctcgtgtacaaacgggaagttgacctgcctgggagccctgatgcagaagagcacagagtgtcaggcgcctatggtctacctggattgtaacaatgcctcagtgggtcaccacggggctgaatgcctcaaaagctgccacacactggatgtggaatgtttcagcacacagtgtgtctcgggctgcgtgtgtccctcagggctggtagcagatgggaatgggggctgtattgctgaggaagattgcccctgcatacacaatgaggtcacatatagacctggggagatcatccgggtagactgcaataactgcacctgtaagaaccgccggtgggaatgcaccaacaagccctgcatgggtgcctgtgtggcctacggggatggccactttgttacctttgatggtgaacgctacatctttgaaggtagctgcgagtataccttggctcaggactactgcagaggcaacaccagtactaatgggaccttccgaattgtcactgagaatgtcccctgtgggaccacaggaaccacctgctccaagaccatcaagatctttgtggagagctacgagctgatccttcatgaggggaactttaaggtggtagagcaagggccaagcggagaccctccatacaagatcagattcatgggcatcttcctggtcattgagatccgcagcgggatagtcgtgtcctgggacaggaagaccagtgtgtttgtccggctgcagcagcattataagggcagggtctgtggcctctgtgggaactttgacgacaatgccatcaatgacttcaccacacgcagccagtctgtggtgggcgatgtgctggagtttggaaatagctggaagttctccccatcctgcccagacgccccagttcccaaggacccctgcattgcaaacccttaccgcaagtcctgggcccagaagaagtgtagcatcatcaacagtgcaacgtttgccgcctgccactctcaggttgactctacaaaatactatgaagcctgtgtgcatgatgtgtgtgcctgtgactcagggggtgactgcgagtgtttctgcaccgctgtggccgcctatgcccaggcctgccgtgatgtgggtgtgtgcttgtcctggaggacaccggacatctgccctcttttctgtgactactacaaccctcatggggaatgtgagtggcactatcagccctgtggagccccctgtctgaagacctgtcggaacccaactggacactgcctcgttgacctgccaggtctagaaggctgctacccacagtgcccagccagccagcccttcttcaatgaggaccagatgaagtgtgtggcccagtgtggctgctacgatgacaatggaaactaccatgacattggcacacaggtccctacagctgagaattgccagagttgtctctgcacccctggtggcctccagtgtgtttacaaccttacagcctgcacatgcacctatgagggccgtacctacaactacaatgatgttgtctacaacaccacggatggccttggcgcctgcttagtagccatctgcaaagacaatgggactatagcacgcacaactgaagtgtgccatgaagtcccgtctaccacaccattcacattcaccaccaccctggcaccccttgccacaaacggctcagcttccactgtgtctaccgtgtgtgttcatgaggtctgccaatggtccatttggtatgatgagagccatccagaggctggcatgtcaggcggggactttgaaacatttgagaacctgaggaagaaggggcaccaggtgtgtcaaacccccgttggcatcgaatgccgtgcagtgaaattccctagcatggacttagagaagctgggtcagaaggtcaactgtgacccatcctctgggctgagttgcttcaacagtgaacagagccccccgctgtgccacgactatgagctgagggttctctgttgtgattatgtgccctgtggctcctctctgaccttgggcataagtaccactccctcccagcctgacaccagcagaagaccctcttcgcctacacttaccactcatacagcatcctcagaatcacagtcctggaccagagaagagaaaaagacatcagtggataaaagttacagctcaaggcaaacagtgccattcacttcaaacagcagactcacttcaacttctatgtcgtcagccagcagcctccccctgtccaaccctacctggactacaacattgaaagcgaccgacgagaacacaatgcttagctcccggacaacagcagtattcacttcacaaaccaggtccacttcaaggcccagcacagtcacacagccaatcagcagccctgagacctcctccaccacctgccaaccccaatgtcagtggacaaagtggatcgatgtagactacccttcatctagcattaatggaggagacatcgagacatatgagaatatcagggccaatggagaaaaaatctgtgagaagcctcaggacatcaggtgtatggcccagaaccacccaggagtgaatgtggacgagttgggacagaaagtgaagtgtgatgtcagctctggtctggtgtgctacaacaaggaccagggaggcactttccagatgtgctacaactacctgatcaaggtgctctgttgtagtgttagccactgccagggatctaccacccctgaaggatcggtctcaacgacagaaactgccacctccactccccagacactgtcctccaagcctctgcccaacactagttcatttgagacctggtctccctctggccctaccaccagtatggaagcctcagagatgcccaccttttggaccctgaggacaagcgtgtcgtccccacccaccactcctctcacagtcacctcagtgagcactcagcatcccaagagtctagaatcctctggcagcccatcagtggtgactgccaggtccacctctcaaggttactccctgcctcccagcagtccccacactaccaattcactctcagcaacaacctcaaaggcttccttgtccagcatgacaaccatctccacctccctgaccactcctgggccctccagtcctcctcatggaggcacgaccacacacccagtcaccactgcctccacgaccagagcagtcactgagaccctgtcctcaagacctcataccaagaccacctcagagctccctacagtttcctcagccagctccacagcaggacctggcacacagaccttctccaccacctgccaaccccaatgtcagtggacaaagtggatcgatgtagactacccttcatctagcattaatggaggagacatcgagacatatgagaatatcagggccaatggagaaaaaatctgtgagaagcctcaggacatcaggtgtatggcccagaactaccccggagtgaatgtggacaagttgggacagaaagtgaagtgtgatgtcagctctggtctggtgtgctacaacaaggaccagggaggcactttcccaatgtgctacaactacctgatcaaggtgctctgttgtagtgttagccactgccagggatctaccacccctgaaggatcggtctcaacgacagaaactaccaccgctactccccagaccctgtcctctaagcctttgcccaacactagttcaattgagacatggtctccctcaggccctaccaccagtatggaagcctcagagatgcccaccttttggaccctgaggacaagcgtgtcgtccccacccaccactcctctcacagtcacctcagtgagcactcagcatcccaagagtctagaatcctctggcagcccatcagtggtgactgccaggtccacctctccagggcactcccagcctcccagcagtccctatgctaccaattcactctcagcaacaacctcaaaggcttctctgtccagcatgacaaccatctccacctccctgaccactcctgggccctccagtcctcctcatggaggcacgaccacacacccagtcaccactgcctctacgaccagagcagtcactgagaccctgtcctcaagacctcataccaagaccacctcagagctccctacagtttcctcagtcagctccacagcaggaccaggcacacagactgggtccacttcaaggcccaacacagtcacacagccagccagcagccctgagacctcctctaccacctgccaaccccaatgtcagtggacaaagtggatcgatgtagactacccttcatctagcattaatggaggagacatcgagacatatgagaatatcagggccaatggagaaaaaatctgtgagaagcctcaggacatcaggtgtatggcccagaaccacccaggagtgaatgtggacgagttgggacagaaagtgaagtgtgatgtcagctctggtctggtgtgctacaacaaggaccagggaggcactttccagatgtgctacaactacctgatcaaggtgctctgttgtagtgttagccactgccagggatctaccacccctgaaggatcggtctcaacgacagaaactaccaccgctactccccagaccctgtcctctaagcctttgcccaacactagttcaattgagacatggtctccctcaggccctaccaccagtatggaagcctcagagatgcccaccttttggaccctgaggacaagcgtgtcgtccccacccaccactcctctcacagtcacctcagtgagcactcagcatcccaagagtctagaatcctctggcagcccatcagtggtgactgccaggtccacctctccagggcactcccagcctcccagcagtccctatgctaccaattcactctcagcaacaacctcaaaggcttctctgtccagcatgacaaccatctccacctccctgaccactcctgggccctccagtcctcctcatggaggcacgaccacacacccagtcaccactgcctctacgaccagagcagtcactgagaccctgtcctcaagacctcataccaagaccacctcagagctccctacagtttcctcagtcagctccacagcaggaccaggcacacagactgggtccacttcaaggcccaacacagtcacacagccagccagcagccctgagacctcctctaccacctgccaaccccaatgtcagtggacaaagtggatcgatgtagactacccttcatctagcattaatggaggagacatcgagacatatgagaatatcagggccaatggagaaaaaatctgtgagaagcctcaggacatcaggtgtatggcccagaaccacccaggagtgaatgtggacgagttgggacagaaagtgaagtgtgatgtcagctctggtctggtgtgctacaacaaggaccagggaggcactttccagatgtgctacaactacctgatcaaggtgctctgttgtagtgttagccactgccagcgatctaccacccctgcagggtcggcccccacaacaggaactgcccccactgccacttctgggactgctacacatacttcctggcctgcgtccagcatgcctaccagtaccacagagtcaccttcttcctctggaaaaaccacaatccttaccacagcttcttctctagccacaggcacacccagagagactcaaacctcatccttgctaaccactggtctctcctcagccctcacaaccacagggaccacctccacaggctgtaaatctcaatgcacctggacagactggctggacagtgacaaaccccaacctggccagtttgaaggagacatcgagacctactatcatattcagaacaagacaggtatcaagatatgcaagaaacccgtggacatcgagtgtgaagccgtcctctttcccaacatatccttccagaagctgggccaggaggtggtttgtaatgtggactttggactcatctgtagaaacagcaagcagagtgacaaccaaatctgtttcaactaccacatccgtgtcctctgctgtgaggaagataccagctgtatcagcacaactggactactgtctaccacctccacatcagcacctggatttcccagcacagtctccacgtctacaacaagcaagttgccatcagaggagccaataccctcaacttcattcacaactcaaagtagaccctctacccccaggacagaaaagattgtctccattgccacagctaggactactgggagtttccctgtctctagtctctctacctttccagcctctcccactagccttctcccaacttcagaagagccacattcaggtaaaccaagcacaagttcatggacagcctcctccaatgttccgagcactgccaagccaaccacctccactggcagacagttccctagaacaaaaaccacattgtggaatagtctcccttctagtaccccaaccatggccaccagatccatccatcccatttctaccacaatgacaaccaagaaccctcaaacactagtcaccagtgacatttccaaaagcaactctatgttgcctagtaggccccatatcacagcatcttcagtcacatcaacaagtggtagtcagataagcaagtcatactcctccacctccctgaccactgctgggccctccagtcctcctcatggaggcacgaccacacacccagtcaccactgcctctacgaccagagcagtcactgagaccctgtcctcaagacctcataccaagaccacctcagagctccctacagtttcctcagtcagctccacagcaggacctggcacacagactgggtccacttcaaggcccagcatagtcacacagccagtcagcagccctgagacctcctccaccacctgccaaccccaatgtcagtggacaaggtggatcaatgtagactacccttcatctagcattaatggaggagacatcgagacatatgagaatatcagggccaatggagaaaaaatctgtgagaagcctcaggacatcaggtgtatggcccagaactacccaggagtgaatgtggacgagttgggacagaaagtgaagtgtgatgtcaactctggtctggtgtgctacaacaaggaccagggaggcactttcaagatgtgctacaactacctgatcaaggtgctctgttgtagtgttagccactgccagggatctaccacccctgaaggatcggtctcaacgacagaaactgccagctccattccccagaccctgtcctccaagcctttgcccaacactagttcatttgagacctggtctccctctggccctaccaccagtatggaagcctcagagatgcccaccttttggaccctgaggacaagcgtgtcatccccacccaccactcctctcacagtcacctcagtgagcactcagcatcccaagagtctagaatcctctggcagcccatcagtggtgactgccaggtccacctctcaaggtcactccctgcctcccagcagtccccacactaccaattcactctcagcaacaacctcaaaggcttctctgtccagcatgacaaccatctccacctccctgaccacttctgagccctccagtcctcctcatggaggcacgaccacacacccagtcaccgctgcctctacgaccagagcagtcactgagaccctgtcctcaagacctcataccaagaccacctcagagctccctacagttccctcagccagctccacagcaggacctggcacacagacggggtccacttcaaggcccagcacagtcacacagccagccagcagccctgagacctcctctaccacctgccaaccccaatgtcagtggacaaagtggatcgatgtagactacccttcatctagcattaatggaggagatatagagacatatgagaatatcaggaccaatggagaaaaaatctgtgagaagcctcaggacatcaggtgtatggcccagaaccaccccggagtgaatgtggacgagttgggacagaaagtgaagtgtgatgtcaactctggtctggtgtgctacaacaaggaccagggaggcactttccagatgtgctacaactacctgatcaaggtgctctgttgtagtgttagccactgccagggatctaccaccactccagggtcggccccaatgacaggatcagcaactactgccactcagaccctgagttctatgcctcttcccaacactagtctgaccgtgaccagtcctcactcggcctccaccacagcagcaacaagcatcacggaaaccagcagcccaaggagcgtctcctcaattcatacaacacccaagatctttcctgagacattacagtcgacgactggcttgacaacacagcaaacgtcgtcaactggaatctggacaagtatgcttacgggtacagctggcactgtctcctcaacatctctgtccaccagcctagagtctactacaggcataacagaggtgtccaccagtatgcccatgacatctaccctaccagtaactgtgactaatgctactaccccccagggcacaacactctgccaacccaagtgtaagtggactgaatggtttgatgtggattcaccgacctcgggatcggtaaaaggggacatggaaacctatgagaacatcagggcctctggtaagaccttgtgccaggcaccagagaaaattgagtgtcgggcagagaactaccctgcagtgagcattgataaggttggccaagtagtaagctgcaacctagaaacggggctggtctgcaaaaatgaagaccagaaagatgatttcaaaatgtgctttaactacaatatacgtgtgctttgctgtgatgactatagccactgtcctactaccacttacaccaccatcaagtctcccctggcccctttcacaacctcagtgtcctcgagcatggagtccacctttcagactaaccgtcctgccagcccttcagggccaagcacccaagcatccacatggtctacacttcctgactcaggctgtacacctcgctgcaaatggacagagtggtttgacgcagactaccctaaccccggccccagaggcggggactttgaggtctatgcagtatttcgtgaggttggctacatcttctgcgatcagcccaaggacatcgagtgccgttcagagaaggagccagacaggcccctggaaactctagagcaggtggtccagtgtgatgtgcgatttgggctgatatgcaaaaatatcaaccaatcgggacctttgcagtattgtgacaactaccacgtgcgcctcctctgctgtgataactatagccactgtacctcgtcacccatggccaccatgtccactgctctttcttcctctcacctgccatctactcacacttccctggctttgaataccacgacttttttccccggactcagtagttccagtgagccccactcctcttccctgatgtctactcacacctccacaatgttgaccactgagacttcacctatagccactggccccactgtggccccatcctcaacctcagggaccccttacacccccaaagtttcccccagcagccaggtgaccttcagtgtgtctactgctttttcctccgtcttcagtacccccaggcctgtcttttccagccatgcatcttccccatcaccctgtttctgtcaggcatttgggcaactgttcttacctggggatatcatctacaataagactgatggagctggctgccaattctatgccatctgcaaccagtattgtgatgttgaccgcttccagggtacctgcccctcctcttcacctccaatgtcctctaccactgtacctttgcctcccctgcttcctggctgtgataatgctatccctccccggcaggtgaatgagtcttggaccctggagaactgcacagtggccaggtgccagggcaacaatcaaatcattctccttgagccggagcctgtggacaatgtcacctgtgccaaccgtcacttgcctatcaaagtgtgggaccaggagccttgccacttccactacgagtgtgaatgcttctgcagtggatgggggcactcacactacctgaccttcgatggcacctcctatactttcctggataactgtacctccgtgctcatgagagagatccaccctcgccatggtaacctgagcatccttgcccacagctactactgtggggctaccacaaatgtcacctcctgtccccgtgccctcagtgtgtactacaactccatggagattatccttaccatcagcaccactgagagcgggaaggatgagagcctgattatatgggaccaaatgtggatacgatcaggcttcagtaagaatggtgtgaccgtgtccttgagtggggccaccacaatgagtgtcaacatttccaccattggcaccatcatcacctttgatgggaacatcttccagatatggttgccctacagatatttcagcagcaatactgagggccagtgtggtacctgcacaaacagccagatagacgactgccgccggcctgatggcaccatagcttctgactgccaggacatggccaaagaatggctggtgcctgggaacagtagcagcagctgcttagctcagcctagccctctcccgagcaccactccccagaccccagtgtccagcacactgacctccaccccatgcccctctgcacctctctgtgagctgatgctgagccaggtcttcgcagagtgccacaggctcatccctccagatgccttcttcagaagctgtgtcagtgaccactgcaatgccaatattactgacatgctctgtcagagcctggaggcctatgcagcactctgccgggcccaaggtgtatgtaccaactggcgcaatgccactggaggcttgtgtgacctctcctgtccacccactaaggagtacaggccctgtggacccctgcatccagcatcctgcaactcgaggacccaggatagtacaactgggatgctggcagagggctgcttctgccctgagaaccagctcctcttcaactcacgcatggacatctgtgtgtcagagtgtccctgcgtgggaccagacgggctacccaagtttcctggagaacactggatcagcaactgtcaggcctgtgtatgtgagcccggctctgtgtcggtacagtgtgagccagtgaagtgtgagagccaggataaacccccacagtgcacagaagctggctttgtgactgtgacctggcccagtgctgacaatccatgctgccccgagacactgtgtgtttgcaattcaaccacctgccccaagagcctgcccacgtgtgagccaggatatgagctggtccagacccatgagaatagcagctgctgccccagctacagctgtcgacctaagctgtgtacatacaatgacaccatctatggggttggtacaaccttcccagggggtccctgccacacatgcacctgcctctctgatggtgaccaagagccaaaagtagagtgtaaggagacgaactgtaccacctcttgtccccagggcttcaagtacacgctggtgccagagcagtgctgcggggagtgcctgcaaaatgcctgcctcacaccagagggccacgcggtacagcccaatgaaacctgggtgaacagtcctgtggacaactgcactgcataccactgtatggctgagaatggagtctatgtgctgaccccaatccccacatcttgccctgatgtatccaactgtacgggaaccctaaggaaaacgggctgctgttactcctgtgaaaaagaggactcaagtacctgtcaagtgcacgtaaatgcgactgtcttgcggtataagggctgtgagacagaggtcaacatcaccttctgcgagggttcctgctctggaatatccaagtactccatggaggcccaggccatggaacgccagtgcacctgctgtcaggagagcaaggtccatgatgtagctgtaactatgcagtgtcctgatggtacagtcatccagcacacctatacccacatcgatgagtgcaactgtgccccggcctgcagctccctgcctgggacttccatgattgcttcctagagcccattgctagaaggcaattgcatccctaaccccttatgtccctccacctggggcagaacctgcacaactgaccatgagaaccttaggcaggcaagctccccgaggcccacaagaaccctctgtggccctcactgcctctgctccaccctccgcctgccactgttaagaccagcatcaaagagggtggtggggcaatcaagatccacttgaggagggttccaggtgaggatctggccctgaggagcctgttggctgttttggcctcattctctgtgagagcctgtggctgttaaggctccccacagcaagcctgtgtgtcctctgtcacataaaacaagccctgtgtcaggcatctcatgctcacaaaagcagatgggactgtccaagcaagatcagctaccagggatctgtatcaggcaaggtggctgcctgctggaggggctctgggatctggggttgaagaggggtctgtgctcactcatccctaagctgcaataaaccctggcactgtg

SEQ ID NO: 3 - DNA, 12845 bp, Rattus norvegicus
  source 1..12845: mol_type = genomic DNA
ttagtccctcctgcctgccctctgtactgcccccaggatgggcggcaggaattggagctgggctctggtctgggcttctgtggccttgctcatggtgtggccagcagagagccagggccaggaagagctgagcgcagaacatccagaactcaccggagacagtcagaaagtgtatagtgcccccacatcctcatccgcacggcatgtcaccttcatcccacctatctctgtcttcccaagcataagtgccttacacctggcacacaacgggagagtgtgcagcacgtggggtgacttccattataagaccttcgatggtgacgtgttccgcttccctggcctctgtaactatgtcttctcttcacactgcggggccacctacgaggacttcaacatccaattacgtcgtggtcttgagggttccaggcccacggtcacctatgtgttcctcagggcccagggactggtgattgagctgtctaatggctctgtcctggtaaacggacatcgggaggagctgccctacagccgtgcaggtcttctgatggagaagaccagtggctatgtgaagatcagcatcaggctagtcctcaacttcctgtggaatgaagaagacagtgtcctgctggaactggactccaaatacaccaaccagacgtgtgggctgtgcggtgacttcaacgggctcccagctgtcaatgagttctacgcccacaacactaggctgacccctgtccagtttggaaacctgcagaagctggatggtcccacagaacagtgccaggatgtcctactgtcacctgccaacaactgcacagatacggagggcatctgccgtcacatcctgcttggccctgcctttgccgagtgcatcgccctggtagacgtcaacgtgtacctggatgcctgtgtccaggacctgtgccgctgccccacctgcccatgtgccacttttgctgaatattcccgccagtgtgcccatgcagggggccacccacagaactggaggcgttccgatctctgcaactggacctgccctttcaacatggaataccaagagtgcagctcaccctgtgtggatacctgctccaacccccagcgctctcaactgtgcgaggaccactgcatggatggctgcttctgtcccccaggaactgtgctggatgatgtcagacatttgggctgcctgcccctggaacagtgccactgtacccacggtggccacatttatgcccctggagagtccttcaacaccacctgtagctcctgcacctgcttcgggggactgtggcagtgccaggacctgccgtgccccggcacctgctctgtgcaaggcgggtcccacatctccacctttgatgagaaactctacaatgtgcatggagactgcagctacatcctgaccaagaaatgtgcagatagcagcttcactgtgctggtggatcttcggaagtgtggaatgacggacaccgagaactgcctcaaagcagtgacgctgagcctcaatagcggggacatggtcgtcaggatccaggtcaacggtgctgtgttcctgaactccattttcactcaactgcccttgtcagcaggcaacgtcaccatcttcaggccatcatccttcttcgttatagtacaggtgggcacggggctgcagctgcaagtgcagctggtgcccttcatgcaggtgtttgtcaggctggaccgctcctaccaaggccagatgtgtggcctgtgtggaaacttcaaccagaaccaggccgatgacttcacggccctcagtggggtggtggagggcacaggggcagccttctccaacacctggaagactcaagcctcctgccccaactccaagaacacctatgaagacccctgctcatacagtgtggagaacgagaacttcgctcgggagtggtgctcgatgctcactgaaagctcaggagttttctcagcctgccatgccactgttagcccggtgcccttctactcgaactgcttgtttgacacgtgcaactgtgagaatagcgaggactgcatgtgtgccgccctgtcctcctacgtgcgtgcctgtgctgccaaaggcgtgctgctcagtggctggaggggcaaagcctgctacaagtacatgaacaactgcccccaaaccaaggagtactcctactcagtgagtacttgccagcctacgtgccgctctctaagtgaggttgacgtcacctgcagcatcccctttgtgcctgtggatggttgcacctgccctgaaggtaccttcctgaatgacaaggaccactgtgtcccagtggaggagtgcccctgctacttccatggaaccgtggtggcttccggagaggttgttatggacaacggtgtggtgtgctcgtgtacaaatgggaagttgacctgcctgggagccctgatgcagagaaacaaagagtgccaggcacctatggtatacttggactgtaacaatgcctcagtgggtgaccacggggctgaatgcctcagaagctgccacacgctggatgtggattgcttcagcacacaatgtgtctcgggctgcgtgtgtccctcagggctggtagcagatgggaatgggggctgcattgctgaggaggactgcccctgcgtacacaatgaggccacatacagacctggggagatcattcgggtagactgcaataactgcacctgccggaaccgccggtgggaatgcaccaaccagccctgcatgggtgcctgtgtagcctatggggacggccactttgttacctttgatggtgaacgttacatctttgaaggcaactgcgagtataccttggctcaagactactgcagaggcaacaccagtactgatgggaccttccgtattgtcactgagaatgtcccctgtgggaccacaggaaccacctgctccaaggccatcaagatctttgtggagagctatgagctgatccttcatgaggggaactttaaggtggtagcgcgagggccaagtggggaccctccgtacaagatcagatacatgggcatcttcctggtcattgagatccggagtgggatagtcgtgtcctgggacaggaagaccagtgtgtttgtccggctgcagcagcattataagggtagggtctgcggcctgtgtgggaactttgatgacaatgccatcaatgacttcaccacacgcagccagtctgtggtgggtgatgtgctggagtttggaaatagctggaagttctccccatcctgcccggatgccccagttcccaaggatccctgcatcgccaacccttaccgcaagtcctgggcccagaaaaaatgtagcatcatcaacagcgcaactttcgctgcctgccactctcaggttgactctacaaaatactacgaagcctgtgtgcatgatgtgtgtgcctgtgactcaggaggtgactgtgagtgcttctgcactgccgtggccgcctacgcccaggcctgccgtgatgtgggtgtgtgcttgtcctggaggactccagacatctgccctcttttctgtgactactacaaccctcatgggcaatgtgagtggcattatcagccctgtggagccccctgtctgaagacctgtcggaatccatctggacactgcctggttgacctgccaggcctagaaggctgctacccacagtgtccacccagccagcccttcttcaatgaagaccagatgaagtgtgtggcccagtgtggctgctatgatgatgacggaaactatcatgacattggcacacaggtccctacagctgagaactgccagagttgtctctgcacccctggtggcctccagtgtgcttacaaccttacagcctgcacatgcatctatgagggccgtacctacaactacaatgatgttgtctacaacaccactgatggcctcggtgcctgcttagtagccatctgcaaagacaacgggactataaaacgcacgactgaagagtgccctgaagtcccgtctaccacaccattcatattcaccaccactctgacaccccttaccacaaacggttcagcttccactgcgtctactgtgtgtgttcgtgaggtctgccactggtccagttggtatgatgagagccatccagaggctggcatgttaggcggggactttgaaacatttgagaacctgaggaggaaagggtaccaggtgtgtcaaacccccgttgccattgaatgccgagcagtgaagttccccagcctggacttagagaagctgggtcagaaggtaaactgtgacctatcctctgggttgagatgcttcaacaatgaacagagccccccactgtgccacaactatgagctgagggttctgtgttgtgattatgtgccctgtggctcctctctgacctcgggtgtgagtaccactccctctcagtctgacaccagtaaaaacccctctctgcccacacttaccactcatacagcatcctcaaaatcacagtcctggaccagagtgcttagctcccagacaacagcagaattcacttcacacaccaggtccacttcaagccccaacacagtcactccttccactgcgtctactgtgtgtgttcgtgaggtctgccactggtccagttggtatgatgagagccatccagaggctggcatgttaggcggggactttgaaacatttgagaacctgaggaggaaagggtaccaggtgtgtcaaacccccgttgccattgaatgccgagcagtgaagttccccagcctggacttagagaagctgggtcagaaggtaaactgtgacctatcctctgggttgagatgcttcaacaatgaacagagccccccactgtgccacaactatgagctgagggttctgtgttgtgattatgtgccctgtggctcctctctgacctcgggtgtgagtaccactccctctcagtctgacaccagtaaaaacccctctctgcccacacttaccactcatacagcatcctcaaaatcacagtcctggaccagaggtgggaaagagacatcactggataaaactcacagctcaaggcaaacagtgacgtttgcctcaaagagcagacctacttcatctcctacgtcatctagaaactcagccagcagcctccccttgtccaaccctacctggactacaacagtgaaagggaccaatgagaacacagtgcttagctcccagacaacagcagaattcacttcacacaccaggtccacttcaagccccaacacagtcacacagacagtcagcagccctgagacctcctccaccacctgccaacccaaatgtgagtggacaaagtggattgatgtagactatcctacttctagcattgatggaggagacatagagacatatgacaatatcagggccaatggagaaaaagtctgtgagaagcctaaggacatcaggtgtatggcccagaactaccccgaagaggccttagacaacttgcaacagaaagtgaagtgtgatgtcagccttggtctggtgtgctacaaccgggaccagggaggcattttcccgatgtgctacaactacatgatcaaggtgctctgttgtagtgtcatccactgccagggatcttccaccactgcagagtcggccctgacgacgggaactgccactttcactacccagaccctgtcctccaagcctcatcccaacactgattcagttgagacctggtctccctcagggtccaccacccatatagatgcttcagatttgcccacccctggaaccctgactacaagtgtgtcatccccactcaccacccctctcacagtcacttcagtgagcactcagcatcccaagagtctagaatcctctggcatcccatctgtggtgactatcaggtccacctctcaagggcagtccctgcttcccagcagtccccacactaccaacacgttctcagcaacaacctcaaggacttccctgtctagcctggccaccatctctacctccctgaccactcctggaccctccagaactcctcctgggagcactaccacaaacccagccacagctgcctccatgaccagagcggttactgagaccctgtcctcaaggccacataccgagaccacctcagagttccctggagtttcctcagccagctccacagtagggcccagcacacagactgggtccacttcaagccccagcacggtcatacagacagtcagcagccctgagacctcctccaccacctgccaacccaaatgtgagtggacaaagtggattgatgtagactatcctacctctagcattgatggaggagacatagagacatatgacaatatcagggccaatggagaaaaagtctgtgagaagcctaaggacatcaggtgtatggcccagaactaccctggacaggccttagacaacttgcaacagaaagtgaagtgtgatgtcagccttggtctggtgtgctacaaccgggaccagggaggcattttcccgatgtgctacaactacatgatcaaggtgctctgttgtagtgtcatccactgccagggatcttccaccactacagaatcagccccgacgatgggaactgccactactgccacttctgggacatccacacacacttcctggcctgtgtccagcatgcctaccagcgccagcactacagagtcattttcttcccgtgaaaaaaccacagtccttaccagagcttcctctacagctacagtgacatccagggagactcaaacctcatccttgctaaccactggtccatcctcagccctcacaaccacagagaccacttccacaggctgtaaatctcagtgcacctggacagattggctggacagtgacaaaccccaacctggccagtttggaggagacattgagacctactatcatattcaaaacaagacaggtatcgagatatgcaagaaacctgtggacattgagtgtgaggccatcctcttccccaacatgtccttccagcaactgggccaggaggtggtttgtaatgtggacttcggactcatctgtaggaatagcaagcaggtcgacaatgaaacttgtttcaactaccatatccgtgtcctctgctgtgaggaagatatcagctgtatcagcacaactgggtcactgtccaccacttccacaccagcaactggatttcccagcatagtccccatgtccacaagcaagtggtcatcagaggagccaaaatcctcaacttctttcacaactcaaaggagaccctctacccctaggacagagaagattgtccccaacaccacgactaggactactgggagtttctctgcctctagtctctctacacttccagcctctcccaccagccgtctccaaacctcaaaagagccacactcgggtaagccaagtacaagtttgtggacagcctcctccaatgttctgagcactgccacgctgaccacctctattggcaaaccggtctctggaacaaaaaccacattgtggaaagacctccattctagtacctcaaccatggccacatccacccatcccatttctaccacaatgacaacgaagaaccctcaaacactgaccaccaatgacatttccaaaagcaactctatgctgcctagtaggccccatatcaccacaacatcttcagccccagcaacaaataggagtctggccaccatctctacctccctgaccactcctggaccctccagaactcctcctgggagcactaccacaaacccagccacagctgcctccatgaccagagcggttactgagaccccgtcctcaaggccacataccgagaccacctcagagctccctggagtttcctcagccagctccacagtagggcccagcacacagactgggtccacttcaagccccagcacggtcatacagacagtcagcagccctgagacctcctccaccacctgccaacccaaatgtgagtggacaaagtggattgatgtagactatcctacctctagcattgatggaggagacatagagacatatgacaatatcagggccaatggagaaaaagtctgtgagaagcctaaggacatcaggtgtatggcccagaactaccctggacaggccttagacaacttgcaacagaaagtgaagtgtgatgtcagccttggtctggtgtgctacaaccgggaccagggaggcattttcccgatgtgctacaactacatgatcaaggtgctctgttgtagtgtcatccactgccagggatcttccaccactacagagtcggccctgacgacgggaactgccaccacggcagggtcagtcccagtgacgggatcagcaactactgccactcagaccctgagtcctaagcctcttcccaacactagtctgactgtggccagtacccacccagcctccaccacagtaggaacaagcgtctcaaaagctctaacaggctctagccacacagccactcttgttacatcccatggcacaaggcccccacatgtttcaactatcaaggaaaccagcagcccgggaagagcctcctcaatccatacaacacccaagaccttgcctgagacattacagtcgacatctggcttgacaacacaacagatctcgtcaactggaatctggacaagtgtacatacgggtacagctggcactgtctccccaaaatctctgtccaccaccctagaaacgactacaggcataaaagagccatccaccagtgtaccaatgacacataccctaccaccaaccgtgactaatgcaaccacctcccagggcacaacacactgccagcccaagtgtaagtggactgaatggtttgatgtggactcaccgacatcgggggtagtaaaaggggacatggagacctatgaaaacatcagggcctctggcaagaagatgtgccaggcaccagagaaaattgagtgtcgggcagagaactaccctgcagtgagtattgataaggttggtcaagtagtaagctgcaacctggagacggggctagtctgcagaaatgaggagcagacagatgattttaaaatgtgcttcaactacaatatacgtgtgctttgctgtgatgactatagccactgtcctgaaaccccttacagcaccatcaagccatccccgctctggtctacccctacgcccctggtccctttcacaacctcagtgtcctcgagcacggagtccacctttcagactaagcatccctccagctcttccgtatcaagcacccaagcctccacatggactatatctcctgactcgggctgtgaacctcgctgcaaatggacagagtggtttgacgccgacttccccaaccctggccccagaggcggggactttgaggtctacgcagtgcttcgtgaggttggctttatcttctgtgatcaacccaaggacatccaatgccgttcagagaaggagccagacaagcccctggaagctctacagcaggtggtcctgtgtgatgtgcgattcgggctgatatgcaaaaatatcaaccaatcgggacctttgcagtattgtgacaactaccacgtgcgcctcctctgctgtgacaactatagtcactgtaccacgtcacctctggccaccacatccactgtcccttcttcctctcgcctgtcctctacccacactgccccagctttgaataccacgacttctttccctggggtctctagttccagcgtgccccactcctcttccctggtatctactcacacctcggcagtgttgaccaccctgacttcaactatagccactggtcccattgtgatcccctcctcaacctcagggacccctcacacccctgaagtcttccccagcagtcaggcgaccttcagcgtgtctactgcttcttcctcctcggtgttcagtacctccaggcctactgtcatttccagccaagcatcttccccatcaccctgtttctgccgggcatttggacagctgttcgtacctggggatatcatctacaataagactgatggagctggctgccaattctatgccatctgcaaccagcactgtgatgttgaccgcttccagggtgcctgcccctcctcttcacctccaacgccctctacccctgcgcctttgtctcccctgcttcctggctgtgataatatcacccctccccggcaggtgaatgagtcttggaccctggagaactgcacggtggcccagtgccagggcaacaaccaaatcatcctcctagagccagagcctgtggacaacgtcacgtgtgtcaacaagcacttgcccatcaaagtgtgggaccaggagccttgccatttccactatgagtgtgaatgcttctgcagtggatgggggcactcccactacctgacattcgatggcacctcctatacttttgtggacaactgtacctcagtgctcatgagagagatccaccctcgccatggcaacctgagcatccttgcccacagctactactgtggggccaccacaaatgtcaccttctgtccccgcgccctcagtgtgtactacaactccatggagattgtcctcaccaccaccaccaccaacagtgggaaggaagagagcctgattatatgggaccagatgtggataaggtcgggcttcagtaagaatggcgtgaccgtatctttgagtggggccaccacaatgagtgtcaacatttccaccattggcgccagcatcacctttgatggaaacatcttccagatatggttgccctatagatacttcagcaacaacactgagggccagtgtggtacctgcacaaacagtcagacagacgactgccgccggcctgatggcaccatagcttccgactgccaggacatggccaaagactggctggtgccggggaacaacaacagcgactgcttagctcaacccagcccttcccccagcaccacttcccagcccccaatgtccagcacactgacctccaccacatgcccctctgcgcctctctgtgagctgatgttgagccaggtctttgccgagtgccacaagttcatccctccagacgccttcttcagaacctgtgtcagtgaccactgcaatggcaattttagtaaaacgctctgtcagagcctggaggtctacgcagcgctctgccggatccagggtgtatgtaccgactggcgcaatgccacaggagggctgtgtgacttctcctgtccaccctctaaggagtacaggccttgtggacccatgtatccagcttcctgcagccccaggacccaggaactttcagatgggaccctggcagagggctgcttctgccctgagggtcagctcctcttcaactcacgcacggacatctgtgtgtctgagtgtccctgcgtgggaccagatgggttacccaagcttcctggagaacactggatcagcaactgccaggactgtgtgtgtgaccttggctctgtgtcagtacaatgtgagccggtgaagtgtgagggccaggacaaacccccacagtgcacagaagctggctttgtgactgtgacctggcccagcactgacaatccatgctgccctgagacactgtgtgtttgcaattcaaccacttgcccgagtctgcccaaatgtgaaccagggtacgaactgctccagacccatgagaacggcagctgctgtcccatctccagctgtcgacctaagctgtgtacatacaatgacaccatctatggggtcggtgcaaccttcctagggggtccctgccagatatgcacctgcctctctgtggacaaccaagaacctagagtagagtgtagggagacccactgcaccacctcttgtccccagggctttgagtacacactggtgccagaccagtgctgcgggaagtgtgtacagaatgcctgcctcacaccagagggccaggtggtacagcccaatgaaacctgggtgaacagccctggggacaactgcactacatactattgtagtgctgagaatggagttcacgtactgaccccaatccccacgtcttgccctgatgtgtccaactgtacgggaatcctaaggaaaacgggctgctgttactcctgtgaaagagaggactcaagtacctgtcaagtgcacgtcaacccaaccgtcttgaggcacgagggctgtgagacagaggtcaacatcaccttctgcgagggttcctgctctggaaagtccaagtactccatggaggcccgggccatagagcatcagtgcagctgctgtcaggagaccaaggtccatgatgtagctgcaacattacagtgtcccgatggtacagtcatccagcacacctatacccacatcgacgagtgcaaatgtgccccggcctgcagctccctgcctatgacttccatgactatttcctagagcctcttgctggaaggcaattgcatccccaaccccttatgtccctccacctggagcagaatctgcacaactgaccatgaaaaccttaggcaggtatgctccatgaggcccacaagaaccctctgtggctctcactgcctctgctcctcccctctgcctgccacttggtgagaccagcatcaaagagggggacagggcaattaagattcacctgaggagggtgccaggcgagggtttggtcctgaggagcctgttggctcctttggtctcatcctccgtgagagcctgtggctgtagggctccccacagcaagcctgtgcgccctctgtcacataaagtgagctctgtgtcagtcacctcatgttcacaagggcagatggaactgtccacgcaagaccagctaccagggagctgtatcagacaaggtggctgcctgctggaggggctctggggtctgaggtggaagagggggtctgagctcactcatccctaagcggcaataaaccctggcaccgtg

SEQ ID NO: 4 - DNA, 19765 bp, Macaca mulatta
  source 1..19765: mol_type = genomic DNA
cccagttccctccctgcccgtccgtgccccccacctgtgccagtccccaggatgggtgccctgagcacgtgccggacgctggtgttggctctggcggccgtgctcctggtgcagcaggcagagacccagggccctgcggagccgagctggggcagtgcagggcacaccacagatggcggtgccccgatggcctcgcccacccggcgtgtgagctttgttccacccgtcactgtcttccccagcctgagccccctgaacccggcacacaacgggcgggtgtgcagcacctggggcgacttccactacaagaccttcgacggtgacgtcttccgcttccccggcctctgcaactacgtgttctccgagcactgcggcgccgcctatgaggacttcaacgtccagctacgcagaggcctggtgggctccaggcctgtggtcacccgtgttgtcatcaaggcccaggggctggtgctagaggcgtccaatggctctgtcctcgtcaacgggcagcgggaggagctgccttacagccgcactgggctcctggtggagcagagtggggactacgtcaaggtcagcatccggctggtcctgaccttcctgtggaacggagaggacagtgccctgctggagctggaccccaaatacgccaaccagacctgtggcctgtgcggggacttcaacggcctcccagccttcaacgagttctatgcccacaatgccagactgaccccgctccagtttgggaacctgcagaagttggatgggcccacggagcagtgcccggacccgctgcccttgccagccagcaactgcacagatgaggaaggcatttgccaccacaccctgctggggccggcctttgcggagtgccatgcactggtggacactgccccgtacctggctgcctgcgcccaggacctgtgccgctgccccacctgcccgtgcgccacctttgtggaatactcacgccagtgcgcccacgcggggggccagccgcagaactggaggcgccctgagctctgcccccggacctgccccgtcaacatgcagcaccgggagtgtggctcaccttgcgtggacacctgctccaacccccagcgcgcacagctctgcgaagaccactgcgtggacggctgcttctgccccccaggcacggtgctggatgatgtcacgcactctggctgcctgcccctcgggcagtgcccctgcacccacggcggccgcacctacagcccgggcgcctccgtcaacaccacctgcagctcctgcacctgctctggggggctgtggcagtgccaggacctgccgtgccctggcacctgctccgtgcagggcggggcccacatcaccacctacgacgagaaactttacgacctgcatggcgactgcagctacgttctgtccaagaaatgtgctgatggcagcttcaccgtgctggccgaactgcggaagtgtggactgacggacaacgagaactgcctgaaggccgtgacgctcagcctggacggcggggacacggccatccgggtccaggcagacggcagcgtgttcctcaactccatctacacgcagctgcccctgtcggcagccaacatcaccctgttcacaccctcgagcttcttcatcgtagtgcacacaggcctcgggctgcagctgctggtgcagctggtgccgctcatgcaggtgtttgtcaggctggaccccgcccaccagggccagatgtgcggcctgtgtgggaacttcaaccagaaccaggctgacgacttcgcagccctcagtggggtggtggaggccacaggcgcagccttcgccaacacctggaaggcccaggccacctgcaccagtgccaggaacagctttgaggacccctgctccctcagtgtggagaatgagaactacgcccggcactggtgctcacgcctgactgaccccaccggctccttctcgcgctgccactccgtcatcaaccccaagcccttccactcgaactgcctgtttgacacctgcaactgtgagcggagcgaggactgcctgtgcgccgcgctgtcctcctatgtgcacgcctgtgccgccaagggcgtgcagctcagcggctggagggacggcgtctgcaccaagtacatgcagaactgccccaagtcccagagctatgcctacgtggtggacgcctgccagccgacttgccgaggcctgagtgaggccgacgtcacctgcagcgtttcctttgtgcctgtggacggctgcacctgccccacgggcaccttcctcaatgacgcgggcgcctgtgtgcccgcccgggagtgcccctgctacgttcacggcaccgtgctggctcctggagaggtcgtgcacgacgaaggcgctgtgtgttcgtgtgagggtgggaagctgagctgcctgggagcctctctgcagaaaagcacagggtgtgtggcccccatggtgtacctgaactgcagcaacagcttggcgggcacccctggggccgagtgcctccgaagctgccacacgctggacgtgggctgtttcagcacacactgcgtgtccggctgtgtctgtcccccggggctggtgtcagatgggagtgggggctgcatcgccgaggaggactgcccctgcgtgcacaacgaggccacctacaagcctggagacaccatcagggtcgactgcaacacctgcacctgcagaaaccggaggtgggagtgcagccaccggctctgcctgggcacctgcgtggcctacggggatggccacttcatcacctttgatggcgagcgttacagctttgaaggcagttgcgagtacatcctggcccaggactactgtggggacgacgccacccacgggaccttccgcatcgtcaccgagaacatcccctgtgggaccaccggcaccacctgctccaaggccatcaagctcttcgtggagagctacgagctgatcctccaggagggtgcctttaaggcagtggcgagggggccgggcggggacccgccctacaagatccgctacatggggatcttcctggtcatcgagacccgcgggatggccgtgtcctgggaccggaagaccagtgtgttcatccgactgcaccaggactacaagggcagggtctgcggcctgtgcgggaacttcgacgaccatgccatcaatgactttgccacgcgtagccggtctgtggtgggggacgcactggagtttgggaacagttggaagctctccccgtcctgcccagacgccctggcgccgaaggacccctgcacggccaaccccttccgcaagtcctgggcccagaagcagtgcagcatcctccacggtcctaccttcgccgcctgccgctcccaggttgactccaccaagtactacgaggcctgcgtgaacgacgcgtgtgcctgtgactcgggtggtgactgcgagtgtttctgcacggctgtggctgcctacgcccaggcttgccacgacgcgggcctgtgtgtgtcctggcggactccggacacctgccctttgttctgtgacttctacaacccacacgggggctgtgagtggcactaccagccctgcggggcaccctgcctaaaaacctgccggaaccccagtgggcactgcctggtggacctgcctggcctggaaggctgctacccgacgtgcccacccagccagcccttcttcaatgaggaccagatgaagtgcgtggcccagtgtggctgctacgacagggatggaaactactatgacgttggcgcaagagtccccacagcggagaactgccagagctgtaactgcacgcccagtggcatccagtgcgctcacagccttgaggcctgcacctgcacctatgaggacaggacctacggctaccaggacgtcatctacaacaccaccgatgggcttggtgcctgtttgatcgccatctgtggaagcaacggcaccatcgtcaggaaggctgtggcatgtcctggaactccggccacaacgccattcaccttcaccactagctgggtcccccactccacgacaagcccggccctcccagtctccactgtgtgtgtccgcgaggtctgccgctggtccagctggtacaacgggcaccacccagagcctggtctgggaggcggagacttcgagacatttgaaaacctgaggcagagagggtaccaggtgtgccctgtgccagccgacatcgagtgccgggcagggcagcttcccgacatgccactgggagagctgggccagcaggtggactgtgaccgcgtgagggggctgatgtgcgccaacagccagcagagccccccgctctgtcacgactatgagctgcgggttctctgctgtgaatacgtgccctgtggcccctccctggccccaggcaccagcccccagccctccctcagtgccagcacggagcctgctgtgcctacccctacccagaccacagcaaccgaaaagaccaccctgtgggtgatcccaagcatccggtcaacagcagccctcacctcacagactgggtccagctcaggccccacgacggtcacctccctggccccaggtaccaccacctgccagccccggtgtcagtggacagagtggtttgatgaggactaccccaagtctgaacaacttggaggggacgttgagtcctacgataagatcagggctgcaggagggcacttatgtgagcagcctaaggacatagagtgccaggccgagagcttccccaactggcccctggctcaggtagggcagaaggtgcactgtgacgtccgcttcggcctggtgtgcaggaactgggagcaggagggcatattcaagatgtgctacaactacaggatccgggtcctgtgctgcagcgccgaccactgcaggggacgagccacaaccccaccaccggccacatcgctggagacggccaccaccaccacccaggtcctgttctcaacgctgcagtcaacgagtagcctgggggtgaccagcaccacagcagtccccaccctctcaaaaggactgacatcccccagatacacgggcacccttggtacagccaccacaggaggccccacggttcctgcaggctccacagaacccactgtcccaggggtggccacatccaaccttccaacacactcagtcctgccagggaccacggggagttcgggcacatggcatccctcacagccacccacgccagccccaacgacaatggcaacctccagagctcacctgacaggcacagccagctccagctccaaacagccgctgaccacgagcctggcgccgacactctcgagcgaactgttcacctctcaggccgagaccagcacccccaggacagagacgacactgagccgcttgactgagaccaccactagccagagcactacccgctgtcaaccgaagtgtgagtggacagagtggtttgacgtggacttcccaacctcaggggtcgcaggcggggacatggaaacttttgaaaacatcagggctgctgggggcaagatgtgctgggcaccaaagagcatagagtgccgggcggagaactaccccgaggtgagcatcgaccagatcgggcaggtgctgacctgtagcctggagacggggctgatctgcaagaatgaggaccagacaggcaggttcaacatgtgcttcaactacaatgtgcgtgtgctctgctgtgacgactacagccactgcccccacacagccgcccccacgcccacctcctccacacaggcacccagactcacctccatgggggccaccagccccacagtgactgcctccacagccattgcaacctggagcaccaagtcaccagcagtaacaggatcctcaactctggccaccactcaaactggccccagcttctccaagaccacagagagggtgtccctccccagtccctctgcccctttaccttccaccgccagcctcctccctaccagggagcagcagacctcccaggctccatccatgcccaccagtccaattgtgaccagcacccccacaacgtcccccgtggtgaccgcccgtgtgcacacaaccctgcggacttccagctctgggcccaccatcaggacgaccctgccctctggccccccgtctcccagcacgggctgtgtgcctcgctgcacctggacagactggtttgatgaggactaccccagctctgaccctgatggcggggactttgagacctttggggtcatccgctctgctggccataccttctgcgagcatccatgggacattgagtgccgctctgagaaggagcccaaccaacccctggaggccctggggcaggtggtgcagtgtgatgtgagcattgggctggtgtgtaggaaccgtgaccagtctgggcccctgtggtactgccacaactttcatgtgcggctgttgtgctgtgatgacagccactgtgccagcactcccacgagcaccggatccacggctaccactcccacaagcaccggatccacggctaccactcccacgagcactggatccacggctaccactcccatgagcaccagatccacggctaccactcccacgagcactggatccacagttaccgtacccatgagcaccggttccatggctaccactcccacgagcaccggatccacagttaccgtacccatgagcaccggatccacggctaccactcccacgagcaccggatccatggctaccactcccacgagcaccggatccacggctaccactcccacgagcaccggatccacggctaccactcccacgagcaccggatccacagttaccactcccacgagcaccggatccacagttaccgtacccatgagcaccggttccacggctgccacacccaggagcacaggcaccacagccaggcgctcctccaccccaggaacagctcacactgtgaaagtgctgaccaccacagccatcacaacccaggccaccagctccacagccaccccctcctccacctcaagcactgctcagagccccaaagggttgaccaccacagccaccacaactgtggctgccagctccacggtgacttcccaccccccagcaggaaccaccggtaccaccctgggtggtaccaccttgatcttcacagagccaaccactaaagccaccatgaccacgcccaccagctccatggccaccgcctcctccagccaaggaacagctcacaccccaaaagtgctgagcaccacaaccatcacaaccatggccaccacctccaaagccaccccctcccacaccccggcaactgctgccaccccaaatgtgctgaccaccatgaccacaacacccacagtcaccggctccaaagccattccctcctccagtccagggactgcacccacccttccagcactgacaagcacagccaccacacccacagctacaagctttacagccatcccctcttcctctctggggaccacctggaccctcacagcacagaccaccacacccacagccaccatgtccacaggcagaccctcctccactccagagactgcccatatttccacagtgcttaccaccacggccaccacaactggggccactggctccatggccaccccctcctccagcccaggaacagcttacactaccaaagtgctgactaccacaaccaggggcttcacagccactccctcctctagcccagggactgcacccacacttccagggcggatcggcacaaacaccacacccacaaccagcggctccatggtgaccccctcctccatcccagggaccacccacacccccacagtgctgaccaacaccaccacaaccgtggccactggctctatggtaacaccctcctctagcccacagaccactggtacacccccagcactggccaccacgggcacgacaatcacggccacaggctccaccaccaccccctcctccgctccagggacaactcccatctccccagtgctgaccaccacggccaccacacctgcagccaccagcaccacagtggctccctcctctgccctagggaccacccatacacccccagtgctgtccaccatggccaccacacatgggcgatcccagctccctgagagtccccgcatggtacccacagcctggacttccatggccacctcgggcgccacccacatcacagagccatccacggtgacttcccacaccccagtaggaaccaccggtaccaccccacactcgactccagccctgtccagccctcacactcacagcagaaccactgagtcacccctttctccagggaagaccaccccgggcctcaccacggccacctccaggaccacggccacggccacaaccagcgagacccgtgcctcgaccctgctgtccagcagccccacatcggcccccacgaccccggtggtgtccacaggctgtgagccccagtgtgcctggtcagactggctggactacagctaccccatgtcggggccctctggcggggacttggagacctactccaacatccgcgcggctggaggggccgtctgtgagcagcccctgggcctcgagtgccgcgcccaggcccagcctggtgtccccctgcgggagttgggccaggtcgtggaatgcagcctggacttcggcttggtctgcaggaaccgtcagcaggtggggaagttcaagatgtgcttcaactacgaaatccgtgtgttctgctgcaactacggccgctgccccagcaccctggccaccagctccaaggccacaccctcctccactctggagacaaccgggatcctcacagagccaaccactacagccatcacaacagtggccacgggctccacagccatgccctcctccactccagggaccaccgcgatcctcacagagccaaccactacagccatcacaacagtggtcacgggctccactgccatcccttcctccacctcagggactactcaaatcaccaaagtgtttcccaccacaactgcaacgactgaagccactggctccacggccaacccctcctccaccccagggaccaccggctccacagccacctcctcctccactcctgggaccacctggatcttcacagagccaaccacaacattgaccacgaatgtggccaccagctccacagtcaccccctcctccaccccagcaactgctgccacctcagaattgctgaccaccatggccacgaaacccacagccactggctccaaagccactgcctccaccagtccagggactgcacccacccttccagttgtgctgacaagcacagccaccacacccacagctaccagctttacagccatcccatcctcctccctgagaaccacttggaacctcacagcacagaccaccgcaccaacggccaccctgtccacagcccacgcctcctccactccaaggaccacccacacctccacagcgctaaccaccacggccaccacaatccaggccactggctccacggccaccctcctcacctcaggaacagctcacacctctaaagtgctgaccaccatggccatcaccacaagctccacagccaccccctcctccagcccagggactgcaagcacccttacagcacttatcaccacaaccaccacacccacaaccagcagctacacagtgaccccctcctccatcccagggaccacccacaccccgacagtgctgaccaacaccaccataactgtggccactggctctatggcaacaccctcctctagcccacagaccactggtacacccccagcactggccaccacgggcacgacaatcacggccacaggctccaccaccacccccgcctccactccagggacaactcccatctccccagcgctgaccaccacggccaccacacctgcagccaccagcaccacagtggctccctcctctgccctagggaccacccatacacccccagtgctgtccaccacggccaccacacatgggcgatcccagctccccgagagtccccgcacggtacccacagcccggacttctgtggccacctcgggcaccacccacatcacagagccatccacggtgacttcccacaccccagtaggaaccaccggtaccaccccacactcgacttcagccctgtccagtcctcacactcacagcagaaccactgagtcacccctttctccagggaagaccaccccgggcctcaccacggccacctccaggaccacggccacaaccagcaagacccacacctcgaccctgctgcccagcagccccacatcggcccccacaaccccagtggtgtccacgggctgtgagccccagtgtgcctggtcagactggctggactacagctaccccatgtcggggccctctggcggggacttggagacctactccaacatccgcgcggctggaggggccgtctgtgagcagcccctgggcctcgagtgccgcgcccaggcccagcctggtgtccccctgcgggagttgggccaggtcgtggaatgcagcctggacttcggcttggtctgcaggaaccgtcagcaggtggggaagttcaagatgtgcttcaactacgaaatccgtgtgttctgctgcaactacggccactgccccagcaccccggccaccagctccaaggccacaccctcctccactctggggtcaacctggattctcacagagccaaccactacagccatcacaacagtggccacgggctccacgaccatcccctcctccactccagggaccaccgcgatcctcacagagccaaccactacagccatcacaacagtggtcacgggctccacagccattccctcctccactacagggactactcgaatcactgaagtttttcccaccacaaccgcaatgactgcagccactggctccacggccaacccctcctccaccccaggaaccacctggatcttcacagagccaaccaccactgccaccataactgtggccactggctccaaggccacgccctcttccactccagcatcaacctggattctcacagagccgaccactacagccgtcacaacagtggccacgggctccacggccatgccttcctccactcaggggacgaccgggagcctcacagaaccaaccaacactgccaccataactgtgaccaccagctccacagccatgccctcctccactccagggatgacctcgatcctcacagagccgaccactacagccattacaacagtggccacgaggtccacggccacgccctcctccactccggagacggccaggatcgtcacagagccaaccaccactgccaccataactgtggccaccagctccacagccacgccctcctccactccagggacgaccttgatcctcacagagccgaccactacagccatcacaacagtggccccgggctccacagccacgcccacctccactctggggacgaccgggatcctcacagagccaaccactacaaccatcacaacagtggccacaaggtccacggccacgcattcctccactccggggacaaccgggatcctcacagagccgaccactacagccatcacaacagtggccccgggctccacagccacgccctcctccactccagggaccactgggatcctcacagagccaaccaccactgccaccataactgtggccactggctccacggccatcccctcctccactccagggatgacctcgatcctcacagagccaaccactacaaccatcacaacagtggccacaggctccacggccacgcccacctccactccggggacgaccgggatcctcacagagccaaccactacaaccatcacaacagtggccacgaggtccacggccacgccttcctccactccggggacaaccgggatcctcacagagccgatcactacagccatcacaacagtggccacgggctccacggccatcccctcctccactccagggatgacctcgatcctcacagagccaaccactacagccatcacaacagtggcccctggctccacagccacgccctcctccactccggggacgactgggatcctcacagagccaaccaccactgccaccataactgtggccactggctccacggccatcccctcctccactccagggatgacctcgatcctcacagagccaaccactacagccatcacaacagtggccacgggctccatggccacgcccacctccactccggggacgaccgggatcctcacagagccgaccaccactgccaccataactgtggccactggctccacggccatcccctcctccactccagggatgacctcgatcctcacagagccaaccactacaaccatcacaacagtggccacgaggtccacggccacgccttctactccggggacaaccgggatcctcacagagccgaccactacagccatcacaacagtggccacgggctccacggccatcccctcctccactccagggatgacctcgatcctcacagagccaaccactacagccatcacaacagtgaccacgggctccacggccacgccctcctccactccggggacgactgggatcctcacagagccaaccactacaaccgtcacgacagtggccacgaagtccacggccgtgccctcctccactccagggaagacctcagtcctcacagagctgaccactacagccatcacaaccacgggctccacggccacaccttccactccggggacgactgggatcctcacagagccgaccactacaaccatcacaacagtggccacaggctccacagccctgccctcctccactccggggacgactggattcctcacagagccaaccaccactgccaccataactgtggccactggctccacggccatcccctcctccactccagggatgacctcaatcctcacagcgccgaccactacagccatcacaacagtgaccacgggctccacggccacgccctcctccactccagggaagacctcaatcctcacagagctgaccactacagccatcacgacagtggccacgggctccacggccacgccttccactccggggacaaccaggatcctcacagagccgaccactacagccatcacaacagtggccccgggctccacagccatgccctcctccactccggggactactgggatcctcacagagccaaccactacaaccatcacaacagtggccacgaggtccatggccatgccttcctccactccggggacgaccgggatcctcacagagccaaccactacaaccatcacaacagtggccacaaggtccacggccacgcattcctccactctggggacaaccgggatcctcacagagccgaccactacagcgatcacaacagtggccacgggctccacggccatcccctcctccactccagggataacctcgatcctcacagagccaaccactacagccatcacaacagtggccccgggctccacagccgcgccctcctccactccggggacgactggaatcctcacagagccaaccaccactgccaccataactgtggccactggctccacggccatcccctcctccactccagggatgacctcgatcctcacagagccaaccactacagccatcacaacagtggccacgggctccaaggccaagcccacctccactccggggacgaccgggatcctcacagagccgaccaccactgccaccataactgtggccactggctccacggccatcccctcctccactccagggatgacctcgatcctcacagagccaaccactacagccatcacaacagtggccccgggctccacagccacgccctcctccactccggggacgactgggatcctcacagagccgaccaccactgccaccataactgtggccactggctccacggccatcccctcctccactccagggatgacctcgatcctcacagagccaaccactacaaccatcacaacagtgaccacgggctccacggccacgccctcctccactccagggaagacctcagtcctcacagagctgaccactacagccatcacgacagtggccacgggctccacagccacgccttccactccggggacaaccaggatcctcacagagccgaccactacagccatcacaacagtggccccgggctccacagccacgccctcctccactccggggacgaccgggatcctcacagagccaaccactacaaccatcacaacagtggccacaaagtccacggccacgccttcctccactccggggacgaccgggatcctcacagagccaaccactacaaccatcacaacagtggccacaaggtccacggccacgcattcctccactccggggacgactgggatcctcacagagccgaccaccactgccaccataactgtggccactggctccacagccatcccctcctccactccagggatgacctcgatcctcacagagccaaccaccacagccatcacaacagtggccacgggctccacggccacgcccacctccactccggggacgactgggatcctcacagggccgaccaccactgccaccataactgtggccactggctccacggccatcccctcctccactccagggatgacctcgatcctcacagagccaaccactacagccatcacaacagtggccacgggctccatggccacgccttctactccggggacgactgggatcctcacagagccaaccactacagccatcacaacagtgaccacgggctccacggccacgcccacctccactccagggacgaccgggatcctcacagagccaaccactacaaccatcacaacagtggtcacgaggtccacggccgtgccttcctccactccagggatgacctcaatcctcacagagccaaccactacagccatcacaacagtggccacgggctccacggccacgcccacctccactccagggacgactgggatcctcacagggccgaccaccactgccaccataactgtggccactggctccacggccatcccctcctccactccagggatgacctcgatcctcacagagccaaccactacagccatcacaacagtggccacgggctccacggccacgccttctactccggggacgactgggatcctcacagagccaaccactacagccatcacaacagtgaccacgggctccacggccacgcccacctccactccagggacgactgggatcctcacagagccaaccactacaaccatcacaacagtggccacgaggtccacggccgtgccttcctccactccagggatgacctcaatcctcacagagccaaccactacagccatcacaacagtggccacgggctccacggccacgccctcctccactcaggggacgaccgggatcctcacagagccaaccactactaccgtcacaacagtggccacgaagtccacggccgtgccctcctccactccagggaagacctcagtcctcacaaaactgaccactacagccatcacaaccacgggctccacagccacagcttccactccggggacgactggattcctcacagagccaaccaccactgccaccatcactgtggccactggctccatggccatcccctcctccactccagggacgacctcgatcctcacagcgccgaccactacagccatcacaacagtgaccacgggctccacggccacgccctcctccacttcagggaagacctcaatcctcacagagctgaccactacagccattacgacagtggccacgggctccacggccatgccttccactccggggacaaccaggatcctcacagagccgaccactacagccatcacaacagtggccacgggctccacagcctcaccctccttcactccagggacaaccgggatcctcacagagccgaccactacaaccattacaacagtggctatgaggtccacggccacgccctcctccactctggggacgaccgggatcctcacagagccaaccactacagccatcacaacagtggccacaggctccacggccataccttcctctactctgggaacgaccaggatccacacagaaccaaccaccactgccaccataagtgtggccaccagctccacagccacgccctcctccactccggcgtcaacttggttcctcacagagccgaccactacagccatcacaactatggcctcgggctccacagccaccctgacctccaccccgggaacaacgtactctcccaaagtgttgaccatcacagccaccacacccacagccaccagctccaaagcaaccccctcctccactctggggacgacctggatcctcacagagccgaccactctagccaccccgactgaggccactggttccacagccaccatacccacagcgcccagctcctcagcaacccctttctccagcccagggactgcaggcacccttccagtgcggaccactacagcaaccacgaccatggccactaggtctactgccatcccctcctccactgtgggaacagctggcacccccaaagtgctgaccaccacggccaccaggcccacagccactggctccacggttcccagctcgtccaccctggggaccacccacacccctgcagtgctccccagcagcctgccagccttcagcatgtccactgtgtcctcctcagtcctcaccaccctcagacccactcacttccccagctcccacttctctactccctgcttctgcagggcatttggacagttcttctcacctggggaagtaatctacaataggacagaccgagccggctgccaattctatgccgtgtgcaaccagcactgtgacctcgaccgcttccagggcacctgccccacctccccaccaccagcgtcctccaccctgctgccctcgccctcccctgcccctggctgtgacaatgccatccctccccggcaggtgaatgagacctggaccctggagaactgcacggtggccaggtgcgtgggtgacaaccatgtcgccctgctggacccaaagcccgtggccaatgtcacctgcgtgaacaagcacctgcccatcaaagtgtccgacccgagccagccctgtgacttccactatgagtgcgagtgcatctgcagtgtgtggggcagttcccactattccacctttgacggcacctcttacacctttgagggcaactgcacctatgtcctcatgagagagatccacgcacgcctcgggaatctcagcctctacttggacaaccactactgcgcggcctctgccgctgccgccagctgctcccgcgccctcaggctccactacaagtccatggatatcgtcctcaccgtcaccacggtgcatgggaaggaggaggacttgatcctgtttgaccaaattccggtgagcagcggtttcagcaagaacggcgtgcttgtgtctgtgacggggaccaccaccatgcgcgtggacatccctgccctgggtgtgagcgtcaccttcgatggccacatcttccaggcccggctgccctacagcctcttccacaacaacaccgagggccagtgcggcacctgcaccaacaaccagagggacgattgtctccagcgcgacggaaccactgccaccagctgtaaggacatggctaagacttggttggtccctgacagcagaaaggacggctgctgggccccgaccggcacgccccccacggccagtcccccggccccggtgtctagtgcacccacccccagcccgtgcccgccgcagccactctgtgatctgatgctgagccaggtctttgcccagtgccacgaccttgtgcccccgggcccattcttcaatgcctgcatcagcgacggctgccagggccaccccgaggtgccctgccagagcctggaggcctacgcagctctttgccgtgcccggggagtgtgcagtgactggcgaggtgcaaccggcggcctgtgcgatctcacctgcccacccaccaaagtgtacaagccgtgcggccccatacagcctgcctcctgcaactccaggaaccagaacccacaactggaggggctggcggagggctgcttctgccccggggaccagatcctcttcagcgcacacacgggcacctgcgtgcaggactgcccctgcgtgggacctgatgggcttcccaagtctcctgggcagcagtggatcagcaactgccagtcctgcgtgtgtgatgagggttcaatgtcggtgcaatgcaagcccctgccctgtgaggcccagggtccctcctcaccatgcagccaccccggtttcgtgaccgtgaccaggccccgggccaacaacccctgttgccccgagacggtgtgcgtatgcaacacaagcacctgccaccagagcccacccgtgtgcccgctagggcaggagttgatcagcacccagaaggagggcgactgctgtcccaccttccgctgcggacctcagctgtgttcctacaagggcatcttctatggggttggtgcaatcttcccaggggcccttccctgccacacgtgtacctgcctctctggggacacccaggacccaacggtgcaatgttgggaggatgcctgccacaatactacctgcccccagggctttgagtacaagagagcggccgggcagtgctgtggggagtgcgtgcagactgcctgcctcacgcccgatggtccgccagtccagctgaacgaaacctgggtcaatagccgtgtggacaactgcaccgtgtaccactgtgaggtcgagagcggagtctatttgctgaccccacagcctgcatcctgcccagaagtgtccagctgcagggggagcctcaggaaaaccggctgctgctactcctgtgaggaggactcctgtcaggtccgcgtcaacacaaccgtcctgtggcaccagggctgcaagactgaggtcaacatcaccttctgtgagggctcctgccccggagagtccaggtactcggcagaggcccaggccatgcagcaccagtgcacctgctgccaggagagacgggtccacgaggagacggtgcccttgcgctgtcccgacggctcgactgtcctgcacacctacaaccatgtggatgagtgtggctgcacgccattctgtgtccctgcgcccatggctcccatatacccccccggcttcctggcccaggaggccactgccgtctgaggatgttctgcctccatccccatgctctgtccacctggagccaggacgtgcattgcctgatcatgaaaaccttgggcctgctctgcggagccccctggcctctgtgtgtggcaccccgtgcctctgtgctcctgctgcccaccctgtgggtaaaaccggaccctggaagggtgaggggccagcaggacccctttcaggagggcaccactcaggagtcatgtcctgggagagcctgtggcccaccttggccttgcccctccttgatgtcactgggacgccctggaacaagctaagcgtgtgcgggcctgtgtgtccctgccatggccagagtccccaggcagcatggattctggctggccacatccggccactggggcacagacaggctggtccaggcaaggccggctgctgccaggaagctgcgctagacctgcctgctgcagggtacctcggggctgaggtcacaatggccaggtcagagagaggtcggcatcccaaagccccctctgctcaacccagcccagttttgcaaataaacgctgagcatcgagta

SEQ ID NO: 5 - DNA, 17773 bp, Macaca fascicularis
  source 1..17773: mol_type = genomic DNA
atgggtgccctgagcacgtgccggacgctggtgttggctctggcggccgtgctcctggtgcagcaagcagagacccagggccctgcggagccgagctggggcggtgcagggcacaccacagatggcggtgccccgatggcctcgcccacccggcgtgtgagctttgttccacccgtcactgtcttccccagcctgagccccctgaacccggcacacaacgggcgggtgtgcagcacctggggcgacttccactacaagaccttcgacggtgacgtcttccgcttccccggcctctgcaactacgtgttctccgagcactgcggcgccgcctatgaggacttcaacgtccagctacgcagaggcctggtgggctccaggcctgtggtcacccgtgttgtcatcaaggcccaggggctggtgctagaggcgtccaatggctctgtcctcgtcaacgggcagcgggaggagctgccttacagccgcactgggctcctggtggagcagagcggggactacgtcaaggtcagcatccggctggtcttgaccttcctgtggaacggagaggacagtgccctgctggagctggaccccaaatacgccaaccagacctgtggcctgtgcggggacttcaacggcctcccagccttcaacgagttctatgcccacaacgccagactgaccccgctccagtttgggaacctgcagaagttggatgggcccacggaacagtgcccggacccgctgcccttgccagccagcaactgcacagatgaggaaggcatttgccaccacactctgctggggtcggcctttgcggagtgccacgcactggtggacactgccccgtacctggctgcctgcgcccaggacctgtgccgctgccccacctgcccgtgcgccacctttgtggaatactcacgccagtgcgcccacgcggggggccagccgcagaactggaggcgccctgagctctgcccccggacctgccccgtcaacatgcagcaccgggagtgtggctcaccttgcgtggacacctgctccaacccccagcgcgcacagctctgcgaagaccactgcgtggacggctgcttctgccccccaggcacggtgctggatgatgtcacgcactctggctgcctgcccctcgggcagtgcccctgcacccacggcggccgcacctacagcccgggcgcctccgtcaacaccacctgcagctcctgcacctgctctggggggctgtggcagtgccaggacctgccgtgccctggcacctgctccgtgcagggcggggcccacatcaccacctacgacgagaaactttacgacctgcatggcgactgcacctacgttctgtccaagaaatgtgctgatggcagcttcaccgtgctggccgaactgcggaagtgtggactgacggacaacgagaactgcctgaaggccgtgacgctcagcctggacggcggggacacggccatccgggtccaggcagacggcagcgtgttcctcaactccatctacacgcagctgcccctgtcggcagccaacatcaccctgttcacaccctcgagcttcttcatcgtagtgcacacaggcctcgggctgcagctgctggtgcagctggtgccgctcatgcaggtgtttgtcaggctggaccccgcccaccagggccagatgtgcggcctgtgtgggaacttcaaccagaaccaggctgacgacttcgcagccctcagtggggtggtggaggccacaggcgcagccttcgccaacacctggaaggcccaggccgcctgcgccaatgccaggaacagctttgaggacccctgctccctcagtgtggagaatgagaactacgcccggcactggtgctcacgcctgactgaccccaccggctccttctcgcgctgccactccgtcatcaaccccaagcccttccactcgaactgcctgtttgacacctgcaactgtgagcggagcgaggactgcctgtgcgccgcgctgtcctcctatgtgcacgcctgtgccgccaagggcgtgcagctcagcggctggagggacggcgtctgcaccaagtacatgcagaactgccccaagtcccagagctatgcctacgtggtggacgcctgccagccgacttgccgaggcctgagtgaggccgacgtcacctgcagcgtttcctttgtgcctgtggacggctgcacctgccccacgggcaccttcctcaatgacgcgggcgcctgtgtgcccgcccgggagtgcccctgctacgttcacggcaccgtgctggctcctggagaggtcgtgcacgacgaaggcgctgtgtgttcgtgtgagggtgggaagctgagctgcctgggagcctctctgcagaaaagcacagggtgtgtggcccccatggtgtacctgaactgcagcatcagcttggcgggcacccctggggccgagtgcctccggagctgccacacgctggacgtgggctgtttcagcacacactgcgtgtccggctgtgtctgtcccccggggctggtgtcagatgggagtgggggctgcatcgccgaggaggactgcccctgcgtgcacaacgaggccacctacaagcctggagacaccatcagggtcgactgcaacacctgcacctgcagaaaccggaggtgggagtgcagccaccggctctgcctgggcacctgcgtggcctacggggatggccacttcatcacctttgatggcgagcgttacagctttgaaggcagttgcgagtacatcctggcccaggactactgtggggacgacgccacccacgggaccttccgcatcgtcaccgagaacatcccctgtgggaccaccggcaccacctgctccaaggccatcaagctcttcgtggagagctacgagctgatcctccaggagggcgcctttaaggcagtggtgagggggccgggcggggacccgccctacaagatccgctacatggggatcttcctggtcatcgagacccgcgggatggccgtgtcctgggaccggaagaccagtgtgttcatccgactgcaccaggactacaagggcagggtctgcggcctgtgcgggaacttcgacgaccatgccatcaatgactttgccacgcgtagccggtctgtggtgggggacgcactggagtttgggaacagttggaagctctccccgtcctgcccagacgccctggcgccgaaggacccctgcacggccaaccccttccgcaagtcctgggcccagaagcagtgcagcatcctccacggtcctaccttcgccgcctgccgctcccaggttgactccaccaagtactacgaggcctgcgtgaacgacgcgtgtgcctgtgactcgggtggtgactgcgagtgtttctgcacggctgtggctgcctacgcccaggcttgccacgacgcgggcctgtgtgtgtcctggcggactccggacacctgccctttgttctgtgacttctacaacccacacgggggctgtgagtggcactaccagccctgcggggcaccctgcctaaaaacctgccggaaccccagtgggcactgcctggtggacctgcctggcctggaaggctgctacccgacgtgcccacccagccagcccttcttcaatgaggaccagatgaagtgcgtggcccagtgtggctgctacgacagggatggaaactactatgacgttggcgcaagagtccccacagcggagaactgccagagctgtaactgcacgcccagtggcatccagtgcgctcacagccttgaggcctgcacctgcacctatgaggacaggacctacggctaccaggacgtcatctacaacaccaccgatgggcttggtgcctgtttgatcgccatctgtggaagcaacggcaccatcatcaggaaggctgtggcatgtcctggaactccggccacaacgccattcaccttcaccactagctgggtcccccactccacgacaagcccggccctcccagtctccactgtgtgtgtccgcgaggtctgccactggtccagctggtacaacgggcaccacccagagcctggtctgggaggcggagacttcgagacatttgaaaacctgaggcagagagggtaccaggtgtgccctgtgccagccgacatcgagtgccgggcagggcagcttcccgacatgccactgggagagctgggccagcaggtggactgtgaccgcgtgagggggctgatgtgcgccaacagccagcagagccccccgctctgtcacgactatgagctgcgggttctctgctgtgaatacgtgccctgtggcccctccctggccccaggcaccagcccccagccctccctcagtgccagcacggagcctgctgtgcctacccctacccagaccacagcaaccgaaaagaccaccctgtgggtgatcccaagcatccggtcaacagcagccctcacctcacagactgggtccagctcaggccccacgacggtcacctccctggccccaggtaccaccacctgccagccccggtgtcagtggacagagtggtttgatgaggactaccccaagtctgaacaacttggaggggacgttgagtcctacgataagatcagggctgcaggagggcacttatgtgagcagcctaaggacatagagtgccaggccgagagcttccccaactggcccctggctcaggtagggcagaaggtgcactgtgacgtccgcttcggcctggtgtgcaggaactgggagcaggagggcatattcaagatgtgctacaactacaggatccgggtcctgtgctgcagcgccgaccactgcaggggacgagccacgaccccaccaccggccacatcgctggagacggccaccaccaccaccaccacccaggtcctgttctcaacgctgcagtcaacgagtagcctgggggtgaccagcaccacagcagtccccaccctctcaaaaggactgacatcccccagatacacgggcacccttggtacagccaccacaggaggccccacggttcctgcaggctccacagaacccactgtcccaggggtggccacatccaaccttccaacacactcagtcctgccagggaccacggggagttcgggcacatggcatccctcacagccacccacgccagccccaacgacaatggcaacctccagagctcacctgacaggcacagccagctccagctccaaacagccgctgaccacgagcctggcgccgacactctcgagcgaactgttcacctctcaggccgagaccagcacccccaggacagagacgacactgagccgcttgactgagaccaccactagccagagcactacccgctgtcaaccgaagtgtgagtggacagagtggtttgacgtggacttcccaacctcaggggtcgcaggcggggacatggaaacttttgaaaacatcagggctgctgggggcaagatgtgctgggcaccaaagagcatagagtgccgggcggagaactaccccgaggtgagcatcgaccagatcgggcaggtgctgacctgtagcctggagacggggctgatctgcaagaatgaggaccagacaggcaggttcaacatgtgcttcaactacaatgtgcgtgtgctctgctgtgacgactacagccactgcccccacacagccgcccccacgcccacctcctccacacaggcacccagactcacctccatgggggccaccagccccacagtgactgcctccacagccattgcaacctggagcaccaagtcaccagcagtaacaggatcctcaactctggccaccactcaaactggccccagcttctccaagaccacagagagggtgtccctccccagtccctctgcccctttaccttccaccgccagcctcctccctaccagggagcagcagacctcccaggctccatccatgcccaccagtccaattgtgaccagcacccccacaacgtcccccgtggtgaccgcccgtgtgcacacaaccctgcggacttccagctctgggcccaccatcaggacgaccctgccctctggccccccgtctcccagcacgggctgtgtgcctcgctgcacctggacagactggtttgatgaggactaccccagctctgaccctgatggcggggactttgagacctttggggtcatccgctctgctggccataccttctgcgagcatccatgggacattgagtgccgctctgagaaggagcccaaccaacccctggaggccctggggcaggtggtgcagtgtgatgtgagcattgggctgccactgtgccagcactcccacgagcaccggatccatggctaccactcccacaagcaccggatccacggctaccactcccacgagcactggatccacggctaccactcccatgagcaccagatccacggctaccactcccacgagcactggatccacagttaccgtacccatgagcaccggttccatggctaccactcccacgagcaccggatccacagttaccgtacccatgagcaccggatccacggctaccactcccacgagcaccggatccatggctaccactcccacgagcaccggatccacggctaccactcccacgagcaccggatccacggctaccactcccacgagcaccggatccacagttaccactcccacgagcaccggatccacagttaccgaaccaccggtaccaccctgggtggtaccaccttgatcttcacagagccaaccactaaagccaccatgaccacgcccaccagctccatggccaccgcctcctccagccaaggaacagctcacaccccaaaagtgctgagcaccacaaccatcacaaccatggccaccacctccaaagccaccccctcccacaccccggcaactgctgccaccccaaatgtgctgaccaccatgaccacaacacccacagtcaccggctccaaagccattccctcctccagtccagggactgcacccacccttccagcactgacaagcacagccaccacacccacagctacaagctttacagccatcccctcttcctctctggggaccacctggaccctcacagcacagaccaccacacccacagccaccatgtccacagccagaccctcctccactccagagactgcccatatttccacagtgcttaccaccacggccaccacaactggggccactggctccatggccaccccctcctccagcccaggaacagcttacactaccaaagtgctgactaccacaaccaggggcttcacagccactccctcctctagcccagggactgcacccacacttccagggcggatcggcacaaacaccacacccacaaccagcggctccatggtgaccccctcctccatcccagggaccacccacacccccacagtgctgaccaacaccaccacaaccgtggccactggctctatggtaacaccctcctctagcccacagaccactggtacacccccagcactggccaccacgggcacgacaatcacggccacaggctccaccaccaccccctcctccactccagggacaactcccatctccccagtgctgaccaccacggccaccacacctgcagccaccagcaccacagtggctccctcctctgccctagggaccacccatacacccccagtgctgtccaccatggccaccacacatgggcgatcccagctccctgagagtccccgcacggtacccacagcccggacttccatggccacctcgggcgccacccacatcacagagccatccacggtgacttcccacaccccagtaggaaccaccggtaccaccccacactcgactccagccctgtccagccctcacactcacagcagaaccactgagtcacccctttctccagggaagaccaccccgggcctcaccacggccacctccaggaccacggccacggccacaaccagcgagacccgtgcctcgaccctgctgtccagcagccccacatcggcccccacgaccccggtggtgtccacaggctgtgagccccagtgtgcctggtcagactggctggactacagctaccccatgtcggggccctctggcggggacttggagacctactccaacatccgcgcggctggaggggccgtctgtgagcagcccctgggcctcgagtgccgcgcccaggcccagcctggtgtccccctgcgggagttgggccaggtcgtggaatgcagcctggacttcggcttggtctgcaggaaccgtcagcaggtggggaagttcaagatgtgcttcaactacgaaatccgtgtgttctgctgcaactacggccgctgccccagcaccctggccaccagctccaaggccacaccctcctccactctggagacaaccgggatcctcacagagccaaccactacagccatcacaacagtggccacgggctccacagccatgccctcctccactccagggaccaccgcgatcctcacagagccaaccactacagccatcacaacagtggtcacgggctccactgccatcccttcctccacctcagggactactcaaatcaccaaagtgtttcccaccacaactgcaacgactgaagccactggctccacggccaacccctcctccaccccaggaaccacctggatcttcacagagccaaccaccactgccaccataactgtggccactggctccaaggccacgccctcttccactccagcatcaacctggattctcacagagccgaccactacagccgtcacaacagtggccacgggctccacggccacgccttcctccactcaggggacgactgggagcctcacagaaccaaccaacactgccaccataactgtgaccaccagctccacagccatgccctcctccactccagggatgacctcgatcctcacagagccgaccactacagccattacaacagtggccacgaggtccacggccacgccctcctccactccggagacggccaggatcgtcacagagccaaccaccactgccaccataactgtggccaccagctccacagccacgccctcctccactccagggacgaccttgatcctcacagagccgaccactacagccatcacaacagtggccccgggctccacagccacgcccacctccactctggggacgaccgggatcctcacagagccaaccactacaaccatcacaacagtggccacaaggtccacggccacgcattcctccactccggggacaaccgggatcctcacagagctgaccactacagccatcacaacagtggccccgggctccacagccacgccctcctccactccagggacgactgggatcctcacagagccaaccaccactgccaccataactgtggccactggctccacggccatcccctcctccactccagggatgacctcaatcctcacagcgccgaccactacagccatcacaacagtgaccacaggctccacggccacgccctcctccactccagggaagacctcaatcctcacagagctgaccactacagccatcacgacagtggccacgggctccacggccacgccttccactctggggacaaccaggatcctcacagagccgaccactacagccatcacaacagtggccccgggctccacagccatgccctcctccactctggggactaccgggatcctcacagagccaaccactacaaccatcacaacagtggccacgaggtccacggccacgccttcctccactccggggacgaccgggatcctcacagagccaaccactacaaccatcacaacagtggccacaaggtccacggccacgcattcctccactccggggacaaccgggatcctcacagagccgaccactacagccatcacaacagtggccacgggctccacggccatcccctcctccactccagggatgacctcaatcctcacagagccaaccactacagccatcacaacagtggccccggcctccacagccacgccctcctccactccggggacgactggaatcctcacagagccaaccaccactgccaccataactgtggccactggctccacggccatcccctcctccactccagggatgacctcgatcctcacagagccaaccactacagccatcacaacagtggccacgggctccacggccacgcccacctccactccggggacgaccgggatcctcacagagccgaccaccactgccaccataactgtggccactggctccacggccatcccctcctccactccagggatgacctcgatcctcacagagccaaccactacagccatcacaacagtggccccgggctccacagccacgccctcctccactccggggacgactgggatcctcacagagccgaccaccactgccaccataactgtggccactggctccacggccatcccctcctccactccagggatgacctcgatcctcacagagccaaccactacagccatcacaacagtgaccacgggctccacggccacgccctcctccactccggggacgactgggatcctcacagagccaaccaccactgccaccataactgtggccactggctccacggccatcccctcctccactccagggatgacctcgatcctcacagagccaaccactacagccatcacaacagtggccacaggctccacggccacgcccacctccactccggggacgaccgggatcctcacagagccaaccactacaaccatcacaacagtggccacgaggtccacggccacgccttcctccactccggggacaaccgggatcctcacagagccgaccactacagccatcacaacagtggccacgggctccacggccatcccctcctccactccagggatgacctcgatcctcacagagccaaccactacagccatcacaacagtggccccaggctccacagccacgccctcctccactccagggacgactgggatcctcacagagccaaccaccactgccaccataactgtggccactggctccacggccatcccctcctccactccagggatgacctcgatcctcacagagccaaccactacagccatcacaacagtggccacgggctccacggccacgcccacctccactccggggacgaccgggatcctcacagagccaaccactacaaccatcacaacagtggccacgaggtccacggccatgccttcctccactccagggatgacctcaatcctcacagagccaaccactacagccatcacaacagtggccacgggctccacggccacgcccacctccactccggggacgactgggatcctcacagggccgaccaccactgccaccataactgtggccactggctccacggccatcccctcctccactccagggatgacctcgatcctcacagagccaaccactacagccatcacaacagtggccacgggctccacggccacgccttctactccggggacgactgggatcctcacagagccaaccactacagccatcacaacagtgaccacgggctccacggccatgccctcctccactccggggacgactgggatcctcacagagccaaccactacaaccatcacaacagtggccacgaggtccacggccacgccttcctccactccagggatgacctcaatcctcacagagccaaccactacagccatcacaacagtggccacgggctccacggccacgccctcctccactcaggggacgaccgggatcctcacagagccaaccactactaccgtcacaacagtggccacgaagtccacggccgtgccctcctccactccagggaagacctcagtcctcacagagctgaccactacagccatcacaaccacgggctccacggccacaccttccactccggggacgactgggatcctcacagagccgaccactacaaccatcacaacagtggccacaggctccacagccctgccttcctccactccggggactactggattcctcacagagccaaccaccactgccaccataactgtggccactggctccacggccatcccctcctccactccagggatgacctcgatcctcacagggccaaccactacagccatcacaacagtggccacgggctccacggccacgcccacctccactccggggacgactgggatcctcacagagccgaccaccactgccaccataactgtggccacgggctccacggccacgccttccactctggggacaaccaggatcctcacagagccgaccactacagccatcacaacagtggccccgggctccacagccacgccctcctccactccggggacgaccgggatcctcacagagccaaccactacagccatcacaacagtggccacgaggtccacggccacgccttcctccactccggggacgaccgggatcctcacagagccaaccactacaaccatcacaacagtggccacgggctccacagccacacccacctccactccggggacgaccgggatcctcacagagccaaccactacaaccatcacaacagtggccacgaggtccacggccacgccttcctccactccggggacgaccgggatcctcacagagccaaccactacaaccatcacaacagtggccacaaggtccacggccacgcattcctccactccggggacaaccgggatcctcacagagccgaccactacagccatcacaacagtggccacgggctccacggccatcccctcctccactccagggatgacctcgatcctcacagagccaaccactacagccatcacaacagtggccccgggctccacagccacgccctcctccactccggggacgactgggatcctcacagagccaaccaccgctgccaccataactgtggccactggctccacggccatcccctcctccactccagggatgacctcgatcctcacagagccaaccactacagccatcacaacagtggccacgggctccacggccacgccttctactccggggacgactgggatcctcacagagccaaccactacagccatcacaacagtggccacgggctccacggccacgcccacctccactccggggatgaccgggatcctcacagagctgaccactacagccatcacaacagtggccccgggctccacagccacgccctcctccactccggggacgactgggatcctcacagagccaaccaccactgccaccataactgtggccactggctccacggccatcccctcctccactccagggatgacctcgatcctcacagagccaaccactacagccatcacaacagtggccacgggctccacggccacgccctcctccactcaggggacgaccgggatcctcacagagccaaccactactaccgtcacaacagtggccacgaagtccacggccgtgccctcctccactccagggaagacctcagtcctcacaaagctgaccactacagccatcacaaccacgggctccacagccacaccttccactccggggacgactggattcctcacagagccaaccaccactgccaccataactgtggccactggctccatggccatcccctcctccactccagggacgacctcgatcctcacagcgccgaccactacagccatcacaacagtgaccacgggctccacggccacgccctcctccacttcagggaagacctcaatcctcacagagctgaccactacagccatcacgacagtggccacgggctccacggccacgccttccactccggggacaaccaggatcctcacagagccgaccactacagccatcacaacagtggccacgggctccacagcctcaccctccttcactccagggacaaccgggatcctcacagagccgaccactacaaccattacaacagtggctatgaggtccacggccacgccctcctccactctggggacgaccgggatcctcacagagccaaccactacagccatcacaacagtggccacaggctccacggccataccttcctctactctgggaacgaccaggatccacacagaaccaaccaccactgccaccataagtgtggccaccagctccacagccacgcccttctccactccggcgtcaacttggttcctcacagagccgaccactacagccatcacaactatggcctcaggctccacagccaccctgacctccaccccaggaacaacgtactctcccaaagtgttgaccatcacagccaccacacccacagccaccagctccaaagcaaccccctcctccactctggggacgacctggatcctcacagagccgaccactctagccaccccgactgaggccactggttccacagccaccatacccacagtgcccagctcctcagccacccctttctccagcccagggactgcaggcacccttccagtgcggaccactacagcaaccacgaccatggccactaggtctactgccatcccctcctccactgtgggaacagctggcacccccaaagtgctgaccaccacggccaccaggcccacagccactggctccacggttcccagctcgtccaccctggggaccacccacacccccgcagtgctccccagcagcctgccagccttcagcatgtccactgtgtcctcctcagtcctcaccaccctcagacccactcacttccccagctcccacttctctactccctgcttctgcagggcatttggacagttcttctcacctggggaagtaatctacaataggacagaccgagccggctgccaattctatgccgtgtgcaaccagcactgtgacctcgaccgcttccagggcacctgccccacctccccaccaccagcgtcctccaccctgctgccctcgccctcccctgcccctggctgtgacaatgccatccctccccggcaggtgaatgagacctggaccctggagaactgcacggtggccaggtgcgtgggtgacaaccgtgtcgccctgctggacccaaagcccgtggccaatgtcacctgcgtgaacaagcacctgcccatcaaagtgtccgacccgagccagccctgtgacttccactatgagtgcgagtgcatctgcagtgtgtggggcagttcccactattccacctttgacggcacctcttacacctttgagggcaactgcacctatgtcctcatgagagagatccacgcacgcctcgggaatctcagcctctacttggacaaccactactgcgcggcctctgccgctgccgccagctgctcccgcgccctcaggctccactacaagtccatggatatcgtcctcaccgtcaccacggtgcatgggaaggagaaggacttgatcctgtttgaccaaattctggtgagcagcggtttcagcaagaacggcgtgcttgtgtctgtgacggggaccaccaccatgcgcgtggacatccctgccctgggtgtgagcgtcaccttcgatggccacatcttccaggcccggctgccctacagcctcttccacaacaacaccgagggccagtgcggcacctgcaccaacaaccagagggacgactgtctccagcgggacggaaccactgccaccagctgtaaggacatggctaagacttggttggtccctgacagcagaaaggacggctgctgggccccgaccggcacgccccccacggccagtcccccggccccggtgtctagtgcacccacccccagcccgtgcccgccgcagccactctgtgatctgatgctgagccaggtctttgccgagtgccacgaccttgtgcccccgggcccattcttcaatgcctgcatcagcgacagctgccagggccgccccgaggtgccctgccagagcctggaggcctacgcagcgctctgccgcgcccggggagtgtgcagtgactggcgaggtgcaaccggcggcctgtgcgatctcacctgcccacccaccaaagtgtacaagccgtgcggccccatacagcctgcctcctgcaactccaggaaccagaacccacaactggaggggctggcggagggctgcttctgccccggggaccagatcctcttcagcacacacacgggcatctgcgtgcaggactgcccctgcgtgggacctgatgggcttcccaagtctcccgggcagcagtggatcagcaactgccagtcctgcgtgtgtgatgagggctcaatgtcggtgcaatgcaagcccctgccctgtgaggcccagggtccctcctcaccatgcagccaccccggcttcgtgaccgtgaccaggccccgggccgacaacccctgttgccctgagaccgtgtgtgtatgcaacacaagcacctgccaccagagcccacgcgtgtgcccgccagggcaggagttgatcagcacccagaaggagggcgactgctgtcccaccttcctctgcagacctcagctgtgttcctacaacggcatcttctatggggttggtgcaatcttcccaggggcccttccctgccacacgtgtacctgcctctctggggacacccaggacccaacggtgcaatgttgggaggacgcctgtcacaatactacctgcccccagggctttgagtacaagagagcggccgggcagtgctgtggggagtgcgtgcagactgcctgcctcacgcccaatggtccgccagtccagctgaacgaaacctgggtcaatagccgtgtggacaactgcaccgtgtaccactgtgaggttgagagcggagtctatttgctgaccccacagcctgcatcctgcccagaagtgtccagctgcagggggagcctcaggaaaaccggctgctgctactcctgtgaggaggactcctgtcaggtccgcgtcaacacaaccgtcctgtggcaccagggctgcaagactgaggtcaacatcaccttctgtgagggctcctgccccggagagtccaggtactcggcagaggcccaggccatgcagcaccagtgcacctgctgccaggagagacgggtccacgaggagacggtgcccttgcgctgtcccgacggctcgactgtcctgcacacctacaaccatgtggatgagtgtggctgcacgcccttctgtgtccctgcgcccatggctcccatatacccccccggcttcctggcccaggaggccactgccgtctgaggatgttctgcctccatccccatgctctgtccacctggagccaggacgtgcattgcccgatcatgaaaaccttgggcctgctctgcggagccccctggcctctgtgtgtggcaccccgtgcctctgtgctcctgctgcccaccctgtgggtaaaaccggaccctggaagggtgaggggccagcaggacccctttcaggagggcaccactcaggagtcatgtcctgggagagcctgtggcccaccttggccttgcccctccttgatgtcactgggacgccccggaacaagctaagcgtgtgcgggcctgtgtgtccctgccatggccagagtccccaggcagcatggattctggctggccacatctggccactggggcacagacaggctggtccaggcaaggccggctgctgccaggaagctgcgctagacctgcctgctgcagggtacctcggggctgaggtcacaatggccaggtcagagagaggtcggcatcccaaagccccctctgctcaacccagcccagttttgcaaataaacgctgagcatcgagta

SEQ ID NO: 6 - DNA, 17911 bp, Homo sapiens
  source 1..17911: mol_type = genomic DNA
tactcaatgctcagggtttatttgcaaaactgggctgggttgagcagagggggctttgggatgctgacccctctctgacctggccgttgcgacctcagccctgagttaccctgcagcaggcatggacaggcggccgccttgcctgtcgcagcttcctggcagcagctggccttgcctggaccagcctgtctgccccagcggccggacgtggccagctggaatccgtgctgcgcgggcgctccggccgtggcagggacacataggcccgcacatgcttagtttgttccagggcgtcccagtgacatcagggaggggcaaggccaaggtgggccacaggctctcccagggtaggactcctgagtggcgccctcccgaaaggggtcctgctggcccctcacccttctggggccggtttcacccacggggtgggcagcaggagcacggagcgcggggtgccacacacaggccggggggctccgcagaggaggcccaaggttttcatgatcagacaatgcacatcctggctccaggtggacagagcatggggatggaggcagaacgttctcagacagcagtggcctcctgggccgggaagccacgggtgtgtgggggagccatgggcgcagggacacagaagggcgtgcagccacactcatccacgtgggtgtaggtgtgcaggatggctgagccgttaggacagtgcaagggcaccgtctcctcgtggacccgcctctcctggcagcaggtgcactggtgctgcatggcctgggcctctgctgagtacttggacgctccggggcaggagccctcgcagaaggtgatgttgacctcggtctcgcagccctggtgccacaggatggtcgtgttgatgcggacttgacaggagtcctcctcacaggagtagcagcagccggttttcctgaggctccccctgcagctggacacatctgggcaggatgcaggctgtggggtcagcaaatggactccaccctcagcctcacagaggtacacggtgcagttgtccacatggctgttgacccaggtttcattcagctggactggctggccatcgggcgtgaggcaggcggtctggacgcactccccacagcactgcccggccactctcttgtactcaaagccctggggacaggtagtattgttgcaggcatcctcctgacattgcaccgttgggtcctgggtgtccccagagaggcaggtacacatgtggcagggaagggcgcctgggaaggttgcaccaaccccgtagaaggtgccattgtacgaacacagctgaggtctgcagcggaaggtgggacagcagtcgccctcctcctgggtgcagatggactcctgccctggcgggcacacaggcaggctctgggggcaggtggttgtgttgcacacgcacaccgtctcggggcagcaggggttctcggcccggggcctggtcacggttacgaagccgggacggttgcacggcgggggctgaccctgggcgtcacagggcaggggcttgcactgcaccgacactgaaccctcgtcacacacgcaggactggcagttgctgacccaccgctccccgggaaatttaggaaacccatcgggtcccacgcaggggcaggcctgcacgcagatgcccatgtgtgcgttgaagaggatctggtcctcagggcagaagcagccctccgccatcccctccagctgtgggctctggttcctagagttgcaggtggcaggctgtatggggccgcatggcttgtacactttggtgggtgggcaggtgaggtcgcacaggccaccggttgcacctcgccagtcactgcacactccccgggcgcggcagagctctgcgtaagcctccaggctctggcagggcacctcaaggcggcccctgcagtggtcgctgatgcaggcgttgaagaatgggcccgggggcacaaggttgtggcactcagcaaagacctggctcagcatcagatcacagagcggctgtggtgggcatggggtgggggtgggtgtgctagacaccggggctgcggggctggcagtggggggtgtgccagtcggggcccagcagccatcctttctgctgtcggggaccagccacgtcttggccatgtccttgcaactggcggcagtggttccgtcccgctggagacagtcgtccctctggttgttggtgcaggtgccgcactggccctcggtgttgttgtggaagaggctgtagggcagccgggcctggaagacttggccattgaaggtgacgctcacgcccagggcaggaatgtccacacgcatggtggtggtccccagcacagacacaagcacgccgttcttgctgaaaccgctgctcaccggaatttggtcaaacaggatcaggccctcctccttcccatgcaccatggtgacagtgaggacgatatccatggacttgtagtggatgctgagggcgcgggggcagcgggcggcagcggcagtggcagaggccgtgcagtagtggttgtccaggtagaggctgagattcccaaagcgtgcatggatctctctcatgaggacataggtgcagttgccccggaaggtgtaagaggtgccgtcaaaggtggaatagtgggagccgccccacatgctgcagatgcactcgcactcatagtggaagtcacagggctggctcgggtccgacactttgatgggcaggtgcttgttcacgcaggtgacgttggccacaggctttgggtccagcaggacgacacggttgtcacccacgcacctggccaccgtgcagttctccagggtccaggtctcattcacctgccggagagggatggcattgtcacagccaggggcaggggagggcgaggacagcggggcggaggacactggcggtggggaggtgggacaggcgccctggaagcggtcaatgtcacagtgctgattgcacactgcgtagaaatggcagccggctcggtcggtcttattgtagatgacttccccgggcgagaaaaactgtccaaatgccctgcagaagcagggagtagagaagtgggagctggggaagccagtgggtctcagggtggtgaggactgaggaggacacagtggacacgctgaaggttggcaggctgctggggagcactgcaggggtgcgggtggtccccacggtggacgagctgggaaccgtggaggcagtggctgtgggcatagtggccatggtggtcaccactttgggggtgtgagctgttcccagagtggaggaggcggtggccgtggaaccggtgggcaccatcacggtggctatagtgctcggctctgtgaggatccaggtggtccctggggtggaggacagggtggccgtggatccagtggctgcagttgtagtggctgttgtggtcagctcagtgaggatccgggtcgtccccagagtggaggagggtgtggccgtggaattggtggcccttgtcatggtggctgtggtggtcagcactgtggaggtgtgggtggtctctggagtagaggaggtgtggattgtggacatggtggacatgggtgtggtggtctgtgctgggacggtccacgtggtccacagggtggaggaggggatgggtgtaaagctggtagctgtggattttgtggctgtgcttgtcagcactggaagggtggttgcagtccttggactggaggaggaagtggctttggagctggtggctgcgggtgtggtggccgtgctggtcagcactggggtgatgggtgttgtccctggagttgaggaggggttggtggtggagccggtggccgtgatcgtagtggccgtggtggtcagtgatgggggagtaccactggtctgtgtgctagaggagggtgttgccatagaaccagtggccacagttgtggtggtggtggtcagcactctggcggtgtgggtggtccccgggatggaggagggggtcaccgtggagccactggttgtgggtgtggtggttgtgggtgtggtggttgtgctgatccacactggaggcgtgagtgccgtccctgggctggaggagggggtggctgtgaagcccgtggttgtggtagtcggcactttggtagtgtgagctgttcctggggtggaggagggggtggccacagagccggtggccccggttgtggtggccgtggcggtaagcactgtggaggtgtggacagtctctggagtggaggagggtgtggctgtggacatggtggccgtgggtgtggtggtctgtgataggcgggtccaggtggtgcccagggaggaggaggggatggctgtaaagctggtagctgtgggtgtggtggctgtgcttctcagtgctggaagggcagttgcagtccctggactggaggagggagtggctttggagctggtgactgtgggtgtcgtggccgtggtgctcacatgtggggtgccagcagttgcctgggtggaggaggcggtggccgtggatccggtgggcaccgtcacggtggctgtagtgctcggctctgtgaggatccaggtggtccctggggtggaggacggggtggccgtggatccagtggacgcagtcgtagtggctgttgtggtcagctctgtgaggatccaggtggtccctggggtggaggacggggtggccgtggggccagtggctgcagttgtagtggctgctgtggtcagctctgtgaggatccaggtcgtccccggagtggaggagggggtggacgtggaactggtggcccttgtcgtggtggccttcgtggtcagcactgtggaggtgtgggtggtctccggagtggaggaggggtggattgtggacatggtggccacgggtgtggtggtctgttctgggagggtcccggtggtcccaagggtggaggaggggatgggtgtaacgctggtagctgtggatttggtggctgtgcttgtcagcactggaagggtggttgcagtccttggactggaggaggaagtggctttggaactggtggctgtgggtgtggtggccgggctggtcagcactttgggagggggagctgttcccggggtggaggacggggtggccgtggatccagtggatgcagtcgtagtggctgttgtggtcagctctgtgaggatccaggtcgtccccggagtggaggagggcatggccgtagagctggtggccggggtgctggggcagtggccgtagttgcagcagaacacacggatttcatagttgaagcacatcttgaacttccccacctgctcacggttcctgcagaccaggccaaagtccaggctgcattccacgacctggcccaactcccccagggggacaccaggctgggcctgggcacggcactcgaggcccaggggctgctcacagacggcccctccggccgcacggatgttggagtaggtgtcaaagtccccgccagagggccccggcatggggtagctgtagtccagccactctgaccaggcacactggggctcacagcccgtggtcaccaccgtggttatgggggccgatgtggggctgctgggcagcagggtcgaggtgcgggtcttgctgggtgtggccgtggccgtggtcctggaggtggccgtggtgtggcccggggtggtcgtccctggggaagggggtgactcggtggtcctgctgctagggtgagggctggacagggctggagtcgagtgctgggtggtaccggtggttgctgctggggtgtgggaagtccccgtggaaggctctgtgatgtgggtggtgcccaaggtgcctgaggtggccgaagtccaggctgtgcgcaccgtgtggggactgctgggggacagggatcgcccgtgtgtggtggccgtggtgttcggcactgggggtgtgtgggtggtccctagggcagaggagggagtcactgtgctgctggtggctgcaggtgtggtggcggtggtggtcagcactggggggataggtgttgtccctggagttgaggaggggttggtggtggagccggtggccgtgatcgtagtggccgtggtgatcagtgatgggggagtaccactggtctgtgtgctagaggagggtgttgccatagaaccagtggccacagttgtggtggtggtggtcagcactgtgggggtgtgggtggtccccgggacggaggagggggtcaccgtggagccactggttgtgggtgtggtggttgtgctgatccacactggaggcgtgcgtgccgtccctgggctggaggagggggtgactgtgaagcccgtggttgtggtagtcggcactttggtagtgtgagctgttcctggggtggaagagggggtggccacagagccggtggccctggttgtggtggccgtggtggtaagcactgtggaggtgtgggcagtctctggagtggaggagggtgtggctgtggacatggtggccgtgggtgtggtggtctgtgataggcgggtccaggtggtgcccagggaggaggaggggatggctgtaaagctggtagctgtgggtgtggtggctgtgcttctcagtgctggaagggcggttgcagtccctggactggagaagggagtggctttggagctggtgactgtgggtgtcgtggccgtggtgctcacatgtggggtgccagcagttgcctgggtggaggaggcggtggccgtggatccggtgggcaccgtcacggtggctgtagtgctcggctctgtgaggatccaggtggtccctggggtggaggacggggtggccgtggatccagtggactcagtcgtagtggctgttgtggtcagctttgtgaggatccaggtcgtccccggagttgaggagggcgtggccgtagagctggtggccggggtgctggggcagtggccgtagttgcagcagaacacacggatttcatagttgaagcacatcttgaacttccccacctgctcacggttcctgcagaccaggccaaagtccaggctgcattccacgacctggcccaactcccgcagggggacaccaggctgggcctgggcacggcactcgaggcccaggggctgctcacagactgcccctccggccgcacggatgttggagtaggtgtcaaagtccccgccagagggccccggcatggggtagctgtagtccagccactctgaccaggcacactggggctcacagcccgtggtcaccaccgtggttatgggggccgatgtggggctgctgggcagcagggtcgaggtgcgggtcttgctgggtgtggctgtggctgtggtcctggaggtgcccctggtgtggcccggggtggtcgtccctggagaagggggtgactcggtggtcctgctgctagggtgagggctggacagggctggagtcgagtgctgggtggtactggtggttgctgctggggtgtgggaagtcaccgtggaaggctctgtgatgtgggtggtgcccaagatgcccgaggtggccgaagtccaggctgtgcgcaccgtgtggggactgctggggggcagggaccgcccgtgtgtggtggccgtggtgttcggcactgggggtgtgtgggtggtccctagggcagaggagggagtcactgtgctgctggtggctgcaggtgtggtggcggtggtggtcagcactggggggatgggagttgtccctggagttgaggaggggttggtggtggagccggtggctgtgatcgtagtggccgtggtggtcagtgatgggggagtaccactggtctgtgtgctagaggagggtgttgccatagaaccagtggccacagttgtggtggtggtggtcagcactgtggcggtgtgggtggtccccgggatggaggagggggtcaccgtggagcctctggttgtgggtgtggtggttgtgctgatccacactggaggcgtgagtgccgtccctgggctggaggagggggtggctgtgaagcccgtggttgtggtagtcggcactttggtagtgtgagctgttcctggggtggaggagggggtggccacagagccggtggccctggttgtggtggtcgtggtggtaagcactgtggaggtgtggacagtctctggagtagaggagggtgtggctgtggacatggtggccgtgggtgtggtggtctgtgataggcgggtccaggcggtgcccagggaggaagaggggatggctgtaacgctggtagctgtgggtgtggtggctgtgcttctcagtgctggaagggcggttgcagtccctggactggaggagggagtggctctggagctgatgactgtgggtgtggtggccgtgctggtcagcactttgagggtgccagcagttgcccgggtggaggaggcggtggccgtggatccggtgggcaccgtcacggtggctgtagtgctgggctctgtgaggatccaggtggtccctggggtggaggacggggtggccgtggggccagtggctgcagttgtagtggctgctgtggtcagctctgtgaggatccaggtcgtccccggagtggaggagggggtggacatggaactggtggcccttgtcgtggtggccttcgtggtcagcactgtggaggtgtgggtggtctccggagtggaggaggggtggattgtggacatggtggccatgggtgtggtggtctgttctgggagggtcccggtggtcccaagggtgaaggaggggatgggtgtaaagctggtagctgtggatttggtggctgtgcttgtcagcactggaagggtggttgcagtccttggactggaggaggaagtggctttggaactggtggctgtgggtgtggtggccgtgctggtcagcactttgggagggggagctgttcccggggtggaggacgggatggccgtggatccagtggttgcggtcgtagtggctgctgtggtctgctctgtgaggatccaggtcgtccctggagtggaggagggcgtggccgtagagctggtggccggggtgctggggcagtggccgtagttgcagcagaacacacggatttcatagttgaagcacatcttgaacttccccacctgctcacggttcctgcagaccaggccaaagtccaggctgcattccacgacctggcccaactcccgcagggggacaccaggctgggcctgggcacggcactcgaggcccaggggctgctcacagacggcccctccggccgcacggatgttggagtaggtgtcaaagtccccgccagagggccccggcatggggtagctgtagtccagccactctgaccaggcacactggggctcacagcccatggtcaccaccgtggttattggggccgatgtggggctgctgggcagcagggtcgaggtgcgggtcttgctgggtgtggccgtggccgtggtcctggaggtggccctggtgtggcccggggtggtcgtccctggagaagggggtgactcggtggtcctgctgctagggtgagggctggacagggctggagtcgagtgctgggtggtaccggtggttgctgctggggtgtgggaagtccccgtggaaggctctgtgatgtgggtggtgcccaaggtgcctgaggtggccgaagtccaggctgtgcgcaccgtgtggggactgctgggggacagggatcgcccgtgtgtggtggccgtggtgttcggcactgggggtgtgtgggtggtccctagggcagaggagggagtcactgtgctgctggtggctgcaggtgtggtggcggtggtggtcagcactggggggataggtgttgtccctggagttgaggaggggttggtggtggagccggtggccgtgatcgtagtggccgtggtggtcagtgatgggggagtaccactggtctgtgtgctagaggagggtgttgccatagaaccagtggccacagttgtggtggtggtggtcagcactgtgggggtgtgggtggtccccgggatggaggagggggtcaccgtggaacctctggttgtgggtgtggtggttgtgctgatccacactggaagcgtgcgtgccgtccctgggctggaggagggggtggctgtgaagcccgtggttgtggtagtcagcactttggtagtgtgagctgttcctggggtggaggagggggtggccacagagccggtggccccggttgtggtggccgtggtggtaagcactgtggaggtgtggacagtctctggagtggaggagggtgtggctgtggacatggtggccgtgggtgtggtggtctgtgataggcgggtccaggtggtgcccagggaggaggaggggatggctgtaaagctggtagctgtgggtgtggtggctgtgcttctcagtgctggaagggcggttgcagtccctggactggagaagggagtggctttggagctggtgactgtgggtgtcgtggccgtggtgctcacatgtggggtgccagcagttgcctgggtggaggaggcggtggccgtggatccggtgggcaccgtcacggtggctgtagtgctcggctctgtgaggatccaggtggtccctggggtggaggacggggtggccgtggatccagtggactcagtcgtagtggctgttgtggtcagctctgtgaggatccaggtcgtccccggagtggaggagggcatggccgtagagctggtggccggggtgctggggcagtggccgtagttgcagcagaacacacggatttcatagttgaagcacatcttgaacttccccacctgctcacggttcctgcagaccaggccaaagtccaggctgcattccacgacctggcccaactcccgcagggggacaccaggctgggcctgggcacggcactcgaggcccaggggctgctcacagacggcccctccggccgcacggatgttggagtaggtgtcaaagtccccgccagagggccccggcatggggtagctgtagtccagccactctgaccaggcacactggggctcacagcccatggtcaccaccgtggttatgggggccgatgtggggctgctgggcagcagggtcgaggtgcgggtcttgctgggtgtggccgtggctgtggtcctggaggtggccgtggtgtggcccggggtggtcgtccctggagaagggggtgactcggtggttctgctgctagggtgagggctggaaagggctggagtcgagtgctgggtggtaccggtggttgctgctagggtgtgggaagtcaccgtggaaggctctgtgatgtgggtggtgcccaagatgcccgaggtggccgaagtccaggctgtgcgcaccgtgtggggactgctggggggcagggatcgcccgtgtgtggtggccatggtgttcggcactgggggtgtgtgggtggtccctagggcagaggagggagtcactgtgttgctggtggctgcaggtgtggtggcggtggtggtcagcactggggggatgggagttgtcccaggagttgaggaggggttggtggtggagccggtggccgtgatcgtagtggccgtggtggtcagtgatgggggagtaccactggtctgtgtgctagaggagggtgttgccatagaaccagtggccacagttgtggtggtggtggtcagcactgtggcggtgtgggtggtccccgggatggaggagggggtcaccgtggagcctctggttgtgggtgtggtggttgtgctgatccacactggaggcgtgagtgccgtccctgggctggaggagggggtggctgtgaagcccgtggttgtggtagttggcactttggtagtgtgagctgttcctggggtggaggagggggtggccacagagccggtggccccagttgtggtggccgtggcggtaagcactgtggaggtgtgggcagtctctggagtggaggagggtgtggctgtggacatggtggccgtgggtgtggtggtctgtgataggcgggtccaggtggtgcccagggaggaagaggggatgggtgtaacgctggtagctgtgggtgtggtggctgtgcttctcagtgctggaagggcggttgcagtccctggactggaggagggagtggctttggagctggtgactgtgggtgtggtggccgtggtggtcagcactttgggagggggagctgttctcagggtggaggtcggggtggccgtggatccagtggacgcagtcgtagtggctgttgtggtcggctttgtgaggatccaggtcgtccccggagttgaggagggcgtggccgtggagctggtggctggggtactggggcagtggctgtagtcgtcacagcaaagcacacgcacgttgtagttgaagcacatgttgaacctgcctgtctggtcttcgttcttgcaggtcagccccgtctccaggctgcaggtcagcacctgcccgacctggtcgatgcttacctcggggtagttctccgcccggcactctatgctctttggtgcccagcacatcttgcccccagcagccctgatgttttcaaaagtttccatgtccccgcctgcaacccctgaggttgggaagtccacgtcaaaccactctgtccactcacacttcggttgacagcgggtcgtgccctggctggtggtggtgttagtcaaggggctcattgtcgtctctgtcctgggcgtgctggtctcggcctgagaggtggacagctcgctcgtgagtgttggcgccaggctcgtggtcagcggctctttggaagcggtgctggctgtgcctgtcgggcgagctctggaggttgccattgttgttggggccagcgtgggtggctgtgaggggcgccatgtgcccaagctccccgtcgtccctggaagggctgagcgtgttggaagggtggatgtggccacccctgggacagtgggttctgtggagcctgcaggcgtcgtggggcctcccgtggtggctgtaccaagggtgcttgtgtatctgggggatgtcagtccttctgagagggtggggactgctgtggtgctggccgggggagccctggtcagccccgggctactcgtaggctgcggcgttgagaacagggcctgggtggtggtggtggtggccgtctccagctctgtggtcggtggcggggttgtggcacgtcccctgcagtggtcgtcactgcagcagaggacccggatcctgtagttgtagcacatcttgaagacgccctcctgctcccagttcctgcacaccaggccgaagtggacgtcacagtgcaccttctgccccacctgtgccagggtccagttggggaagctctcggcctggcactctatgtccttaggctgctggcataagtgccctccagcggccctgatcttatcgtaggactcaacgtcccctccaagttgttcagacttggggtagtcctcatcaaaccactctgtccactgacaccggggctggcaggtggtggtacctggggccgagggggtgaccgtcacggggcctgagctggacccagtctgcgaggtgagggccgccgtcgaccggatgctcggggtcacccatagggtggtcttttcggttgctgtggtctgggttggggtaggcacagcaggctccgtgctggcactgagggagggctgagggctggtgcctggggccggggaggggccacagggcacgtattcgcagcagagaacccgcagctcgtagtcgtgacagagcgggggactctgttggctgttggcgcacatcagcccccgcatgcggtcacagtccacctgctggcccagctcctccagcggcatgtcgggaagctgcgccgcccggcactcgatgtcagccagcacagggcatacctggtaccctctctgcctcaggttttcaaacgtctcaaagtctccgcctcccaggccgggctctgggcggtgcccattgtaccagctggaccagcggcagacctcgcggacacacacggtggagaccgggagggccgggcttgtcgtggagtgggggacccaggcggtggtgaaggtgaatggcgttgtggctggagttccaggacatgccacagccttcctgatgatggtgccgttgcttccgcagatggcgatcaagcaggcgccaagcccatcggtggtgttgtagatgacgtcctggtagctgtaggtcctgtcctcataggtgcaggtgcaggcctcaaggctgtgagcgcactggatgccactgggtgtgcagttacagctctggcagttctccgctgtggggacccttgcaccgacgtcatagtagtttccgtccttgtcgtagcagccacactgggccacgcacttcatctggtcctcattgaagaagggctggctgggtgggcacttcgggtagcagccttccaggccaggcaggtccaccaggcagtgcccactggggttccggcaggtttttaggcagggtgccccgcagggctggtagtgccactcacagcccccatgtgggttgtagaagtcacagaacaaggggcaggtgtccggagtccgccaggacacacacaggcccgcgtcgtggcaggcctgggcgtaggcagccacagccgtgcagaaacactcgcagtcgccacccgagtcgcaggcacacgcgtcgttcacgcaggcctcgtagtacttggtggagtcaacctgggagcggcaggcggcgaaggtggggccgtggaggatgctgcactgcttctgggcccaggacttgcggaaggggttggccgtgcaggggtccttgggtgccagggcgtccgggcaggagggggagagcttccagctgttcccaaactccagtgcgtcccccaccacggaccggctacgcgtggcaaagtcattgatggcattgtcgtcgaagttcccgcacaggccgcagaccctgcccttgtagtcctggtgcagtcggatgaacacgctggtcttccggtcccaggacacggccatcccgtgggtctcgatgaccaggaagatccccatgtagcgtatcttgtagggtgggtccccacccggccctctcgccaccgccttaaaggtcccctcttggaggatcagctcgtagctctccacgaagagcttgatggccttggagcaggtggtgccggtggtcccacaggggatgttctcggtgacgatgcggaaggtcccgtgggtggtgttgtccccacagtagtcctgggccaagatgtactcgcagctgccttcaaagctgtagcgatcgccatcaaaggtgatgaagtggccatccccgtaggccacgcaggtgcccaggcagagccggtggctgcactcccacctccggttcctgcaggtgcaggtgttgcagtcgaccctgatggtctctccaggcttgtaggtggcctcgttgtgcacacaggggcagtcctcctcggcaatgcagcccccactcccatccgacaccagccccgggggacagacacagccggacacgcagtgtgtgctgaaacagcccacgtccagcgtgtggcagctccggaggcactcggccccaggggtgcccgccgagctgttgctgcagtccaggtacaccatgggggctgcacaccctgtgcttttctgcagagaggctcccaggcagcttagcttcccacccgtacatgaacacacggcgccctcgtcgtgcaccacctctccaggagccagcacggtgccgtgagcgtagcaggggcactcctgggcgggcacacaggcgcccgcgtcattgaggaaggtgcccgcggggcaggtgcagccgtccacaggcacgaaggaaacgctgcaggtgacgtcggcctcactcaggccgcggcaagtgggctggcaggcatccaccacgtaggcgtagcgctgggacttggggcagttctgcatgtacttggtgcagacgccgtccctccagtcgctgagctgtacgcccttggcggcacaggcgtgcacataggaggacagcgcggcgcacaggcagtcctcgctccgctcacagttgcaggtgtcaaacatgcagttcgagtggaagggcttggggttgatgatggagtggcagcgcgagaaggcactgttgggatcggtcaggcgcgagcaccagtgccgggcgtagttctcattctccacactgagggagcaggggtcctcaaagctgttcctggcattggcacaggcagcctgggccttccaggtgttggcgaaggctgcgcccgtggcctccaccaccccgctgagggccgtgaagtcgtcagcctggttctggttgaagttcccacacaggccgcacatctggccctggtgggcggggtccagcctgacaaacacctgcatgagtggcaccagctgcaccagcagctgcagccccaggcctgtctgcaccacgatgaagaagctcgagggtgtgaacagggtgatgttggctgccgacaggggcagctgcgtgtagatggagttgaggaacacgccgccgtccgcttggacccggatggccgtgtccccgccgtccaggctgagcgtcaccgctttcaggcagttctcgttgtccgtcaggccgcacttccgcagctcagccagcacggtgaagctgctgtcggcacatttcttggacagaacgtagctgcagtcaccatgcaggtcgtagagtttctcatcataggtggagatgtgggccccgccctgcacagagcaggtgccagggcacggcaggtcctggcactgccatagccccccggagcaggtgcaggagctgcaggtggtgttgaaggaggtgcccgggctgtaggtgcggccgccgtgggtgcaggggcactgcccgaggggcaggcagccagagtgcgtgatgtcatccagcaccgtgcctggggggcagaagcagccgtccacacagtggtcctcgcagagctgcgcgcgctgggggttggagcaggtgtccgtgcagggtgagccacactcctggtgctgcatgttgagggggcaggtccgggggcagagctcagggcacctccagttccgcggctggccccccgcgtgggcgcactggcgtgagtattccacaaaggtggcacacgggcaggtggggcagcggcacaggtcctgggcgcaggcggccaggtacgcagtgctgtccaccagtgcgtggcactccgcaaaggccggccccagcagggtgcggtggcagatgccctcctcgtccgtgcagttgccggccggcaagggcagcgggtccgggcactgctccgtgggcccatccaacttctgcaggttcccaaactggagcggggtcagcctggcgttgtgggcatagaactcgttgaaggccgggaggccgttgaagtccccacacaggccacaggtctggttggcgtatttgggatccagctccagcagggcactgtcctctccgttccacaggaatgtcagcaccagccggatgctgaccttgatgtagtccccgctctgctccaccaggaggccagtgcggctgtaaggcagctcctcccgctgcccattgatgaggacggagccgttggacgcctccagcaccagcccctgggccttgatgacaacacgggtgaccacaggcctggagcccactaggcctcggcgtagctggacgttgaagtcctcgtaggcggcgcggcagtgctcagagaacacgtagttgcaaaggccagggaagcggaagacgtcgccgtcgaaggtcttgtagtggaagtcaccccaggtgctgcacacccgcccattgtgcgccgggttcagggggctcaggctggggaagacagtgacgggtggaacaaagctcacgcgccgggtgggcgaggacgtcggggcaccgccatccatggtgtgccctgcattctcccagctcggctccacagggccctgggtctctgcctgcggcaccacgagcatggccgccagagccaacaccagcgtccggcacgcgctcggggcacccatcctgggggctggcacgggtggggggacggggacgggcagggagggagccgggccgggt

SEQ ID NO: 7 - DNA, 14963 bp, Mus musculus
  source 1..14963: mol_type = genomic DNA
cacagtgccagggtttattgcagcttagggatgagtgagcacagacccctcttcaaccccagatcccagagcccctccagcaggcagccaccttgcctgatacagatccctggtagctgatcttgcttggacagtcccatctgcttttgtgagcatgagatgcctgacacagggcttgttttatgtgacagaggacacacaggcttgctgtggggagccttaacagccacaggctctcacagagaatgaggccaaaacagccaacaggctcctcagggccagatcctcacctggaaccctcctcaagtggatcttgattgccccaccaccctctttgatgctggtcttaacagtggcaggcggagggtggagcagaggcagtgagggccacagagggttcttgtgggcctcggggagcttgcctgcctaaggttctcatggtcagttgtgcaggttctgccccaggtggagggacataaggggttagggatgcaattgccttctagcaatgggctctaggaagcaatcatggaagtcccaggcagggagctgcaggccggggcacagttgcactcatcgatgtgggtataggtgtgctggatgactgtaccatcaggacactgcatagttacagctacatcatggaccttgctctcctgacagcaggtgcactggcgttccatggcctgggcctccatggagtacttggatattccagagcaggaaccctcgcagaaggtgatgttgacctctgtctcacagcccttataccgcaagacagtcgcatttacgtgcacttgacaggtacttgagtcctctttttcacaggagtaacagcagcccgttttccttagggttcccgtacagttggatacatcagggcaagatgtggggattggggtcagcacatagactccattctcagccatacagtggtatgcagtgcagttgtccacaggactgttcacccaggtttcattgggctgtaccgcgtggccctctggtgtgaggcaggcattttgcaggcactccccgcagcactgctctggcaccagcgtgtacttgaagccctggggacaagaggtggtacagttcgtctccttacactctacttttggctcttggtcaccatcagagaggcaggtgcatgtgtggcagggaccccctgggaaggttgtaccaaccccatagatggtgtcattgtatgtacacagcttaggtcgacagctgtagctggggcagcagctgctattctcatgggtctggaccagctcatatcctggctcacacgtgggcaggctcttggggcaggtggttgaattgcaaacacacagtgtctcggggcagcatggattgtcagcactgggccaggtcacagtcacaaagccagcttctgtgcactgtgggggtttatcctggctctcacacttcactggctcacactgtaccgacacagagccgggctcacatacacaggcctgacagttgctgatccagtgttctccaggaaacttgggtagcccgtctggtcccacgcagggacactctgacacacagatgtccatgcgtgagttgaagaggagctggttctcagggcagaagcagccctctgccagcatcccagttgtactatcctgggtcctcgagttgcaggatgctggatgcaggggtccacagggcctgtactccttagtgggtggacaggagaggtcacacaagcctccagtggcattgcgccagttggtacatacaccttgggcccggcagagtgctgcataggcctccaggctctgacagagcatgtcagtaatattggcattgcagtggtcactgacacagcttctgaagaaggcatctggagggatgagcctgtggcactctgcgaagacctggctcagcatcagctcacagagaggtgcagaggggcatggggtggaggtcagtgtgctggacactggggtctggggagtggtgctcgggagagggctaggctgagctaagcagctgctgctactgttcccaggcaccagccattctttggccatgtcctggcagtcagaagctatggtgccatcaggccggcggcagtcgtctatctggctgtttgtgcaggtaccacactggccctcagtattgctgctgaaatatctgtagggcaaccatatctggaagatgttcccatcaaaggtgatgatggtgccaatggtggaaatgttgacactcattgtggtggccccactcaaggacacggtcacaccattcttactgaagcctgatcgtatccacatttggtcccatataatcaggctctcatccttcccgctctcagtggtgctgatggtaaggataatctccatggagttgtagtacacactgagggcacggggacaggaggtgacatttgtggtagccccacagtagtagctgtgggcaaggatgctcaggttaccatggcgagggtggatctctctcatgagcacggaggtacagttatccaggaaagtataggaggtgccatcgaaggtcaggtagtgtgagtgcccccatccactgcagaagcattcacactcgtagtggaagtggcaaggctcctggtcccacactttgataggcaagtgacggttggcacaggtgacattgtccacaggctccggctcaaggagaatgatttgattgttgccctggcacctggccactgtgcagttctccagggtccaagactcattcacctgccggggagggatagcattatcacagccaggaagcaggggaggcaaaggtacagtggtagaggacattggaggtgaagaggaggggcaggtaccctggaagcggtcaacatcacaatactggttgcagatggcatagaattggcagccagctccatcagtcttattgtagatgatatccccaggtaagaacagttgcccaaatgcctgacagaaacagggtgatggggaagatgcatggctggaaaagacaggcctgggggtactgaagacggaggaaaaagcagtagacacactgaaggtcacctggctgctgggggaaactttgggggtgtaaggggtccctgaggttgaggatggggccacagtggggccagtggctataggtgaagtctcagtggtcaacattgtggaggtgtgagtagacatcagggaagaggagtggggctcactggaactactgagtccggggaaaaaagtcgtggtattcaaagccagggaagtgtgagtagatggcaggtgagaggaagaaagagcagtggacatggtggccatgggtgacgaggtacagtggctatagttatcacagcagaggaggcgcacgtggtagttgtcacaatactgcaaaggtcccgattggttgatatttttgcatatcagcccaaatcgcacatcacactggaccacctgctctagagtttccaggggcctgtctggctccttctctgaacggcactcgatgtccttgggctgatcgcagaagatgtagccaacctcacgaaatactgcatagacctcaaagtccccgcctctggggccggggttagggtagtctgcgtcaaaccactctgtccatttgcagcgaggtgtacagcctgagtcaggaagtgtagaccatgtggatgcttgggtgcttggccctgaagggctggcaggacggttagtctgaaaggtggactccatgctcgaggacactgaggttgtgaaaggggccaggggagacttgatggtggtgtaagtggtagtaggacagtggctatagtcatcacagcaaagcacacgtatattgtagttaaagcacattttgaaatcatctttctggtcttcatttttgcagaccagccccgtttctaggttgcagcttactacttggccaaccttatcaatgctcactgcagggtagttctctgcccgacactcaattttctctggtgcctggcacaaggtcttaccagaggccctgatgttctcataggtttccatgtccccttttaccgatcccgaggtcggtgaatccacatcaaaccattcagtccacttacacttgggttggcagagtgttgtgccctggggggtagtagcattagtcacagttactggtagggtagatgtcatgggcatactggtggacacctctgttatgcctgtagtagactctaggctggtggacagagatgttgaggagacagtgccagctgtacccgtaagcatacttgtccagattccagttgacgacgtttgctgtgttgtcaagccagtcgtcgactgtaatgtctcaggaaagatcttgggtgttgtatgaattgaggagacgctccttgggctgctggtttccgtgatgcttgttgctgctgtggtggaggccgagtgaggactggtcacggtcagactagtgttgggaagaggcatagaactcagggtctgagtggcagtagttgctgatcctgtcattggggccgaccctggagtggtggtagatccctggcagtggctaacactacaacagagcaccttgatcaggtagttgtagcacatctggaaagtgcctccctggtccttgttgtagcacaccagaccagagttgacatcacacttcactttctgtcccaactcgtccacattcactccggggtggttctgggccatacacctgatgtcctgaggcttctcacagattttttctccattggtcctgatattctcatatgtctctatatctcctccattaatgctagatgaagggtagtctacatcgatccactttgtccactgacattggggttggcaggtggtagaggaggtctcagggctgctggctggctgtgtgactgtgctgggccttgaagtggaccccgtctgtgtgccaggtcctgctgtggagctggctgagggaactgtagggagctctgaggtggtcttggtatgaggtcttgaggacagggtctcagtgactgctctggtcgtagaggcagcggtgactgggtgtgtggtcgtgcctccatgaggaggactggagggctcagaagtggtcagggaggtggagatggttgtcatgctggacagagaagcctttgaggttgttgctgagagtgaattggtagtgtggggactgctgggaggcagggagtgaccttgagaggtggacctggcagtcaccactgatgggctgccagaggattctagactcttgggatgctgagtgctcactgaggtgactgtgagaggagtggtgggtggggatgacacgcttgtcctcagggtccaaaaggtgggcatctctgaggcttccatactggtggtagggccagagggagaccaggtctcaaatgaactagtgttgggcaaaggcttggaggacagggtctggggaatggagctggcagtttctgtcgttgagaccgatccttcaggggtggtagatccctggcagtggctaacactacaacagagcaccttgatcaggtagttgtagcacatcttgaaagtgcctccctggtccttgttgtagcacaccagaccagagttgacatcacacttcactttctgtcccaactcgtccacattcactcctgggtagttctgggccatacacctgatgtcctgaggcttctcacagattttttctccattggccctgatattctcatatgtctcgatgtctcctccattaatgctagatgaagggtagtctacattgatccaccttgtccactgacattggggttggcaggtggtggaggaggtctcagggctgctgactggctgtgtgactatgctgggccttgaagtggacccagtctgtgtgccaggtcctgctgtggagctgactgaggaaactgtagggagctctgaggtggtcttggtatgaggtcttgaggacagggtctcagtgactgctctggtcgtagaggcagtggtgactgggtgtgtggtcgtgcctccatgaggaggactggagggcccagcagtggtcagggaggtggaggagtatgacttgcttatctgactaccacttgttgatgtgactgaagatgctgtgatatggggcctactaggcaacatagagttgcttttggaaatgtcactggtgactagtgtttgagggttcttggttgtcattgtggtagaaatgggatggatggatctggtggccatggttggggtactagaagggagactattccacaatgtggtttttgttctagggaactgtctgccagtggaggtggttggcttggcagtgctcggaacattggaggaggctgtccatgaacttgtgcttggtttacctgaatgtggctcttctgaagttgggagaaggctagtgggagaggctggaaaggtagagagactagagacagggaaactcccagtagtcctagctgtggcaatggagacaatcttttctgtcctgggggtagagggtctactttgagttgtgaatgaagttgagggtattggctcctctgatggcaacttgcttgttgtagacgtggagactgtgctgggaaatccaggtgctgatgtggaggtggtagacagtagtccagttgtgctgatacagctggtatcttcctcacagcagaggacacggatgtggtagttgaaacagatttggttgtcactctgcttgctgtttctacagatgagtccaaagtccacattacaaaccacctcctggcccagcttctggaaggatatgttgggaaagaggacggcttcacactcgatgtccacgggtttcttgcatatcttgatacctgtcttgttctgaatatgatagtaggtctcgatgtctccttcaaactggccaggttggggtttgtcactgtccagccagtctgtccaggtgcattgagatttacagcctgtggaggtggtccctgtggttgtgagggctgaggagagaccagtggttagcaaggatgaggtttgagtctctctgggtgtgcctgtggctagagaagaagctgtggtaaggattgtggtttttccagaggaagaaggtgactctgtggtactggtaggcatgctggacgcaggccaggaagtatgtgtagcagtcccagaagtggcagtgggggcagttcctgttgtgggggccgaccctgcaggggtggtagatcgctggcagtggctaacactacaacagagcaccttgatcaggtagttgtagcacatctggaaagtgcctccctggtccttgttgtagcacaccagaccagagctgacatcacacttcactttctgtcccaactcgtccacattcactcctgggtggttctgggccatacacctgatgtcctgaggcttctcacagattttttctccattggccctgatattctcatatgtctcgatgtctcctccattaatgctagatgaagggtagtctacatcgatccactttgtccactgacattggggttggcaggtggtagaggaggtctcagggctgctggctggctgtgtgactgtgttgggccttgaagtggacccagtctgtgtgcctggtcctgctgtggagctgactgaggaaactgtagggagctctgaggtggtcttggtatgaggtcttgaggacagggtctcagtgactgctctggtcgtagaggcagtggtgactgggtgtgtggtcgtgcctccatgaggaggactggagggcccaggagtggtcagggaggtggagatggttgtcatgctggacagagaagcctttgaggttgttgctgagagtgaattggtagcatagggactgctgggaggctgggagtgccctggagaggtggacctggcagtcaccactgatgggctgccagaggattctagactcttgggatgctgagtgctcactgaggtgactgtgagaggagtggtgggtggggacgacacgcttgtcctcagggtccaaaaggtgggcatctctgaggcttccatactggtggtagggcctgagggagaccatgtctcaattgaactagtgttgggcaaaggcttagaggacagggtctggggagtagcggtggtagtttctgtcgttgagaccgatccttcaggggtggtagatccctggcagtggctaacactacaacagagcaccttgatcaggtagttgtagcacatctggaaagtgcctccctggtccttgttgtagcacaccagaccagagctgacatcacacttcactttctgtcccaactcgtccacattcactcctgggtggttctgggccatacacctgatgtcctgaggcttctcacagattttttctccattggccctgatattctcatatgtctcgatgtctcctccattaatgctagatgaagggtagtctacatcgatccactttgtccactgacattggggttggcaggtggtagaggaggtctcagggctgctggctggctgtgtgactgtgttgggccttgaagtggacccagtctgtgtgcctggtcctgctgtggagctgactgaggaaactgtagggagctctgaggtggtcttggtatgaggtcttgaggacagggtctcagtgactgctctggtcgtagaggcagtggtgactgggtgtgtggtcgtgcctccatgaggaggactggagggcccaggagtggtcagggaggtggagatggttgtcatgctggacagagaagcctttgaggttgttgctgagagtgaattggtagcatagggactgctgggaggctgggagtgccctggagaggtggacctggcagtcaccactgatgggctgccagaggattctagactcttgggatgctgagtgctcactgaggtgactgtgagaggagtggtgggtggggacgacacgcttgtcctcagggtccaaaaggtgggcatctctgaggcttccatactggtggtagggcctgagggagaccatgtctcaattgaactagtgttgggcaaaggcttagaggacagggtctggggagtagcggtggtagtttctgtcgttgagaccgatccttcaggggtggtagatccctggcagtggctaacactacaacagagcaccttgatcaggtagttgtagcacattgggaaagtgcctccctggtccttgttgtagcacaccagaccagagctgacatcacacttcactttctgtcccaacttgtccacattcactccggggtagttctgggccatacacctgatgtcctgaggcttctcacagattttttctccattggccctgatattctcatatgtctcgatgtctcctccattaatgctagatgaagggtagtctacatcgatccactttgtccactgacattggggttggcaggtggtggagaaggtctgtgtgccaggtcctgctgtggagctggctgaggaaactgtagggagctctgaggtggtcttggtatgaggtcttgaggacagggtctcagtgactgctctggtcgtggaggcagtggtgactgggtgtgtggtcgtgcctccatgaggaggactggagggcccaggagtggtcagggaggtggagatggttgtcatgctggacaaggaagcctttgaggttgttgctgagagtgaattggtagtgtggggactgctgggaggcagggagtaaccttgagaggtggacctggcagtcaccactgatgggctgccagaggattctagactcttgggatgctgagtgctcactgaggtgactgtgagaggagtggtgggtggggacgacacgcttgtcctcagggtccaaaaggtgggcatctctgaggcttccatactggtggtagggccagagggagaccaggtctcaaatgaactagtgttgggcagaggcttggaggacagtgtctggggagtggaggtggcagtttctgtcgttgagaccgatccttcaggggtggtagatccctggcagtggctaacactacaacagagcaccttgatcaggtagttgtagcacatctggaaagtgcctccctggtccttgttgtagcacaccagaccagagctgacatcacacttcactttctgtcccaactcgtccacattcactcctgggtggttctgggccatacacctgatgtcctgaggcttctcacagattttttctccattggccctgatattctcatatgtctcgatgtctcctccattaatgctagatgaagggtagtctacatcgatccactttgtccactgacattggggttggcaggtggtggaggaggtctcagggctgctgattggctgtgtgactgtgctgggccttgaagtggacctggtttgtgaagtgaatactgctgttgtccgggagctaagcattgtgttctcgtcggtcgctttcaatgttgtagtccaggtagggttggacagggggaggctgctggctgacgacatagaagttgaagtgagtctgctgtttgaagtgaatggcactgtttgccttgagctgtaacttttatccactgatgtctttttctcttctctggtccaggactgtgattctgaggatgctgtatgagtggtaagtgtaggcgaagagggtcttctgctggtgtcaggctgggagggagtggtacttatgcccaaggtcagagaggagccacagggcacataatcacaacagagaaccctcagctcatagtcgtggcacagcggggggctctgttcactgttgaagcaactcagcccagaggatgggtcacagttgaccttctgacccagcttctctaagtccatgctagggaatttcactgcacggcattcgatgccaacgggggtttgacacacctggtgccccttcttcctcaggttctcaaatgtttcaaagtccccgcctgacatgccagcctctggatggctctcatcataccaaatggaccattggcagacctcatgaacacacacggtagacacagtggaagctgagccgtttgtggcaaggggtgccagggtggtggtgaatgtgaatggtgtggtagacgggacttcatggcacacttcagttgtgcgtgctatagtcccattgtctttgcagatggctactaagcaggcgccaaggccatccgtggtgttgtagacaacatcattgtagttgtaggtacggccctcataggtgcatgtgcaggctgtaaggttgtaaacacactggaggccaccaggggtgcagagacaactctggcaattctcagctgtagggacctgtgtgccaatgtcatggtagtttccattgtcatcgtagcagccacactgggccacacacttcatctggtcctcattgaagaagggctggctggctgggcactgtgggtagcagccttctagacctggcaggtcaacgaggcagtgtccagttgggttccgacaggtcttcagacagggggctccacagggctgatagtgccactcacattccccatgagggttgtagtagtcacagaaaagagggcagatgtccggtgtcctccaggacaagcacacacccacatcacggcaggcctgggcataggcggccacagcggtgcagaaacactcgcagtcaccccctgagtcacaggcacacacatcatgcacacaggcttcatagtattttgtagagtcaacctgagagtggcaggcggcaaacgttgcactgttgatgatgctacacttcttctgggcccaggacttgcggtaagggtttgcaatgcaggggtccttgggaactggggcgtctgggcaggatggggagaacttccagctatttccaaactccagcacatcgcccaccacagactggctgcgtgtggtgaagtcattgatggcattgtcgtcaaagttcccacagaggccacagaccctgcccttataatgctgctgcagccggacaaacacactggtcttcctgtcccaggacacgactatcccgctgcggatctcaatgaccaggaagatgcccatgaatctgatcttgtatggagggtctccgcttggcccttgctctaccaccttaaagttcccctcatgaaggatcagctcgtagctctccacaaagatcttgatggtcttggagcaggtggttcctgtggtcccacaggggacattctcagtgacaattcggaaggtcccattagtactggtgttgcctctgcagtagtcctgagccaaggtatactcgcagctaccttcaaagatgtagcgttcaccatcaaaggtaacaaagtggccatccccgtaggccacacaggcacccatgcagggcttgttggtgcattcccaccggcggttcttacaggtgcagttattgcagtctacccggatgatctccccaggtctatatgtgacctcattgtgtatgcaggggcaatcttcctcagcaatacagcccccattcccatctgctaccagccctgagggacacacgcagcccgagacacactgtgtgctgaaacattccacatccagtgtgtggcagcttttgaggcattcagccccgtggtgacccactgaggcattgttacaatccaggtagaccataggcgcctgacactctgtgctcttctgcatcagggctcccaggcaggtcaacttcccgtttgtacacgagcacaccacaccgttgtccgtaacaacctctctgggagccaccacagttccatggaagtagcaagggcactcctccactggcacacagtggtccttgtcattcaggaaggtgccttcagggcaggtgcagccatccaccgtcacaaaggggacgctgcaggtgacatcggcctcactcagagagcggcaggtaggctggcaagaactcactgaatagaagtagcccttggtttgggggcagttgttcgtgtacttgtagcaaactttgtccctccagccactgagcagcacgcctttggcagcacaggcaaacacataggaggacagggctgcacacatgcagtcctcactgttctcacagttgcacgtgtcaaacaagcagttcgagtagaagggcaccgggctaacagtggcatggcaggctgagaaaactcctgagctttccgtgagcatggagcaccactcccgggcgaagttctcattctccacactgtatgagcaggggtcttcataggtgttcttggagttggggcaggaggcttgagtcttccaggtgttggagaaggctgctcctgtgccctccaccaccccactgagggctgtgaagtcatcagcctggttctggttgaagtttccacacagaccacacatctggccttggtaggagcggtccagccggacaaacacctgcatgaggggcaccagctgcacttgaagctgcagccccatgcccgtctgtactatgatgaagaaggatgatggcttgaagatggtaatgttgcctgctgacaagggcatctgcgtaaagatggagttcaggaacacagcaccgttgacctggatccggatgaccgtgtccccactattgaggtttagtgtcactgctttgaggcagttctccgtatctgtcactccacacttccgaagatcgaccagcacagtgaagctactatctgcacatttcttggtcaggatgtagctgcagtctccatgcacattgtagagtttctcgtcaaaggtaaagatgtgggacccgccttgcacagagcaggtgccagggcatggcaggtctttgcacttccacagtcctccgaagcaggtgcaggacctacagctggtgttgaaggactctccaggggcataaattcggccaccgtgtgtacagtggcactgctccaggggcaggcatcccaagtgtctgacatcgtccagcacagttcctgggggacagaagcagccatccatgcagtggtcctcgcagagttgagagcgctgggggttagagcaggtatccacacagggtgaactgcactctcggtattccatgttgaaagggcatgtccaattgcagagatcaggatgcctccagttctgtgggtagccccctgcgtgggcacactggcgggaatattcggcaaaagtggcacatgggcaggtgggacagcggcacaggtcctggacacaggcatccaagtacatgctgacatctaccagagcggtgcacttgtcaaaggcaggaccaagcagggtgcgacggcagatgtcctccgtatctgtgcagttgctgacagctgagggtaggacatcctggcactgctctgtaggaccatccagcttctgcaagtttccaaactgcacaggggtcagcctagtgttgtgggtgtagaactcactgacagctgggagcccgttgaagtcaccgcacagcccacacgtctggttgatgtatttggagtccagctccagcagggcgctgtcttcttcattccacaggaaggtgaggactaggcggatgctgattttcacatagccactgctcttctccatcaggagacctgcacgactgtagggcagcttctcccgatgtccattcaccaggacagagccattggacagctcaatcaccagcccctgggccctgaggagcacataggtgactgtgggcctggaaccctcaagaccacgacgcagttggatgttgaagtcctcgtaggtggccccgcagtgtgaagagaagacatagttacagaggccagggaagcggaacacgtcaccatcaaaggtcttgtaatggaagtcaccccacgtgctgcacactctcccattgtgtgccaggtgtaaggcgctcatgctagggaagacagtgataggtgggatgaaggtgacatgccttgtggatgaggatatggagtcactatacactctctgactgtctccggtgagttctagatgttctgagctcagctctgcctgaccctggctctctgctggccacaccatgagcaaggccacggaggcccagaccagagcccagctccagtttctgctgcccatcctgggggcagtacagagggcaggcaggagggactgagacaaggc

SEQ ID NO: 8 - DNA, 12845 bp, Rattus norvegicus
  source 1..12845: mol_type = genomic DNA
cacggtgccagggtttattgccgcttagggatgagtgagctcagaccccctcttccacctcagaccccagagcccctccagcaggcagccaccttgtctgatacagctccctggtagctggtcttgcgtggacagttccatctgcccttgtgaacatgaggtgactgacacagagctcactttatgtgacagagggcgcacaggcttgctgtggggagccctacagccacaggctctcacggaggatgagaccaaaggagccaacaggctcctcaggaccaaaccctcgcctggcaccctcctcaggtgaatcttaattgccctgtccccctctttgatgctggtctcaccaagtggcaggcagaggggaggagcagaggcagtgagagccacagagggttcttgtgggcctcatggagcatacctgcctaaggttttcatggtcagttgtgcagattctgctccaggtggagggacataaggggttggggatgcaattgccttccagcaagaggctctaggaaatagtcatggaagtcataggcagggagctgcaggccggggcacatttgcactcgtcgatgtgggtataggtgtgctggatgactgtaccatcgggacactgtaatgttgcagctacatcatggaccttggtctcctgacagcagctgcactgatgctctatggcccgggcctccatggagtacttggactttccagagcaggaaccctcgcagaaggtgatgttgacctctgtctcacagccctcgtgcctcaagacggttgggttgacgtgcacttgacaggtacttgagtcctctctttcacaggagtaacagcagcccgttttccttaggattcccgtacagttggacacatcagggcaagacgtggggattggggtcagtacgtgaactccattctcagcactacaatagtatgtagtgcagttgtccccagggctgttcacccaggtttcattgggctgtaccacctggccctctggtgtgaggcaggcattctgtacacacttcccgcagcactggtctggcaccagtgtgtactcaaagccctggggacaagaggtggtgcagtgggtctccctacactctactctaggttcttggttgtccacagagaggcaggtgcatatctggcagggaccccctaggaaggttgcaccgaccccatagatggtgtcattgtatgtacacagcttaggtcgacagctggagatgggacagcagctgccgttctcatgggtctggagcagttcgtaccctggttcacatttgggcagactcgggcaagtggttgaattgcaaacacacagtgtctcagggcagcatggattgtcagtgctgggccaggtcacagtcacaaagccagcttctgtgcactgtgggggtttgtcctggccctcacacttcaccggctcacattgtactgacacagagccaaggtcacacacacagtcctggcagttgctgatccagtgttctccaggaagcttgggtaacccatctggtcccacgcagggacactcagacacacagatgtccgtgcgtgagttgaagaggagctgaccctcagggcagaagcagccctctgccagggtcccatctgaaagttcctgggtcctggggctgcaggaagctggatacatgggtccacaaggcctgtactccttagagggtggacaggagaagtcacacagccctcctgtggcattgcgccagtcggtacatacaccctggatccggcagagcgctgcgtagacctccaggctctgacagagcgttttactaaaattgccattgcagtggtcactgacacaggttctgaagaaggcgtctggagggatgaacttgtggcactcggcaaagacctggctcaacatcagctcacagagaggcgcagaggggcatgtggtggaggtcagtgtgctggacattgggggctgggaagtggtgctgggggaagggctgggttgagctaagcagtcgctgttgttgttccccggcaccagccagtctttggccatgtcctggcagtcggaagctatggtgccatcaggccggcggcagtcgtctgtctgactgtttgtgcaggtaccacactggccctcagtgttgttgctgaagtatctatagggcaaccatatctggaagatgtttccatcaaaggtgatgctggcgccaatggtggaaatgttgacactcattgtggtggccccactcaaagatacggtcacgccattcttactgaagcccgaccttatccacatctggtcccatataatcaggctctcttccttcccactgttggtggtggtggtggtgaggacaatctccatggagttgtagtacacactgagggcgcggggacagaaggtgacatttgtggtggccccacagtagtagctgtgggcaaggatgctcaggttgccatggcgagggtggatctctctcatgagcactgaggtacagttgtccacaaaagtataggaggtgccatcgaatgtcaggtagtgggagtgcccccatccactgcagaagcattcacactcatagtggaaatggcaaggctcctggtcccacactttgatgggcaagtgcttgttgacacacgtgacgttgtccacaggctctggctctaggaggatgatttggttgttgccctggcactgggccaccgtgcagttctccagggtccaagactcattcacctgccggggaggggtgatattatcacagccaggaagcaggggagacaaaggcgcaggggtagagggcgttggaggtgaagaggaggggcaggcaccctggaagcggtcaacatcacagtgctggttgcagatggcatagaattggcagccagctccatcagtcttattgtagatgatatccccaggtacgaacagctgtccaaatgcccggcagaaacagggtgatggggaagatgcttggctggaaatgacagtaggcctggaggtactgaacaccgaggaggaagaagcagtagacacgctgaaggtcgcctgactgctggggaagacttcaggggtgtgaggggtccctgaggttgaggaggggatcacaatgggaccagtggctatagttgaagtcagggtggtcaacactgccgaggtgtgagtagataccagggaagaggagtggggcacgctggaactagagaccccagggaaagaagtcgtggtattcaaagctggggcagtgtgggtagaggacaggcgagaggaagaagggacagtggatgtggtggccagaggtgacgtggtacagtgactatagttgtcacagcagaggaggcgcacgtggtagttgtcacaatactgcaaaggtcccgattggttgatatttttgcatatcagcccgaatcgcacatcacacaggaccacctgctgtagagcttccaggggcttgtctggctccttctctgaacggcattggatgtccttgggttgatcacagaagataaagccaacctcacgaagcactgcgtagacctcaaagtccccgcctctggggccagggttggggaagtcggcgtcaaaccactctgtccatttgcagcgaggttcacagcccgagtcaggagatatagtccatgtggaggcttgggtgcttgatacggaagagctggagggatgcttagtctgaaaggtggactccgtgctcgaggacactgaggttgtgaaagggaccaggggcgtaggggtagaccagagcggggatggcttgatggtgctgtaaggggtttcaggacagtggctatagtcatcacagcaaagcacacgtatattgtagttgaagcacattttaaaatcatctgtctgctcctcatttctgcagactagccccgtctccaggttgcagcttactacttgaccaaccttatcaatactcactgcagggtagttctctgcccgacactcaattttctctggtgcctggcacatcttcttgccagaggccctgatgttttcataggtctccatgtccccttttactacccccgatgtcggtgagtccacatcaaaccattcagtccacttacacttgggctggcagtgtgttgtgccctgggaggtggttgcattagtcacggttggtggtagggtatgtgtcattggtacactggtggatggctcttttatgcctgtagtcgtttctagggtggtggacagagattttggggagacagtgccagctgtacccgtatgtacacttgtccagattccagttgacgagatctgttgtgttgtcaagccagatgtcgactgtaatgtctcaggcaaggtcttgggtgttgtatggattgaggaggctcttcccgggctgctggtttccttgatagttgaaacatgtgggggccttgtgccatgggatgtaacaagagtggctgtgtggctagagcctgttagagcttttgagacgcttgttcctactgtggtggaggctgggtgggtactggccacagtcagactagtgttgggaagaggcttaggactcagggtctgagtggcagtagttgctgatcccgtcactgggactgaccctgccgtggtggcagttcccgtcgtcagggccgactctgtagtggtggaagatccctggcagtggatgacactacaacagagcaccttgatcatgtagttgtagcacatcgggaaaatgcctccctggtcccggttgtagcacaccagaccaaggctgacatcacacttcactttctgttgcaagttgtctaaggcctgtccagggtagttctgggccatacacctgatgtccttaggcttctcacagactttttctccattggccctgatattgtcatatgtctctatgtctcctccatcaatgctagaggtaggatagtctacatcaatccactttgtccactcacatttgggttggcaggtggtggaggaggtctcagggctgctgactgtctgtatgaccgtgctggggcttgaagtggacccagtctgtgtgctgggccctactgtggagctggctgaggaaactccagggagctctgaggtggtctcggtatgtggccttgaggacggggtctcagtaaccgctctggtcatggaggcagctgtggctgggtttgtggtagtgctcccaggaggagttctggagggtccaggagtggtcagggaggtagagatggtggccagactcctatttgttgctggggctgaagatgttgtggtgatatggggcctactaggcagcatagagttgcttttggaaatgtcattggtggtcagtgtttgagggttcttcgttgtcattgtggtagaaatgggatgggtggatgtggccatggttgaggtactagaatggaggtctttccacaatgtggtttttgttccagagaccggtttgccaatagaggtggtcagcgtggcagtgctcagaacattggaggaggctgtccacaaacttgtacttggcttacccgagtgtggctcttttgaggtttggagacggctggtgggagaggctggaagtgtagagagactagaggcagagaaactcccagtagtcctagtcgtggtgttggggacaatcttctctgtcctaggggtagagggtctcctttgagttgtgaaagaagttgaggattttggctcctctgatgaccacttgcttgtggacatggggactatgctgggaaatccagttgctggtgtggaagtggtggacagtgacccagttgtgctgatacagctgatatcttcctcacagcagaggacacggatatggtagttgaaacaagtttcattgtcgacctgcttgctattcctacagatgagtccgaagtccacattacaaaccacctcctggcccagttgctggaaggacatgttggggaagaggatggcctcacactcaatgtccacaggtttcttgcatatctcgatacctgtcttgttttgaatatgatagtaggtctcaatgtctcctccaaactggccaggttggggtttgtcactgtccagccaatctgtccaggtgcactgagatttacagcctgtggaagtggtctctgtggttgtgagggctgaggatggaccagtggttagcaaggatgaggtttgagtctccctggatgtcactgtagctgtagaggaagctctggtaaggactgtggttttttcacgggaagaaaatgactctgtagtgctggcgctggtaggcatgctggacacaggccaggaagtgtgtgtggatgtcccagaagtggcagtagtggcagttcccatcgtcggggctgattctgtagtggtggaagatccctggcagtggatgacactacaacagagcaccttgatcatgtagttgtagcacatcgggaaaatgcctccctggtcccggttgtagcacaccagaccaaggctgacatcacacttcactttctgttgcaagttgtctaaggcctgtccagggtagttctgggccatacacctgatgtccttaggcttctcacagactttttctccattggccctgatattgtcatatgtctctatgtctcctccatcaatgctagaggtaggatagtctacatcaatccactttgtccactcacatttgggttggcaggtggtggaggaggtctcagggctgctgactgtctgtatgaccgtgctggggcttgaagtggacccagtctgtgtgctgggccctactgtggagctggctgaggaaactccagggaactctgaggtggtctcggtatgtggccttgaggacagggtctcagtaaccgctctggtcatggaggcagctgtggctgggtttgtggtagtgctcccaggaggagttctggagggtccaggagtggtcagggaggtagagatggtggccaggctagacagggaagtccttgaggttgttgctgagaacgtgttggtagtgtggggactgctgggaagcagggactgcccttgagaggtggacctgatagtcaccacagatgggatgccagaggattctagactcttgggatgctgagtgctcactgaagtgactgtgagaggggtggtgagtggggatgacacacttgtagtcagggttccaggggtgggcaaatctgaagcatctatatgggtggtggaccctgagggagaccaggtctcaactgaatcagtgttgggatgaggcttggaggacagggtctgggtagtgaaagtggcagttcccgtcgtcagggccgactctgcagtggtggaagatccctggcagtggatgacactacaacagagcaccttgatcatgtagttgtagcacatcgggaaaatgcctccctggtcccggttgtagcacaccagaccaaggctgacatcacacttcactttctgttgcaagttgtctaaggcctcttcggggtagttctgggccatacacctgatgtccttaggcttctcacagactttttctccattggccctgatattgtcatatgtctctatgtctcctccatcaatgctagaagtaggatagtctacatcaatccactttgtccactcacatttgggttggcaggtggtggaggaggtctcagggctgctgactgtctgtgtgactgtgttggggcttgaagtggacctggtgtgtgaagtgaattctgctgttgtctgggagctaagcactgtgttctcattggtccctttcactgttgtagtccaggtagggttggacaaggggaggctgctggctgagtttctagatgacgtaggagatgaagtaggtctgctctttgaggcaaacgtcactgtttgccttgagctgtgagttttatccagtgatgtctctttcccacctctggtccaggactgtgattttgaggatgctgtatgagtggtaagtgtgggcagagaggggtttttactggtgtcagactgagagggagtggtactcacacccgaggtcagagaggagccacagggcacataatcacaacacagaaccctcagctcatagttgtggcacagtggggggctctgttcattgttgaagcatctcaacccagaggataggtcacagtttaccttctgacccagcttctctaagtccaggctggggaacttcactgctcggcattcaatggcaacgggggtttgacacacctggtaccctttcctcctcaggttctcaaatgtttcaaagtccccgcctaacatgccagcctctggatggctctcatcataccaactggaccagtggcagacctcacgaacacacacagtagacgcagtggaaggagtgactgtgttggggcttgaagtggacctggtgtgtgaagtgaattctgctgttgtctgggagctaagcactctggtccaggactgtgattttgaggatgctgtatgagtggtaagtgtgggcagagaggggtttttactggtgtcagactgagagggagtggtactcacacccgaggtcagagaggagccacagggcacataatcacaacacagaaccctcagctcatagttgtggcacagtggggggctctgttcattgttgaagcatctcaacccagaggataggtcacagtttaccttctgacccagcttctctaagtccaggctggggaacttcactgctcggcattcaatggcaacgggggtttgacacacctggtaccctttcctcctcaggttctcaaatgtttcaaagtccccgcctaacatgccagcctctggatggctctcatcataccaactggaccagtggcagacctcacgaacacacacagtagacgcagtggaagctgaaccgtttgtggtaaggggtgtcagagtggtggtgaatatgaatggtgtggtagacgggacttcagggcactcttcagtcgtgcgttttatagtcccgttgtctttgcagatggctactaagcaggcaccgaggccatcagtggtgttgtagacaacatcattgtagttgtaggtacggccctcatagatgcatgtgcaggctgtaaggttgtaagcacactggaggccaccaggggtgcagagacaactctggcagttctcagctgtagggacctgtgtgccaatgtcatgatagtttccgtcatcatcatagcagccacactgggccacacacttcatctggtcttcattgaagaagggctggctgggtggacactgtgggtagcagccttctaggcctggcaggtcaaccaggcagtgtccagatggattccgacaggtcttcagacagggggctccacagggctgataatgccactcacattgcccatgagggttgtagtagtcacagaaaagagggcagatgtctggagtcctccaggacaagcacacacccacatcacggcaggcctgggcgtaggcggccacggcagtgcagaagcactcacagtcacctcctgagtcacaggcacacacatcatgcacacaggcttcgtagtattttgtagagtcaacctgagagtggcaggcagcgaaagttgcgctgttgatgatgctacattttttctgggcccaggacttgcggtaagggttggcgatgcagggatccttgggaactggggcatccgggcaggatggggagaacttccagctatttccaaactccagcacatcacccaccacagactggctgcgtgtggtgaagtcattgatggcattgtcatcaaagttcccacacaggccgcagaccctacccttataatgctgctgcagccggacaaacacactggtcttcctgtcccaggacacgactatcccactccggatctcaatgaccaggaagatgcccatgtatctgatcttgtacggagggtccccacttggccctcgcgctaccaccttaaagttcccctcatgaaggatcagctcatagctctccacaaagatcttgatggccttggagcaggtggttcctgtggtcccacaggggacattctcagtgacaatacggaaggtcccatcagtactggtgttgcctctgcagtagtcttgagccaaggtatactcgcagttgccttcaaagatgtaacgttcaccatcaaaggtaacaaagtggccgtccccataggctacacaggcacccatgcagggctggttggtgcattcccaccggcggttccggcaggtgcagttattgcagtctacccgaatgatctccccaggtctgtatgtggcctcattgtgtacgcaggggcagtcctcctcagcaatgcagcccccattcccatctgctaccagccctgagggacacacgcagcccgagacacattgtgtgctgaagcaatccacatccagcgtgtggcagcttctgaggcattcagccccgtggtcacccactgaggcattgttacagtccaagtataccataggtgcctggcactctttgtttctctgcatcagggctcccaggcaggtcaacttcccatttgtacacgagcacaccacaccgttgtccataacaacctctccggaagccaccacggttccatggaagtagcaggggcactcctccactgggacacagtggtccttgtcattcaggaaggtaccttcagggcaggtgcaaccatccacaggcacaaaggggatgctgcaggtgacgtcaacctcacttagagagcggcacgtaggctggcaagtactcactgagtaggagtactccttggtttgggggcagttgttcatgtacttgtagcaggctttgcccctccagccactgagcagcacgcctttggcagcacaggcacgcacgtaggaggacagggcggcacacatgcagtcctcgctattctcacagttgcacgtgtcaaacaagcagttcgagtagaagggcaccgggctaacagtggcatggcaggctgagaaaactcctgagctttcagtgagcatcgagcaccactcccgagcgaagttctcgttctccacactgtatgagcaggggtcttcataggtgttcttggagttggggcaggaggcttgagtcttccaggtgttggagaaggctgcccctgtgccctccaccaccccactgagggccgtgaagtcatcggcctggttctggttgaagtttccacacaggccacacatctggccttggtaggagcggtccagcctgacaaacacctgcatgaagggcaccagctgcacttgcagctgcagccccgtgcccacctgtactataacgaagaaggatgatggcctgaagatggtgacgttgcctgctgacaagggcagttgagtgaaaatggagttcaggaacacagcaccgttgacctggatcctgacgaccatgtccccgctattgaggctcagcgtcactgctttgaggcagttctcggtgtccgtcattccacacttccgaagatccaccagcacagtgaagctgctatctgcacatttcttggtcaggatgtagctgcagtctccatgcacattgtagagtttctcatcaaaggtggagatgtgggacccgccttgcacagagcaggtgccggggcacggcaggtcctggcactgccacagtcccccgaagcaggtgcaggagctacaggtggtgttgaaggactctccaggggcataaatgtggccaccgtgggtacagtggcactgttccaggggcaggcagcccaaatgtctgacatcatccagcacagttcctgggggacagaagcagccatccatgcagtggtcctcgcacagttgagagcgctgggggttggagcaggtatccacacagggtgagctgcactcttggtattccatgttgaaagggcaggtccagttgcagagatcggaacgcctccagttctgtgggtggccccctgcatgggcacactggcgggaatattcagcaaaagtggcacatgggcaggtggggcagcggcacaggtcctggacacaggcatccaggtacacgttgacgtctaccagggcgatgcactcggcaaaggcagggccaagcaggatgtgacggcagatgccctccgtatctgtgcagttgttggcaggtgacagtaggacatcctggcactgttctgtgggaccatccagcttctgcaggtttccaaactggacaggggtcagcctagtgttgtgggcgtagaactcattgacagctgggagcccgttgaagtcaccgcacagcccacacgtctggttggtgtatttggagtccagttccagcaggacactgtcttcttcattccacaggaagttgaggactagcctgatgctgatcttcacatagccactggtcttctccatcagaagacctgcacggctgtagggcagctcctcccgatgtccgtttaccaggacagagccattagacagctcaatcaccagtccctgggccctgaggaacacataggtgaccgtgggcctggaaccctcaagaccacgacgtaattggatgttgaagtcctcgtaggtggccccgcagtgtgaagagaagacatagttacagaggccagggaagcggaacacgtcaccatcgaaggtcttataatggaagtcaccccacgtgctgcacactctcccgttgtgtgccaggtgtaaggcacttatgcttgggaagacagagataggtgggatgaaggtgacatgccgtgcggatgaggatgtgggggcactatacactttctgactgtctccggtgagttctggatgttctgcgctcagctcttcctggccctggctctctgctggccacaccatgagcaaggccacagaagcccagaccagagcccagctccaattcctgccgcccatcctgggggcagtacagagggcaggcaggagggactaa

SEQ ID NO: 9 - DNA, 19765 bp, Macaca mulatta
  source 1..19765: mol_type = genomic DNA
tactcgatgctcagcgtttatttgcaaaactgggctgggttgagcagagggggctttgggatgccgacctctctctgacctggccattgtgacctcagccccgaggtaccctgcagcaggcaggtctagcgcagcttcctggcagcagccggccttgcctggaccagcctgtctgtgccccagtggccggatgtggccagccagaatccatgctgcctggggactctggccatggcagggacacacaggcccgcacacgcttagcttgttccagggcgtcccagtgacatcaaggaggggcaaggccaaggtgggccacaggctctcccaggacatgactcctgagtggtgccctcctgaaaggggtcctgctggcccctcacccttccagggtccggttttacccacagggtgggcagcaggagcacagaggcacggggtgccacacacagaggccagggggctccgcagagcaggcccaaggttttcatgatcaggcaatgcacgtcctggctccaggtggacagagcatggggatggaggcagaacatcctcagacggcagtggcctcctgggccaggaagccgggggggtatatgggagccatgggcgcagggacacagaatggcgtgcagccacactcatccacatggttgtaggtgtgcaggacagtcgagccgtcgggacagcgcaagggcaccgtctcctcgtggacccgtctctcctggcagcaggtgcactggtgctgcatggcctgggcctctgccgagtacctggactctccggggcaggagccctcacagaaggtgatgttgacctcagtcttgcagccctggtgccacaggacggttgtgttgacgcggacctgacaggagtcctcctcacaggagtagcagcagccggttttcctgaggctccccctgcagctggacacttctgggcaggatgcaggctgtggggtcagcaaatagactccgctctcgacctcacagtggtacacggtgcagttgtccacacggctattgacccaggtttcgttcagctggactggcggaccatcgggcgtgaggcaggcagtctgcacgcactccccacagcactgcccggccgctctcttgtactcaaagccctgggggcaggtagtattgtggcaggcatcctcccaacattgcaccgttgggtcctgggtgtccccagagaggcaggtacacgtgtggcagggaagggcccctgggaagattgcaccaaccccatagaagatgcccttgtaggaacacagctgaggtccgcagcggaaggtgggacagcagtcgccctccttctgggtgctgatcaactcctgccctagcgggcacacgggtgggctctggtggcaggtgcttgtgttgcatacgcacaccgtctcggggcaacaggggttgttggcccggggcctggtcacggtcacgaaaccggggtggctgcatggtgaggagggaccctgggcctcacagggcaggggcttgcattgcaccgacattgaaccctcatcacacacgcaggactggcagttgctgatccactgctgcccaggagacttgggaagcccatcaggtcccacgcaggggcagtcctgcacgcaggtgcccgtgtgtgcgctgaagaggatctggtccccggggcagaagcagccctccgccagcccctccagttgtgggttctggttcctggagttgcaggaggcaggctgtatggggccgcacggcttgtacactttggtgggtgggcaggtgagatcgcacaggccgccggttgcacctcgccagtcactgcacactccccgggcacggcaaagagctgcgtaggcctccaggctctggcagggcacctcggggtggccctggcagccgtcgctgatgcaggcattgaagaatgggcccgggggcacaaggtcgtggcactgggcaaagacctggctcagcatcagatcacagagtggctgcggcgggcacgggctgggggtgggtgcactagacaccggggccgggggactggccgtggggggcgtgccggtcggggcccagcagccgtcctttctgctgtcagggaccaaccaagtcttagccatgtccttacagctggtggcagtggttccgtcgcgctggagacaatcgtccctctggttgttggtgcaggtgccgcactggccctcggtgttgttgtggaagaggctgtagggcagccgggcctggaagatgtggccatcgaaggtgacgctcacacccagggcagggatgtccacgcgcatggtggtggtccccgtcacagacacaagcacgccgttcttgctgaaaccgctgctcaccggaatttggtcaaacaggatcaagtcctcctccttcccatgcaccgtggtgacggtgaggacgatatccatggacttgtagtggagcctgagggcgcgggagcagctggcggcagcggcagaggccgcgcagtagtggttgtccaagtagaggctgagattcccgaggcgtgcgtggatctctctcatgaggacataggtgcagttgccctcaaaggtgtaagaggtgccgtcaaaggtggaatagtgggaactgccccacacactgcagatgcactcgcactcatagtggaagtcacagggctggctcgggtcggacactttgatgggcaggtgcttgttcacgcaggtgacattggccacgggctttgggtccagcagggcgacatggttgtcacccacgcacctggccaccgtgcagttctccagggtccaggtctcattcacctgccggggagggatggcattgtcacagccaggggcaggggagggcgagggcagcagggtggaggacgctggtggtggggaggtggggcaggtgccctggaagcggtcgaggtcacagtgctggttgcacacggcatagaattggcagccggctcggtctgtcctattgtagattacttccccaggtgagaagaactgtccaaatgccctgcagaagcagggagtagagaagtgggagctggggaagtgagtgggtctgagggtggtgaggactgaggaggacacagtggacatgctgaaggctggcaggctgctggggagcactgcaggggtgtgggtggtccccagggtggacgagctgggaaccgtggagccagtggctgtgggcctggtggccgtggtggtcagcactttgggggtgccagctgttcccacagtggaggaggggatggcagtagacctagtggccatggtcgtggttgctgtagtggtccgcactggaagggtgcctgcagtccctgggctggagaaaggggttgctgaggagctgggcgctgtgggtatggtggctgtggaaccagtggcctcagtcggggtggctagagtggtcggctctgtgaggatccaggtcgtccccagagtggaggagggggttgctttggagctggtggctgtgggtgtggtggctgtgatggtcaacactttgggagagtacgttgttcccggggtggaggtcagggtggctgtggagcccgaggccatagttgtgatggctgtagtggtcggctctgtgaggaaccaagttgacgccggagtggaggagggcgtggctgtggagctggtggccacacttatggtggcagtggtggttggttctgtgtggatcctggtcgttcccagagtagaggaaggtatggccgtggagcctgtggccactgttgtgatggctgtagtggttggctctgtgaggatcccggtcgtccccagagtggaggagggcgtggccgtggacctcatagccactgttgtaatggttgtagtggtcggctctgtgaggatcccggttgtccctggagtgaaggagggtgaggctgtggagcccgtggccactgttgtgatggctgtagtggtcggctctgtgaggatcctggttgtccccggagtggaaggcatggccgtggagcccgtggccactgtcgtaatggctgtagtggtcagctctgtgaggattgaggtcttccctgaagtggaggagggcgtggccgtggagcccgtggtcactgttgtgatggctgtagtggtcggcgctgtgaggatcgaggtcgtccctggagtggaggaggggatggccatggagccagtggccacagtgatggtggcagtggtggttggctctgtgaggaatccagtcgtccccggagtggaagctgtggctgtggagcccgtggttgtgatggctgtagtggtcagttttgtgaggactgaggtcttccctggagtggaggagggcacggccgtggacttcgtggccactgttgtgacggtagtagtggttggctctgtgaggatcccggtcgtcccctgagtggaggagggcgtggccgtggagcccgtggccactgttgtgatggctgtagtggttggctctgtgaggattgaggtcatccctggagtggaggaaggcacggccgtggacctcgtggccactgttgtgatggttgtagtggttggctctgtgaggatcccagtcgtccctggagtggaggtgggcgtggccgtggagcccgtggtcactgttgtgatggctgtagtggttggctctgtgaggatcccagtcgtccccggagtagaaggcgtggccgtggagcccgtggccactgttgtgatggctgtagtggttggctctgtgaggatcgaggtcatccctggagtggaggaggggatggccgtggagccagtggccacagttatggtggcagtggtggtcggccctgtgaggatcccagtcgtccctggagtggaggtgggcgtggccgtggagcccgtggccactgttgtgatggctgtagtggttggctctgtgaggattgaggtcatccctggagtggaggaaggcacggccgtggacctcgtgaccactgttgtgatggttgtagtggttggctctgtgaggatcccggtcgtccctggagtggaggtgggcgtggccgtggagcccgtggtcactgttgtgatggctgtagtggttggctctgtgaggatcccagtcgtccccggagtagaaggcgtggccatggagcccgtggccactgttgtgatggctgtagtggttggctctgtgaggatcgaggtcatccctggagtggaggaggggatggccgtggagccagtggccacagttatggtggcagtggtggtcggccctgtgaggatcccagtcgtccccggagtggaggtgggcgtggccgtggagcccgtggccactgttgtgatggctgtggtggttggctctgtgaggatcgaggtcatccctggagtggaggaggggatggctgtggagccagtggccacagttatggtggcagtggtggtcggctctgtgaggatcccagtcgtccccggagtggaggaatgcgtggccgtggaccttgtggccactgttgtgatggttgtagtggttggctctgtgaggatcccggtcgtccccggagtggaggaaggcgtggccgtggactttgtggccactgttgtgatggttgtagtggttggctctgtgaggatcccggtcgtccccggagtggaggagggcgtggctgtggagcccggggccactgttgtgatggctgtagtggtcggctctgtgaggatcctggttgtccccggagtggaaggcgtggctgtggagcccgtggccactgtcgtgatggctgtagtggtcagctctgtgaggactgaggtcttccctggagtggaggagggcgtggccgtggagcccgtggtcactgttgtgatggttgtagtggttggctctgtgaggatcgaggtcatccctggagtggaggaggggatggccgtggagccagtggccacagttatggtggcagtggtggtcggctctgtgaggatcccagtcgtccccggagtggaggagggcgtggctgtggagcccggggccactgttgtgatggctgtagtggttggctctgtgaggatcgaggtcatccctggagtggaggaggggatggccgtggagccagtggccacagttatggtggcagtggtggtcggctctgtgaggatcccggtcgtccccggagtggaggtgggcttggccttggagcccgtggccactgttgtgatggctgtagtggttggctctgtgaggatcgaggtcatccctggagtggaggaggggatggccgtggagccagtggccacagttatggtggcagtggtggttggctctgtgaggattccagtcgtccccggagtggaggagggcgcggctgtggagcccggggccactgttgtgatggctgtagtggttggctctgtgaggatcgaggttatccctggagtggaggaggggatggccgtggagcccgtggccactgttgtgatcgctgtagtggtcggctctgtgaggatcccggttgtccccagagtggaggaatgcgtggccgtggaccttgtggccactgttgtgatggttgtagtggttggctctgtgaggatcccggtcgtccccggagtggaggaaggcatggccatggacctcgtggccactgttgtgatggttgtagtggttggctctgtgaggatcccagtagtccccggagtggaggagggcatggctgtggagcccggggccactgttgtgatggctgtagtggtcggctctgtgaggatcctggttgtccccggagtggaaggcgtggccgtggagcccgtggccactgtcgtgatggctgtagtggtcagctctgtgaggattgaggtcttccctggagtggaggagggcgtggccgtggagcccgtggtcactgttgtgatggctgtagtggtcggcgctgtgaggattgaggtcatccctggagtggaggaggggatggccgtggagccagtggccacagttatggtggcagtggtggttggctctgtgaggaatccagtcgtccccggagtggaggagggcagggctgtggagcctgtggccactgttgtgatggttgtagtggtcggctctgtgaggatcccagtcgtccccggagtggaaggtgtggccgtggagcccgtggttgtgatggctgtagtggtcagctctgtgaggactgaggtcttccctggagtggaggagggcacggccgtggacttcgtggccactgtcgtgacggttgtagtggttggctctgtgaggatcccagtcgtccccggagtggaggagggcgtggccgtggagcccgtggtcactgttgtgatggctgtagtggttggctctgtgaggatcgaggtcatccctggagtggaggaggggatggccgtggagcccgtggccactgttgtgatggctgtagtggtcggctctgtgaggatcccggttgtccccggagtagaaggcgtggccgtggacctcgtggccactgttgtgatggttgtagtggttggctctgtgaggatcgaggtcatccctggagtggaggaggggatggccgtggagccagtggccacagttatggtggcagtggtggtcggctctgtgaggatcccggtcgtccccggagtggaggtgggcgtggccatggagcccgtggccactgttgtgatggctgtagtggttggctctgtgaggatcgaggtcatccctggagtggaggaggggatggccgtggagccagtggccacagttatggtggcagtggtggttggctctgtgaggatcccagtcgtccccggagtggaggagggcgtggctgtggagccaggggccactgttgtgatggctgtagtggttggctctgtgaggatcgaggtcatccctggagtggaggaggggatggccgtggagcccgtggccactgttgtgatggctgtagtgatcggctctgtgaggatcccggttgtccccggagtggaggaaggcgtggccgtggacctcgtggccactgttgtgatggttgtagtggttggctctgtgaggatcccggtcgtccccggagtggaggtgggcgtggccgtggagcctgtggccactgttgtgatggttgtagtggttggctctgtgaggatcgaggtcatccctggagtggaggaggggatggccgtggagccagtggccacagttatggtggcagtggtggttggctctgtgaggatcccagtggtccctggagtggaggagggcgtggctgtggagcccggggccactgttgtgatggctgtagtggtcggctctgtgaggatcccggttgtccccggagtggaggaatgcgtggccgtggaccttgtggccactgttgtgatggttgtagtggttggctctgtgaggatcccggtcgtccccagagtggaggtgggcgtggctgtggagcccggggccactgttgtgatggctgtagtggtcggctctgtgaggatcaaggtcgtccctggagtggaggagggcgtggctgtggagctggtggccacagttatggtggcagtggtggttggctctgtgacgatcctggccgtctccggagtggaggagggcgtggccgtggacctcgtggccactgttgtaatggctgtagtggtcggctctgtgaggatcgaggtcatccctggagtggaggagggcatggctgtggagctggtggtcacagttatggtggcagtgttggttggttctgtgaggctcccggtcgtcccctgagtggaggaaggcatggccgtggagcccgtggccactgttgtgacggctgtagtggtcggctctgtgagaatccaggttgatgctggagtggaagagggcgtggccttggagccagtggccacagttatggtggcagtggtggttggctctgtgaagatccaggtggttcctggggtggaggaggggttggccgtggagccagtggctgcagtcattgcggttgtggtgggaaaaacttcagtgattcgagtagtccctgtagtggaggagggaatggctgtggagcccgtgaccactgttgtgatggctgtagtggttggctctgtgaggatcgcggtggtccctggagtggaggaggggatggtcgtggagcccgtggccactgttgtgatggctgtagtggttggctctgtgagaatccaggttgaccccagagtggaggagggtgtggccttggagctggtggccggggtgctggggcagtggccgtagttgcagcagaacacacggatttcgtagttgaagcacatcttgaacttccccacctgctgacggttcctgcagaccaagccgaagtccaggctgcattccacgacctggcccaactcccgcagggggacaccaggctgggcctgggcgcggcactcgaggcccaggggctgctcacagacggcccctccagccgcgcggatgttggagtaggtctccaagtccccgccagagggccccgacatggggtagctgtagtccagccagtctgaccaggcacactggggctcacagcccgtggacaccactggggttgtgggggccgatgtggggctgctgggcagcagggtcgaggtgtgggtcttgctggttgtggccgtggtcctggaggtggccgtggtgaggcccggggtggtcttccctggagaaaggggtgactcagtggttctgctgtgagtgtgaggactggacagggctgaagtcgagtgtggggtggtaccggtggttcctactggggtgtgggaagtcaccgtggatggctctgtgatgtgggtggtgcccgaggtggccacagaagtccgggctgtgggtaccgtgcggggactctcggggagctgggatcgcccatgtgtggtggccgtggtggacagcactgggggtgtatgggtggtccctagggcagaggagggagccactgtggtgctggtggctgcaggtgtggtggccgtggtggtcagcgctggggagatgggagttgtccctggagtggaggcgggggtggtggtggagcctgtggccgtgattgtcgtgcccgtggtggccagtgctgggggtgtaccagtggtctgtgggctagaggagggtgttgccatagagccagtggccacagttatggtggtgttggtcagcactgtcggggtgtgggtggtccctgggatggaggagggggtcactgtgtagctgctggttgtgggtgtggtggttgtggtgataagtgctgtaagggtgcttgcagtccctgggctggaggagggggtggctgtggagcttgtggtgatggccatggtggtcagcactttagaggtgtgagctgttcctgaggtgaggagggtggccgtggagccagtggcctggattgtggtggccgtggtggttagcgctgtggaggtgtgggtggtccttggagtggaggaggcgtgggctgtggacagggtggccgttggtgcggtggtctgtgctgtgaggttccaagtggttctcagggaggaggatgggatggctgtaaagctggtagctgtgggtgtggtggctgtgcttgtcagcacaactggaagggtgggtgcagtccctggactggtggaggcagtggctttggagccagtggctgtgggtttcgtggccatggtggtcagcaattctgaggtggcagcagttgctggggtggaggagggggtgactgtggagctggtggccacattcgtggtcaatgttgtggttggctctgtgaagatccaggtggtcccaggagtggaggaggaggtggctgtggagccggtggtccctggggtggaggaggggttggccgtggagccagtggcttcagtcgttgcagttgtggtgggaaacactttggtgatttgagtagtccctgaggtggaggaagggatggcagtggagcccgtgaccactgttgtgatggctgtagtggttggctctgtgaggatcgcggtggtccctggagtggaggagggcatggctgtggagcccgtggccactgttgtgatggctgtagtggttggctctgtgaggatcccggttgtctccagagtggaggagggtgtggccttggagctggtggccagggtgctggggcagcggccgtagttgcagcagaacacacggatttcgtagttgaagcacatcttgaacttccccacctgctgacggttcctgcagaccaagccgaagtccaggctgcattccacgacctggcccaactcccgcagggggacaccaggctgggcctgggcgcggcactcgaggcccaggggctgctcacagacggcccctccagccgcgcggatgttggagtaggtctccaagtccccgccagagggccccgacatggggtagctgtagtccagccagtctgaccaggcacactggggctcacagcctgtggacaccaccggggtcgtgggggccgatgtggggctgctggacagcagggtcgaggcacgggtctcgctggttgtggccgtggccgtggtcctggaggtggccgtggtgaggcccggggtggtcttccctggagaaaggggtgactcagtggttctgctgtgagtgtgagggctggacagggctggagtcgagtgtggggtggtaccggtggttcctactggggtgtgggaagtcaccgtggatggctctgtgatgtgggtggcgcccgaggtggccatggaagtccaggctgtgggtaccatgcggggactctcagggagctgggatcgcccatgtgtggtggccatggtggacagcactgggggtgtatgggtggtccctagggcagaggagggagccactgtggtgctggtggctgcaggtgtggtggccgtggtggtcagcactggggagatgggagttgtccctggagcggaggagggggtggtggtggagcctgtggccgtgattgtcgtgcccgtggtggccagtgctgggggtgtaccagtggtctgtgggctagaggagggtgttaccatagagccagtggccacggttgtggtggtgttggtcagcactgtgggggtgtgggtggtccctgggatggaggagggggtcaccatggagccgctggttgtgggtgtggtgtttgtgccgatccgccctggaagtgtgggtgcagtccctgggctagaggagggagtggctgtgaagcccctggttgtggtagtcagcactttggtagtgtaagctgttcctgggctggaggagggggtggccatggagccagtggccccagttgtggtggccgtggtggtaagcactgtggaaatatgggcagtctctggagtggaggagggtctgcctgtggacatggtggctgtgggtgtggtggtctgtgctgtgagggtccaggtggtccccagagaggaagaggggatggctgtaaagcttgtagctgtgggtgtggtggctgtgcttgtcagtgctggaagggtgggtgcagtccctggactggaggagggaatggctttggagccggtgactgtgggtgttgtggtcatggtggtcagcacatttggggtggcagcagttgccggggtgtgggagggggtggctttggaggtggtggccatggttgtgatggttgtggtgctcagcacttttggggtgtgagctgttccttggctggaggaggcggtggccatggagctggtgggcgtggtcatggtggctttagtggttggctctgtgaagatcaaggtggtaccacccagggtggtaccggtggttcctgctggggggtgggaagtcaccgtggagctggcagccacagttgtggtggctgtggtggtcaaccctttggggctctgagcagtgcttgaggtggaggagggggtggctgtggagctggtggcctgggttgtgatggctgtggtggtcagcactttcacagtgtgagctgttcctggggtggaggagcgcctggctgtggtgcctgtgctcctgggtgtggcagccgtggaaccggtgctcatgggtacggtaactgtggatccggtgctcgtgggagtggtaactgtggatccggtgctcgtgggagtggtagccgtggatccggtgctcgtgggagtggtagccgtggatccggtgctcgtgggagtggtagccatggatccggtgctcgtgggagtggtagccgtggatccggtgctcatgggtacggtaactgtggatccggtgctcgtgggagtggtagccatggaaccggtgctcatgggtacggtaactgtggatccagtgctcgtgggagtggtagccgtggatctggtgctcatgggagtggtagccgtggatccagtgctcgtgggagtggtagccgtggatccggtgcttgtgggagtggtagccgtggatccggtgctcgtgggagtgctggcacagtggctgtcatcacagcacaacagccgcacatgaaagttgtggcagtaccacaggggcccagactggtcacggttcctacacaccagcccaatgctcacatcacactgcaccacctgccccagggcctccaggggttggttgggctccttctcagagcggcactcaatgtcccatggatgctcgcagaaggtatggccagcagagcggatgaccccaaaggtctcaaagtccccgccatcagggtcagagctggggtagtcctcatcaaaccagtctgtccaggtgcagcgaggcacacagcccgtgctgggagacggggggccagagggcagggtcgtcctgatggtgggcccagagctggaagtccgcagggttgtgtgcacacgggcggtcaccacgggggacgttgtgggggtgctggtcacaattggactggtgggcatggatggagcctgggaggtctgctgctccctggtagggaggaggctggcggtggaaggtaaaggggcagagggactggggagggacaccctctctgtggtcttggagaagctggggccagtttgagtggtggccagagttgaggatcctgttactgctggtgacttggtgctccaggttgcaatggctgtggaggcagtcactgtggggctggtggcccccatggaggtgagtctgggtgcctgtgtggaggaggtgggcgtgggggcggctgtgtgggggcagtggctgtagtcgtcacagcagagcacacgcacattgtagttgaagcacatgttgaacctgcctgtctggtcctcattcttgcagatcagccccgtctccaggctacaggtcagcacctgcccgatctggtcgatgctcacctcggggtagttctccgcccggcactctatgctctttggtgcccagcacatcttgcccccagcagccctgatgttttcaaaagtttccatgtccccgcctgcgacccctgaggttgggaagtccacgtcaaaccactctgtccactcacacttcggttgacagcgggtagtgctctggctagtggtggtctcagtcaagcggctcagtgtcgtctctgtcctgggggtgctggtctcggcctgagaggtgaacagttcgctcgagagtgtcggcgccaggctcgtggtcagcggctgtttggagctggagctggctgtgcctgtcaggtgagctctggaggttgccattgtcgttggggctggcgtgggtggctgtgagggatgccatgtgcccgaactccccgtggtccctggcaggactgagtgtgttggaaggttggatgtggccacccctgggacagtgggttctgtggagcctgcaggaaccgtggggcctcctgtggtggctgtaccaagggtgcccgtgtatctgggggatgtcagtccttttgagagggtggggactgctgtggtgctggtcacccccaggctactcgttgactgcagcgttgagaacaggacctgggtggtggtggtggccgtctccagcgatgtggccggtggtggggttgtggctcgtcccctgcagtggtcggcgctgcagcacaggacccggatcctgtagttgtagcacatcttgaatatgccctcctgctcccagttcctgcacaccaggccgaagcggacgtcacagtgcaccttctgccctacctgagccaggggccagttggggaagctctcggcctggcactctatgtccttaggctgctcacataagtgccctcctgcagccctgatcttatcgtaggactcaacgtcccctccaagttgttcagacttggggtagtcctcatcaaaccactctgtccactgacaccggggctggcaggtggtggtacctggggccagggaggtgaccgtcgtggggcctgagctggacccagtctgtgaggtgagggctgctgttgaccggatgcttgggatcacccacagggtggtcttttcggttgctgtggtctgggtaggggtaggcacagcaggctccgtgctggcactgagggagggctgggggctggtgcctggggccagggaggggccacagggcacgtattcacagcagagaacccgcagctcatagtcgtgacagagcggggggctctgctggctgttggcgcacatcagccccctcacgcggtcacagtccacctgctggcccagctctcccagtggcatgtcgggaagctgccctgcccggcactcgatgtcggctggcacagggcacacctggtaccctctctgcctcaggttttcaaatgtctcgaagtctccgcctcccagaccaggctctgggtggtgcccgttgtaccagctggaccagcggcagacctcgcggacacacacagtggagactgggagggccgggcttgtcgtggagtgggggacccagctagtggtgaaggtgaatggcgttgtggccggagttccaggacatgccacagccttcctgacgatggtgccgttgcttccacagatggcgatcaaacaggcaccaagcccatcggtggtgttgtagatgacgtcctggtagccgtaggtcctgtcctcataggtgcaggtgcaggcctcaaggctgtgagcgcactggatgccactgggcgtgcagttacagctctggcagttctccgctgtggggactcttgcgccaacgtcatagtagtttccatccctgtcgtagcagccacactgggccacgcacttcatctggtcctcattgaagaagggctggctgggtgggcacgtcgggtagcagccttccaggccaggcaggtccaccaggcagtgcccactggggttccggcaggtttttaggcagggtgccccgcagggctggtagtgccactcacagcccccgtgtgggttgtagaagtcacagaacaaagggcaggtgtccggagtccgccaggacacacacaggcccgcgtcgtggcaagcctgggcgtaggcagccacagccgtgcagaaacactcgcagtcaccacccgagtcacaggcacacgcgtcgttcacgcaggcctcgtagtacttggtggagtcaacctgggagcggcaggcggcgaaggtaggaccgtggaggatgctgcactgcttctgggcccaggacttgcggaaggggttggccgtgcaggggtccttcggcgccagggcgtctgggcaggacggggagagcttccaactgttcccaaactccagtgcgtcccccaccacagaccggctacgcgtggcaaagtcattgatggcatggtcgtcgaagttcccgcacaggccgcagaccctgcccttgtagtcctggtgcagtcggatgaacacactggtcttccggtcccaggacacggccatcccgcgggtctcgatgaccaggaagatccccatgtagcggatcttgtagggcgggtccccgcccggccccctcgccactgccttaaaggcaccctcctggaggatcagctcgtagctctccacgaagagcttgatggccttggagcaggtggtgccggtggtcccacaggggatgttctcggtgacgatgcggaaggtcccgtgggtggcgtcgtccccacagtagtcctgggccaggatgtactcgcaactgccttcaaagctgtaacgctcgccatcaaaggtgatgaagtggccatccccgtaggccacgcaggtgcccaggcagagccggtggctgcactcccacctccggtttctgcaggtgcaggtgttgcagtcgaccctgatggtgtctccaggcttgtaggtggcctcgttgtgcacgcaggggcagtcctcctcggcgatgcagcccccactcccatctgacaccagccccgggggacagacacagccggacacgcagtgtgtgctgaaacagcccacgtccagcgtgtggcagcttcggaggcactcggccccaggggtgcccgccaagctgttgctgcagttcaggtacaccatgggggccacacaccctgtgcttttctgcagagaggctcccaggcagctcagcttcccaccctcacacgaacacacagcgccttcgtcgtgcacgacctctccaggagccagcacggtgccgtgaacgtagcaggggcactcccgggcgggcacacaggcgcccgcgtcattgaggaaggtgcccgtggggcaggtgcagccgtccacaggcacaaaggaaacgctgcaggtgacgtcggcctcactcaggcctcggcaagtcggctggcaggcgtccaccacgtaggcatagctctgggacttggggcagttctgcatgtacttggtgcagacgccgtccctccagccgctgagctgcacgcccttggcggcacaggcgtgcacataggaggacagcgcggcgcacaggcagtcctcgctccgctcacagttgcaggtgtcaaacaggcagttcgagtggaagggcttggggttgatgacggagtggcagcgcgagaaggagccggtggggtcagtcaggcgtgagcaccagtgccgggcgtagttctcattctccacactgagggagcaggggtcctcaaagctgttcctggcactggtgcaggtggcctgggccttccaggtgttggcgaaggctgcgcctgtggcctccaccaccccactgagggctgcgaagtcgtcagcctggttctggttgaagttcccacacaggccgcacatctggccctggtgggcggggtccagcctgacaaacacctgcatgagcggcaccagctgcaccagcagctgcagcccgaggcctgtgtgcactacgatgaagaagctcgagggtgtgaacagggtgatgttggctgccgacaggggcagctgcgtgtagatggagttgaggaacacgctgccgtctgcctggacccggatggccgtgtccccgccgtccaggctgagcgtcacggccttcaggcagttctcgttgtccgtcagtccacacttccgcagttcggccagcacggtgaagctgccatcagcacatttcttggacagaacgtagctgcagtcgccatgcaggtcgtaaagtttctcgtcgtaggtggtgatgtgggccccgccctgcacggagcaggtgccagggcacggcaggtcctggcactgccacagccccccagagcaggtgcaggagctgcaggtggtgttgacggaggcgcccgggctgtaggtgcggccgccgtgggtgcaggggcactgcccgaggggcaggcagccagagtgcgtgacatcatccagcaccgtgcctggggggcagaagcagccgtccacgcagtggtcttcgcagagctgtgcgcgctgggggttggagcaggtgtccacgcaaggtgagccacactcccggtgctgcatgttgacggggcaggtccgggggcagagctcagggcgcctccagttctgcggctggccccccgcgtgggcgcactggcgtgagtattccacaaaggtggcgcacgggcaggtggggcagcggcacaggtcctgggcgcaggcagccaggtacggggcagtgtccaccagtgcatggcactccgcaaaggccggccccagcagggtgtggtggcaaatgccttcctcatctgtgcagttgctggctggcaagggcagcgggtccgggcactgctccgtgggcccatccaacttctgcaggttcccaaactggagcggggtcagtctggcattgtgggcatagaactcgttgaaggctgggaggccgttgaagtccccgcacaggccacaggtctggttggcgtatttggggtccagctccagcagggcactgtcctctccgttccacaggaaggtcaggaccagccggatgctgaccttgacgtagtccccactctgctccaccaggagcccagtgcggctgtaaggcagctcctcccgctgcccgttgacgaggacagagccattggacgcctctagcaccagcccctgggccttgatgacaacacgggtgaccacaggcctggagcccaccaggcctctgcgtagctggacgttgaagtcctcataggcggcgccgcagtgctcggagaacacgtagttgcagaggccggggaagcggaagacgtcaccgtcgaaggtcttgtagtggaagtcgccccaggtgctgcacacccgcccgttgtgtgccgggttcagggggctcaggctggggaagacagtgacgggtggaacaaagctcacacgccgggtgggcgaggccatcggggcaccgccatctgtggtgtgccctgcactgccccagctcggctccgcagggccctgggtctctgcctgctgcaccaggagcacggccgccagagccaacaccagcgtccggcacgtgctcagggcacccatcctggggactggcacaggtggggggcacggacgggcagggagggaactggg

SEQ ID NO: 10 - DNA, 17773 bp, Macaca fascicularis
  source 1..17773: mol_type = genomic DNA
tactcgatgctcagcgtttatttgcaaaactgggctgggttgagcagagggggctttgggatgccgacctctctctgacctggccattgtgacctcagccccgaggtaccctgcagcaggcaggtctagcgcagcttcctggcagcagccggccttgcctggaccagcctgtctgtgccccagtggccagatgtggccagccagaatccatgctgcctggggactctggccatggcagggacacacaggcccgcacacgcttagcttgttccggggcgtcccagtgacatcaaggaggggcaaggccaaggtgggccacaggctctcccaggacatgactcctgagtggtgccctcctgaaaggggtcctgctggcccctcacccttccagggtccggttttacccacagggtgggcagcaggagcacagaggcacggggtgccacacacagaggccagggggctccgcagagcaggcccaaggttttcatgatcgggcaatgcacgtcctggctccaggtggacagagcatggggatggaggcagaacatcctcagacggcagtggcctcctgggccaggaagccgggggggtatatgggagccatgggcgcagggacacagaagggcgtgcagccacactcatccacatggttgtaggtgtgcaggacagtcgagccgtcgggacagcgcaagggcaccgtctcctcgtggacccgtctctcctggcagcaggtgcactggtgctgcatggcctgggcctctgccgagtacctggactctccggggcaggagccctcacagaaggtgatgttgacctcagtcttgcagccctggtgccacaggacggttgtgttgacgcggacctgacaggagtcctcctcacaggagtagcagcagccggttttcctgaggctccccctgcagctggacacttctgggcaggatgcaggctgtggggtcagcaaatagactccgctctcaacctcacagtggtacacggtgcagttgtccacacggctattgacccaggtttcgttcagctggactggcggaccattgggcgtgaggcaggcagtctgcacgcactccccacagcactgcccggccgctctcttgtactcaaagccctgggggcaggtagtattgtgacaggcgtcctcccaacattgcaccgttgggtcctgggtgtccccagagaggcaggtacacgtgtggcagggaagggcccctgggaagattgcaccaaccccatagaagatgccgttgtaggaacacagctgaggtctgcagaggaaggtgggacagcagtcgccctccttctgggtgctgatcaactcctgccctggcgggcacacgcgtgggctctggtggcaggtgcttgtgttgcatacacacacggtctcagggcaacaggggttgtcggcccggggcctggtcacggtcacgaagccggggtggctgcatggtgaggagggaccctgggcctcacagggcaggggcttgcattgcaccgacattgagccctcatcacacacgcaggactggcagttgctgatccactgctgcccgggagacttgggaagcccatcaggtcccacgcaggggcagtcctgcacgcagatgcccgtgtgtgtgctgaagaggatctggtccccggggcagaagcagccctccgccagcccctccagttgtgggttctggttcctggagttgcaggaggcaggctgtatggggccgcacggcttgtacactttggtgggtgggcaggtgagatcgcacaggccgccggttgcacctcgccagtcactgcacactccccgggcgcggcagagcgctgcgtaggcctccaggctctggcagggcacctcggggcggccctggcagctgtcgctgatgcaggcattgaagaatgggcccgggggcacaaggtcgtggcactcggcaaagacctggctcagcatcagatcacagagtggctgcggcgggcacgggctgggggtgggtgcactagacaccggggccgggggactggccgtggggggcgtgccggtcggggcccagcagccgtcctttctgctgtcagggaccaaccaagtcttagccatgtccttacagctggtggcagtggttccgtcccgctggagacagtcgtccctctggttgttggtgcaggtgccgcactggccctcggtgttgttgtggaagaggctgtagggcagccgggcctggaagatgtggccatcgaaggtgacgctcacacccagggcagggatgtccacgcgcatggtggtggtccccgtcacagacacaagcacgccgttcttgctgaaaccgctgctcaccagaatttggtcaaacaggatcaagtccttctccttcccatgcaccgtggtgacggtgaggacgatatccatggacttgtagtggagcctgagggcgcgggagcagctggcggcagcggcagaggccgcgcagtagtggttgtccaagtagaggctgagattcccgaggcgtgcgtggatctctctcatgaggacataggtgcagttgccctcaaaggtgtaagaggtgccgtcaaaggtggaatagtgggaactgccccacacactgcagatgcactcgcactcatagtggaagtcacagggctggctcgggtcggacactttgatgggcaggtgcttgttcacgcaggtgacattggccacgggctttgggtccagcagggcgacacggttgtcacccacgcacctggccaccgtgcagttctccagggtccaggtctcattcacctgccggggagggatggcattgtcacagccaggggcaggggagggcgagggcagcagggtggaggacgctggtggtggggaggtggggcaggtgccctggaagcggtcgaggtcacagtgctggttgcacacggcatagaattggcagccggctcggtctgtcctattgtagattacttccccaggtgagaagaactgtccaaatgccctgcagaagcagggagtagagaagtgggagctggggaagtgagtgggtctgagggtggtgaggactgaggaggacacagtggacatgctgaaggctggcaggctgctggggagcactgcgggggtgtgggtggtccccagggtggacgagctgggaaccgtggagccagtggctgtgggcctggtggccgtggtggtcagcactttgggggtgccagctgttcccacagtggaggaggggatggcagtagacctagtggccatggtcgtggttgctgtagtggtccgcactggaagggtgcctgcagtccctgggctggagaaaggggtggctgaggagctgggcactgtgggtatggtggctgtggaaccagtggcctcagtcggggtggctagagtggtcggctctgtgaggatccaggtcgtccccagagtggaggagggggttgctttggagctggtggctgtgggtgtggtggctgtgatggtcaacactttgggagagtacgttgttcctggggtggaggtcagggtggctgtggagcctgaggccatagttgtgatggctgtagtggtcggctctgtgaggaaccaagttgacgccggagtggagaagggcgtggctgtggagctggtggccacacttatggtggcagtggtggttggttctgtgtggatcctggtcgttcccagagtagaggaaggtatggccgtggagcctgtggccactgttgtgatggctgtagtggttggctctgtgaggatcccggtcgtccccagagtggaggagggcgtggccgtggacctcatagccactgttgtaatggttgtagtggtcggctctgtgaggatcccggttgtccctggagtgaaggagggtgaggctgtggagcccgtggccactgttgtgatggctgtagtggtcggctctgtgaggatcctggttgtccccggagtggaaggcgtggccgtggagcccgtggccactgtcgtgatggctgtagtggtcagctctgtgaggattgaggtcttccctgaagtggaggagggcgtggccgtggagcccgtggtcactgttgtgatggctgtagtggtcggcgctgtgaggatcgaggtcgtccctggagtggaggaggggatggccatggagccagtggccacagttatggtggcagtggtggttggctctgtgaggaatccagtcgtccccggagtggaaggtgtggctgtggagcccgtggttgtgatggctgtagtggtcagctttgtgaggactgaggtcttccctggagtggaggagggcacggccgtggacttcgtggccactgttgtgacggtagtagtggttggctctgtgaggatcccggtcgtcccctgagtggaggagggcgtggccgtggagcccgtggccactgttgtgatggctgtagtggttggctctgtgaggatcgaggtcatccctggagtggaggaggggatggccgtggagccagtggccacagttatggtggcagtggtggttggctctgtgaggatcccagtcgtccccggagtggaggagggcgtggctgtggagcccggggccactgttgtgatggctgtagtggtcagctctgtgaggatcccggtcatccccggagtggaggtgggcgtggccgtggagcccgtggccactgttgtgatggctgtagtggttggctctgtgaggatcccagtcgtccccggagtagaaggcgtggccgtggagcccgtggccactgttgtgatggctgtagtggttggctctgtgaggatcgaggtcatccctggagtggaggaggggatggccgtggagccagtggccacagttatggtggcagcggtggttggctctgtgaggatcccagtcgtccccggagtggaggagggcgtggctgtggagcccggggccactgttgtgatggctgtagtggttggctctgtgaggatcgaggtcatccctggagtggaggaggggatggccgtggagcccgtggccactgttgtgatggctgtagtggtcggctctgtgaggatcccggttgtccccggagtggaggaatgcgtggccgtggaccttgtggccactgttgtgatggttgtagtggttggctctgtgaggatcccggtcgtccccggagtggaggaaggcgtggccgtggacctcgtggccactgttgtgatggttgtagtggttggctctgtgaggatcccggtcgtccccggagtggaggtgggtgtggctgtggagcccgtggccactgttgtgatggttgtagtggttggctctgtgaggatcccggtcgtccccggagtggaggaaggcgtggccgtggacctcgtggccactgttgtgatggctgtagtggttggctctgtgaggatcccggtcgtccccggagtggaggagggcgtggctgtggagcccggggccactgttgtgatggctgtagtggtcggctctgtgaggatcctggttgtccccagagtggaaggcgtggccgtggagcccgtggccacagttatggtggcagtggtggtcggctctgtgaggatcccagtcgtccccggagtggaggtgggcgtggccgtggagcccgtggccactgttgtgatggctgtagtggttggccctgtgaggatcgaggtcatccctggagtggaggaggggatggccgtggagccagtggccacagttatggtggcagtggtggttggctctgtgaggaatccagtagtccccggagtggaggaaggcagggctgtggagcctgtggccactgttgtgatggttgtagtggtcggctctgtgaggatcccagtcgtccccggagtggaaggtgtggccgtggagcccgtggttgtgatggctgtagtggtcagctctgtgaggactgaggtcttccctggagtggaggagggcacggccgtggacttcgtggccactgttgtgacggtagtagtggttggctctgtgaggatcccggtcgtcccctgagtggaggagggcgtggccgtggagcccgtggccactgttgtgatggctgtagtggttggctctgtgaggattgaggtcatccctggagtggaggaaggcgtggccgtggacctcgtggccactgttgtgatggttgtagtggttggctctgtgaggatcccagtcgtccccggagtggaggagggcatggccgtggagcccgtggtcactgttgtgatggctgtagtggttggctctgtgaggatcccagtcgtccccggagtagaaggcgtggccgtggagcccgtggccactgttgtgatggctgtagtggttggctctgtgaggatcgaggtcatccctggagtggaggaggggatggccgtggagccagtggccacagttatggtggcagtggtggtcggccctgtgaggatcccagtcgtccccggagtggaggtgggcgtggccgtggagcccgtggccactgttgtgatggctgtagtggttggctctgtgaggattgaggtcatccctggagtggaggaaggcatggccgtggacctcgtggccactgttgtgatggttgtagtggttggctctgtgaggatcccggtcgtccccggagtggaggtgggcgtggccgtggagcccgtggccactgttgtgatggctgtagtggttggctctgtgaggatcgaggtcatccctggagtggaggaggggatggccgtggagccagtggccacagttatggtggcagtggtggttggctctgtgaggatcccagtcgtccctggagtggaggagggcgtggctgtggagcctggggccactgttgtgatggctgtagtggttggctctgtgaggatcgaggtcatccctggagtggaggaggggatggccgtggagcccgtggccactgttgtgatggctgtagtggtcggctctgtgaggatcccggttgtccccggagtggaggaaggcgtggccgtggacctcgtggccactgttgtgatggttgtagtggttggctctgtgaggatcccggtcgtccccggagtggaggtgggcgtggccgtggagcctgtggccactgttgtgatggctgtagtggttggctctgtgaggatcgaggtcatccctggagtggaggaggggatggccgtggagccagtggccacagttatggtggcagtggtggttggctctgtgaggatcccagtcgtccccggagtggaggagggcgtggccgtggagcccgtggtcactgttgtgatggctgtagtggttggctctgtgaggatcgaggtcatccctggagtggaggaggggatggccgtggagccagtggccacagttatggtggcagtggtggtcggctctgtgaggatcccagtcgtccccggagtggaggagggcgtggctgtggagcccggggccactgttgtgatggctgtagtggttggctctgtgaggatcgaggtcatccctggagtggaggaggggatggccgtggagccagtggccacagttatggtggcagtggtggtcggctctgtgaggatcccggtcgtccccggagtggaggtgggcgtggccgtggagcccgtggccactgttgtgatggctgtagtggttggctctgtgaggatcgaggtcatccctggagtggaggaggggatggccgtggagccagtggccacagttatggtggcagtggtggttggctctgtgaggattccagtcgtccccggagtggaggagggcgtggctgtggaggccggggccactgttgtgatggctgtagtggttggctctgtgaggattgaggtcatccctggagtggaggaggggatggccgtggagcccgtggccactgttgtgatggctgtagtggtcggctctgtgaggatcccggttgtccccggagtggaggaatgcgtggccgtggaccttgtggccactgttgtgatggttgtagtggttggctctgtgaggatcccggtcgtccccggagtggaggaaggcgtggccgtggacctcgtggccactgttgtgatggttgtagtggttggctctgtgaggatcccggtagtccccagagtggaggagggcatggctgtggagcccggggccactgttgtgatggctgtagtggtcggctctgtgaggatcctggttgtccccagagtggaaggcgtggccgtggagcccgtggccactgtcgtgatggctgtagtggtcagctctgtgaggattgaggtcttccctggagtggaggagggcgtggccgtggagcctgtggtcactgttgtgatggctgtagtggtcggcgctgtgaggattgaggtcatccctggagtggaggaggggatggccgtggagccagtggccacagttatggtggcagtggtggttggctctgtgaggatcccagtcgtccctggagtggaggagggcgtggctgtggagcccggggccactgttgtgatggctgtagtggtcagctctgtgaggatcccggttgtccccggagtggaggaatgcgtggccgtggaccttgtggccactgttgtgatggttgtagtggttggctctgtgaggatcccggtcgtccccagagtggaggtgggcgtggctgtggagcccggggccactgttgtgatggctgtagtggtcggctctgtgaggatcaaggtcgtccctggagtggaggagggcgtggctgtggagctggtggccacagttatggtggcagtggtggttggctctgtgacgatcctggccgtctccggagtggaggagggcgtggccgtggacctcgtggccactgttgtaatggctgtagtggtcggctctgtgaggatcgaggtcatccctggagtggaggagggcatggctgtggagctggtggtcacagttatggtggcagtgttggttggttctgtgaggctcccagtcgtcccctgagtggaggaaggcgtggccgtggagcccgtggccactgttgtgacggctgtagtggtcggctctgtgagaatccaggttgatgctggagtggaagagggcgtggccttggagccagtggccacagttatggtggcagtggtggttggctctgtgaagatccaggtggttcctggggtggaggaggggttggccgtggagccagtggcttcagtcgttgcagttgtggtgggaaacactttggtgatttgagtagtccctgaggtggaggaagggatggcagtggagcccgtgaccactgttgtgatggctgtagtggttggctctgtgaggatcgcggtggtccctggagtggaggagggcatggctgtggagcccgtggccactgttgtgatggctgtagtggttggctctgtgaggatcccggttgtctccagagtggaggagggtgtggccttggagctggtggccagggtgctggggcagcggccgtagttgcagcagaacacacggatttcgtagttgaagcacatcttgaacttccccacctgctgacggttcctgcagaccaagccgaagtccaggctgcattccacgacctggcccaactcccgcagggggacaccaggctgggcctgggcgcggcactcgaggcccaggggctgctcacagacggcccctccagccgcgcggatgttggagtaggtctccaagtccccgccagagggccccgacatggggtagctgtagtccagccagtctgaccaggcacactggggctcacagcctgtggacaccaccggggtcgtgggggccgatgtggggctgctggacagcagggtcgaggcacgggtctcgctggttgtggccgtggccgtggtcctggaggtggccgtggtgaggcccggggtggtcttccctggagaaaggggtgactcagtggttctgctgtgagtgtgagggctggacagggctggagtcgagtgtggggtggtaccggtggttcctactggggtgtgggaagtcaccgtggatggctctgtgatgtgggtggcgcccgaggtggccatggaagtccgggctgtgggtaccgtgcggggactctcagggagctgggatcgcccatgtgtggtggccatggtggacagcactgggggtgtatgggtggtccctagggcagaggagggagccactgtggtgctggtggctgcaggtgtggtggccgtggtggtcagcactggggagatgggagttgtccctggagtggaggagggggtggtggtggagcctgtggccgtgattgtcgtgcccgtggtggccagtgctgggggtgtaccagtggtctgtgggctagaggagggtgttaccatagagccagtggccacggttgtggtggtgttggtcagcactgtgggggtgtgggtggtccctgggatggaggagggggtcaccatggagccgctggttgtgggtgtggtgtttgtgccgatccgccctggaagtgtgggtgcagtccctgggctagaggagggagtggctgtgaagcccctggttgtggtagtcagcactttggtagtgtaagctgttcctgggctggaggagggggtggccatggagccagtggccccagttgtggtggccgtggtggtaagcactgtggaaatatgggcagtctctggagtggaggagggtctggctgtggacatggtggctgtgggtgtggtggtctgtgctgtgagggtccaggtggtccccagagaggaagaggggatggctgtaaagcttgtagctgtgggtgtggtggctgtgcttgtcagtgctggaagggtgggtgcagtccctggactggaggagggaatggctttggagccggtgactgtgggtgttgtggtcatggtggtcagcacatttggggtggcagcagttgccggggtgtgggagggggtggctttggaggtggtggccatggttgtgatggttgtggtgctcagcacttttggggtgtgagctgttccttggctggaggaggcggtggccatggagctggtgggcgtggtcatggtggctttagtggttggctctgtgaagatcaaggtggtaccacccagggtggtaccggtggttcggtaactgtggatccggtgctcgtgggagtggtaactgtggatccggtgctcgtgggagtggtagccgtggatccggtgctcgtgggagtggtagccgtggatccggtgctcgtgggagtggtagccatggatccggtgctcgtgggagtggtagccgtggatccggtgctcatgggtacggtaactgtggatccggtgctcgtgggagtggtagccatggaaccggtgctcatgggtacggtaactgtggatccagtgctcgtgggagtggtagccgtggatctggtgctcatgggagtggtagccgtggatccagtgctcgtgggagtggtagccgtggatccggtgcttgtgggagtggtagccatggatccggtgctcgtgggagtgctggcacagtggcagcccaatgctcacatcacactgcaccacctgccccagggcctccaggggttggttgggctccttctcagagcggcactcaatgtcccatggatgctcgcagaaggtatggccagcagagcggatgaccccaaaggtctcaaagtccccgccatcagggtcagagctggggtagtcctcatcaaaccagtctgtccaggtgcagcgaggcacacagcccgtgctgggagacggggggccagagggcagggtcgtcctgatggtgggcccagagctggaagtccgcagggttgtgtgcacacgggcggtcaccacgggggacgttgtgggggtgctggtcacaattggactggtgggcatggatggagcctgggaggtctgctgctccctggtagggaggaggctggcggtggaaggtaaaggggcagagggactggggagggacaccctctctgtggtcttggagaagctggggccagtttgagtggtggccagagttgaggatcctgttactgctggtgacttggtgctccaggttgcaatggctgtggaggcagtcactgtggggctggtggcccccatggaggtgagtctgggtgcctgtgtggaggaggtgggcgtgggggcggctgtgtgggggcagtggctgtagtcgtcacagcagagcacacgcacattgtagttgaagcacatgttgaacctgcctgtctggtcctcattcttgcagatcagccccgtctccaggctacaggtcagcacctgcccgatctggtcgatgctcacctcggggtagttctccgcccggcactctatgctctttggtgcccagcacatcttgcccccagcagccctgatgttttcaaaagtttccatgtccccgcctgcgacccctgaggttgggaagtccacgtcaaaccactctgtccactcacacttcggttgacagcgggtagtgctctggctagtggtggtctcagtcaagcggctcagtgtcgtctctgtcctgggggtgctggtctcggcctgagaggtgaacagttcgctcgagagtgtcggcgccaggctcgtggtcagcggctgtttggagctggagctggctgtgcctgtcaggtgagctctggaggttgccattgtcgttggggctggcgtgggtggctgtgagggatgccatgtgcccgaactccccgtggtccctggcaggactgagtgtgttggaaggttggatgtggccacccctgggacagtgggttctgtggagcctgcaggaaccgtggggcctcctgtggtggctgtaccaagggtgcccgtgtatctgggggatgtcagtccttttgagagggtggggactgctgtggtgctggtcacccccaggctactcgttgactgcagcgttgagaacaggacctgggtggtggtggtggtggtggccgtctccagcgatgtggccggtggtggggtcgtggctcgtcccctgcagtggtcggcgctgcagcacaggacccggatcctgtagttgtagcacatcttgaatatgccctcctgctcccagttcctgcacaccaggccgaagcggacgtcacagtgcaccttctgccctacctgagccaggggccagttggggaagctctcggcctggcactctatgtccttaggctgctcacataagtgccctcctgcagccctgatcttatcgtaggactcaacgtcccctccaagttgttcagacttggggtagtcctcatcaaaccactctgtccactgacaccggggctggcaggtggtggtacctggggccagggaggtgaccgtcgtggggcctgagctggacccagtctgtgaggtgagggctgctgttgaccggatgcttgggatcacccacagggtggtcttttcggttgctgtggtctgggtaggggtaggcacagcaggctccgtgctggcactgagggagggctgggggctggtgcctggggccagggaggggccacagggcacgtattcacagcagagaacccgcagctcatagtcgtgacagagcggggggctctgctggctgttggcgcacatcagccccctcacgcggtcacagtccacctgctggcccagctctcccagtggcatgtcgggaagctgccctgcccggcactcgatgtcggctggcacagggcacacctggtaccctctctgcctcaggttttcaaatgtctcgaagtctccgcctcccagaccaggctctgggtggtgcccgttgtaccagctggaccagtggcagacctcgcggacacacacagtggagactgggagggccgggcttgtcgtggagtgggggacccagctagtggtgaaggtgaatggcgttgtggccggagttccaggacatgccacagccttcctgatgatggtgccgttgcttccacagatggcgatcaaacaggcaccaagcccatcggtggtgttgtagatgacgtcctggtagccgtaggtcctgtcctcataggtgcaggtgcaggcctcaaggctgtgagcgcactggatgccactgggcgtgcagttacagctctggcagttctccgctgtggggactcttgcgccaacgtcatagtagtttccatccctgtcgtagcagccacactgggccacgcacttcatctggtcctcattgaagaagggctggctgggtgggcacgtcgggtagcagccttccaggccaggcaggtccaccaggcagtgcccactggggttccggcaggtttttaggcagggtgccccgcagggctggtagtgccactcacagcccccgtgtgggttgtagaagtcacagaacaaagggcaggtgtccggagtccgccaggacacacacaggcccgcgtcgtggcaagcctgggcgtaggcagccacagccgtgcagaaacactcgcagtcaccacccgagtcacaggcacacgcgtcgttcacgcaggcctcgtagtacttggtggagtcaacctgggagcggcaggcggcgaaggtaggaccgtggaggatgctgcactgcttctgggcccaggacttgcggaaggggttggccgtgcaggggtccttcggcgccagggcgtctgggcaggacggggagagcttccaactgttcccaaactccagtgcgtcccccaccacagaccggctacgcgtggcaaagtcattgatggcatggtcgtcgaagttcccgcacaggccgcagaccctgcccttgtagtcctggtgcagtcggatgaacacactggtcttccggtcccaggacacggccatcccgcgggtctcgatgaccaggaagatccccatgtagcggatcttgtagggcgggtccccgcccggccccctcaccactgccttaaaggcgccctcctggaggatcagctcgtagctctccacgaagagcttgatggccttggagcaggtggtgccggtggtcccacaggggatgttctcggtgacgatgcggaaggtcccgtgggtggcgtcgtccccacagtagtcctgggccaggatgtactcgcaactgccttcaaagctgtaacgctcgccatcaaaggtgatgaagtggccatccccgtaggccacgcaggtgcccaggcagagccggtggctgcactcccacctccggtttctgcaggtgcaggtgttgcagtcgaccctgatggtgtctccaggcttgtaggtggcctcgttgtgcacgcaggggcagtcctcctcggcgatgcagcccccactcccatctgacaccagccccgggggacagacacagccggacacgcagtgtgtgctgaaacagcccacgtccagcgtgtggcagctccggaggcactcggccccaggggtgcccgccaagctgatgctgcagttcaggtacaccatgggggccacacaccctgtgcttttctgcagagaggctcccaggcagctcagcttcccaccctcacacgaacacacagcgccttcgtcgtgcacgacctctccaggagccagcacggtgccgtgaacgtagcaggggcactcccgggcgggcacacaggcgcccgcgtcattgaggaaggtgcccgtggggcaggtgcagccgtccacaggcacaaaggaaacgctgcaggtgacgtcggcctcactcaggcctcggcaagtcggctggcaggcgtccaccacgtaggcatagctctgggacttggggcagttctgcatgtacttggtgcagacgccgtccctccagccgctgagctgcacgcccttggcggcacaggcgtgcacataggaggacagcgcggcgcacaggcagtcctcgctccgctcacagttgcaggtgtcaaacaggcagttcgagtggaagggcttggggttgatgacggagtggcagcgcgagaaggagccggtggggtcagtcaggcgtgagcaccagtgccgggcgtagttctcattctccacactgagggagcaggggtcctcaaagctgttcctggcattggcgcaggcggcctgggccttccaggtgttggcgaaggctgcgcctgtggcctccaccaccccactgagggctgcgaagtcgtcagcctggttctggttgaagttcccacacaggccgcacatctggccctggtgggcggggtccagcctgacaaacacctgcatgagcggcaccagctgcaccagcagctgcagcccgaggcctgtgtgcactacgatgaagaagctcgagggtgtgaacagggtgatgttggctgccgacaggggcagctgcgtgtagatggagttgaggaacacgctgccgtctgcctggacccggatggccgtgtccccgccgtccaggctgagcgtcacggccttcaggcagttctcgttgtccgtcagtccacacttccgcagttcggccagcacggtgaagctgccatcagcacatttcttggacagaacgtaggtgcagtcgccatgcaggtcgtaaagtttctcgtcgtaggtggtgatgtgggccccgccctgcacggagcaggtgccagggcacggcaggtcctggcactgccacagccccccagagcaggtgcaggagctgcaggtggtgttgacggaggcgcccgggctgtaggtgcggccgccgtgggtgcaggggcactgcccgaggggcaggcagccagagtgcgtgacatcatccagcaccgtgcctggggggcagaagcagccgtccacgcagtggtcttcgcagagctgtgcgcgctgggggttggagcaggtgtccacgcaaggtgagccacactcccggtgctgcatgttgacggggcaggtccgggggcagagctcagggcgcctccagttctgcggctggccccccgcgtgggcgcactggcgtgagtattccacaaaggtggcgcacgggcaggtggggcagcggcacaggtcctgggcgcaggcagccaggtacggggcagtgtccaccagtgcgtggcactccgcaaaggccgaccccagcagagtgtggtggcaaatgccttcctcatctgtgcagttgctggctggcaagggcagcgggtccgggcactgttccgtgggcccatccaacttctgcaggttcccaaactggagcggggtcagtctggcgttgtgggcatagaactcgttgaaggctgggaggccgttgaagtccccgcacaggccacaggtctggttggcgtatttggggtccagctccagcagggcactgtcctctccgttccacaggaaggtcaagaccagccggatgctgaccttgacgtagtccccgctctgctccaccaggagcccagtgcggctgtaaggcagctcctcccgctgcccgttgacgaggacagagccattggacgcctctagcaccagcccctgggccttgatgacaacacgggtgaccacaggcctggagcccaccaggcctctgcgtagctggacgttgaagtcctcataggcggcgccgcagtgctcggagaacacgtagttgcagaggccggggaagcggaagacgtcaccgtcgaaggtcttgtagtggaagtcgccccaggtgctgcacacccgcccgttgtgtgccgggttcagggggctcaggctggggaagacagtgacgggtggaacaaagctcacacgccgggtgggcgaggccatcggggcaccgccatctgtggtgtgccctgcaccgccccagctcggctccgcagggccctgggtctctgcttgctgcaccaggagcacggccgccagagccaacaccagcgtccggcacgtgctcagggcacccat

SEQ ID NO: 11 - protein, 16 aa, unidentified
  REGION 1..16: note = source = /note="Description of Unknown: RFGF peptide"
AAVALLPAVLLALLAP

SEQ ID NO: 12 - protein, 11 aa, unidentified
  REGION 1..11: note = source = /note="Description of Unknown: RFGF analogue"
AALLPVLLAAP

SEQ ID NO: 13 - protein, 13 aa, Human immunodeficiency virus
GRKKRRQRRRPPQ

SEQ ID NO: 14 - protein, 16 aa, Drosophila sp.
RQIKIWFQNRRMKWKK

SEQ ID NO: 15 - DNA, 21 bp, synthetic construct
  source 1..21: mol_type = other DNA
  modified_base 1: mod_base = OTHER; note = 2'-O-methylcytidine-3'-phosphate
  modified_base 2: mod_base = OTHER; note = 2'-O-methyluridine-3'-phosphate
  modified_base 3: mod_base = OTHER; note = 2'-O-methyluridine-3'-phosphate
  modified_base 4: mod_base = OTHER; note = adenosine-3'-phosphate
  modified_base 5: mod_base = OTHER; note = 2'-O-methylcytidine-3'-phosphate
  modified_base 6: mod_base = OTHER; note = guanosine-3'-phosphate
  modified_base 7: mod_base = OTHER; note = 2'-O-methylcytidine-3'-phosphate
  modified_base 8: mod_base = OTHER; note = 2'-O-methyluridine-3'-phosphate
  modified_base 9: mod_base = OTHER; note = guanosine-3'-phosphate
  modified_base 10: mod_base = OTHER; note = adenosine-3'-phosphate
  modified_base 11: mod_base = OTHER; note = guanosine-3'-phosphate
  modified_base 12: mod_base = OTHER; note = 2'-O-methyluridine-3'-phosphate
  modified_base 13: mod_base = OTHER; note = adenosine-3'-phosphate
  modified_base 14: mod_base = OTHER; note = 2'-O-methylcytidine-3'-phosphate
  modified_base 15: mod_base = OTHER; note = 2'-O-methyluridine-3'-phosphate
  modified_base 16: mod_base = OTHER; note = 2'-O-methyluridine-3'-phosphate
  modified_base 17: mod_base = OTHER; note = 2'-O-methylcytidine-3'-phosphate
  modified_base 18: mod_base = OTHER; note = guanosine-3'-phosphate
  modified_base 19: mod_base = OTHER; note = adenosine-3'-phosphate
  modified_base 20: mod_base = OTHER; note = 2'-deoxythymidine-3'-phosphorothioate
  misc_feature 1..19: note = RNA
  misc_feature 20..21: note = DNA
cttacgctgagtacttcgatt

SEQ ID NO: 16 - DNA, 21 bp, synthetic construct
  source 1..21: mol_type = other DNA
  modified_base 1: mod_base = OTHER; note = uridine-3'-phosphate
  modified_base 2: mod_base = OTHER; note = cytidine-3'-phosphate
  modified_base 3: mod_base = OTHER; note = guanosine-3'-phosphate
  modified_base 4: mod_base = OTHER; note = adenosine-3'-phosphate
  modified_base 5: mod_base = OTHER; note = adenosine-3'-phosphate
  modified_base 6: mod_base = OTHER; note = guanosine-3'-phosphate
  modified_base 7: mod_base = OTHER; note = 2'-O-methyluridine-3'-phosphate
  modified_base 8: mod_base = OTHER; note = adenosine-3'-phosphate
  modified_base 9: mod_base = OTHER; note = cytidine-3'-phosphate
  modified_base 10: mod_base = OTHER; note = uridine-3'-phosphate
  modified_base 11: mod_base = OTHER; note = 2'-O-methylcytidine-3'-phosphate
  modified_base 12: mod_base = OTHER; note = adenosine-3'-phosphate
  modified_base 13: mod_base = OTHER; note = guanosine-3'-phosphate
  modified_base 14: mod_base = OTHER; note = cytidine-3'-phosphate
  modified_base 15: mod_base = OTHER; note = guanosine-3'-phosphate
  modified_base 16: mod_base = OTHER; note = 2'-O-methyluridine-3'-phosphate
  modified_base 17: mod_base = OTHER; note = adenosine-3'-phosphate
  modified_base 18: mod_base = OTHER; note = adenosine-3'-phosphate
  modified_base 19: mod_base = OTHER; note = guanosine-3'-phosphate
  modified_base 20: mod_base = OTHER; note = 2'-deoxythymidine-3'-phosphorothioate
  misc_feature 1..19: note = RNA
  misc_feature 20..21: note = DNA
tcgaagtactcagcgtaagtt

SEQ ID NO: 17 - RNA, 21 nt, synthetic construct
  source 1..21: mol_type = other RNA
ttggctctggcggccatgctt

SEQ ID NO: 18 - RNA, 21 nt, synthetic construct
  source 1..21: mol_type = other RNA
ccgagctgggagaatgcaggt

SEQ ID NO: 19 - RNA, 21 nt, synthetic construct
  source 1..21: mol_type = other RNA
gcgcgtgagctttgttccact

SEQ ID NO: 20 - RNA, 21 nt, synthetic construct
  source 1..21: mol_type = other RNA
tgggcgggtgtgcagcacctt

SEQ ID NO: 21 - RNA, 21 nt, synthetic construct
  source 1..21: mol_type = other RNA
ccactacaagaccttcgacgt

SEQ ID NO: 22 - RNA, 21 nt, synthetic construct
  source 1..21: mol_type = other RNA
cctttgcaactacgtgttctt

SEQ ID NO: 23 - RNA, 21 nt, synthetic construct
  source 1..21: mol_type = other RNA
gaggacttcaacgtccagctt

SEQ ID NO: 24 - RNA, 21 nt, synthetic construct
  source 1..21: mol_type = other RNA
tcacccgtgttgtcatcaagt

SEQ ID NO: 25 - RNA, 21 nt, synthetic construct
  source 1..21: mol_type = other RNA
ggctccgtcctcatcaatggt

SEQ ID NO: 26 - RNA, 21 nt, synthetic construct
  source 1..21: mol_type = other RNA
gctgccttacagccgcactgt

SEQ ID NO: 27 - RNA, 21 nt, synthetic construct
  source 1..21: mol_type = other RNA
gactacatcaaggtcagcatt

SEQ ID NO: 28 - RNA, 21 nt, synthetic construct
  source 1..21: mol_type = other RNA
gctgacattcctgtggaacgt

SEQ ID NO: 29 - RNA, 21 nt, synthetic construct
  source 1..21: mol_type = other RNA
gagctggatcccaaatacgct

SEQ ID NO: 30 - RNA, 21 nt, synthetic construct
  source 1..21: mol_type = other RNA
cagacctgtggcctgtgtggt

SEQ ID NO: 31 - RNA, 21 nt, synthetic construct
  source 1..21: mol_type = other RNA
gccttcaacgagttctatgct

SEQ ID NO: 32 - RNA, 21 nt, synthetic construct
  source 1..21: mol_type = other RNA
gaacctgcagaagttggatgt

SEQ ID NO: 33 - RNA, 21 nt, synthetic construct
  source 1..21: mol_type = other RNA
tgcacggacgaggagggcatt

SEQ ID NO: 34 - RNA, 21 nt, synthetic construct
  source 1..21: mol_type = other RNA
gtggacagcactgcgtacctt

SEQ ID NO: 35 - RNA, 21 nt, synthetic construct
  source 1..21: mol_type = other RNA
gccacctttgtggaatactct

SEQ ID NO: 36 - RNA, 21 nt, synthetic construct
  source 1..21: mol_type = other RNA
ctggaggtgccctgagctctt

SEQ ID NO: 37 - RNA, 21 nt, synthetic construct
  source 1..21: mol_type = other RNA
ctcaacatgcagcaccaggat

SEQ ID NO: 38 - RNA, 21 nt, synthetic construct
  source 1..21: mol_type = other RNA
accctgcacggacacctgctt

SEQ ID NO: 39 - RNA, 21 nt, synthetic construct
  source 1..21: mol_type = other RNA
ggaccactgtgtggacggctt

SEQ ID NO: 40 - RNA, 21 nt, synthetic construct
  source 1..21: mol_type = other RNA
gctggatgacatcacgcactt

SEQ ID NO: 41 - RNA, 21 nt, synthetic construct
  source 1..21: mol_type = other RNA
cacctccttcaacaccacctt

SEQ ID NO: 42 - RNA, 21 nt, synthetic construct
  source 1..21: mol_type = other RNA
ctatggcagtgccaggacctt

SEQ ID NO: 43 - RNA, 21 nt, synthetic construct
  source 1..21: mol_type = other RNA
cctatgatgagaaactctact

SEQ ID NO: 44 - RNA, 21 nt, synthetic construct
  source 1..21: mol_type = other RNA
tacgttctgtccaagaaatgt

SEQ ID NO: 45 - RNA, 21 nt, synthetic construct
  source 1..21: mol_type = other RNA
gacagcagcttcaccgtgctt

SEQ ID NO: 46 - RNA, 21 nt, synthetic construct
  source 1..21: mol_type = other RNA
aacgagaactgcctgaaagct

SEQ ID NO: 47 - RNA, 21 nt, synthetic construct
  source 1..21: mol_type = other RNA
tcctcaactccatctacacgt

SEQ ID NO: 48 - RNA, 21 nt, synthetic construct
  source 1..21: mol_type = other RNA
gccaacatcaccctgttcact

SEQ ID NO: 49 - RNA, 21 nt, synthetic construct
  source 1..21: mol_type = other RNA
tcgagcttcttcatcgtggtt

SEQ ID NO: 50 - RNA, 21 nt, synthetic construct
  source 1..21: mol_type = other RNA
cagctgctggtgcagctggtt

SEQ ID NO: 51 - RNA, 21 nt, synthetic construct
  source 1..21: mol_type = other RNA
ctcatgcaggtgtttgtcagt

SEQ ID NO: 52 - RNA, 21 nt, synthetic construct
  source 1..21: mol_type = other RNA
gtgggaacttcaaccagaact

SEQ ID NO: 53 - RNA, 21 nt, synthetic construct
  source 1..21: mol_type = other RNA
tgacgacttcacggccctcat

SEQ ID NO: 54 - RNA, 21 nt, synthetic construct
  source 1..21: mol_type = other RNA
agccttcgccaacacctggat

SEQ ID NO: 55 - RNA, 21 nt, synthetic construct
  source 1..21: mol_type = other RNA
ccaggaacagctttgaggact

SEQ ID NO: 56 - RNA, 21 nt, synthetic construct
  source 1..21: mol_type = other RNA
gtggagaatgagaactacgct

SEQ ID NO: 57 - RNA, 21 nt, synthetic construct
  source 1..21: mol_type = other RNA
tcccaacagtgccttctcgct

SEQ ID NO: 58 - RNA, 21 nt, synthetic construct
  source 1..21: mol_type = other RNA
cttccactcgaactgcatgtt

SEQ ID NO: 59 - RNA, 21 nt, synthetic construct
  source 1..21: mol_type = other RNA
cacctgcaactgtgagcggat

SEQ ID NO: 60 - RNA, 21 nt, synthetic construct
  source 1..21: mol_type = other RNA
cctcctatgtgcacgcctgtt

SEQ ID NO: 61 - RNA, 21 nt, synthetic construct
  source 1..21: mol_type = other RNA
gggcgtacagctcagcgactt

SEQ ID NO: 62 - RNA, 21 nt, synthetic construct
  source 1..21: mol_type = other RNA
accaagtacatgcagaactgt

SEQ ID NO: 63 - RNA, 21 nt, synthetic construct
  source 1..21: mol_type = other RNA
aagtcccagcgctacgcctat

SEQ ID NO: 64 - RNA, 21 nt, synthetic construct
  source 1..21: mol_type = other RNA
ggatgcctgccagcccacttt

SEQ ID NO: 65 - RNA, 21 nt, synthetic construct
  source 1..21: mol_type = other RNA
tcacctgcagcgtttccttct

SEQ ID NO: 66 - RNA, 21 nt, synthetic construct
  source 1..21: mol_type = other RNA
gggcaccttcctcaatgacgt

SEQ ID NO: 67 - RNA, 21 nt, synthetic construct
  source 1..21: mol_type = other RNA
ctggctcctggagaggtggtt

SEQ ID NO: 68 - RNA, 21 nt, synthetic construct
  source 1..21: mol_type = other RNA
ccgtgtgttcatgtacgggtt

SEQ ID NO: 69 - RNA, 21 nt, synthetic construct
  source 1..21: mol_type = other RNA
cctctctgcagaaaagcacat

SEQ ID NO: 70 - RNA, 21 nt, synthetic construct
  source 1..21: mol_type = other RNA
cctggactgcagcaacagctt

SEQ ID NO: 71 - RNA, 21 nt, synthetic construct
  source 1..21: mol_type = other RNA
gctgtttcagcacacactgct

SEQ ID NO: 72 - RNA, 21 nt, synthetic construct
  source 1..21: mol_type = other RNA
ctgcattgccgaggaggactt

SEQ ID NO: 73 - RNA, 21 nt, synthetic construct
  source 1..21: mol_type = other RNA
cacctacaagcctggagagat

SEQ ID NO: 74 - RNA, 21 nt, synthetic construct
  source 1..21: mol_type = other RNA
cgactgcaacacctgcacctt

SEQ ID NO: 75 - RNA, 21 nt, synthetic construct
  source 1..21: mol_type = other RNA
gaaccggaggtgggagtgcat

SEQ ID NO: 76 - RNA, 21 nt, synthetic construct
  source 1..21: mol_type = other RNA
tggccacttcatcacctttgt

SEQ ID NO: 77 - RNA, 21 nt, synthetic construct
  source 1..21: mol_type = other RNA
cgatcgctacagctttgaagt

SEQ ID NO: 78 - RNA, 21 nt, synthetic construct
  source 1..21: mol_type = other RNA
gctgcgagtacatcttggcct

SEQ ID NO: 79 - RNA, 21 nt, synthetic construct
  source 1..21: mol_type = other RNA
tccgcatcgtcaccgagaact

SEQ ID NO: 80 - RNA, 21 nt, synthetic construct
  source 1..21: mol_type = other RNA
aaggccatcaagctcttcgtt

SEQ ID NO: 81 - RNA, 21 nt, synthetic construct
  source 1..21: mol_type = other RNA
gagctacgagctgatcctcct

SEQ ID NO: 82 - RNA, 21 nt, synthetic construct
  source 1..21: mol_type = other RNA
gacctttaaggcggtggcgat

SEQ ID NO: 83 - RNA, 21 nt, synthetic construct
  source 1..21: mol_type = other RNA
caccctacaagatacgctact

SEQ ID NO: 84 - RNA, 21 nt, synthetic construct
  source 1..21: mol_type = other RNA
atcttcctggtcatcgagact

SEQ ID NO: 85 - RNA, 21 nt, synthetic construct
  source 1..21: mol_type = other RNA
cagcgtgttcatccgactgct

SEQ ID NO: 86 - RNA, 21 nt, synthetic construct
  source 1..21: mol_type = other RNA
ggactacaagggcagggtctt

SEQ ID NO: 87 - RNA, 21 nt, synthetic construct
  source 1..21: mol_type = other RNA
gacaatgccatcaatgacttt

SEQ ID NO: 88 - RNA, 21 nt, synthetic construct
  source 1..21: mol_type = other RNA
gcactggagtttgggaacagt

SEQ ID NO: 89 - RNA, 21 nt, synthetic construct
  source 1..21: mol_type = other RNA
cagaagcagtgcagcatcctt

SEQ ID NO: 90 - RNA, 21 nt, synthetic construct
  source 1..21: mol_type = other RNA
ccaggttgactccaccaagtt

SEQ ID NO: 91 - RNA, 21 nt, synthetic construct
  source 1..21: mol_type = other RNA
cgaggcctgcgtgaacgacgt

SEQ ID NO: 92 - RNA, 21 nt, synthetic construct
  source 1..21: mol_type = other RNA
actgcgagtgtttctgcacgt

SEQ ID NO: 93 - RNA, 21 nt, synthetic construct
  source 1..21: mol_type = other RNA
tgtgtgtgtcctggcggactt

SEQ ID NO: 94 - RNA, 21 nt, synthetic construct
  source 1..21: mol_type = other RNA
tgttctgtgacttctacaact

SEQ ID NO: 95 - RNA, 21 nt, synthetic construct
  source 1..21: mol_type = other RNA
ctgtgagtggcactaccagct

SEQ ID NO: 96 - RNA, 21 nt, synthetic construct
  source 1..21: mol_type = other RNA
gctgctacccgaagtgcccat

SEQ ID NO: 97 - RNA, 21 nt, synthetic construct
  source 1..21: mol_type = other RNA
agcccttcttcaatgaggact

SEQ ID NO: 98 - RNA, 21 nt, synthetic construct
  source 1..21: mol_type = other RNA
aagtgcgtggcccagtgtggt

SEQ ID NO: 99 - RNA, 21 nt, synthetic construct
  source 1..21: mol_type = other RNA
ctacgacaaggacggaaactt

SEQ ID NO: 100 - RNA, 21 nt, synthetic construct
  source 1..21: mol_type = other RNA
atgacgtcggtgcaagggtct

SEQ ID NO: 101 - RNA, 21 nt, synthetic construct
  source 1..21: mol_type = other RNA
ccagagctgtaactgcacact

SEQ ID NO: 102 - RNA, 21 nt, synthetic construct
  source 1..21: mol_type = other RNA
cagtgcgctcacagccttgat

SEQ ID NO: 103 - RNA, 21 nt, synthetic construct
  source 1..21: mol_type = other RNA
tgcacctatgaggacaggact

SEQ ID NO: 104 - RNA, 21 nt, synthetic construct
  source 1..21: mol_type = other RNA
caggacgtcatctacaacact

SEQ ID NO: 105 - RNA, 21 nt, synthetic construct
  source 1..21: mol_type = other RNA
cgcctgcttgatcgccatctt

SEQ ID NO: 106 - RNA, 21 nt, synthetic construct
  source 1..21: mol_type = other RNA
accatcatcaggaaggctgtt

SEQ ID NO: 107 - RNA, 21 nt, synthetic construct
  source 1..21: mol_type = other RNA
ccacaacgccattcaccttct

SEQ ID NO: 108 - RNA, 21 nt, synthetic construct
  source 1..21: mol_type = other RNA
tccaccgtgtgtgtccgcgat

SEQ ID NO: 109 - RNA, 21 nt, synthetic construct
  source 1..21: mol_type = other RNA
gtccagctggtacaatgggct

SEQ ID NO: 110 - RNA, 21 nt, synthetic construct
  source 1..21: mol_type = other RNA
gactttgagacgtttgaaaat

SEQ ID NO: 111 - RNA, 21 nt, synthetic construct
  source 1..21: mol_type = other RNA
agagggtaccaggtatgccct

SEQ ID NO: 112 - RNA, 21 nt, synthetic construct
  source 1..21: mol_type = other RNA
gctggctgacatcgagtgcct

SEQ ID NO: 113 - RNA, 21 nt, synthetic construct
  source 1..21: mol_type = other RNA
cttcccgacatgccgctggat

SEQ ID NO: 114 - RNA, 21 nt, synthetic construct
  source 1..21: mol_type = other RNA
caggtggactgtgaccgcatt

SEQ ID NO: 115 - RNA, 21 nt, synthetic construct
  source 1..21: mol_type = other RNA
cgccaacagccaacagagtct

SEQ ID NO: 116 - RNA, 21 nt, synthetic construct
  source 1..21: mol_type = other RNA
ctctgtcacgactacgagctt

SEQ ID NO: 117 - RNA, 21 nt, synthetic construct
  source 1..21: mol_type = other RNA
tctctgctgcgaatacgtgct

SEQ ID NO: 118 - RNA, 21 nt, synthetic construct
  source 1..21: mol_type = other RNA
cacggagcctgctgtgcctat

SEQ ID NO: 119 - RNA, 21 nt, synthetic construct
  source 1..21: mol_type = other RNA
agaccacagcaaccgaaaagt

SEQ ID NO: 120 - RNA, 21 nt, synthetic construct
  source 1..21: mol_type = other RNA
ctcgcagactgggtccagctt

SEQ ID NO: 121 - RNA, 21 nt, synthetic construct
  source 1..21: mol_type = other RNA
gtggacagagtggtttgatgt

SEQ ID NO: 122 - RNA, 21 nt, synthetic construct
  source 1..21: mol_type = other RNA
caagtctgaacaacttggagt

SEQ ID NO: 123 - RNA, 21 nt, synthetic construct
  source 1..21: mol_type = other RNA
ttgagtcctacgataagatct

SEQ ID NO: 124 - RNA, 21 nt, synthetic construct
  source 1..21: mol_type = other RNA
gcagcctaaggacatagagtt

SEQ ID NO: 125 - RNA, 21 nt, synthetic construct
  source 1..21: mol_type = other RNA
ctggaccctggcacaggtggt

SEQ ID NO: 126 - RNA, 21 nt, synthetic construct
  source 1..21: mol_type = other RNA
gcactgtgacgtccacttcgt

SEQ ID NO: 127 - RNA, 21 nt, synthetic construct
  source 1..21: mol_type = other RNA
gtgcaggaactgggagcaggt

SEQ ID NO: 128 - RNA, 21 nt, synthetic construct
  source 1..21: mol_type = other RNA
caagatgtgctacaactacat

SEQ ID NO: 129 - RNA, 21 nt, synthetic construct
  source 1..21: mol_type = other RNA
ctgctgcagtgacgaccactt

SEQ ID NO: 130 - RNA, 21 nt, synthetic construct
  source 1..21: mol_type = other RNA
cgaccacagagctggagacgt

SEQ ID NO: 131 - RNA, 21 nt, synthetic construct
  source 1..21: mol_type = other RNA
acccaggccctgttctcaact

SEQ ID NO: 132 - RNA, 21 nt, synthetic construct
  source 1..21: mol_type = other RNA
ctctcagaaggactgacatct

SEQ ID NO: 133 - RNA, 21 nt, synthetic construct
  source 1..21: mol_type = other RNA
cagatacacaagcacccttgt

SEQ ID NO: 134 - RNA, 21 nt, synthetic construct
  source 1..21: mol_type = other RNA
gctccacagaacccactgtct

SEQ ID NO: 135 - RNA, 21 nt, synthetic construct
  source 1..21: mol_type = other RNA
cacccttccaacacgctcagt

SEQ ID NO: 136 - RNA, 21 nt, synthetic construct
  source 1..21: mol_type = other RNA
caacaacaatggcaacctcct

SEQ ID NO: 137 - RNA, 21 nt, synthetic construct
  source 1..21: mol_type = other RNA
accgcttccaaagagccgctt

SEQ ID NO: 138 - RNA, 21 nt, synthetic construct
  source 1..21: mol_type = other RNA
ccaacactcacgagcgagctt

SEQ ID NO: 139 - RNA, 21 nt, synthetic construct
  source 1..21: mol_type = other RNA
cacctctcaggccgagaccat

SEQ ID NO: 140 - RNA, 21 nt, synthetic construct
  source 1..21: mol_type = other RNA
ccaggacagagacgacaatgt

SEQ ID NO: 141 - RNA, 21 nt, synthetic construct
  source 1..21: mol_type = other RNA
cttgactaacaccaccaccat

SEQ ID NO: 142 - RNA, 21 nt, synthetic construct
  source 1..21: mol_type = other RNA
ctgtcaaccgaagtgtgagtt

SEQ ID NO: 143 - RNA, 21 nt, synthetic construct
  source 1..21: mol_type = other RNA
cgtggacttcccaacctcagt

SEQ ID NO: 144 - RNA, 21 nt, synthetic construct
  source 1..21: mol_type = other RNA
acatggaaacttttgaaaact

SEQ ID NO: 145 - RNA, 21 nt, synthetic construct
  source 1..21: mol_type = other RNA
gcaccaaagagcatagagtgt

SEQ ID NO: 146 - RNA, 21 nt, synthetic construct
  source 1..21: mol_type = other RNA
ggtaagcatcgaccaggtcgt

SEQ ID NO: 147 - RNA, 21 nt, synthetic construct
  source 1..21: mol_type = other RNA
ctgacctgcagcctggagact

SEQ ID NO: 148 - RNA, 21 nt, synthetic construct
  source 1..21: mol_type = other RNA
tgcaagaacgaagaccagact

SEQ ID NO: 149 - RNA, 21 nt, synthetic construct
  source 1..21: mol_type = other RNA
tcaacatgtgcttcaactact

SEQ ID NO: 150 - RNA, 21 nt, synthetic construct
  source 1..21: mol_type = other RNA
tgcgtgtgctttgctgtgact

SEQ ID NO: 151 - RNA, 21 nt, synthetic construct
  source 1..21: mol_type = other RNA
ctccaccctgagaacagctct

SEQ ID NO: 152 - RNA, 21 nt, synthetic construct
  source 1..21: mol_type = other RNA
tcccaaagtgctgaccaccat

SEQ ID NO: 153 - RNA, 21 nt, synthetic construct
  source 1..21: mol_type = other RNA
ttcctccctgggcaccacctt

SEQ ID NO: 154 - RNA, 21 nt, synthetic construct
  source 1..21: mol_type = other RNA
tgccaactaccacaaccacgt

SEQ ID NO: 155 - RNA, 21 nt, synthetic construct
  source 1..21: mol_type = other RNA
cacacccacaaccagaggctt

SEQ ID NO: 156 - RNA, 21 nt, synthetic construct
  source 1..21: mol_type = other RNA
gacctggatcctcacaaagct

SEQ ID NO: 157 - RNA, 21 nt, synthetic construct
  source 1..21: mol_type = other RNA
ctaccagcgttacacccatct

SEQ ID NO: 158 - RNA, 21 nt, synthetic construct
  source 1..21: mol_type = other RNA
ccacaacagccactacgactt

SEQ ID NO: 159 - RNA, 21 nt, synthetic construct
  source 1..21: mol_type = other RNA
cagctccaaagccactccctt

SEQ ID NO: 160 - RNA, 21 nt, synthetic construct
  source 1..21: mol_type = other RNA
gcccttccagcactgagaagt

SEQ ID NO: 161 - RNA, 21 nt, synthetic construct
  source 1..21: mol_type = other RNA
cctatcacagaccaccacact

SEQ ID NO: 162 - RNA, 21 nt, synthetic construct
  source 1..21: mol_type = other RNA
ggccaccatgtccacagccat

SEQ ID NO: 163 - RNA, 21 nt, synthetic construct
  source 1..21: mol_type = other RNA
cctcctccactccagagactt

SEQ ID NO: 164 - RNA, 21 nt, synthetic construct
  source 1..21: mol_type = other RNA
cacacctccacagtgcttact

SEQ ID NO: 165 - RNA, 21 nt, synthetic construct
  source 1..21: mol_type = other RNA
caggaacagctcacactacct

SEQ ID NO: 166 - RNA, 21 nt, synthetic construct
  source 1..21: mol_type = other RNA
tccagtgtggatcagcacaat

SEQ ID NO: 167 - RNA, 21 nt, synthetic construct
  source 1..21: mol_type = other RNA
ctcctgggacaactcccatct

SEQ ID NO: 168 - RNA, 21 nt, synthetic construct
  source 1..21: mol_type = other RNA
cagcaacacagtgactccctt

SEQ ID NO: 169 - RNA, 21 nt, synthetic construct
  source 1..21: mol_type = other RNA
agtgccgaacaccatggccat

SEQ ID NO: 170 - RNA, 21 nt, synthetic construct
  source 1..21: mol_type = other RNA
ggtgacttcccacaccctagt

SEQ ID NO: 171 - RNA, 21 nt, synthetic construct
  source 1..21: mol_type = other RNA
cgactccagccctttccagct

SEQ ID NO: 172 - RNA, 21 nt, synthetic construct
  source 1..21: mol_type = other RNA
tagcagcagaaccaccgagtt

SEQ ID NO: 173 - RNA, 21 nt, synthetic construct
  source 1..21: mol_type = other RNA
gctcacactaccaaagtgctt

SEQ ID NO: 174 - RNA, 21 nt, synthetic construct
  source 1..21: mol_type = other RNA
acgcttccagtgtggatcagt

SEQ ID NO: 175 - RNA, 21 nt, synthetic construct
  source 1..21: mol_type = other RNA
cacccacaaccagaggttcct

SEQ ID NO: 176 - RNA, 21 nt, synthetic construct
  source 1..21: mol_type = other RNA
cacggtggtgaccatgggctt

SEQ ID NO: 177 - RNA, 21 nt, synthetic construct
  source 1..21: mol_type = other RNA
accgccacagtgctgaccact

SEQ ID NO: 178 - RNA, 21 nt, synthetic construct
  source 1..21: mol_type = other RNA
ccactacgactgagtccactt

SEQ ID NO: 179 - RNA, 21 nt, synthetic construct
  source 1..21: mol_type = other RNA
gctccaaagccactcccttct

SEQ ID NO: 180 - RNA, 21 nt, synthetic construct
  source 1..21: mol_type = other RNA
ctccagggacaacacctatct

SEQ ID NO: 181 - RNA, 21 nt, synthetic construct
  source 1..21: mol_type = other RNA
cagcagcacagtgactccctt

SEQ ID NO: 182 - RNA, 21 nt, synthetic construct
  source 1..21: mol_type = other RNA
tgccctagggaccacccacat

SEQ ID NO: 183 - RNA, 21 nt, synthetic construct
  source 1..21: mol_type = other RNA
cacacacgggcgatccctgtt

SEQ ID NO: 184 - RNA, 21 nt, synthetic construct
  source 1..21: mol_type = other RNA
agcctggacttcggccacctt

SEQ ID NO: 185 - RNA, 21 nt, synthetic construct
  source 1..21: mol_type = other RNA
acccacatcacagagccttct

SEQ ID NO: 186 - RNA, 21 nt, synthetic construct
  source 1..21: mol_type = other RNA
caaccaccggtaccacccagt

SEQ ID NO: 187 - RNA, 21 nt, synthetic construct
  source 1..21: mol_type = other RNA
acccagcaagacccgcacctt

SEQ ID NO: 188 - RNA, 21 nt, synthetic construct
  source 1..21: mol_type = other RNA
gtggctggactacagctacct

SEQ ID NO: 189 - RNA, 21 nt, synthetic construct
  source 1..21: mol_type = other RNA
ttgacacctactccaacatct

SEQ ID NO: 190 - RNA, 21 nt, synthetic construct
  source 1..21: mol_type = other RNA
ttgggccaggtcgtggaatgt

SEQ ID NO: 191 - RNA, 21 nt, synthetic construct
  source 1..21: mol_type = other RNA
cctggactttggcctggtctt

SEQ ID NO: 192 - RNA, 21 nt, synthetic construct
  source 1..21: mol_type = other RNA
gatgtgcttcaactatgaaat

SEQ ID NO: 193 - RNA, 21 nt, synthetic construct
  source 1..21: mol_type = other RNA
tgtgttctgctgcaactacgt

SEQ ID NO: 194 - RNA, 21 nt, synthetic construct
  source 1..21: mol_type = other RNA
cagctctacggccatgccctt

SEQ ID NO: 195 - RNA, 21 nt, synthetic construct
  source 1..21: mol_type = other RNA
atcctcacagagctgaccact

SEQ ID NO: 196 - RNA, 21 nt, synthetic construct
  source 1..21: mol_type = other RNA
ccgagcactacagccaccgtt

SEQ ID NO: 197 - RNA, 21 nt, synthetic construct
  source 1..21: mol_type = other RNA
cctccacccaggcaactgctt

SEQ ID NO: 198 - RNA, 21 nt, synthetic construct
  source 1..21: mol_type = other RNA
ggccacgacacccacagtcat

SEQ ID NO: 199 - RNA, 21 nt, synthetic construct
  source 1..21: mol_type = other RNA
cacagctaccagctttacagt

SEQ ID NO: 200 - RNA, 21 nt, synthetic construct
  source 1..21: mol_type = other RNA
accacaaccacgggcttcact

SEQ ID NO: 201 - RNA, 21 nt, synthetic construct
  source 1..21: mol_type = other RNA
gaccaccaccaccacaactgt

SEQ ID NO: 202 - RNA, 21 nt, synthetic construct
  source 1..21: mol_type = other RNA
cactggttctatggcaacact

SEQ ID NO: 203 - RNA, 21 nt, synthetic construct
  source 1..21: mol_type = other RNA
cctctagcacacagaccagtt

SEQ ID NO: 204 - RNA, 21 nt, synthetic construct
  source 1..21: mol_type = other RNA
ccacggccactacgatcacgt

SEQ ID NO: 205 - RNA, 21 nt, synthetic construct
  source 1..21: mol_type = other RNA
gggaccacctggatcctcact

SEQ ID NO: 206 - RNA, 21 nt, synthetic construct
  source 1..21: mol_type = other RNA
cagccactacgaccgcaacct

SEQ ID NO: 207 - RNA, 21 nt, synthetic construct
  source 1..21: mol_type = other RNA
tcccaaagtgctgaccagcat

SEQ ID NO: 208 - RNA, 21 nt, synthetic construct
  source 1..21: mol_type = other RNA
ctccttcacccttgggaccat

SEQ ID NO: 209 - RNA, 21 nt, synthetic construct
  source 1..21: mol_type = other RNA
gggccaccagttccatgtcct

SEQ ID NO: 210 - RNA, 21 nt, synthetic construct
  source 1..21: mol_type = other RNA
cagcactacagccaccgtgat

SEQ ID NO: 211 - RNA, 21 nt, synthetic construct
  source 1..21: mol_type = other RNA
accctcaaagtgctgaccagt

SEQ ID NO: 212 - RNA, 21 nt, synthetic construct
  source 1..21: mol_type = other RNA
cacacccacagtcatcagctt

SEQ ID NO: 213 - RNA, 21 nt, synthetic construct
  source 1..21: mol_type = other RNA
cacccacagctaccagcgttt

SEQ ID NO: 214 - RNA, 21 nt, synthetic construct
  source 1..21: mol_type = other RNA
tcctctactccagagactgtt

SEQ ID NO: 215 - RNA, 21 nt, synthetic construct
  source 1..21: mol_type = other RNA
acagtgcttaccaccacgact

SEQ ID NO: 216 - RNA, 21 nt, synthetic construct
  source 1..21: mol_type = other RNA
gccactacgatcacagccact

SEQ ID NO: 217 - RNA, 21 nt, synthetic construct
  source 1..21: mol_type = other RNA
ctccagggacaactcccatct

SEQ ID NO: 218 - RNA, 21 nt, synthetic construct
  source 1..21: mol_type = other RNA
cagcagcaaccaccagtacct

SEQ ID NO: 219 - RNA, 21 nt, synthetic construct
  source 1..21: mol_type = other RNA
ctccaggaccacagccacagt

SEQ ID NO: 220 - RNA, 21 nt, synthetic construct
  source 1..21: mol_type = other RNA
cggccacgccctcctcaactt

SEQ ID NO: 221 - RNA, 21 nt, synthetic construct
  source 1..21: mol_type = other RNA
cctcacaaagctgaccacaat

SEQ ID NO: 222 - RNA, 21 nt, synthetic construct
  source 1..21: mol_type = other RNA
tcctccactccagagactgct

SEQ ID NO: 223 - RNA, 21 nt, synthetic construct
  source 1..21: mol_type = other RNA
ccacagtgcttaccaccacgt

SEQ ID NO: 224 - RNA, 21 nt, synthetic construct
  source 1..21: mol_type = other RNA
caccacggccaccacacacgt

SEQ ID NO: 225 - RNA, 21 nt, synthetic construct
  source 1..21: mol_type = other RNA
accacccagcactcgactcct

SEQ ID NO: 226 - RNA, 21 nt, synthetic construct
  source 1..21: mol_type = other RNA
cagccctcaccctagcagcat

SEQ ID NO: 227 - RNA, 21 nt, synthetic construct
  source 1..21: mol_type = other RNA
ataaccacggtggtgaccact

SEQ ID NO: 228 - RNA, 21 nt, synthetic construct
  source 1..21: mol_type = other RNA
ccagttccaaagccacttcct

SEQ ID NO: 229 - RNA, 21 nt, synthetic construct
  source 1..21: mol_type = other RNA
cccagaacagaccaccacact

SEQ ID NO: 230 - RNA, 21 nt, synthetic construct
  source 1..21: mol_type = other RNA
ctccacagtgctgaccacgat

SEQ ID NO: 231 - RNA, 21 nt, synthetic construct
  source 1..21: mol_type = other RNA
gacctggatcctcacagagct

SEQ ID NO: 232 - RNA, 21 nt, synthetic construct
  source 1..21: mol_type = other RNA
ccactccctcctccagtccat

SEQ ID NO: 233 - RNA, 21 nt, synthetic construct
  source 1..21: mol_type = other RNA
ccaccatgtccacagccacat

SEQ ID NO: 234 - RNA, 21 nt, synthetic construct
  source 1..21: mol_type = other RNA
tgccgactaccacaaccacgt

SEQ ID NO: 235 - RNA, 21 nt, synthetic construct
  source 1..21: mol_type = other RNA
cacacccacaaccagtggctt

SEQ ID NO: 236 - RNA, 21 nt, synthetic construct
  source 1..21: mol_type = other RNA
caaggactgcaaccacccttt

SEQ ID NO: 237 - RNA, 21 nt, synthetic construct
  source 1..21: mol_type = other RNA
gtgctgacaagcacagccact

SEQ ID NO: 238 - RNA, 21 nt, synthetic construct
  source 1..21: mol_type = other RNA
cacagctaccagctttacact

SEQ ID NO: 239 - RNA, 21 nt, synthetic construct
  source 1..21: mol_type = other RNA
ccaccatgtccacaatccact

SEQ ID NO: 240 - RNA, 21 nt, synthetic construct
  source 1..21: mol_type = other RNA
ccactacaactgcagccactt

SEQ ID NO: 241 - RNA, 21 nt, synthetic construct
  source 1..21: mol_type = other RNA
gaccacctggatcctcacagt

SEQ ID NO: 242 - RNA, 21 nt, synthetic construct
  source 1..21: mol_type = other RNA
ccactacgactgcatccactt

SEQ ID NO: 243 - RNA, 21 nt, synthetic construct
  source 1..21: mol_type = other RNA
ctcccaaagtgctgaccagct

SEQ ID NO: 244 - RNA, 21 nt, synthetic construct
  source 1..21: mol_type = other RNA
cacagctaccagcgttacact

SEQ ID NO: 245 - RNA, 21 nt, synthetic construct
  source 1..21: mol_type = other RNA
gggccaccagttccacgtcct

SEQ ID NO: 246 - RNA, 21 nt, synthetic construct
  source 1..21: mol_type = other RNA
tgaccacaacagccactacgt

SEQ ID NO: 247 - RNA, 21 nt, synthetic construct
  source 1..21: mol_type = other RNA
tgagcaccacggccacgacat

SEQ ID NO: 248 - RNA, 21 nt, synthetic construct
  source 1..21: mol_type = other RNA
ccagtccagggactgcaactt

SEQ ID NO: 249 - RNA, 21 nt, synthetic construct
  source 1..21: mol_type = other RNA
cagcactgagaagcacagcct

SEQ ID NO: 250 - RNA, 21 nt, synthetic construct
  source 1..21: mol_type = other RNA
caccacacccacaaccagtgt

SEQ ID NO: 251 - RNA, 21 nt, synthetic construct
  source 1..21: mol_type = other RNA
cgccagagtgctgaccaccat

SEQ ID NO: 252 - RNA, 21 nt, synthetic construct
  source 1..21: mol_type = other RNA
cagggacaacacccatcacct

SEQ ID NO: 253 - RNA, 21 nt, synthetic construct
  source 1..21: mol_type = other RNA
ctccaaagccacttcctcctt

SEQ ID NO: 254 - RNA, 21 nt, synthetic construct
  source 1..21: mol_type = other RNA
tgctgacaagcacagccacat

SEQ ID NO: 255 - RNA, 21 nt, synthetic construct
  source 1..21: mol_type = other RNA
ctccaccctgtggaccacgtt

SEQ ID NO: 256 - RNA, 21 nt, synthetic construct
  source 1..21: mol_type = other RNA
cccagcacagaccaccacact

SEQ ID NO: 257 - RNA, 21 nt, synthetic construct
  source 1..21: mol_type = other RNA
gtccaccatgtccacaatcct

SEQ ID NO: 258 - RNA, 21 nt, synthetic construct
  source 1..21: mol_type = other RNA
cctcctctactccagagacct

SEQ ID NO: 259 - RNA, 21 nt, synthetic construct
  source 1..21: mol_type = other RNA
cacacctccacagtgctgact

SEQ ID NO: 260 - RNA, 21 nt, synthetic construct
  source 1..21: mol_type = other RNA
cacagccaccatgacaagggt

SEQ ID NO: 261 - RNA, 21 nt, synthetic construct
  source 1..21: mol_type = other RNA
tccacggccacaccctcctct

SEQ ID NO: 262 - RNA, 21 nt, synthetic construct
  source 1..21: mol_type = other RNA
gacccggatcctcactgagct

SEQ ID NO: 263 - RNA, 21 nt, synthetic construct
  source 1..21: mol_type = other RNA
ccacaacagccactacaactt

SEQ ID NO: 264 - RNA, 21 nt, synthetic construct
  source 1..21: mol_type = other RNA
tggatccacggccaccctgtt

SEQ ID NO: 265 - RNA, 21 nt, synthetic construct
  source 1..21: mol_type = other RNA
cacctggatcctcacagagct

SEQ ID NO: 266 - RNA, 21 nt, synthetic construct
  source 1..21: mol_type = other RNA
tatagccaccgtgatggtgct

SEQ ID NO: 267 - RNA, 21 nt, synthetic construct
  source 1..21: mol_type = other RNA
ccactctgggaacagctcact

SEQ ID NO: 268 - RNA, 21 nt, synthetic construct
  source 1..21: mol_type = other RNA
catggccactatgcccacagt

SEQ ID NO: 269 - RNA, 21 nt, synthetic construct
  source 1..21: mol_type = other RNA
tgcctccacggttcccagctt

SEQ ID NO: 270 - RNA, 21 nt, synthetic construct
  source 1..21: mol_type = other RNA
cctgccaaccttcagcgtgtt

SEQ ID NO: 271 - RNA, 21 nt, synthetic construct
  source 1..21: mol_type = other RNA
gtgtcctcctcagtcctcact

SEQ ID NO: 272 - RNA, 21 nt, synthetic construct
  source 1..21: mol_type = other RNA
cagctcccacttctctactct

SEQ ID NO: 273 - RNA, 21 nt, synthetic construct
  source 1..21: mol_type = other RNA
gcatttggacagtttttctct

SEQ ID NO: 274 - RNA, 21 nt, synthetic construct
  source 1..21: mol_type = other RNA
gaagtcatctacaataagact

SEQ ID NO: 275 - RNA, 21 nt, synthetic construct
  source 1..21: mol_type = other RNA
ctgccatttctacgcagtgtt

SEQ ID NO: 276 - RNA, 21 nt, synthetic construct
  source 1..21: mol_type = other RNA
cactgtgacattgaccgcttt

SEQ ID NO: 277 - RNA, 21 nt, synthetic construct
  source 1..21: mol_type = other RNA
tgtgacaatgccatccctctt

SEQ ID NO: 278 - RNA, 21 nt, synthetic construct
  source 1..21: mol_type = other RNA
accctggagaactgcacggtt

SEQ ID NO: 279 - RNA, 21 nt, synthetic construct
  source 1..21: mol_type = other RNA
gtgggtgacaaccgtgtcgtt

SEQ ID NO: 280 - RNA, 21 nt, synthetic construct
  source 1..21: mol_type = other RNA
gacccaaagcctgtggccaat

SEQ ID NO: 281 - RNA, 21 nt, synthetic construct
  source 1..21: mol_type = other RNA
ctgcgtgaacaagcacctgct

SEQ ID NO: 282 - RNA, 21 nt, synthetic construct
  source 1..21: mol_type = other RNA
tcaaagtgtcggacccgagct

SEQ ID NO: 283 - RNA, 21 nt, synthetic construct
  source 1..21: mol_type = other RNA
ctgtgacttccactatgagtt

SEQ ID NO: 284 - RNA, 21 nt, synthetic construct
  source 1..21: mol_type = other RNA
agtgcatctgcagcatgtggt

SEQ ID NO: 285 - RNA, 21 nt, synthetic construct
  source 1..21: mol_type = other RNA
cccactattccacctttgact

SEQ ID NO: 286 - RNA, 21 nt, synthetic construct
  source 1..21: mol_type = other RNA
acctatgtcctcatgagagat

SEQ ID NO: 287 - RNA, 21 nt, synthetic construct
  source 1..21: mol_type = other RNA
cacgctttgggaatctcagct

SEQ ID NO: 288 - RNA, 21 nt, synthetic construct
  source 1..21: mol_type = other RNA
ctggacaaccactactgcact

SEQ ID NO: 289 - RNA, 21 nt, synthetic construct
  source 1..21: mol_type = other RNA
cctcagcatccactacaagtt

SEQ ID NO: 290 - RNA, 21 nt, synthetic construct
  source 1..21: mol_type = other RNA
gtcctcactgtcaccatggtt

SEQ ID NO: 291 - RNA, 21 nt, synthetic construct
  source 1..21: mol_type = other RNA
atcctgtttgaccaaattcct

SEQ ID NO: 292 - RNA, 21 nt, synthetic construct
  source 1..21: mol_type = other RNA
agcggtttcagcaagaacggt

SEQ ID NO: 293 - RNA, 21 nt, synthetic construct
  source 1..21: mol_type = other RNA
atgcgtgtggacattcctgct

SEQ ID NO: 294 - RNA, 21 nt, synthetic construct
  source 1..21: mol_type = other RNA
gtgagcgtcaccttcaatggt

SEQ ID NO: 295 - RNA, 21 nt, synthetic construct
  source 1..21: mol_type = other RNA
agcctcttccacaacaacact

SEQ ID NO: 296 - RNA, 21 nt, synthetic construct
  source 1..21: mol_type = other RNA
cacctgcaccaacaaccagat

SEQ ID NO: 297 - RNA, 21 nt, synthetic construct
  source 1..21: mol_type = other RNA
tgtctccagcgggacggaact

SEQ ID NO: 298 - RNA, 21 nt, synthetic construct
  source 1..21: mol_type = other RNA
cgccagttgcaaggacatggt

SEQ ID NO: 299 - RNA, 21 nt, synthetic construct
  source 1..21: mol_type = other RNA
cgacagcagaaaggatggctt

SEQ ID NO: 300 - RNA, 21 nt, synthetic construct
  source 1..21: mol_type = other RNA
ccgctctgtgatctgatgctt

SEQ ID NO: 301 - RNA, 21 nt, synthetic construct
  source 1..21: mol_type = other RNA
caggtctttgctgagtgccat

SEQ ID NO: 302 - RNA, 21 nt, synthetic construct
  source 1..21: mol_type = other RNA
cgcctgcatcagcgaccactt

SEQ ID NO: 303 - RNA, 21 nt, synthetic construct
  source 1..21: mol_type = other RNA
gaggcttacgcagagctctgt

SEQ ID NO: 304 - RNA, 21 nt, synthetic construct
  source 1..21: mol_type = other RNA
agtgtgcagtgactggcgagt

SEQ ID NO: 305 - RNA, 21 nt, synthetic construct
  source 1..21: mol_type = other RNA
caccaaagtgtacaagccatt

SEQ ID NO: 306 - RNA, 21 nt, synthetic construct
  source 1..21: mol_type = other RNA
ctgcaactctaggaaccagat

SEQ ID NO: 307 - RNA, 21 nt, synthetic construct
  source 1..21: mol_type = other RNA
gaccagatcctcttcaacgct

SEQ ID NO: 308 - RNA, 21 nt, synthetic construct
  source 1..21: mol_type = other RNA
catgggcatctgcgtgcaggt

SEQ ID NO: 309 - RNA, 21 nt, synthetic construct
  source 1..21: mol_type = other RNA
cgatgggtttcctaaatttct

SEQ ID NO: 310 - RNA, 21 nt, synthetic construct
  source 1..21: mol_type = other RNA
ggtcagcaactgccagtcctt

SEQ ID NO: 311 - RNA, 21 nt, synthetic construct
  source 1..21: mol_type = other RNA
gagggttcagtgtcggtgcat

SEQ ID NO: 312 - RNA, 21 nt, synthetic construct
  source 1..21: mol_type = other RNA
ccggcttcgtaaccgtgacct

SEQ ID NO: 313 - RNA, 21 nt, synthetic construct
  source 1..21: mol_type = other RNA
cgtgtgcaacacaaccacctt

SEQ ID NO: 314 - RNA, 21 nt, synthetic construct
  source 1..21: mol_type = other RNA
ggcaggagtccatctgcacct

SEQ ID NO: 315 - RNA, 21 nt, synthetic construct
  source 1..21: mol_type = other RNA
ctgctgtcccaccttccgctt

SEQ ID NO: 316 - RNA, 21 nt, synthetic construct
  source 1..21: mol_type = other RNA
tcagctgtgttcgtacaatgt

SEQ ID NO: 317 - RNA, 21 nt, synthetic construct
  source 1..21: mol_type = other RNA
ttggtgcaaccttcccaggct

SEQ ID NO: 318 - RNA, 21 nt, synthetic construct
  source 1..21: mol_type = other RNA
tccctgccacatgtgtacctt

SEQ ID NO: 319 - RNA, 21 nt, synthetic construct
  source 1..21: mol_type = other RNA
acccaacggtgcaatgtcagt

SEQ ID NO: 320 - RNA, 21 nt, synthetic construct
  source 1..21: mol_type = other RNA
cctgcaacaatactacctgtt

SEQ ID NO: 321 - RNA, 21 nt, synthetic construct
  source 1..21: mol_type = other RNA
agggctttgagtacaagagat

SEQ ID NO: 322 - RNA, 21 nt, synthetic construct
  source 1..21: mol_type = other RNA
agtccagctgaatgaaacctt

SEQ ID NO: 323 - RNA, 21 nt, synthetic construct
  source 1..21: mol_type = other RNA
caacagccatgtggacaactt

SEQ ID NO: 324 - RNA, 21 nt, synthetic construct
  source 1..21: mol_type = other RNA
ccgtgtacctctgtgaggctt

SEQ ID NO: 325 - RNA, 21 nt, synthetic construct
  source 1..21: mol_type = other RNA
ggtggagtccatttgctgact

SEQ ID NO: 326 - RNA, 21 nt, synthetic construct
  source 1..21: mol_type = other RNA
ctgcccagatgtgtccagctt

SEQ ID NO: 327 - RNA, 21 nt, synthetic construct
  source 1..21: mol_type = other RNA
gctgctactcctgtgaggagt

SEQ ID NO: 328 - RNA, 21 nt, synthetic construct
  source 1..21: mol_type = other RNA
cctgtcaagtccgcatcaact

SEQ ID NO: 329 - RNA, 21 nt, synthetic construct
  source 1..21: mol_type = other RNA
catcctgtggcaccagggctt

SEQ ID NO: 330 - RNA, 21 nt, synthetic construct
  source 1..21: mol_type = other RNA
cgaggtcaacatcaccttctt

SEQ ID NO: 331 - RNA, 21 nt, synthetic construct
  source 1..21: mol_type = other RNA
cgtccaagtactcagcagagt

SEQ ID NO: 332 - RNA, 21 nt, synthetic construct
  source 1..21: mol_type = other RNA
catgcagcaccagtgcacctt

SEQ ID NO: 333 - RNA, 21 nt, synthetic construct
  source 1..21: mol_type = other RNA
cttgcactgtcctaacggctt

SEQ ID NO: 334 - RNA, 21 nt, synthetic construct
  source 1..21: mol_type = other RNA
ctgcacacctacacccacgtt

SEQ ID NO: 335 - RNA, 21 nt, synthetic construct
  source 1..21: mol_type = other RNA
gcacgcccttctgtgtccctt

SEQ ID NO: 336 - RNA, 21 nt, synthetic construct
  source 1..21: mol_type = other RNA
actgctgtctgagaacgttct

SEQ ID NO: 337 - RNA, 21 nt, synthetic construct
  source 1..21: mol_type = other RNA
catgctctgtccacctggagt

SEQ ID NO: 338 - RNA, 21 nt, synthetic construct
  source 1..21: mol_type = other RNA
gcattgtctgatcatgaaaat

SEQ ID NO: 339 - RNA, 21 nt, synthetic construct
  source 1..21: mol_type = other RNA
ggcgccactcaggagtcctat

SEQ ID NO: 340 - RNA, 21 nt, synthetic construct
  source 1..21: mol_type = other RNA
ctccctgatgtcactgggact

SEQ ID NO: 341 - RNA, 21 nt, synthetic construct
  source 1..21: mol_type = other RNA
ctggaacaaactaagcatgtt

SEQ ID NO: 342 - RNA, 21 nt, synthetic construct
  source 1..21: mol_type = other RNA
cacggattccagctggccact

SEQ ID NO: 343 - RNA, 21 nt, synthetic construct
  source 1..21: mol_type = other RNA
gacaggctggtccaggcaagt

SEQ ID NO: 344 - RNA, 21 nt, synthetic construct
  source 1..21: mol_type = other RNA
ctgccaggaagctgcgacagt

SEQ ID NO: 345 - RNA, 21 nt, synthetic construct
  source 1..21: mol_type = other RNA
ctgctgcagggtaactcaggt

SEQ ID NO: 346 - RNA, 21 nt, synthetic construct
  source 1..21: mol_type = other RNA
gcaacggccaggtcagagagt

SEQ ID NO: 347 - RNA, 21 nt, synthetic construct
  source 1..21: mol_type = other RNA
cccagttttgcaaataaacct

SEQ ID NO: 348 - RNA, 23 nt, synthetic construct
  source 1..23: mol_type = other RNA
aagcatggccgccagagccaaca

SEQ ID NO: 349 - RNA, 23 nt, synthetic construct
  source 1..23: mol_type = other RNA
acctgcattctcccagctcggct

SEQ ID NO: 350 - RNA, 23 nt, synthetic construct
  source 1..23: mol_type = other RNA
agtggaacaaagctcacgcgccg

SEQ ID NO: 351 - RNA, 23 nt, synthetic construct
  source 1..23: mol_type = other RNA
aaggtgctgcacacccgcccatt

SEQ ID NO: 352 - RNA, 23 nt, synthetic construct
  source 1..23: mol_type = other RNA
acgtcgaaggtcttgtagtggaa

SEQ ID NO: 353 - RNA, 23 nt, synthetic construct
  source 1..23: mol_type = other RNA
aagaacacgtagttgcaaaggcc

SEQ ID NO: 354 - RNA, 23 nt, synthetic construct
  source 1..23: mol_type = other RNA
aagctggacgttgaagtcctcgt

SEQ ID NO: 355 - RNA, 23 nt, synthetic construct
  source 1..23: mol_type = other RNA
acttgatgacaacacgggtgacc

SEQ ID NO: 356 - RNA, 23 nt, synthetic construct
  source 1..23: mol_type = other RNA
accattgatgaggacggagccgt

SEQ ID NO: 357 - RNA, 23 nt, synthetic construct
  source 1..23: mol_type = other RNA
acagtgcggctgtaaggcagctc

SEQ ID NO: 358 - RNA, 23 nt, synthetic construct
  source 1..23: mol_type = other RNA
aatgctgaccttgatgtagtccc

SEQ ID NO: 359 - RNA, 23 nt, synthetic construct
  source 1..23: mol_type = other RNA
acgttccacaggaatgtcagcac

SEQ ID NO: 360 - RNA, 23 nt, synthetic construct
  source 1..23: mol_type = other RNA
agcgtatttgggatccagctcca

SEQ ID NO: 361 - RNA, 23 nt, synthetic construct
  source 1..23: mol_type = other RNA
accacacaggccacaggtctggt

SEQ ID NO: 362 - RNA, 23 nt, synthetic construct
  source 1..23: mol_type = other RNA
agcatagaactcgttgaaggccg

SEQ ID NO: 363 - RNA, 23 nt, synthetic construct
  source 1..23: mol_type = other RNA
acatccaacttctgcaggttccc

SEQ ID NO: 364 - RNA, 23 nt, synthetic construct
  source 1..23: mol_type = other RNA
aatgccctcctcgtccgtgcagt

SEQ ID NO: 365 - RNA, 23 nt, synthetic construct
  source 1..23: mol_type = other RNA
aaggtacgcagtgctgtccacca

SEQ ID NO: 366 - RNA, 23 nt, synthetic construct
  source 1..23: mol_type = other RNA
agagtattccacaaaggtggcac

SEQ ID NO: 367 - RNA, 23 nt, synthetic construct
  source 1..23: mol_type = other RNA
aagagctcagggcacctccagtt

SEQ ID NO: 368 - RNA, 23 nt, synthetic construct
  source 1..23: mol_type = other RNA
atcctggtgctgcatgttgaggg

SEQ ID NO: 369 - RNA, 23 nt, synthetic construct
  source 1..23: mol_type = other RNA
aagcaggtgtccgtgcagggtga

SEQ ID NO: 370 - RNA, 23 nt, synthetic construct
  source 1..23: mol_type = other RNA
aagccgtccacacagtggtcctc

SEQ ID NO: 371 - RNA, 23 nt, synthetic construct
  source 1..23: mol_type = other RNA
aagtgcgtgatgtcatccagcac

SEQ ID NO: 372 - RNA, 23 nt, synthetic construct
  source 1..23: mol_type = other RNA
aaggtggtgttgaaggaggtgcc

SEQ ID NO: 373 - RNA, 23 nt, synthetic construct
  source 1..23: mol_type = other RNA
aaggtcctggcactgccatagcc

SEQ ID NO: 374 - RNA, 23 nt, synthetic construct
  source 1..23: mol_type = other RNA
agtagagtttctcatcataggtg

SEQ ID NO: 375 - RNA, 23 nt, synthetic construct
  source 1..23: mol_type = other RNA
acatttcttggacagaacgtagc

SEQ ID NO: 376 - RNA, 23 nt, synthetic construct
  source 1..23: mol_type = other RNA
aagcacggtgaagctgctgtcgg

SEQ ID NO: 377 - RNA, 23 nt, synthetic construct
  source 1..23: mol_type = other RNA
agctttcaggcagttctcgttgt

SEQ ID NO: 378 - RNA, 23 nt, synthetic construct
  source 1..23: mol_type = other RNA
acgtgtagatggagttgaggaac

SEQ ID NO: 379 - RNA, 23 nt, synthetic construct
  source 1..23: mol_type = other RNA
agtgaacagggtgatgttggctg

SEQ ID NO: 380 - RNA, 23 nt, synthetic construct
  source 1..23: mol_type = other RNA
aaccacgatgaagaagctcgagg

SEQ ID NO: 381 - RNA, 23 nt, synthetic construct
  source 1..23: mol_type = other RNA
aaccagctgcaccagcagctgca

SEQ ID NO: 382 - RNA, 23 nt, synthetic construct
  source 1..23: mol_type = other RNA
actgacaaacacctgcatgagtg

SEQ ID NO: 383 - RNA, 23 nt, synthetic construct
  source 1..23: mol_type = other RNA
agttctggttgaagttcccacac

SEQ ID NO: 384 - RNA, 23 nt, synthetic construct
  source 1..23: mol_type = other RNA
atgagggccgtgaagtcgtcagc

SEQ ID NO: 385 - RNA, 23 nt, synthetic construct
  source 1..23: mol_type = other RNA
atccaggtgttggcgaaggctgc

SEQ ID NO: 386 - RNA, 23 nt, synthetic construct
  source 1..23: mol_type = other RNA
agtcctcaaagctgttcctggca

SEQ ID NO: 387 - RNA, 23 nt, synthetic construct
  source 1..23: mol_type = other RNA
agcgtagttctcattctccacac

SEQ ID NO: 388 - RNA, 23 nt, synthetic construct
  source 1..23: mol_type = other RNA
agcgagaaggcactgttgggatc

SEQ ID NO: 389 - RNA, 23 nt, synthetic construct
  source 1..23: mol_type = other RNA
aacatgcagttcgagtggaaggg

SEQ ID NO: 390 - RNA, 23 nt, synthetic construct
  source 1..23: mol_type = other RNA
atccgctcacagttgcaggtgtc

SEQ ID NO: 391 - RNA, 23 nt, synthetic construct
  source 1..23: mol_type = other RNA
aacaggcgtgcacataggaggac

SEQ ID NO: 392 - RNA, 23 nt, synthetic construct
  source 1..23: mol_type = other RNA
aagtcgctgagctgtacgccctt

SEQ ID NO: 393 - RNA, 23 nt, synthetic construct
  source 1..23: mol_type = other RNA
acagttctgcatgtacttggtgc

SEQ ID NO: 394 - RNA, 23 nt, synthetic construct
  source 1..23: mol_type = other RNA
ataggcgtagcgctgggacttgg

SEQ ID NO: 395 - RNA, 23 nt, synthetic construct
  source 1..23: mol_type = other RNA
aaagtgggctggcaggcatccac

SEQ ID NO: 396 - RNA, 23 nt, synthetic construct
  source 1..23: mol_type = other RNA
agaaggaaacgctgcaggtgacg

SEQ ID NO: 397 - RNA, 23 nt, synthetic construct
  source 1..23: mol_type = other RNA
acgtcattgaggaaggtgcccgc

SEQ ID NO: 398 - RNA, 23 nt, synthetic construct
  source 1..23: mol_type = other RNA
aaccacctctccaggagccagca

SEQ ID NO: 399 - RNA, 23 nt, synthetic construct
  source 1..23: mol_type = other RNA
aacccgtacatgaacacacggcg

SEQ ID NO: 400 - RNA, 23 nt, synthetic construct
  source 1..23: mol_type = other RNA
atgtgcttttctgcagagaggct

SEQ ID NO: 401 - RNA, 23 nt, synthetic construct
  source 1..23: mol_type = other RNA
aagctgttgctgcagtccaggta

SEQ ID NO: 402 - RNA, 23 nt, synthetic construct
  source 1..23: mol_type = other RNA
agcagtgtgtgctgaaacagccc

SEQ ID NO: 403 - RNA, 23 nt, synthetic construct
  source 1..23: mol_type = other RNA
aagtcctcctcggcaatgcagcc

SEQ ID NO: 404 - RNA, 23 nt, synthetic construct
  source 1..23: mol_type = other RNA
atctctccaggcttgtaggtggc

SEQ ID NO: 405 - RNA, 23 nt, synthetic construct
  source 1..23: mol_type = other RNA
aaggtgcaggtgttgcagtcgac

SEQ ID NO: 406 - RNA, 23 nt, synthetic construct
  source 1..23: mol_type = other RNA
atgcactcccacctccggttcct

SEQ ID NO: 407 - RNA, 23 nt, synthetic construct
  source 1..23: mol_type = other RNA
acaaaggtgatgaagtggccatc

SEQ ID NO: 408 - RNA, 23 nt, synthetic construct
  source 1..23: mol_type = other RNA
acttcaaagctgtagcgatcgcc

SEQ ID NO: 409 - RNA, 23 nt, synthetic construct
  source 1..23: mol_type = other RNA
aggccaagatgtactcgcagctg

SEQ ID NO: 410 - RNA, 23 nt, synthetic construct
  source 1..23: mol_type = other RNA
agttctcggtgacgatgcggaag

SEQ ID NO: 411 - RNA, 23 nt, synthetic construct
  source 1..23: mol_type = other RNA
aacgaagagcttgatggccttgg

SEQ ID NO: 412 - RNA, 23 nt, synthetic construct
  source 1..23: mol_type = other RNA
aggaggatcagctcgtagctctc

SEQ ID NO: 413 - RNA, 23 nt, synthetic construct
  source 1..23: mol_type = other RNA
atcgccaccgccttaaaggtccc

SEQ ID NO: 414 - RNA, 23 nt, synthetic construct
  source 1..23: mol_type = other RNA
agtagcgtatcttgtagggtggg

SEQ ID NO: 415 - RNA, 23 nt, synthetic construct
  source 1..23: mol_type = other RNA
agtctcgatgaccaggaagatcc

SEQ ID NO: 416 - RNA, 23 nt, synthetic construct
  source 1..23: mol_type = other RNA
agcagtcggatgaacacgctggt

SEQ ID NO: 417 - RNA, 23 nt, synthetic construct
  source 1..23: mol_type = other RNA
aagaccctgcccttgtagtcctg

SEQ ID NO: 418 - RNA, 23 nt, synthetic construct
  source 1..23: mol_type = other RNA
aaagtcattgatggcattgtcgt

SEQ ID NO: 419 - RNA, 23 nt, synthetic construct
  source 1..23: mol_type = other RNA
actgttcccaaactccagtgcgt

SEQ ID NO: 420 - RNA, 23 nt, synthetic construct
  source 1..23: mol_type = other RNA
aaggatgctgcactgcttctggg

SEQ ID NO: 421 - RNA, 23 nt, synthetic construct
  source 1..23: mol_type = other RNA
aacttggtggagtcaacctggga

SEQ ID NO: 422 - RNA, 23 nt, synthetic construct
  source 1..23: mol_type = other RNA
acgtcgttcacgcaggcctcgta

SEQ ID NO: 423 - RNA, 23 nt, synthetic construct
  source 1..23: mol_type = other RNA
acgtgcagaaacactcgcagtcg

SEQ ID NO: 424 - RNA, 23 nt, synthetic construct
  source 1..23: mol_type = other RNA
aagtccgccaggacacacacagg

SEQ ID NO: 425 - RNA, 23 nt, synthetic construct
  source 1..23: mol_type = other RNA
agttgtagaagtcacagaacaag

SEQ ID NO: 426 - RNA, 23 nt, synthetic construct
  source 1..23: mol_type = other RNA
agctggtagtgccactcacagcc

SEQ ID NO: 427 - RNA, 23 nt, synthetic construct
  source 1..23: mol_type = other RNA
atgggcacttcgggtagcagcct

SEQ ID NO: 428 - RNA, 23 nt, synthetic construct
  source 1..23: mol_type = other RNA
agtcctcattgaagaagggctgg

SEQ ID NO: 429 - RNA, 23 nt, synthetic construct
  source 1..23: mol_type = other RNA
accacactgggccacgcacttca

SEQ ID NO: 430 - RNA, 23 nt, synthetic construct
  source 1..23: mol_type = other RNA
aagtttccgtccttgtcgtagca

SEQ ID NO: 431 - RNA, 23 nt, synthetic construct
  source 1..23: mol_type = other RNA
agacccttgcaccgacgtcatag

SEQ ID NO: 432 - RNA, 23 nt, synthetic construct
  source 1..23: mol_type = other RNA
agtgtgcagttacagctctggca

SEQ ID NO: 433 - RNA, 23 nt, synthetic construct
  source 1..23: mol_type = other RNA
atcaaggctgtgagcgcactgga

SEQ ID NO: 434 - RNA, 23 nt, synthetic construct
  source 1..23: mol_type = other RNA
agtcctgtcctcataggtgcagg

SEQ ID NO: 435 - RNA, 23 nt, synthetic construct
  source 1..23: mol_type = other RNA
agtgttgtagatgacgtcctggt

SEQ ID NO: 436 - RNA, 23 nt, synthetic construct
  source 1..23: mol_type = other RNA
aagatggcgatcaagcaggcgcc

SEQ ID NO: 437 - RNA, 23 nt, synthetic construct
  source 1..23: mol_type = other RNA
aacagccttcctgatgatggtgc

SEQ ID NO: 438 - RNA, 23 nt, synthetic construct
  source 1..23: mol_type = other RNA
agaaggtgaatggcgttgtggct

SEQ ID NO: 439 - RNA, 23 nt, synthetic construct
  source 1..23: mol_type = other RNA
atcgcggacacacacggtggaga

SEQ ID NO: 440 - RNA, 23 nt, synthetic construct
  source 1..23: mol_type = other RNA
agcccattgtaccagctggacca

SEQ ID NO: 441 - RNA, 23 nt, synthetic construct
  source 1..23: mol_type = other RNA
attttcaaacgtctcaaagtctc

SEQ ID NO: 442 - RNA, 23 nt, synthetic construct
  source 1..23: mol_type = other RNA
agggcatacctggtaccctctct

SEQ ID NO: 443 - RNA, 23 nt, synthetic construct
  source 1..23: mol_type = other RNA
aggcactcgatgtcagccagcac

SEQ ID NO: 444 - RNA, 23 nt, synthetic construct
  source 1..23: mol_type = other RNA
atccagcggcatgtcgggaagct

SEQ ID NO: 445 - RNA, 23 nt, synthetic construct
  source 1..23: mol_type = other RNA
aatgcggtcacagtccacctgct

SEQ ID NO: 446 - RNA, 23 nt, synthetic construct
  source 1..23: mol_type = other RNA
agactctgttggctgttggcgca

SEQ ID NO: 447 - RNA, 23 nt, synthetic construct
  source 1..23: mol_type = other RNA
aagctcgtagtcgtgacagagcg

SEQ ID NO: 448 - RNA, 23 nt, synthetic construct
  source 1..23: mol_type = other RNA
agcacgtattcgcagcagagaac

SEQ ID NO: 449 - RNA, 23 nt, synthetic construct
  source 1..23: mol_type = other RNA
ataggcacagcaggctccgtgct

SEQ ID NO: 450 - RNA, 23 nt, synthetic construct
  source 1..23: mol_type = other RNA
acttttcggttgctgtggtctgg

SEQ ID NO: 451 - RNA, 23 nt, synthetic construct
  source 1..23: mol_type = other RNA
aagctggacccagtctgcgaggt

SEQ ID NO: 452 - RNA, 23 nt, synthetic construct
  source 1..23: mol_type = other RNA
acatcaaaccactctgtccactg

SEQ ID NO: 453 - RNA, 23 nt, synthetic construct
  source 1..23: mol_type = other RNA
actccaagttgttcagacttggg

SEQ ID NO: 454 - RNA, 23 nt, synthetic construct
  source 1..23: mol_type = other RNA
agatcttatcgtaggactcaacg

SEQ ID NO: 455 - RNA, 23 nt, synthetic construct
  source 1..23: mol_type = other RNA
aactctatgtccttaggctgctg

SEQ ID NO: 456 - RNA, 23 nt, synthetic construct
  source 1..23: mol_type = other RNA
accacctgtgccagggtccagtt

SEQ ID NO: 457 - RNA, 23 nt, synthetic construct
  source 1..23: mol_type = other RNA
acgaagtggacgtcacagtgcac

SEQ ID NO: 458 - RNA, 23 nt, synthetic construct
  source 1..23: mol_type = other RNA
acctgctcccagttcctgcacac

SEQ ID NO: 459 - RNA, 23 nt, synthetic construct
  source 1..23: mol_type = other RNA
atgtagttgtagcacatcttgaa

SEQ ID NO: 460 - RNA, 23 nt, synthetic construct
  source 1..23: mol_type = other RNA
aagtggtcgtcactgcagcagag

SEQ ID NO: 461 - RNA, 23 nt, synthetic construct
  source 1..23: mol_type = other RNA
acgtctccagctctgtggtcggt

SEQ ID NO: 462 - RNA, 23 nt, synthetic construct
  source 1..23: mol_type = other RNA
agttgagaacagggcctgggtgg

SEQ ID NO: 463 - RNA, 23 nt, synthetic construct
  source 1..23: mol_type = other RNA
agatgtcagtccttctgagaggg

SEQ ID NO: 464 - RNA, 23 nt, synthetic construct
  source 1..23: mol_type = other RNA
acaagggtgcttgtgtatctggg

SEQ ID NO: 465 - RNA, 23 nt, synthetic construct
  source 1..23: mol_type = other RNA
agacagtgggttctgtggagcct

SEQ ID NO: 466 - RNA, 23 nt, synthetic construct
  source 1..23: mol_type = other RNA
actgagcgtgttggaagggtgga

SEQ ID NO: 467 - RNA, 23 nt, synthetic construct
  source 1..23: mol_type = other RNA
aggaggttgccattgttgttggg

SEQ ID NO: 468 - RNA, 23 nt, synthetic construct
  source 1..23: mol_type = other RNA
aagcggctctttggaagcggtgc

SEQ ID NO: 469 - RNA, 23 nt, synthetic construct
  source 1..23: mol_type = other RNA
aagctcgctcgtgagtgttggcg

SEQ ID NO: 470 - RNA, 23 nt, synthetic construct
  source 1..23: mol_type = other RNA
atggtctcggcctgagaggtgga

SEQ ID NO: 471 - RNA, 23 nt, synthetic construct
  source 1..23: mol_type = other RNA
acattgtcgtctctgtcctgggc

SEQ ID NO: 472 - RNA, 23 nt, synthetic construct
  source 1..23: mol_type = other RNA
atggtggtggtgttagtcaaggg

SEQ ID NO: 473 - RNA, 23 nt, synthetic construct
  source 1..23: mol_type = other RNA
aactcacacttcggttgacagcg

SEQ ID NO: 474 - RNA, 23 nt, synthetic construct
  source 1..23: mol_type = other RNA
actgaggttgggaagtccacgtc

SEQ ID NO: 475 - RNA, 23 nt, synthetic construct
  source 1..23: mol_type = other RNA
agttttcaaaagtttccatgtcc

SEQ ID NO: 476 - RNA, 23 nt, synthetic construct
  source 1..23: mol_type = other RNA
acactctatgctctttggtgccc

SEQ ID NO: 477 - RNA, 23 nt, synthetic construct
  source 1..23: mol_type = other RNA
acgacctggtcgatgcttacctc

SEQ ID NO: 478 - RNA, 23 nt, synthetic construct
  source 1..23: mol_type = other RNA
agtctccaggctgcaggtcagca

SEQ ID NO: 479 - RNA, 23 nt, synthetic construct
  source 1..23: mol_type = other RNA
agtctggtcttcgttcttgcagg

SEQ ID NO: 480 - RNA, 23 nt, synthetic construct
  source 1..23: mol_type = other RNA
agtagttgaagcacatgttgaac

SEQ ID NO: 481 - RNA, 23 nt, synthetic construct
  source 1..23: mol_type = other RNA
agtcacagcaaagcacacgcacg

SEQ ID NO: 482 - RNA, 23 nt, synthetic construct
  source 1..23: mol_type = other RNA
agagctgttctcagggtggaggt

SEQ ID NO: 483 - RNA, 23 nt, synthetic construct
  source 1..23: mol_type = other RNA
atggtggtcagcactttgggagg

SEQ ID NO: 484 - RNA, 23 nt, synthetic construct
  source 1..23: mol_type = other RNA
aaggtggtgcccagggaggaaga

SEQ ID NO: 485 - RNA, 23 nt, synthetic construct
  source 1..23: mol_type = other RNA
acgtggttgtggtagttggcact

SEQ ID NO: 486 - RNA, 23 nt, synthetic construct
  source 1..23: mol_type = other RNA
aagcctctggttgtgggtgtggt

SEQ ID NO: 487 - RNA, 23 nt, synthetic construct
  source 1..23: mol_type = other RNA
agctttgtgaggatccaggtcgt

SEQ ID NO: 488 - RNA, 23 nt, synthetic construct
  source 1..23: mol_type = other RNA
agatgggtgtaacgctggtagct

SEQ ID NO: 489 - RNA, 23 nt, synthetic construct
  source 1..23: mol_type = other RNA
aagtcgtagtggctgttgtggtc

SEQ ID NO: 490 - RNA, 23 nt, synthetic construct
  source 1..23: mol_type = other RNA
aagggagtggctttggagctggt

SEQ ID NO: 491 - RNA, 23 nt, synthetic construct
  source 1..23: mol_type = other RNA
acttctcagtgctggaagggcgg

SEQ ID NO: 492 - RNA, 23 nt, synthetic construct
  source 1..23: mol_type = other RNA
agtgtggtggtctgtgataggcg

SEQ ID NO: 493 - RNA, 23 nt, synthetic construct
  source 1..23: mol_type = other RNA
atggctgtggacatggtggccgt

SEQ ID NO: 494 - RNA, 23 nt, synthetic construct
  source 1..23: mol_type = other RNA
aagtctctggagtggaggagggt

SEQ ID NO: 495 - RNA, 23 nt, synthetic construct
  source 1..23: mol_type = other RNA
agtaagcactgtggaggtgtggg

SEQ ID NO: 496 - RNA, 23 nt, synthetic construct
  source 1..23: mol_type = other RNA
aggtagtgtgagctgttcctggg

SEQ ID NO: 497 - RNA, 23 nt, synthetic construct
  source 1..23: mol_type = other RNA
attgtgctgatccacactggagg

SEQ ID NO: 498 - RNA, 23 nt, synthetic construct
  source 1..23: mol_type = other RNA
agatgggagttgtcccaggagtt

SEQ ID NO: 499 - RNA, 23 nt, synthetic construct
  source 1..23: mol_type = other RNA
aagggagtcactgtgttgctggt

SEQ ID NO: 500 - RNA, 23 nt, synthetic construct
  source 1..23: mol_type = other RNA
atggccatggtgttcggcactgg

SEQ ID NO: 501 - RNA, 23 nt, synthetic construct
  source 1..23: mol_type = other RNA
actagggtgtgggaagtcaccgt

SEQ ID NO: 502 - RNA, 23 nt, synthetic construct
  source 1..23: mol_type = other RNA
agctggaaagggctggagtcgag

SEQ ID NO: 503 - RNA, 23 nt, synthetic construct
  source 1..23: mol_type = other RNA
aactcggtggttctgctgctagg

SEQ ID NO: 504 - RNA, 23 nt, synthetic construct
  source 1..23: mol_type = other RNA
aagcactttggtagtgtgagctg

SEQ ID NO: 505 - RNA, 23 nt, synthetic construct
  source 1..23: mol_type = other RNA
actgatccacactggaagcgtgc

SEQ ID NO: 506 - RNA, 23 nt, synthetic construct
  source 1..23: mol_type = other RNA
aggaacctctggttgtgggtgtg

SEQ ID NO: 507 - RNA, 23 nt, synthetic construct
  source 1..23: mol_type = other RNA
aagcccatggtcaccaccgtggt

SEQ ID NO: 508 - RNA, 23 nt, synthetic construct
  source 1..23: mol_type = other RNA
agtggtcagcactgtggcggtgt

SEQ ID NO: 509 - RNA, 23 nt, synthetic construct
  source 1..23: mol_type = other RNA
aagtggactcagtcgtagtggct

SEQ ID NO: 510 - RNA, 23 nt, synthetic construct
  source 1..23: mol_type = other RNA
agaagggagtggctttggagctg

SEQ ID NO: 511 - RNA, 23 nt, synthetic construct
  source 1..23: mol_type = other RNA
agataggtgttgtccctggagtt

SEQ ID NO: 512 - RNA, 23 nt, synthetic construct
  source 1..23: mol_type = other RNA
aagggagtcactgtgctgctggt

SEQ ID NO: 513 - RNA, 23 nt, synthetic construct
  source 1..23: mol_type = other RNA
atgtgggtggtccctagggcaga

SEQ ID NO: 514 - RNA, 23 nt, synthetic construct
  source 1..23: mol_type = other RNA
aacagggatcgcccgtgtgtggt

SEQ ID NO: 515 - RNA, 23 nt, synthetic construct
  source 1..23: mol_type = other RNA
aaggtggccgaagtccaggctgt

SEQ ID NO: 516 - RNA, 23 nt, synthetic construct
  source 1..23: mol_type = other RNA
agaaggctctgtgatgtgggtgg

SEQ ID NO: 517 - RNA, 23 nt, synthetic construct
  source 1..23: mol_type = other RNA
actgggtggtaccggtggttgct

SEQ ID NO: 518 - RNA, 23 nt, synthetic construct
  source 1..23: mol_type = other RNA
aaggtgcgggtcttgctgggtgt

SEQ ID NO: 519 - RNA, 23 nt, synthetic construct
  source 1..23: mol_type = other RNA
aggtagctgtagtccagccactc

SEQ ID NO: 520 - RNA, 23 nt, synthetic construct
  source 1..23: mol_type = other RNA
agatgttggagtaggtgtcaaag

SEQ ID NO: 521 - RNA, 23 nt, synthetic construct
  source 1..23: mol_type = other RNA
acattccacgacctggcccaact

SEQ ID NO: 522 - RNA, 23 nt, synthetic construct
  source 1..23: mol_type = other RNA
aagaccaggccaaagtccaggct

SEQ ID NO: 523 - RNA, 23 nt, synthetic construct
  source 1..23: mol_type = other RNA
atttcatagttgaagcacatctt

SEQ ID NO: 524 - RNA, 23 nt, synthetic construct
  source 1..23: mol_type = other RNA
acgtagttgcagcagaacacacg

SEQ ID NO: 525 - RNA, 23 nt, synthetic construct
  source 1..23: mol_type = other RNA
aagggcatggccgtagagctggt

SEQ ID NO: 526 - RNA, 23 nt, synthetic construct
  source 1..23: mol_type = other RNA
agtggtcagctctgtgaggatcc

SEQ ID NO: 527 - RNA, 23 nt, synthetic construct
  source 1..23: mol_type = other RNA
aacggtggctgtagtgctcggct

SEQ ID NO: 528 - RNA, 23 nt, synthetic construct
  source 1..23: mol_type = other RNA
aagcagttgcctgggtggaggag

SEQ ID NO: 529 - RNA, 23 nt, synthetic construct
  source 1..23: mol_type = other RNA
atgactgtgggtgtcgtggccgt

SEQ ID NO: 530 - RNA, 23 nt, synthetic construct
  source 1..23: mol_type = other RNA
actgtaaagctggtagctgtggg

SEQ ID NO: 531 - RNA, 23 nt, synthetic construct
  source 1..23: mol_type = other RNA
agtaagcactgtggaggtgtgga

SEQ ID NO: 532 - RNA, 23 nt, synthetic construct
  source 1..23: mol_type = other RNA
agtgaagcccgtggttgtggtag

SEQ ID NO: 533 - RNA, 23 nt, synthetic construct
  source 1..23: mol_type = other RNA
acagttgtggtggtggtggtcag

SEQ ID NO: 534 - RNA, 23 nt, synthetic construct
  source 1..23: mol_type = other RNA
agtgttgccatagaaccagtggc

SEQ ID NO: 535 - RNA, 23 nt, synthetic construct
  source 1..23: mol_type = other RNA
aactggtctgtgtgctagaggag

SEQ ID NO: 536 - RNA, 23 nt, synthetic construct
  source 1..23: mol_type = other RNA
acgtgatcgtagtggccgtggtg

SEQ ID NO: 537 - RNA, 23 nt, synthetic construct
  source 1..23: mol_type = other RNA
agtgaggatccaggtggtccctg

SEQ ID NO: 538 - RNA, 23 nt, synthetic construct
  source 1..23: mol_type = other RNA
aggttgcggtcgtagtggctgct

SEQ ID NO: 539 - RNA, 23 nt, synthetic construct
  source 1..23: mol_type = other RNA
atgctggtcagcactttgggagg

SEQ ID NO: 540 - RNA, 23 nt, synthetic construct
  source 1..23: mol_type = other RNA
atggtcccaagggtgaaggaggg

SEQ ID NO: 541 - RNA, 23 nt, synthetic construct
  source 1..23: mol_type = other RNA
aggacatggaactggtggccctt

SEQ ID NO: 542 - RNA, 23 nt, synthetic construct
  source 1..23: mol_type = other RNA
atcacggtggctgtagtgctggg

SEQ ID NO: 543 - RNA, 23 nt, synthetic construct
  source 1..23: mol_type = other RNA
actggtcagcactttgagggtgc

SEQ ID NO: 544 - RNA, 23 nt, synthetic construct
  source 1..23: mol_type = other RNA
aagctgatgactgtgggtgtggt

SEQ ID NO: 545 - RNA, 23 nt, synthetic construct
  source 1..23: mol_type = other RNA
aaacgctggtagctgtgggtgtg

SEQ ID NO: 546 - RNA, 23 nt, synthetic construct
  source 1..23: mol_type = other RNA
aacagtctctggagtagaggagg

SEQ ID NO: 547 - RNA, 23 nt, synthetic construct
  source 1..23: mol_type = other RNA
agtcgtggtggtaagcactgtgg

SEQ ID NO: 548 - RNA, 23 nt, synthetic construct
  source 1..23: mol_type = other RNA
agtggctgtgatcgtagtggccg

SEQ ID NO: 549 - RNA, 23 nt, synthetic construct
  source 1..23: mol_type = other RNA
agatgggagttgtccctggagtt

SEQ ID NO: 550 - RNA, 23 nt, synthetic construct
  source 1..23: mol_type = other RNA
aggtactggtggttgctgctggg

SEQ ID NO: 551 - RNA, 23 nt, synthetic construct
  source 1..23: mol_type = other RNA
actgtggctgtggtcctggaggt

SEQ ID NO: 552 - RNA, 23 nt, synthetic construct
  source 1..23: mol_type = other RNA
aagttgaggagggcgtggccgta

SEQ ID NO: 553 - RNA, 23 nt, synthetic construct
  source 1..23: mol_type = other RNA
attgtggtcagctttgtgaggat

SEQ ID NO: 554 - RNA, 23 nt, synthetic construct
  source 1..23: mol_type = other RNA
agcagtctctggagtggaggagg

SEQ ID NO: 555 - RNA, 23 nt, synthetic construct
  source 1..23: mol_type = other RNA
acgtggtggtaagcactgtggag

SEQ ID NO: 556 - RNA, 23 nt, synthetic construct
  source 1..23: mol_type = other RNA
acgtgtgtggtggccgtggtgtt

SEQ ID NO: 557 - RNA, 23 nt, synthetic construct
  source 1..23: mol_type = other RNA
aggagtcgagtgctgggtggtac

SEQ ID NO: 558 - RNA, 23 nt, synthetic construct
  source 1..23: mol_type = other RNA
atgctgctagggtgagggctgga

SEQ ID NO: 559 - RNA, 23 nt, synthetic construct
  source 1..23: mol_type = other RNA
agtggtcaccaccgtggttatgg

SEQ ID NO: 560 - RNA, 23 nt, synthetic construct
  source 1..23: mol_type = other RNA
aggaagtggctttggaactggtg

SEQ ID NO: 561 - RNA, 23 nt, synthetic construct
  source 1..23: mol_type = other RNA
agtgtggtggtctgttctgggag

SEQ ID NO: 562 - RNA, 23 nt, synthetic construct
  source 1..23: mol_type = other RNA
atcgtggtcagcactgtggaggt

SEQ ID NO: 563 - RNA, 23 nt, synthetic construct
  source 1..23: mol_type = other RNA
agctctgtgaggatccaggtcgt

SEQ ID NO: 564 - RNA, 23 nt, synthetic construct
  source 1..23: mol_type = other RNA
atggactggaggagggagtggct

SEQ ID NO: 565 - RNA, 23 nt, synthetic construct
  source 1..23: mol_type = other RNA
atgtggctgtggacatggtggcc

SEQ ID NO: 566 - RNA, 23 nt, synthetic construct
  source 1..23: mol_type = other RNA
acgtggttgtggtagtcggcact

SEQ ID NO: 567 - RNA, 23 nt, synthetic construct
  source 1..23: mol_type = other RNA
aagccactggttgtgggtgtggt

SEQ ID NO: 568 - RNA, 23 nt, synthetic construct
  source 1..23: mol_type = other RNA
aaagggtggttgcagtccttgga

SEQ ID NO: 569 - RNA, 23 nt, synthetic construct
  source 1..23: mol_type = other RNA
agtggctgtgcttgtcagcactg

SEQ ID NO: 570 - RNA, 23 nt, synthetic construct
  source 1..23: mol_type = other RNA
agtgtaaagctggtagctgtgga

SEQ ID NO: 571 - RNA, 23 nt, synthetic construct
  source 1..23: mol_type = other RNA
agtggattgtggacatggtggcc

SEQ ID NO: 572 - RNA, 23 nt, synthetic construct
  source 1..23: mol_type = other RNA
aagtggctgcagttgtagtggct

SEQ ID NO: 573 - RNA, 23 nt, synthetic construct
  source 1..23: mol_type = other RNA
actgtgaggatccaggtggtccc

SEQ ID NO: 574 - RNA, 23 nt, synthetic construct
  source 1..23: mol_type = other RNA
aagtggatgcagtcgtagtggct

SEQ ID NO: 575 - RNA, 23 nt, synthetic construct
  source 1..23: mol_type = other RNA
agctggtcagcactttgggaggg

SEQ ID NO: 576 - RNA, 23 nt, synthetic construct
  source 1..23: mol_type = other RNA
agtgtaacgctggtagctgtgga

SEQ ID NO: 577 - RNA, 23 nt, synthetic construct
  source 1..23: mol_type = other RNA
aggacgtggaactggtggccctt

SEQ ID NO: 578 - RNA, 23 nt, synthetic construct
  source 1..23: mol_type = other RNA
acgtagtggctgttgtggtcagc

SEQ ID NO: 579 - RNA, 23 nt, synthetic construct
  source 1..23: mol_type = other RNA
atgtcgtggccgtggtgctcaca

SEQ ID NO: 580 - RNA, 23 nt, synthetic construct
  source 1..23: mol_type = other RNA
aagttgcagtccctggactggag

SEQ ID NO: 581 - RNA, 23 nt, synthetic construct
  source 1..23: mol_type = other RNA
aggctgtgcttctcagtgctgga

SEQ ID NO: 582 - RNA, 23 nt, synthetic construct
  source 1..23: mol_type = other RNA
acactggttgtgggtgtggtggt

SEQ ID NO: 583 - RNA, 23 nt, synthetic construct
  source 1..23: mol_type = other RNA
atggtggtcagcactctggcggt

SEQ ID NO: 584 - RNA, 23 nt, synthetic construct
  source 1..23: mol_type = other RNA
aggtgatgggtgttgtccctgga

SEQ ID NO: 585 - RNA, 23 nt, synthetic construct
  source 1..23: mol_type = other RNA
aaggaggaagtggctttggagct

SEQ ID NO: 586 - RNA, 23 nt, synthetic construct
  source 1..23: mol_type = other RNA
atgtggctgtgcttgtcagcact

SEQ ID NO: 587 - RNA, 23 nt, synthetic construct
  source 1..23: mol_type = other RNA
aacgtggtccacagggtggagga

SEQ ID NO: 588 - RNA, 23 nt, synthetic construct
  source 1..23: mol_type = other RNA
agtgtggtggtctgtgctgggac

SEQ ID NO: 589 - RNA, 23 nt, synthetic construct
  source 1..23: mol_type = other RNA
aggattgtggacatggtggacat

SEQ ID NO: 590 - RNA, 23 nt, synthetic construct
  source 1..23: mol_type = other RNA
aggtctctggagtagaggaggtg

SEQ ID NO: 591 - RNA, 23 nt, synthetic construct
  source 1..23: mol_type = other RNA
agtcagcactgtggaggtgtggg

SEQ ID NO: 592 - RNA, 23 nt, synthetic construct
  source 1..23: mol_type = other RNA
acccttgtcatggtggctgtggt

SEQ ID NO: 593 - RNA, 23 nt, synthetic construct
  source 1..23: mol_type = other RNA
agaggagggtgtggccgtggaat

SEQ ID NO: 594 - RNA, 23 nt, synthetic construct
  source 1..23: mol_type = other RNA
agctcagtgaggatccgggtcgt

SEQ ID NO: 595 - RNA, 23 nt, synthetic construct
  source 1..23: mol_type = other RNA
aagttgtagtggctgttgtggtc

SEQ ID NO: 596 - RNA, 23 nt, synthetic construct
  source 1..23: mol_type = other RNA
aacagggtggccgtggatccagt

SEQ ID NO: 597 - RNA, 23 nt, synthetic construct
  source 1..23: mol_type = other RNA
agctctgtgaggatccaggtggt

SEQ ID NO: 598 - RNA, 23 nt, synthetic construct
  source 1..23: mol_type = other RNA
agcaccatcacggtggctatagt

SEQ ID NO: 599 - RNA, 23 nt, synthetic construct
  source 1..23: mol_type = other RNA
agtgagctgttcccagagtggag

SEQ ID NO: 600 - RNA, 23 nt, synthetic construct
  source 1..23: mol_type = other RNA
actgtgggcatagtggccatggt

SEQ ID NO: 601 - RNA, 23 nt, synthetic construct
  source 1..23: mol_type = other RNA
aagctgggaaccgtggaggcagt

SEQ ID NO: 602 - RNA, 23 nt, synthetic construct
  source 1..23: mol_type = other RNA
aacacgctgaaggttggcaggct

SEQ ID NO: 603 - RNA, 23 nt, synthetic construct
  source 1..23: mol_type = other RNA
agtgaggactgaggaggacacag

SEQ ID NO: 604 - RNA, 23 nt, synthetic construct
  source 1..23: mol_type = other RNA
agagtagagaagtgggagctggg

SEQ ID NO: 605 - RNA, 23 nt, synthetic construct
  source 1..23: mol_type = other RNA
agagaaaaactgtccaaatgccc

SEQ ID NO: 606 - RNA, 23 nt, synthetic construct
  source 1..23: mol_type = other RNA
agtcttattgtagatgacttccc

SEQ ID NO: 607 - RNA, 23 nt, synthetic construct
  source 1..23: mol_type = other RNA
aacactgcgtagaaatggcagcc

SEQ ID NO: 608 - RNA, 23 nt, synthetic construct
  source 1..23: mol_type = other RNA
aaagcggtcaatgtcacagtgct

SEQ ID NO: 609 - RNA, 23 nt, synthetic construct
  source 1..23: mol_type = other RNA
aagagggatggcattgtcacagc

SEQ ID NO: 610 - RNA, 23 nt, synthetic construct
  source 1..23: mol_type = other RNA
aaccgtgcagttctccagggtcc

SEQ ID NO: 611 - RNA, 23 nt, synthetic construct
  source 1..23: mol_type = other RNA
aacgacacggttgtcacccacgc

SEQ ID NO: 612 - RNA, 23 nt, synthetic construct
  source 1..23: mol_type = other RNA
attggccacaggctttgggtcca

SEQ ID NO: 613 - RNA, 23 nt, synthetic construct
  source 1..23: mol_type = other RNA
agcaggtgcttgttcacgcaggt

SEQ ID NO: 614 - RNA, 23 nt, synthetic construct
  source 1..23: mol_type = other RNA
agctcgggtccgacactttgatg

SEQ ID NO: 615 - RNA, 23 nt, synthetic construct
  source 1..23: mol_type = other RNA
aactcatagtggaagtcacaggg

SEQ ID NO: 616 - RNA, 23 nt, synthetic construct
  source 1..23: mol_type = other RNA
accacatgctgcagatgcactcg

SEQ ID NO: 617 - RNA, 23 nt, synthetic construct
  source 1..23: mol_type = other RNA
agtcaaaggtggaatagtgggag

SEQ ID NO: 618 - RNA, 23 nt, synthetic construct
  source 1..23: mol_type = other RNA
atctctcatgaggacataggtgc

SEQ ID NO: 619 - RNA, 23 nt, synthetic construct
  source 1..23: mol_type = other RNA
agctgagattcccaaagcgtgca

SEQ ID NO: 620 - RNA, 23 nt, synthetic construct
  source 1..23: mol_type = other RNA
agtgcagtagtggttgtccaggt

SEQ ID NO: 621 - RNA, 23 nt, synthetic construct
  source 1..23: mol_type = other RNA
aacttgtagtggatgctgagggc

SEQ ID NO: 622 - RNA, 23 nt, synthetic construct
  source 1..23: mol_type = other RNA
aaccatggtgacagtgaggacga

SEQ ID NO: 623 - RNA, 23 nt, synthetic construct
  source 1..23: mol_type = other RNA
aggaatttggtcaaacaggatca

SEQ ID NO: 624 - RNA, 23 nt, synthetic construct
  source 1..23: mol_type = other RNA
accgttcttgctgaaaccgctgc

SEQ ID NO: 625 - RNA, 23 nt, synthetic construct
  source 1..23: mol_type = other RNA
agcaggaatgtccacacgcatgg

SEQ ID NO: 626 - RNA, 23 nt, synthetic construct
  source 1..23: mol_type = other RNA
accattgaaggtgacgctcacgc

SEQ ID NO: 627 - RNA, 23 nt, synthetic construct
  source 1..23: mol_type = other RNA
agtgttgttgtggaagaggctgt

SEQ ID NO: 628 - RNA, 23 nt, synthetic construct
  source 1..23: mol_type = other RNA
atctggttgttggtgcaggtgcc

SEQ ID NO: 629 - RNA, 23 nt, synthetic construct
  source 1..23: mol_type = other RNA
agttccgtcccgctggagacagt

SEQ ID NO: 630 - RNA, 23 nt, synthetic construct
  source 1..23: mol_type = other RNA
accatgtccttgcaactggcggc

SEQ ID NO: 631 - RNA, 23 nt, synthetic construct
  source 1..23: mol_type = other RNA
aagccatcctttctgctgtcggg

SEQ ID NO: 632 - RNA, 23 nt, synthetic construct
  source 1..23: mol_type = other RNA
aagcatcagatcacagagcggct

SEQ ID NO: 633 - RNA, 23 nt, synthetic construct
  source 1..23: mol_type = other RNA
atggcactcagcaaagacctggc

SEQ ID NO: 634 - RNA, 23 nt, synthetic construct
  source 1..23: mol_type = other RNA
aagtggtcgctgatgcaggcgtt

SEQ ID NO: 635 - RNA, 23 nt, synthetic construct
  source 1..23: mol_type = other RNA
acagagctctgcgtaagcctcca

SEQ ID NO: 636 - RNA, 23 nt, synthetic construct
  source 1..23: mol_type = other RNA
actcgccagtcactgcacactcc

SEQ ID NO: 637 - RNA, 23 nt, synthetic construct
  source 1..23: mol_type = other RNA
aatggcttgtacactttggtggg

SEQ ID NO: 638 - RNA, 23 nt, synthetic construct
  source 1..23: mol_type = other RNA
atctggttcctagagttgcaggt

SEQ ID NO: 639 - RNA, 23 nt, synthetic construct
  source 1..23: mol_type = other RNA
agcgttgaagaggatctggtcct

SEQ ID NO: 640 - RNA, 23 nt, synthetic construct
  source 1..23: mol_type = other RNA
acctgcacgcagatgcccatgtg

SEQ ID NO: 641 - RNA, 23 nt, synthetic construct
  source 1..23: mol_type = other RNA
agaaatttaggaaacccatcggg

SEQ ID NO: 642 - RNA, 23 nt, synthetic construct
  source 1..23: mol_type = other RNA
aaggactggcagttgctgaccca

SEQ ID NO: 643 - RNA, 23 nt, synthetic construct
  source 1..23: mol_type = other RNA
atgcaccgacactgaaccctcgt

SEQ ID NO: 644 - RNA, 23 nt, synthetic construct
  source 1..23: mol_type = other RNA
aggtcacggttacgaagccggga

SEQ ID NO: 645 - RNA, 23 nt, synthetic construct
  source 1..23: mol_type = other RNA
aaggtggttgtgttgcacacgca

SEQ ID NO: 646 - RNA, 23 nt, synthetic construct
  source 1..23: mol_type = other RNA
aggtgcagatggactcctgccct

SEQ ID NO: 647 - RNA, 23 nt, synthetic construct
  source 1..23: mol_type = other RNA
aagcggaaggtgggacagcagtc

SEQ ID NO: 648 - RNA, 23 nt, synthetic construct
  source 1..23: mol_type = other RNA
acattgtacgaacacagctgagg

SEQ ID NO: 649 - RNA, 23 nt, synthetic construct
  source 1..23: mol_type = other RNA
agcctgggaaggttgcaccaacc

SEQ ID NO: 650 - RNA, 23 nt, synthetic construct
  source 1..23: mol_type = other RNA
aaggtacacatgtggcagggaag

SEQ ID NO: 651 - RNA, 23 nt, synthetic construct
  source 1..23: mol_type = other RNA
actgacattgcaccgttgggtcc

SEQ ID NO: 652 - RNA, 23 nt, synthetic construct
  source 1..23: mol_type = other RNA
aacaggtagtattgttgcaggca

SEQ ID NO: 653 - RNA, 23 nt, synthetic construct
  source 1..23: mol_type = other RNA
atctcttgtactcaaagccctgg

SEQ ID NO: 654 - RNA, 23 nt, synthetic construct
  source 1..23: mol_type = other RNA
aaggtttcattcagctggactgg

SEQ ID NO: 655 - RNA, 23 nt, synthetic construct
  source 1..23: mol_type = other RNA
aagttgtccacatggctgttgac

SEQ ID NO: 656 - RNA, 23 nt, synthetic construct
  source 1..23: mol_type = other RNA
aagcctcacagaggtacacggtg

SEQ ID NO: 657 - RNA, 23 nt, synthetic construct
  source 1..23: mol_type = other RNA
agtcagcaaatggactccaccct

SEQ ID NO: 658 - RNA, 23 nt, synthetic construct
  source 1..23: mol_type = other RNA
aagctggacacatctgggcagga

SEQ ID NO: 659 - RNA, 23 nt, synthetic construct
  source 1..23: mol_type = other RNA
actcctcacaggagtagcagcag

SEQ ID NO: 660 - RNA, 23 nt, synthetic construct
  source 1..23: mol_type = other RNA
agttgatgcggacttgacaggag

SEQ ID NO: 661 - RNA, 23 nt, synthetic construct
  source 1..23: mol_type = other RNA
aagccctggtgccacaggatggt

SEQ ID NO: 662 - RNA, 23 nt, synthetic construct
  source 1..23: mol_type = other RNA
aagaaggtgatgttgacctcggt

SEQ ID NO: 663 - RNA, 23 nt, synthetic construct
  source 1..23: mol_type = other RNA
actctgctgagtacttggacgct

SEQ ID NO: 664 - RNA, 23 nt, synthetic construct
  source 1..23: mol_type = other RNA
aaggtgcactggtgctgcatggc

SEQ ID NO: 665 - RNA, 23 nt, synthetic construct
  source 1..23: mol_type = other RNA
aagccgttaggacagtgcaaggg

SEQ ID NO: 666 - RNA, 23 nt, synthetic construct
  source 1..23: mol_type = other RNA
aacgtgggtgtaggtgtgcagga

SEQ ID NO: 667 - RNA, 23 nt, synthetic construct
  source 1..23: mol_type = other RNA
aagggacacagaagggcgtgcag

SEQ ID NO: 668 - RNA, 23 nt, synthetic construct
  source 1..23: mol_type = other RNA
agaacgttctcagacagcagtgg

SEQ ID NO: 669 - RNA, 23 nt, synthetic construct
  source 1..23: mol_type = other RNA
actccaggtggacagagcatggg

SEQ ID NO: 670 - RNA, 23 nt, synthetic construct
  source 1..23: mol_type = other RNA
attttcatgatcagacaatgcac

SEQ ID NO: 671 - RNA, 23 nt, synthetic construct
  source 1..23: mol_type = other RNA
ataggactcctgagtggcgccct

SEQ ID NO: 672 - RNA, 23 nt, synthetic construct
  source 1..23: mol_type = other RNA
agtcccagtgacatcagggaggg

SEQ ID NO: 673 - RNA, 23 nt, synthetic construct
  source 1..23: mol_type = other RNA
aacatgcttagtttgttccaggg

SEQ ID NO: 674 - RNA, 23 nt, synthetic construct
  source 1..23: mol_type = other RNA
agtggccagctggaatccgtgct

SEQ ID NO: 675 - RNA, 23 nt, synthetic construct
  source 1..23: mol_type = other RNA
acttgcctggaccagcctgtctg

SEQ ID NO: 676 - RNA, 23 nt, synthetic construct
  source 1..23: mol_type = other RNA
actgtcgcagcttcctggcagca

SEQ ID NO: 677 - RNA, 23 nt, synthetic construct
  source 1..23: mol_type = other RNA
acctgagttaccctgcagcaggc

SEQ ID NO: 678 - RNA, 23 nt, synthetic construct
  source 1..23: mol_type = other RNA
actctctgacctggccgttgcga

SEQ ID NO: 679 - RNA, 23 nt, synthetic construct
  source 1..23: mol_type = other RNA
aggtttatttgcaaaactgggct

SEQ ID NO: 680 - RNA, 21 nt, synthetic construct
  source 1..21: mol_type = other RNA
  modified_base 1: mod_base = OTHER; note = 2'-O-methyluridine-3'-phosphorothioate
  modified_base 2: mod_base = OTHER; note = 2'-O-methyluridine-3'-phosphorothioate
  modified_base 3: mod_base = OTHER; note = 2'-O-methylguanosine-3'-phosphate
  modified_base 4: mod_base = OTHER; note = 2'-O-methylguanosine-3'-phosphate
  modified_base 5: mod_base = OTHER; note = 2'-O-methylcytidine-3'-phosphate
  modified_base 6: mod_base = OTHER; note = 2'-O-methyluridine-3'-phosphate
  modified_base 7: mod_base = OTHER; note = 2'-deoxy-2'-fluorocytidine-3'-phosphate
  modified_base 8: mod_base = OTHER; note = 2'-O-methyluridine-3'-phosphate
  modified_base 9: mod_base = OTHER; note = 2'-deoxy-2'-fluoroguanosine-3'-phosphate
  modified_base 10: mod_base = OTHER; note = 2'-deoxy-2'-fluoroguanosine-3'-phosphate
  modified_base 11: mod_base = OTHER; note = 2'-deoxy-2'-fluorocytidine-3'-phosphate
  modified_base 12: mod_base = OTHER; note = 2'-O-methylguanosine-3'-phosphate
  modified_base 13: mod_base = OTHER; note = 2'-O-methylguanosine-3'-phosphate
  modified_base 14: mod_base = OTHER; note = 2'-O-methylcytidine-3'-phosphate
  modified_base 15: mod_base = OTHER; note = 2'-O-methylcytidine-3'-phosphate
  modified_base 16: mod_base = OTHER; note = 2'-O-methyladenosine-3'-phosphate
  modified_base 17: mod_base = OTHER; note = 2'-O-methyluridine-3'-phosphate
  modified_base 18: mod_base = OTHER; note = 2'-O-methylguanosine-3'-phosphate
  modified_base 19: mod_base = OTHER; note = 2'-O-methylcytidine-3'-phosphate
  modified_base 20: mod_base = OTHER; note = 2'-O-methyluridine-3'-phosphate
  modified_base 21: mod_base = OTHER; note = 2'-O-methyluridine-3'-phosphate ((2S,4R)-1-[29-[[2-(acetylamino)-2-deoxy-beta-D-galactopyra nosyl]oxy]-14,14-bis[[3-[[3-[[5-[[2-(acetylamino)-2-deoxy-b eta-D-galactopyranosyl]oxy]-1-oxopentyl]amino]propyl]amino] -3-oxopropoxy]methyl]-1,12,19,25-tetraoxo-16-oxa-13,20,24-t riazanonacos-1-yl]-4-hydroxy-2-pyrrolidinyl)methyl ester
ttggctctggcggccatgctt

SEQ ID NO: 681 - RNA, 21 nt, synthetic construct
  source 1..21: mol_type = other RNA
  modified_base 1: mod_base = OTHER; note = 2'-O-methylcytidine-3'-phosphorothioate
  modified_base 2: mod_base = OTHER; note = 2'-O-methylcytidine-3'-phosphorothioate
  modified_base 3: mod_base = OTHER; note = 2'-O-methylguanosine-3'-phosphate
  modified_base 4: mod_base = OTHER; note = 2'-O-methyladenosine-3'-phosphate
  modified_base 5: mod_base = OTHER; note = 2'-O-methylguanosine-3'-phosphate
  modified_base 6: mod_base = OTHER; note = 2'-O-methylcytidine-3'-phosphate
  modified_base 7: mod_base = OTHER; note = 2'-deoxy-2'-fluorouridine-3'-phosphate
  modified_base 8: mod_base = OTHER; note = 2'-O-methylguanosine-3'-phosphate
  modified_base 9: mod_base = OTHER; note = 2'-deoxy-2'-fluoroguanosine-3'-phosphate
  modified_base 10: mod_base = OTHER; note = 2'-deoxy-2'-fluoroguanosine-3'-phosphate
  modified_base 11: mod_base = OTHER; note = 2'-deoxy-2'-fluoroadenosine-3'-phosphate
  modified_base 12: mod_base = OTHER; note = 2'-O-methylguanosine-3'-phosphate
  modified_base 13: mod_base = OTHER; note = 2'-O-methyladenosine-3'-phosphate
  modified_base 14: mod_base = OTHER; note = 2'-O-methyladenosine-3'-phosphate
  modified_base 15: mod_base = OTHER; note = 2'-O-methyluridine-3'-phosphate
  modified_base 16: mod_base = OTHER; note = 2'-O-methylguanosine-3'-phosphate
  modified_base 17: mod_base = OTHER; note = 2'-O-methylcytidine-3'-phosphate
  modified_base 18: mod_base = OTHER; note = 2'-O-methyladenosine-3'-phosphate
  modified_base 19: mod_base = OTHER; note = 2'-O-methylguanosine-3'-phosphate
  modified_base 20: mod_base = OTHER; note = 2'-O-methylguanosine-3'-phosphate
  modified_base 21: mod_base = OTHER; note = 2'-O-methyluridine-3'-phosphate ((2S,4R)-1-[29-[[2-(acetylamino)-2-deoxy-beta-D-galactopyra nosyl]oxy]-14,14-bis[[3-[[3-[[5-[[2-(acetylamino)-2-deoxy-b eta-D-galactopyranosyl]oxy]-1-oxopentyl]amino]propyl]amino] -3-oxopropoxy]methyl]-1,12,19,25-tetraoxo-16-oxa-13,20,24-t riazanonacos-1-yl]-4-hydroxy-2-pyrrolidinyl)methyl ester
ccgagctgggagaatgcaggt

SEQ ID NO: 682 - RNA, 21 nt, synthetic construct
  source 1..21: mol_type = other RNA
  modified_base 1: mod_base = OTHER; note = 2'-O-methylguanosine-3'-phosphorothioate
  modified_base 2: mod_base = OTHER; note = 2'-O-methylcytidine-3'-phosphorothioate
  modified_base 3: mod_base = OTHER; note = 2'-O-methylguanosine-3'-phosphate
  modified_base 4: mod_base = OTHER; note = 2'-O-methylcytidine-3'-phosphate
  modified_base 5: mod_base = OTHER; note = 2'-O-methylguanosine-3'-phosphate
  modified_base 6: mod_base = OTHER; note = 2'-O-methyluridine-3'-phosphate
  modified_base 7: mod_base = OTHER; note = 2'-deoxy-2'-fluoroguanosine-3'-phosphate
  modified_base 8: mod_base = OTHER; note = 2'-O-methyladenosine-3'-phosphate
  modified_base 9: mod_base = OTHER; note = 2'-deoxy-2'-fluoroguanosine-3'-phosphate
  modified_base 10: mod_base = OTHER; note = 2'-deoxy-2'-fluorocytidine-3'-phosphate
  modified_base 11: mod_base = OTHER; note = 2'-deoxy-2'-fluorouridine-3'-phosphate
  modified_base 12: mod_base = OTHER; note = 2'-O-methyluridine-3'-phosphate
  modified_base 13: mod_base = OTHER; note = 2'-O-methyluridine-3'-phosphate
  modified_base 14: mod_base = OTHER; note = 2'-O-methylguanosine-3'-phosphate
  modified_base 15: mod_base = OTHER; note = 2'-O-methyluridine-3'-phosphate
  modified_base 16: mod_base = OTHER; note = 2'-O-methyluridine-3'-phosphate
  modified_base 17: mod_base = OTHER; note = 2'-O-methylcytidine-3'-phosphate
  modified_base 18: mod_base = OTHER; note = 2'-O-methylcytidine-3'-phosphate
  modified_base 19: mod_base = OTHER; note = 2'-O-methyladenosine-3'-phosphate
  modified_base 20: mod_base = OTHER; note = 2'-O-methylcytidine-3'-phosphate
  modified_base 21: mod_base = OTHER; note = 2'-O-methyluridine-3'-phosphate ((2S,4R)-1-[29-[[2-(acetylamino)-2-deoxy-beta-D-galactopyra nosyl]oxy]-14,14-bis[[3-[[3-[[5-[[2-(acetylamino)-2-deoxy-b eta-D-galactopyranosyl]oxy]-1-oxopentyl]amino]propyl]amino] -3-oxopropoxy]methyl]-1,12,19,25-tetraoxo-16-oxa-13,20,24-t riazanonacos-1-yl]-4-hydroxy-2-pyrrolidinyl)methyl ester
gcgcgtgagctttgttccact

SEQ ID NO: 683 - RNA, 21 nt, synthetic construct
  source 1..21: mol_type = other RNA
  modified_base 1: mod_base = OTHER; note = 2'-O-methyluridine-3'-phosphorothioate
  modified_base 2: mod_base = OTHER; note = 2'-O-methylguanosine-3'-phosphorothioate
  modified_base 3: mod_base = OTHER; note = 2'-O-methylguanosine-3'-phosphate
  modified_base 4: mod_base = OTHER; note = 2'-O-methylguanosine-3'-phosphate
  modified_base 5: mod_base = OTHER; note = 2'-O-methylcytidine-3'-phosphate
  modified_base 6: mod_base = OTHER; note = 2'-O-methylguanosine-3'-phosphate
  modified_base 7: mod_base = OTHER; note = 2'-deoxy-2'-fluoroguanosine-3'-phosphate
  modified_base 8: mod_base = OTHER; note = 2'-O-methylguanosine-3'-phosphate
  modified_base 9: mod_base = OTHER; note = 2'-deoxy-2'-fluorouridine-3'-phosphate
  modified_base 10: mod_base = OTHER; note = 2'-deoxy-2'-fluoroguanosine-3'-phosphate
  modified_base 11: mod_base = OTHER; note = 2'-deoxy-2'-fluorouridine-3'-phosphate
  modified_base 12: mod_base = OTHER; note = 2'-O-methylguanosine-3'-phosphate
  modified_base 13: mod_base = OTHER; note = 2'-O-methylcytidine-3'-phosphate
  modified_base 14: mod_base = OTHER; note = 2'-O-methyladenosine-3'-phosphate
  modified_base 15: mod_base = OTHER; note = 2'-O-methylguanosine-3'-phosphate
  modified_base 16: mod_base = OTHER; note = 2'-O-methylcytidine-3'-phosphate
  modified_base 17: mod_base = OTHER; note = 2'-O-methyladenosine-3'-phosphate
  modified_base 18: mod_base = OTHER; note = 2'-O-methylcytidine-3'-phosphate
  modified_base 19: mod_base = OTHER; note = 2'-O-methylcytidine-3'-phosphate
  modified_base 20: mod_base = OTHER; note = 2'-O-methyluridine-3'-phosphate
  modified_base 21: mod_base = OTHER; note = 2'-O-methyluridine-3'-phosphate ((2S,4R)-1-[29-[[2-(acetylamino)-2-deoxy-beta-D-galactopyra nosyl]oxy]-14,14-bis[[3-[[3-[[5-[[2-(acetylamino)-2-deoxy-b eta-D-galactopyranosyl]oxy]-1-oxopentyl]amino]propyl]amino] -3-oxopropoxy]methyl]-1,12,19,25-tetraoxo-16-oxa-13,20,24-t riazanonacos-1-yl]-4-hydroxy-2-pyrrolidinyl)methyl ester
tgggcgggtgtgcagcacctt

SEQ ID NO: 684 - RNA, 21 nt, synthetic construct
  source 1..21: mol_type = other RNA
  modified_base 1: mod_base = OTHER; note = 2'-O-methylcytidine-3'-phosphorothioate
  modified_base 2: mod_base = OTHER; note = 2'-O-methylcytidine-3'-phosphorothioate
  modified_base 3: mod_base = OTHER; note = 2'-O-methyladenosine-3'-phosphate
  modified_base 4: mod_base = OTHER; note = 2'-O-methylcytidine-3'-phosphate
  modified_base 5: mod_base = OTHER; note = 2'-O-methyluridine-3'-phosphate
  modified_base 6: mod_base = OTHER; note = 2'-O-methyladenosine-3'-phosphate
  modified_base 7: mod_base = OTHER; note = 2'-deoxy-2'-fluorocytidine-3'-phosphate
  modified_base 8: mod_base = OTHER; note = 2'-O-methyladenosine-3'-phosphate
  modified_base 9: mod_base = OTHER; note = 2'-deoxy-2'-fluoroadenosine-3'-phosphate
  modified_base 10: mod_base = OTHER; note = 2'-deoxy-2'-fluoroguanosine-3'-phosphate
  modified_base 11: mod_base = OTHER; note = 2'-deoxy-2'-fluoroadenosine-3'-phosphate
  modified_base 12: mod_base = OTHER; note = 2'-O-methylcytidine-3'-phosphate
  modified_base 13: mod_base = OTHER; note = 2'-O-methylcytidine-3'-phosphate
  modified_base 14: mod_base = OTHER; note = 2'-O-methyluridine-3'-phosphate
  modified_base 15: mod_base = OTHER; note = 2'-O-methyluridine-3'-phosphate
  modified_base 16: mod_base = OTHER; note = 2'-O-methylcytidine-3'-phosphate
  modified_base 17: mod_base = OTHER; note = 2'-O-methylguanosine-3'-phosphate
  modified_base 18: mod_base = OTHER; note = 2'-O-methyladenosine-3'-phosphate
  modified_base 19: mod_base = OTHER; note = 2'-O-methylcytidine-3'-phosphate
  modified_base 20: mod_base = OTHER; note = 2'-O-methylguanosine-3'-phosphate
  modified_base 21: mod_base = OTHER; note = 2'-O-methyluridine-3'-phosphate ((2S,4R)-1-[29-[[2-(acetylamino)-2-deoxy-beta-D-galactopyra nosyl]oxy]-14,14-bis[[3-[[3-[[5-[[2-(acetylamino)-2-deoxy-b eta-D-galactopyranosyl]oxy]-1-oxopentyl]amino]propyl]amino] -3-oxopropoxy]methyl]-1,12,19,25-tetraoxo-16-oxa-13,20,24-t riazanonacos-1-yl]-4-hydroxy-2-pyrrolidinyl)methyl ester
ccactacaagaccttcgacgt

SEQ ID NO: 685 - RNA, 21 nt, synthetic construct
  source 1..21: mol_type = other RNA
  modified_base 1: mod_base = OTHER; note = 2'-O-methylcytidine-3'-phosphorothioate
  modified_base 2: mod_base = OTHER; note = 2'-O-methylcytidine-3'-phosphorothioate
  modified_base 3: mod_base = OTHER; note = 2'-O-methyluridine-3'-phosphate
  modified_base 4: mod_base = OTHER; note = 2'-O-methyluridine-3'-phosphate
  modified_base 5: mod_base = OTHER; note = 2'-O-methyluridine-3'-phosphate
  modified_base 6: mod_base = OTHER; note = 2'-O-methylguanosine-3'-phosphate
  modified_base 7: mod_base = OTHER; note = 2'-deoxy-2'-fluorocytidine-3'-phosphate
  modified_base 8: mod_base = OTHER; note = 2'-O-methyladenosine-3'-phosphate
  modified_base 9: mod_base = OTHER; note = 2'-deoxy-2'-fluoroadenosine-3'-phosphate
  modified_base 10: mod_base = OTHER; note = 2'-deoxy-2'-fluorocytidine-3'-phosphate
  modified_base 11: mod_base = OTHER; note = 2'-deoxy-2'-fluorouridine-3'-phosphate
  modified_base 12: mod_base = OTHER; note = 2'-O-methyladenosine-3'-phosphate
  modified_base 13: mod_base = OTHER; note = 2'-O-methylcytidine-3'-phosphate
  modified_base 14: mod_base = OTHER; note = 2'-O-methylguanosine-3'-phosphate
  modified_base 15: mod_base = OTHER; note = 2'-O-methyluridine-3'-phosphate
  modified_base 16: mod_base = OTHER; note = 2'-O-methylguanosine-3'-phosphate
  modified_base 17: mod_base = OTHER; note = 2'-O-methyluridine-3'-phosphate
  modified_base 18: mod_base = OTHER; note = 2'-O-methyluridine-3'-phosphate
  modified_base 19: mod_base = OTHER; note = 2'-O-methylcytidine-3'-phosphate
  modified_base 20: mod_base = OTHER; note = 2'-O-methyluridine-3'-phosphate
  modified_base 21: mod_base = OTHER; note = 2'-O-methyluridine-3'-phosphate ((2S,4R)-1-[29-[[2-(acetylamino)-2-deoxy-beta-D-galactopyra nosyl]oxy]-14,14-bis[[3-[[3-[[5-[[2-(acetylamino)-2-deoxy-b eta-D-galactopyranosyl]oxy]-1-oxopentyl]amino]propyl]amino] -3-oxopropoxy]methyl]-1,12,19,25-tetraoxo-16-oxa-13,20,24-t riazanonacos-1-yl]-4-hydroxy-2-pyrrolidinyl)methyl ester
cctttgcaactacgtgttctt

SEQ ID NO: 686 - RNA, 21 nt, synthetic construct
  source 1..21: mol_type = other RNA
  modified_base 1: mod_base = OTHER; note = 2'-O-methylguanosine-3'-phosphorothioate
  modified_base 2: mod_base = OTHER; note = 2'-O-methyladenosine-3'-phosphorothioate
  modified_base 3: mod_base = OTHER; note = 2'-O-methylguanosine-3'-phosphate
  modified_base 4: mod_base = OTHER; note = 2'-O-methylguanosine-3'-phosphate
  modified_base 5: mod_base = OTHER; note = 2'-O-methyladenosine-3'-phosphate
  modified_base 6: mod_base = OTHER; note = 2'-O-methylcytidine-3'-phosphate
  modified_base 7: mod_base = OTHER; note = 2'-deoxy-2'-fluorouridine-3'-phosphate
  modified_base 8: mod_base = OTHER; note = 2'-O-methyluridine-3'-phosphate
  modified_base 9: mod_base = OTHER; note = 2'-deoxy-2'-fluorocytidine-3'-phosphate
  modified_base 10: mod_base = OTHER; note = 2'-deoxy-2'-fluoroadenosine-3'-phosphate
  modified_base 11: mod_base = OTHER; note = 2'-deoxy-2'-fluoroadenosine-3'-phosphate
  modified_base 12: mod_base = OTHER; note = 2'-O-methylcytidine-3'-phosphate
  modified_base 13: mod_base = OTHER; note = 2'-O-methylguanosine-3'-phosphate
  modified_base 14: mod_base = OTHER; note = 2'-O-methyluridine-3'-phosphate
  modified_base 15: mod_base = OTHER; note = 2'-O-methylcytidine-3'-phosphate
  modified_base 16: mod_base = OTHER; note = 2'-O-methylcytidine-3'-phosphate
  modified_base 17: mod_base = OTHER; note = 2'-O-methyladenosine-3'-phosphate
  modified_base 18: mod_base = OTHER; note = 2'-O-methylguanosine-3'-phosphate
  modified_base 19: mod_base = OTHER; note = 2'-O-methylcytidine-3'-phosphate
  modified_base 20: mod_base = OTHER; note = 2'-O-methyluridine-3'-phosphate
  modified_base 21: mod_base = OTHER; note = 2'-O-methyluridine-3'-phosphate ((2S,4R)-1-[29-[[2-(acetylamino)-2-deoxy-beta-D-galactopyra nosyl]oxy]-14,14-bis[[3-[[3-[[5-[[2-(acetylamino)-2-deoxy-b eta-D-galactopyranosyl]oxy]-1-oxopentyl]amino]propyl]amino] -3-oxopropoxy]methyl]-1,12,19,25-tetraoxo-16-oxa-13,20,24-t riazanonacos-1-yl]-4-hydroxy-2-pyrrolidinyl)methyl ester
gaggacttcaacgtccagctt

SEQ ID NO: 687 - RNA, 21 nt, synthetic construct
  source 1..21: mol_type = other RNA
  modified_base 1: mod_base = OTHER; note = 2'-O-methyluridine-3'-phosphorothioate
  modified_base 2: mod_base = OTHER; note = 2'-O-methylcytidine-3'-phosphorothioate
  modified_base 3: mod_base = OTHER; note = 2'-O-methyladenosine-3'-phosphate
  modified_base 4: mod_base = OTHER; note = 2'-O-methylcytidine-3'-phosphate
  modified_base 5: mod_base = OTHER; note = 2'-O-methylcytidine-3'-phosphate
  modified_base 6: mod_base = OTHER; note = 2'-O-methylcytidine-3'-phosphate
  modified_base 7: mod_base = OTHER; note = 2'-deoxy-2'-fluoroguanosine-3'-phosphate
  modified_base 8: mod_base = OTHER; note = 2'-O-methyluridine-3'-phosphate
  modified_base 9: mod_base = OTHER; note = 2'-deoxy-2'-fluoroguanosine-3'-phosphate
  modified_base 10: mod_base = OTHER; note = 2'-deoxy-2'-fluorouridine-3'-phosphate
  modified_base 11: mod_base = OTHER; note = 2'-deoxy-2'-fluorouridine-3'-phosphate
  modified_base 12: mod_base = OTHER; note = 2'-O-methylguanosine-3'-phosphate
  modified_base 13: mod_base = OTHER; note = 2'-O-methyluridine-3'-phosphate
  modified_base 14: mod_base = OTHER; note = 2'-O-methylcytidine-3'-phosphate
  modified_base 15: mod_base = OTHER; note = 2'-O-methyladenosine-3'-phosphate
  modified_base 16: mod_base = OTHER; note = 2'-O-methyluridine-3'-phosphate
  modified_base 17: mod_base = OTHER; note = 2'-O-methylcytidine-3'-phosphate
  modified_base 18: mod_base = OTHER; note = 2'-O-methyladenosine-3'-phosphate
  modified_base 19: mod_base = OTHER; note = 2'-O-methyladenosine-3'-phosphate
  modified_base 20: mod_base = OTHER; note = 2'-O-methylguanosine-3'-phosphate
  modified_base 21: mod_base = OTHER; note = 2'-O-methyluridine-3'-phosphate ((2S,4R)-1-[29-[[2-(acetylamino)-2-deoxy-beta-D-galactopyra nosyl]oxy]-14,14-bis[[3-[[3-[[5-[[2-(acetylamino)-2-deoxy-b eta-D-galactopyranosyl]oxy]-1-oxopentyl]amino]propyl]amino] -3-oxopropoxy]methyl]-1,12,19,25-tetraoxo-16-oxa-13,20,24-t riazanonacos-1-yl]-4-hydroxy-2-pyrrolidinyl)methyl ester
tcacccgtgttgtcatcaagt

SEQ ID NO: 688 - RNA, 21 nt, synthetic construct
  source 1..21: mol_type = other RNA
  modified_base 1: mod_base = OTHER; note = 2'-O-methylguanosine-3'-phosphorothioate
  modified_base 2: mod_base = OTHER; note = 2'-O-methylguanosine-3'-phosphorothioate
  modified_base 3: mod_base = OTHER; note = 2'-O-methylcytidine-3'-phosphate
  modified_base 4: mod_base = OTHER; note = 2'-O-methyluridine-3'-phosphate
  modified_base 5: mod_base = OTHER; note = 2'-O-methylcytidine-3'-phosphate
  modified_base 6: mod_base = OTHER; note = 2'-O-methylcytidine-3'-phosphate
  modified_base 7: mod_base = OTHER; note = 2'-deoxy-2'-fluoroguanosine-3'-phosphate
  modified_base 8: mod_base = OTHER; note = 2'-O-methyluridine-3'-phosphate
  modified_base 9: mod_base = OTHER; note = 2'-deoxy-2'-fluorocytidine-3'-phosphate
  modified_base 10: mod_base = OTHER; note = 2'-deoxy-2'-fluorocytidine-3'-phosphate
  modified_base 11: mod_base = OTHER; note = 2'-deoxy-2'-fluorouridine-3'-phosphate
  modified_base 12: mod_base = OTHER; note = 2'-O-methylcytidine-3'-phosphate
  modified_base 13: mod_base = OTHER; note = 2'-O-methyladenosine-3'-phosphate
  modified_base 14: mod_base = OTHER; note = 2'-O-methyluridine-3'-phosphate
  modified_base 15: mod_base = OTHER; note = 2'-O-methylcytidine-3'-phosphate
  modified_base 16: mod_base = OTHER; note = 2'-O-methyladenosine-3'-phosphate
  modified_base 17: mod_base = OTHER; note = 2'-O-methyladenosine-3'-phosphate
  modified_base 18: mod_base = OTHER; note = 2'-O-methyluridine-3'-phosphate
  modified_base 19: mod_base = OTHER; note = 2'-O-methylguanosine-3'-phosphate
  modified_base 20: mod_base = OTHER; note = 2'-O-methylguanosine-3'-phosphate
  modified_base 21: mod_base = OTHER; note = 2'-O-methyluridine-3'-phosphate ((2S,4R)-1-[29-[[2-(acetylamino)-2-deoxy-beta-D-galactopyra nosyl]oxy]-14,14-bis[[3-[[3-[[5-[[2-(acetylamino)-2-deoxy-b eta-D-galactopyranosyl]oxy]-1-oxopentyl]amino]propyl]amino] -3-oxopropoxy]methyl]-1,12,19,25-tetraoxo-16-oxa-13,20,24-t riazanonacos-1-yl]-4-hydroxy-2-pyrrolidinyl)methyl ester
ggctccgtcctcatcaatggt

SEQ ID NO: 689 - RNA, 21 nt, synthetic construct
  source 1..21: mol_type = other RNA
  modified_base 1: mod_base = OTHER; note = 2'-O-methylguanosine-3'-phosphorothioate
  modified_base 2: mod_base = OTHER; note = 2'-O-methylcytidine-3'-phosphorothioate
  modified_base 3: mod_base = OTHER; note = 2'-O-methyluridine-3'-phosphate
  modified_base 4: mod_base = OTHER; note = 2'-O-methylguanosine-3'-phosphate
  modified_base 5: mod_base = OTHER; note = 2'-O-methylcytidine-3'-phosphate
  modified_base 6: mod_base = OTHER; note = 2'-O-methylcytidine-3'-phosphate
  modified_base 7: mod_base = OTHER; note = 2'-deoxy-2'-fluorouridine-3'-phosphate
  modified_base 8: mod_base = OTHER; note = 2'-O-methyluridine-3'-phosphate
  modified_base 9: mod_base = OTHER; note = 2'-deoxy-2'-fluoroadenosine-3'-phosphate
  modified_base 10: mod_base = OTHER; note = 2'-deoxy-2'-fluorocytidine-3'-phosphate
  modified_base 11: mod_base = OTHER; note = 2'-deoxy-2'-fluoroadenosine-3'-phosphate
  modified_base 12: mod_base = OTHER; note = 2'-O-methylguanosine-3'-phosphate
  modified_base 13: mod_base = OTHER; note = 2'-O-methylcytidine-3'-phosphate
  modified_base 14: mod_base = OTHER; note = 2'-O-methylcytidine-3'-phosphate
  modified_base 15: mod_base = OTHER; note = 2'-O-methylguanosine-3'-phosphate
  modified_base 16: mod_base = OTHER; note = 2'-O-methylcytidine-3'-phosphate
  modified_base 17: mod_base = OTHER; note = 2'-O-methyladenosine-3'-phosphate
  modified_base 18: mod_base = OTHER; note = 2'-O-methylcytidine-3'-phosphate
  modified_base 19: mod_base = OTHER; note = 2'-O-methyluridine-3'-phosphate
  modified_base 20: mod_base = OTHER; note = 2'-O-methylguanosine-3'-phosphate
  modified_base 21: mod_base = OTHER; note = 2'-O-methyluridine-3'-phosphate ((2S,4R)-1-[29-[[2-(acetylamino)-2-deoxy-beta-D-galactopyra nosyl]oxy]-14,14-bis[[3-[[3-[[5-[[2-(acetylamino)-2-deoxy-b eta-D-galactopyranosyl]oxy]-1-oxopentyl]amino]propyl]amino] -3-oxopropoxy]methyl]-1,12,19,25-tetraoxo-16-oxa-13,20,24-t riazanonacos-1-yl]-4-hydroxy-2-pyrrolidinyl)methyl ester
gctgccttacagccgcactgt

SEQ ID NO: 690 - RNA, 21 nt, synthetic construct
  source 1..21: mol_type = other RNA
  modified_base 1: mod_base = OTHER; note = 2'-O-methylguanosine-3'-phosphorothioate
  modified_base 2: mod_base = OTHER; note = 2'-O-methyladenosine-3'-phosphorothioate
  modified_base 3: mod_base = OTHER; note = 2'-O-methylcytidine-3'-phosphate
  modified_base 4: mod_base = OTHER; note = 2'-O-methyluridine-3'-phosphate
  modified_base 5: mod_base = OTHER; note = 2'-O-methyladenosine-3'-phosphate
  modified_base 6: mod_base = OTHER; note = 2'-O-methylcytidine-3'-phosphate
  modified_base 7: mod_base = OTHER; note = 2'-deoxy-2'-fluoroadenosine-3'-phosphate
  modified_base 8: mod_base = OTHER; note = 2'-O-methyluridine-3'-phosphate
  modified_base 9: mod_base = OTHER; note = 2'-deoxy-2'-fluorocytidine-3'-phosphate
  modified_base 10: mod_base = OTHER; note = 2'-deoxy-2'-fluoroadenosine-3'-phosphate
  modified_base 11: mod_base = OTHER; note = 2'-deoxy-2'-fluoroadenosine-3'-phosphate
  modified_base 12: mod_base = OTHER; note = 2'-O-methylguanosine-3'-phosphate
  modified_base 13: mod_base = OTHER; note = 2'-O-methylguanosine-3'-phosphate
  modified_base 14: mod_base = OTHER; note = 2'-O-methyluridine-3'-phosphate
  modified_base 15: mod_base = OTHER; note = 2'-O-methylcytidine-3'-phosphate
  modified_base 16: mod_base = OTHER; note = 2'-O-methyladenosine-3'-phosphate
  modified_base 17: mod_base = OTHER; note = 2'-O-methylguanosine-3'-phosphate
  modified_base 18: mod_base = OTHER; note = 2'-O-methylcytidine-3'-phosphate
  modified_base 19: mod_base = OTHER; note = 2'-O-methyladenosine-3'-phosphate
  modified_base 20: mod_base = OTHER; note = 2'-O-methyluridine-3'-phosphate
  modified_base 21: mod_base = OTHER; note = 2'-O-methyluridine-3'-phosphate ((2S,4R)-1-[29-[[2-(acetylamino)-2-deoxy-beta-D-galactopyra nosyl]oxy]-14,14-bis[[3-[[3-[[5-[[2-(acetylamino)-2-deoxy-b eta-D-galactopyranosyl]oxy]-1-oxopentyl]amino]propyl]amino] -3-oxopropoxy]methyl]-1,12,19,25-tetraoxo-16-oxa-13,20,24-t riazanonacos-1-yl]-4-hydroxy-2-pyrrolidinyl)methyl ester
gactacatcaaggtcagcatt

SEQ ID NO: 691 - RNA, 21 nt, synthetic construct
  source 1..21: mol_type = other RNA
  modified_base 1: mod_base = OTHER; note = 2'-O-methylguanosine-3'-phosphorothioate
  modified_base 2: mod_base = OTHER; note = 2'-O-methylcytidine-3'-phosphorothioate
  modified_base 3: mod_base = OTHER; note = 2'-O-methyluridine-3'-phosphate
  modified_base 4: mod_base = OTHER; note = 2'-O-methylguanosine-3'-phosphate
  modified_base 5: mod_base = OTHER; note = 2'-O-methyladenosine-3'-phosphate
  modified_base 6: mod_base = OTHER; note = 2'-O-methylcytidine-3'-phosphate
  modified_base 7: mod_base = OTHER; note = 2'-deoxy-2'-fluoroadenosine-3'-phosphate
  modified_base 8: mod_base = OTHER; note = 2'-O-methyluridine-3'-phosphate
  modified_base 9: mod_base = OTHER; note = 2'-deoxy-2'-fluorouridine-3'-phosphate
  modified_base 10: mod_base = OTHER; note = 2'-deoxy-2'-fluorocytidine-3'-phosphate
  modified_base 11: mod_base = OTHER; note = 2'-deoxy-2'-fluorocytidine-3'-phosphate
  modified_base 12: mod_base = OTHER; note = 2'-O-methyluridine-3'-phosphate
  modified_base 13: mod_base = OTHER; note = 2'-O-methylguanosine-3'-phosphate
  modified_base 14: mod_base = OTHER; note = 2'-O-methyluridine-3'-phosphate
  modified_base 15: mod_base = OTHER; note = 2'-O-methylguanosine-3'-phosphate
  modified_base 16: mod_base = OTHER; note = 2'-O-methylguanosine-3'-phosphate
  modified_base 17: mod_base = OTHER; note = 2'-O-methyladenosine-3'-phosphate
  modified_base 18: mod_base = OTHER; note = 2'-O-methyladenosine-3'-phosphate
  modified_base 19: mod_base = OTHER; note = 2'-O-methylcytidine-3'-phosphate
  modified_base 20: mod_base = OTHER; note = 2'-O-methylguanosine-3'-phosphate
  modified_base 21: mod_base = OTHER; note = 2'-O-methyluridine-3'-phosphate ((2S,4R)-1-[29-[[2-(acetylamino)-2-deoxy-beta-D-galactopyra nosyl]oxy]-14,14-bis[[3-[[3-[[5-[[2-(acetylamino)-2-deoxy-b eta-D-galactopyranosyl]oxy]-1-oxopentyl]amino]propyl]amino] -3-oxopropoxy]methyl]-1,12,19,25-tetraoxo-16-oxa-13,20,24-t riazanonacos-1-yl]-4-hydroxy-2-pyrrolidinyl)methyl ester
gctgacattcctgtggaacgt

SEQ ID NO: 692 - RNA, 21 nt, synthetic construct
  source 1..21: mol_type = other RNA
  modified_base 1: mod_base = OTHER; note = 2'-O-methylguanosine-3'-phosphorothioate
  modified_base 2: mod_base = OTHER; note = 2'-O-methyladenosine-3'-phosphorothioate
  modified_base 3: mod_base = OTHER; note = 2'-O-methylguanosine-3'-phosphate
  modified_base 4: mod_base = OTHER; note = 2'-O-methylcytidine-3'-phosphate
  modified_base 5: mod_base = OTHER; note = 2'-O-methyluridine-3'-phosphate
  modified_base 6: mod_base = OTHER; note = 2'-O-methylguanosine-3'-phosphate
  modified_base 7: mod_base = OTHER; note = 2'-deoxy-2'-fluoroguanosine-3'-phosphate
  modified_base 8: mod_base = OTHER; note = 2'-O-methyladenosine-3'-phosphate
  modified_base 9: mod_base = OTHER; note = 2'-deoxy-2'-fluorouridine-3'-phosphate
  modified_base 10: mod_base = OTHER; note = 2'-deoxy-2'-fluorocytidine-3'-phosphate
  modified_base 11: mod_base = OTHER; note = 2'-deoxy-2'-fluorocytidine-3'-phosphate
  modified_base 12: mod_base = OTHER; note = 2'-O-methylcytidine-3'-phosphate
  modified_base 13: mod_base = OTHER; note = 2'-O-methyladenosine-3'-phosphate
  modified_base 14: mod_base = OTHER; note = 2'-O-methyladenosine-3'-phosphate
  modified_base 15: mod_base = OTHER; note = 2'-O-methyladenosine-3'-phosphate
  modified_base 16: mod_base = OTHER; note = 2'-O-methyluridine-3'-phosphate
  modified_base 17: mod_base = OTHER; note = 2'-O-methyladenosine-3'-phosphate
  modified_base 18: mod_base = OTHER; note = 2'-O-methylcytidine-3'-phosphate
  modified_base 19: mod_base = OTHER; note = 2'-O-methylguanosine-3'-phosphate
  modified_base 20: mod_base = OTHER; note = 2'-O-methylcytidine-3'-phosphate
  modified_base 21: mod_base = OTHER; note = 2'-O-methyluridine-3'-phosphate ((2S,4R)-1-[29-[[2-(acetylamino)-2-deoxy-beta-D-galactopyra nosyl]oxy]-14,14-bis[[3-[[3-[[5-[[2-(acetylamino)-2-deoxy-b eta-D-galactopyranosyl]oxy]-1-oxopentyl]amino]propyl]amino] -3-oxopropoxy]methyl]-1,12,19,25-tetraoxo-16-oxa-13,20,24-t riazanonacos-1-yl]-4-hydroxy-2-pyrrolidinyl)methyl ester
gagctggatcccaaatacgct

SEQ ID NO: 693 - RNA, 21 nt, synthetic construct
  source 1..21: mol_type = other RNA
  modified_base 1: mod_base = OTHER; note = 2'-O-methylcytidine-3'-phosphorothioate
  modified_base 2: mod_base = OTHER; note = 2'-O-methyladenosine-3'-phosphorothioate
  modified_base 3: mod_base = OTHER; note = 2'-O-methylguanosine-3'-phosphate
  modified_base 4: mod_base = OTHER; note = 2'-O-methyladenosine-3'-phosphate
  modified_base 5: mod_base = OTHER; note = 2'-O-methylcytidine-3'-phosphate
  modified_base 6: mod_base = OTHER; note = 2'-O-methylcytidine-3'-phosphate
  modified_base 7: mod_base = OTHER; note = 2'-deoxy-2'-fluorouridine-3'-phosphate
  modified_base 8: mod_base = OTHER; note = 2'-O-methylguanosine-3'-phosphate
  modified_base 9: mod_base = OTHER; note = 2'-deoxy-2'-fluorouridine-3'-phosphate
  modified_base 10: mod_base = OTHER; note = 2'-deoxy-2'-fluoroguanosine-3'-phosphate
  modified_base 11: mod_base = OTHER; note = 2'-deoxy-2'-fluoroguanosine-3'-phosphate
  modified_base 12: mod_base = OTHER; note = 2'-O-methylcytidine-3'-phosphate
  modified_base 13: mod_base = OTHER; note = 2'-O-methylcytidine-3'-phosphate
  modified_base 14: mod_base = OTHER; note = 2'-O-methyluridine-3'-phosphate
  modified_base 15: mod_base = OTHER; note = 2'-O-methylguanosine-3'-phosphate
  modified_base 16: mod_base = OTHER; note = 2'-O-methyluridine-3'-phosphate
  modified_base 17: mod_base = OTHER; note = 2'-O-methylguanosine-3'-phosphate
  modified_base 18: mod_base = OTHER; note = 2'-O-methyluridine-3'-phosphate
  modified_base 19: mod_base = OTHER; note = 2'-O-methylguanosine-3'-phosphate
  modified_base 20: mod_base = OTHER; note = 2'-O-methylguanosine-3'-phosphate
  modified_base 21: mod_base = OTHER; note = 2'-O-methyluridine-3'-phosphate ((2S,4R)-1-[29-[[2-(acetylamino)-2-deoxy-beta-D-galactopyra nosyl]oxy]-14,14-bis[[3-[[3-[[5-[[2-(acetylamino)-2-deoxy-b eta-D-galactopyranosyl]oxy]-1-oxopentyl]amino]propyl]amino] -3-oxopropoxy]methyl]-1,12,19,25-tetraoxo-16-oxa-13,20,24-t riazanonacos-1-yl]-4-hydroxy-2-pyrrolidinyl)methyl ester
cagacctgtggcctgtgtggt

SEQ ID NO: 694 - RNA, 21 nt, synthetic construct
  source 1..21: mol_type = other RNA
  modified_base 1: mod_base = OTHER; note = 2'-O-methylguanosine-3'-phosphorothioate
  modified_base 2: mod_base = OTHER; note = 2'-O-methylcytidine-3'-phosphorothioate
  modified_base 3: mod_base = OTHER; note = 2'-O-methylcytidine-3'-phosphate
  modified_base 4: mod_base = OTHER; note = 2'-O-methyluridine-3'-phosphate
  modified_base 5: mod_base = OTHER; note = 2'-O-methyluridine-3'-phosphate
  modified_base 6: mod_base = OTHER; note = 2'-O-methylcytidine-3'-phosphate
  modified_base 7: mod_base = OTHER; note = 2'-deoxy-2'-fluoroadenosine-3'-phosphate
  modified_base 8: mod_base = OTHER; note = 2'-O-methyladenosine-3'-phosphate
  modified_base 9: mod_base = OTHER; note = 2'-deoxy-2'-fluorocytidine-3'-phosphate
  modified_base 10: mod_base = OTHER; note = 2'-deoxy-2'-fluoroguanosine-3'-phosphate
  modified_base 11: mod_base = OTHER; note = 2'-deoxy-2'-fluoroadenosine-3'-phosphate
  modified_base 12: mod_base = OTHER; note = 2'-O-methylguanosine-3'-phosphate
  modified_base 13: mod_base = OTHER; note = 2'-O-methyluridine-3'-phosphate
  modified_base 14: mod_base = OTHER; note = 2'-O-methyluridine-3'-phosphate
  modified_base 15: mod_base = OTHER; note = 2'-O-methylcytidine-3'-phosphate
  modified_base 16: mod_base = OTHER; note = 2'-O-methyluridine-3'-phosphate
  modified_base 17: mod_base = OTHER; note = 2'-O-methyladenosine-3'-phosphate
  modified_base 18: mod_base = OTHER; note = 2'-O-methyluridine-3'-phosphate
  modified_base 19: mod_base = OTHER; note = 2'-O-methylguanosine-3'-phosphate
  modified_base 20: mod_base = OTHER; note = 2'-O-methylcytidine-3'-phosphate
  modified_base 21: mod_base = OTHER; note = 2'-O-methyluridine-3'-phosphate ((2S,4R)-1-[29-[[2-(acetylamino)-2-deoxy-beta-D-galactopyra nosyl]oxy]-14,14-bis[[3-[[3-[[5-[[2-(acetylamino)-2-deoxy-b eta-D-galactopyranosyl]oxy]-1-oxopentyl]amino]propyl]amino] -3-oxopropoxy]methyl]-1,12,19,25-tetraoxo-16-oxa-13,20,24-t riazanonacos-1-yl]-4-hydroxy-2-pyrrolidinyl)methyl ester
gccttcaacgagttctatgct

SEQ ID NO: 695 - RNA, 21 nt, synthetic construct
  source 1..21: mol_type = other RNA
  modified_base 1: mod_base = OTHER; note = 2'-O-methylguanosine-3'-phosphorothioate
  modified_base 2: mod_base = OTHER; note = 2'-O-methyladenosine-3'-phosphorothioate
  modified_base 3: mod_base = OTHER; note = 2'-O-methyladenosine-3'-phosphate
  modified_base 4: mod_base = OTHER; note = 2'-O-methylcytidine-3'-phosphate
  modified_base 5: mod_base = OTHER; note = 2'-O-methylcytidine-3'-phosphate
  modified_base 6: mod_base = OTHER; note = 2'-O-methyluridine-3'-phosphate
  modified_base 7: mod_base = OTHER; note = 2'-deoxy-2'-fluoroguanosine-3'-phosphate
  modified_base 8: mod_base = OTHER; note = 2'-O-methylcytidine-3'-phosphate
  modified_base 9: mod_base = OTHER; note = 2'-deoxy-2'-fluoroadenosine-3'-phosphate
  modified_base 10: mod_base = OTHER; note = 2'-deoxy-2'-fluoroguanosine-3'-phosphate
  modified_base 11: mod_base = OTHER; note = 2'-deoxy-2'-fluoroadenosine-3'-phosphate
  modified_base 12: mod_base = OTHER; note = 2'-O-methyladenosine-3'-phosphate
  modified_base 13: mod_base = OTHER; note = 2'-O-methylguanosine-3'-phosphate
  modified_base 14: mod_base = OTHER; note = 2'-O-methyluridine-3'-phosphate
  modified_base 15: mod_base = OTHER; note = 2'-O-methyluridine-3'-phosphate
  modified_base 16: mod_base = OTHER; note = 2'-O-methylguanosine-3'-phosphate
  modified_base 17: mod_base = OTHER; note = 2'-O-methylguanosine-3'-phosphate
  modified_base 18: mod_base = OTHER; note = 2'-O-methyladenosine-3'-phosphate
  modified_base 19: mod_base = OTHER; note = 2'-O-methyluridine-3'-phosphate
  modified_base 20: mod_base = OTHER; note = 2'-O-methylguanosine-3'-phosphate
  modified_base 21: mod_base = OTHER; note = 2'-O-methyluridine-3'-phosphate ((2S,4R)-1-[29-[[2-(acetylamino)-2-deoxy-beta-D-galactopyra nosyl]oxy]-14,14-bis[[3-[[3-[[5-[[2-(acetylamino)-2-deoxy-b eta-D-galactopyranosyl]oxy]-1-oxopentyl]amino]propyl]amino] -3-oxopropoxy]methyl]-1,12,19,25-tetraoxo-16-oxa-13,20,24-t riazanonacos-1-yl]-4-hydroxy-2-pyrrolidinyl)methyl ester
gaacctgcagaagttggatgt

SEQ ID NO: 696 - RNA, 21 nt, synthetic construct
  source 1..21: mol_type = other RNA
  modified_base 1: mod_base = OTHER; note = 2'-O-methyluridine-3'-phosphorothioate
  modified_base 2: mod_base = OTHER; note = 2'-O-methylguanosine-3'-phosphorothioate
  modified_base 3: mod_base = OTHER; note = 2'-O-methylcytidine-3'-phosphate
  modified_base 4: mod_base = OTHER; note = 2'-O-methyladenosine-3'-phosphate
  modified_base 5: mod_base = OTHER; note = 2'-O-methylcytidine-3'-phosphate
  modified_base 6: mod_base = OTHER; note = 2'-O-methylguanosine-3'-phosphate
  modified_base 7: mod_base = OTHER; note = 2'-deoxy-2'-fluoroguanosine-3'-phosphate
  modified_base 8: mod_base = OTHER; note = 2'-O-methyladenosine-3'-phosphate
  modified_base 9: mod_base = OTHER; note = 2'-deoxy-2'-fluorocytidine-3'-phosphate
  modified_base 10: mod_base = OTHER; note = 2'-deoxy-2'-fluoroguanosine-3'-phosphate
  modified_base 11: mod_base = OTHER; note = 2'-deoxy-2'-fluoroadenosine-3'-phosphate
  modified_base 12: mod_base = OTHER; note = 2'-O-methylguanosine-3'-phosphate
  modified_base 13: mod_base = OTHER; note = 2'-O-methylguanosine-3'-phosphate
  modified_base 14: mod_base = OTHER; note = 2'-O-methyladenosine-3'-phosphate
  modified_base 15: mod_base = OTHER; note = 2'-O-methylguanosine-3'-phosphate
  modified_base 16: mod_base = OTHER; note = 2'-O-methylguanosine-3'-phosphate
  modified_base 17: mod_base = OTHER; note = 2'-O-methylguanosine-3'-phosphate
  modified_base 18: mod_base = OTHER; note = 2'-O-methylcytidine-3'-phosphate
  modified_base 19: mod_base = OTHER; note = 2'-O-methyladenosine-3'-phosphate
  modified_base 20: mod_base = OTHER; note = 2'-O-methyluridine-3'-phosphate
  modified_base 21: mod_base = OTHER; note = 2'-O-methyluridine-3'-phosphate ((2S,4R)-1-[29-[[2-(acetylamino)-2-deoxy-beta-D-galactopyra nosyl]oxy]-14,14-bis[[3-[[3-[[5-[[2-(acetylamino)-2-deoxy-b eta-D-galactopyranosyl]oxy]-1-oxopentyl]amino]propyl]amino] -3-oxopropoxy]methyl]-1,12,19,25-tetraoxo-16-oxa-13,20,24-t riazanonacos-1-yl]-4-hydroxy-2-pyrrolidinyl)methyl ester
tgcacggacgaggagggcatt

SEQ ID NO: 697 - RNA, 21 nt, synthetic construct
  source 1..21: mol_type = other RNA
  modified_base 1: mod_base = OTHER; note = 2'-O-methylguanosine-3'-phosphorothioate
  modified_base 2: mod_base = OTHER; note = 2'-O-methyluridine-3'-phosphorothioate
  modified_base 3: mod_base = OTHER; note = 2'-O-methylguanosine-3'-phosphate
  modified_base 4: mod_base = OTHER; note = 2'-O-methylguanosine-3'-phosphate
  modified_base 5: mod_base = OTHER; note = 2'-O-methyladenosine-3'-phosphate
  modified_base 6: mod_base = OTHER; note = 2'-O-methylcytidine-3'-phosphate
  modified_base 7: mod_base = OTHER; note = 2'-deoxy-2'-fluoroadenosine-3'-phosphate
  modified_base 8: mod_base = OTHER; note = 2'-O-methylguanosine-3'-phosphate
  modified_base 9: mod_base = OTHER; note = 2'-deoxy-2'-fluorocytidine-3'-phosphate
  modified_base 10: mod_base = OTHER; note = 2'-deoxy-2'-fluoroadenosine-3'-phosphate
  modified_base 11: mod_base = OTHER; note = 2'-deoxy-2'-fluorocytidine-3'-phosphate
  modified_base 12: mod_base = OTHER; note = 2'-O-methyluridine-3'-phosphate
  modified_base 13: mod_base = OTHER; note = 2'-O-methylguanosine-3'-phosphate
  modified_base 14: mod_base = OTHER; note = 2'-O-methylcytidine-3'-phosphate
  modified_base 15: mod_base = OTHER; note = 2'-O-methylguanosine-3'-phosphate
  modified_base 16: mod_base = OTHER; note = 2'-O-methyluridine-3'-phosphate
  modified_base 17: mod_base = OTHER; note = 2'-O-methyladenosine-3'-phosphate
  modified_base 18: mod_base = OTHER; note = 2'-O-methylcytidine-3'-phosphate
  modified_base 19: mod_base = OTHER; note = 2'-O-methylcytidine-3'-phosphate
  modified_base 20: mod_base = OTHER; note = 2'-O-methyluridine-3'-phosphate
  modified_base 21: mod_base = OTHER; note = 2'-O-methyluridine-3'-phosphate ((2S,4R)-1-[29-[[2-(acetylamino)-2-deoxy-beta-D-galactopyra nosyl]oxy]-14,14-bis[[3-[[3-[[5-[[2-(acetylamino)-2-deoxy-b eta-D-galactopyranosyl]oxy]-1-oxopentyl]amino]propyl]amino] -3-oxopropoxy]methyl]-1,12,19,25-tetraoxo-16-oxa-13,20,24-t riazanonacos-1-yl]-4-hydroxy-2-pyrrolidinyl)methyl ester
gtggacagcactgcgtacctt

SEQ ID NO: 698 - RNA, 21 nt, synthetic construct
  source 1..21: mol_type = other RNA
  modified_base 1: mod_base = OTHER; note = 2'-O-methylguanosine-3'-phosphorothioate
  modified_base 2: mod_base = OTHER; note = 2'-O-methylcytidine-3'-phosphorothioate
  modified_base 3: mod_base = OTHER; note = 2'-O-methylcytidine-3'-phosphate
  modified_base 4: mod_base = OTHER; note = 2'-O-methyladenosine-3'-phosphate
  modified_base 5: mod_base = OTHER; note = 2'-O-methylcytidine-3'-phosphate
  modified_base 6: mod_base = OTHER; note = 2'-O-methylcytidine-3'-phosphate
  modified_base 7: mod_base = OTHER; note = 2'-deoxy-2'-fluorouridine-3'-phosphate
  modified_base 8: mod_base = OTHER; note = 2'-O-methyluridine-3'-phosphate
  modified_base 9: mod_base = OTHER; note = 2'-deoxy-2'-fluorouridine-3'-phosphate
  modified_base 10: mod_base = OTHER; note = 2'-deoxy-2'-fluoroguanosine-3'-phosphate
  modified_base 11: mod_base = OTHER; note = 2'-deoxy-2'-fluorouridine-3'-phosphate
  modified_base 12: mod_base = OTHER; note = 2'-O-methylguanosine-3'-phosphate
  modified_base 13: mod_base = OTHER; note = 2'-O-methylguanosine-3'-phosphate
  modified_base 14: mod_base = OTHER; note = 2'-O-methyladenosine-3'-phosphate
  modified_base 15: mod_base = OTHER; note = 2'-O-methyladenosine-3'-phosphate
  modified_base 16: mod_base = OTHER; note = 2'-O-methyluridine-3'-phosphate
  modified_base 17: mod_base = OTHER; note = 2'-O-methyladenosine-3'-phosphate
  modified_base 18: mod_base = OTHER; note = 2'-O-methylcytidine-3'-phosphate
  modified_base 19: mod_base = OTHER; note = 2'-O-methyluridine-3'-phosphate
  modified_base 20: mod_base = OTHER; note = 2'-O-methylcytidine-3'-phosphate
  modified_base 21: mod_base = OTHER; note = 2'-O-methyluridine-3'-phosphate ((2S,4R)-1-[29-[[2-(acetylamino)-2-deoxy-beta-D-galactopyra nosyl]oxy]-14,14-bis[[3-[[3-[[5-[[2-(acetylamino)-2-deoxy-b eta-D-galactopyranosyl]oxy]-1-oxopentyl]amino]propyl]amino] -3-oxopropoxy]methyl]-1,12,19,25-tetraoxo-16-oxa-13,20,24-t riazanonacos-1-yl]-4-hydroxy-2-pyrrolidinyl)methyl ester
gccacctttgtggaatactct

SEQ ID NO: 699 - RNA, 21 nt, synthetic construct
  source 1..21: mol_type = other RNA
  modified_base 1: mod_base = OTHER; note = 2'-O-methylcytidine-3'-phosphorothioate
  modified_base 2: mod_base = OTHER; note = 2'-O-methyluridine-3'-phosphorothioate
  modified_base 3: mod_base = OTHER; note = 2'-O-methylguanosine-3'-phosphate
  modified_base 4: mod_base = OTHER; note = 2'-O-methylguanosine-3'-phosphate
  modified_base 5: mod_base = OTHER; note = 2'-O-methyladenosine-3'-phosphate
  modified_base 6: mod_base = OTHER; note = 2'-O-methylguanosine-3'-phosphate
  modified_base 7: mod_base = OTHER; note = 2'-deoxy-2'-fluoroguanosine-3'-phosphate
  modified_base 8: mod_base = OTHER; note = 2'-O-methyluridine-3'-phosphate
  modified_base 9: mod_base = OTHER; note = 2'-deoxy-2'-fluoroguanosine-3'-phosphate
  modified_base 10: mod_base = OTHER; note = 2'-deoxy-2'-fluorocytidine-3'-phosphate
  modified_base 11: mod_base = OTHER; note = 2'-deoxy-2'-fluorocytidine-3'-phosphate
  modified_base 12: mod_base = OTHER; note = 2'-O-methylcytidine-3'-phosphate
  modified_base 13: mod_base = OTHER; note = 2'-O-methyluridine-3'-phosphate
  modified_base 14: mod_base = OTHER; note = 2'-O-methylguanosine-3'-phosphate
  modified_base 15: mod_base = OTHER; note = 2'-O-methyladenosine-3'-phosphate
  modified_base 16: mod_base = OTHER; note = 2'-O-methylguanosine-3'-phosphate
  modified_base 17: mod_base = OTHER; note = 2'-O-methylcytidine-3'-phosphate
  modified_base 18: mod_base = OTHER; note = 2'-O-methyluridine-3'-phosphate
  modified_base 19: mod_base = OTHER; note = 2'-O-methylcytidine-3'-phosphate
  modified_base 20: mod_base = OTHER; note = 2'-O-methyluridine-3'-phosphate
  modified_base 21: mod_base = OTHER; note = 2'-O-methyluridine-3'-phosphate ((2S,4R)-1-[29-[[2-(acetylamino)-2-deoxy-beta-D-galactopyra nosyl]oxy]-14,14-bis[[3-[[3-[[5-[[2-(acetylamino)-2-deoxy-b eta-D-galactopyranosyl]oxy]-1-oxopentyl]amino]propyl]amino] -3-oxopropoxy]methyl]-1,12,19,25-tetraoxo-16-oxa-13,20,24-t riazanonacos-1-yl]-4-hydroxy-2-pyrrolidinyl)methyl ester
ctggaggtgccctgagctctt

SEQ ID NO: 700 - RNA, 21 nt, synthetic construct
  source 1..21: mol_type = other RNA
  modified_base 1: mod_base = OTHER; note = 2'-O-methylcytidine-3'-phosphorothioate
  modified_base 2: mod_base = OTHER; note = 2'-O-methyluridine-3'-phosphorothioate
  modified_base 3: mod_base = OTHER; note = 2'-O-methylcytidine-3'-phosphate
  modified_base 4: mod_base = OTHER; note = 2'-O-methyladenosine-3'-phosphate
  modified_base 5: mod_base = OTHER; note = 2'-O-methyladenosine-3'-phosphate
  modified_base 6: mod_base = OTHER; note = 2'-O-methylcytidine-3'-phosphate
  modified_base 7: mod_base = OTHER; note = 2'-deoxy-2'-fluoroadenosine-3'-phosphate
  modified_base 8: mod_base = OTHER; note = 2'-O-methyluridine-3'-phosphate
  modified_base 9: mod_base = OTHER; note = 2'-deoxy-2'-fluoroguanosine-3'-phosphate
  modified_base 10: mod_base = OTHER; note = 2'-deoxy-2'-fluorocytidine-3'-phosphate
  modified_base 11: mod_base = OTHER; note = 2'-deoxy-2'-fluoroadenosine-3'-phosphate
  modified_base 12: mod_base = OTHER; note = 2'-O-methylguanosine-3'-phosphate
  modified_base 13: mod_base = OTHER; note = 2'-O-methylcytidine-3'-phosphate
  modified_base 14: mod_base = OTHER; note = 2'-O-methyladenosine-3'-phosphate
  modified_base 15: mod_base = OTHER; note = 2'-O-methylcytidine-3'-phosphate
  modified_base 16: mod_base = OTHER; note = 2'-O-methylcytidine-3'-phosphate
  modified_base 17: mod_base = OTHER; note = 2'-O-methyladenosine-3'-phosphate
  modified_base 18: mod_base = OTHER; note = 2'-O-methylguanosine-3'-phosphate
  modified_base 19: mod_base = OTHER; note = 2'-O-methylguanosine-3'-phosphate
  modified_base 20: mod_base = OTHER; note = 2'-O-methyladenosine-3'-phosphate
  modified_base 21: mod_base = OTHER; note = 2'-O-methyluridine-3'-phosphate ((2S,4R)-1-[29-[[2-(acetylamino)-2-deoxy-beta-D-galactopyra nosyl]oxy]-14,14-bis[[3-[[3-[[5-[[2-(acetylamino)-2-deoxy-b eta-D-galactopyranosyl]oxy]-1-oxopentyl]amino]propyl]amino] -3-oxopropoxy]methyl]-1,12,19,25-tetraoxo-16-oxa-13,20,24-t riazanonacos-1-yl]-4-hydroxy-2-pyrrolidinyl)methyl ester
ctcaacatgcagcaccaggat

SEQ ID NO: 701 - RNA, 21 nt, synthetic construct
  source 1..21: mol_type = other RNA
  modified_base 1: mod_base = OTHER; note = 2'-O-methyladenosine-3'-phosphorothioate
  modified_base 2: mod_base = OTHER; note = 2'-O-methylcytidine-3'-phosphorothioate
  modified_base 3: mod_base = OTHER; note = 2'-O-methylcytidine-3'-phosphate
  modified_base 4: mod_base = OTHER; note = 2'-O-methylcytidine-3'-phosphate
  modified_base 5: mod_base = OTHER; note = 2'-O-methyluridine-3'-phosphate
  modified_base 6: mod_base = OTHER; note = 2'-O-methylguanosine-3'-phosphate
  modified_base 7: mod_base = OTHER; note = 2'-deoxy-2'-fluorocytidine-3'-phosphate
  modified_base 8: mod_base = OTHER; note = 2'-O-methyladenosine-3'-phosphate
  modified_base 9: mod_base = OTHER; note = 2'-deoxy-2'-fluorocytidine-3'-phosphate
  modified_base 10: mod_base = OTHER; note = 2'-deoxy-2'-fluoroguanosine-3'-phosphate
  modified_base 11: mod_base = OTHER; note = 2'-deoxy-2'-fluoroguanosine-3'-phosphate
  modified_base 12: mod_base = OTHER; note = 2'-O-methyladenosine-3'-phosphate
  modified_base 13: mod_base = OTHER; note = 2'-O-methylcytidine-3'-phosphate
  modified_base 14: mod_base = OTHER; note = 2'-O-methyladenosine-3'-phosphate
  modified_base 15: mod_base = OTHER; note = 2'-O-methylcytidine-3'-phosphate
  modified_base 16: mod_base = OTHER; note = 2'-O-methylcytidine-3'-phosphate
  modified_base 17: mod_base = OTHER; note = 2'-O-methyluridine-3'-phosphate
  modified_base 18: mod_base = OTHER; note = 2'-O-methylguanosine-3'-phosphate
  modified_base 19: mod_base = OTHER; note = 2'-O-methylcytidine-3'-phosphate
  modified_base 20: mod_base = OTHER; note = 2'-O-methyluridine-3'-phosphate
  modified_base 21: mod_base = OTHER; note = 2'-O-methyluridine-3'-phosphate ((2S,4R)-1-[29-[[2-(acetylamino)-2-deoxy-beta-D-galactopyra nosyl]oxy]-14,14-bis[[3-[[3-[[5-[[2-(acetylamino)-2-deoxy-b eta-D-galactopyranosyl]oxy]-1-oxopentyl]amino]propyl]amino] -3-oxopropoxy]methyl]-1,12,19,25-tetraoxo-16-oxa-13,20,24-t riazanonacos-1-yl]-4-hydroxy-2-pyrrolidinyl)methyl ester
accctgcacggacacctgctt

SEQ ID NO: 702 - RNA, 21 nt, synthetic construct
  source 1..21: mol_type = other RNA
  modified_base 1: mod_base = OTHER; note = 2'-O-methylguanosine-3'-phosphorothioate
  modified_base 2: mod_base = OTHER; note = 2'-O-methylguanosine-3'-phosphorothioate
  modified_base 3: mod_base = OTHER; note = 2'-O-methyladenosine-3'-phosphate
  modified_base 4: mod_base = OTHER; note = 2'-O-methylcytidine-3'-phosphate
  modified_base 5: mod_base = OTHER; note = 2'-O-methylcytidine-3'-phosphate
  modified_base 6: mod_base = OTHER; note = 2'-O-methyladenosine-3'-phosphate
  modified_base 7: mod_base = OTHER; note = 2'-deoxy-2'-fluorocytidine-3'-phosphate
  modified_base 8: mod_base = OTHER; note = 2'-O-methyluridine-3'-phosphate
  modified_base 9: mod_base = OTHER; note = 2'-deoxy-2'-fluoroguanosine-3'-phosphate
  modified_base 10: mod_base = OTHER; note = 2'-deoxy-2'-fluorouridine-3'-phosphate
  modified_base 11: mod_base = OTHER; note = 2'-deoxy-2'-fluoroguanosine-3'-phosphate
  modified_base 12: mod_base = OTHER; note = 2'-O-methyluridine-3'-phosphate
  modified_base 13: mod_base = OTHER; note = 2'-O-methylguanosine-3'-phosphate
  modified_base 14: mod_base = OTHER; note = 2'-O-methylguanosine-3'-phosphate
  modified_base 15: mod_base = OTHER; note = 2'-O-methyladenosine-3'-phosphate
  modified_base 16: mod_base = OTHER; note = 2'-O-methylcytidine-3'-phosphate
  modified_base 17: mod_base = OTHER; note = 2'-O-methylguanosine-3'-phosphate
  modified_base 18: mod_base = OTHER; note = 2'-O-methylguanosine-3'-phosphate
  modified_base 19: mod_base = OTHER; note = 2'-O-methylcytidine-3'-phosphate
  modified_base 20: mod_base = OTHER; note = 2'-O-methyluridine-3'-phosphate
  modified_base 21: mod_base = OTHER; note = 2'-O-methyluridine-3'-phosphate ((2S,4R)-1-[29-[[2-(acetylamino)-2-deoxy-beta-D-galactopyra nosyl]oxy]-14,14-bis[[3-[[3-[[5-[[2-(acetylamino)-2-deoxy-b eta-D-galactopyranosyl]oxy]-1-oxopentyl]amino]propyl]amino] -3-oxopropoxy]methyl]-1,12,19,25-tetraoxo-16-oxa-13,20,24-t riazanonacos-1-yl]-4-hydroxy-2-pyrrolidinyl)methyl ester
ggaccactgtgtggacggctt

SEQ ID NO: 703 - RNA, 21 nt, synthetic construct
  source 1..21: mol_type = other RNA
  modified_base 1: mod_base = OTHER; note = 2'-O-methylguanosine-3'-phosphorothioate
  modified_base 2: mod_base = OTHER; note = 2'-O-methylcytidine-3'-phosphorothioate
  modified_base 3: mod_base = OTHER; note = 2'-O-methyluridine-3'-phosphate
  modified_base 4: mod_base = OTHER; note = 2'-O-methylguanosine-3'-phosphate
  modified_base 5: mod_base = OTHER; note = 2'-O-methylguanosine-3'-phosphate
  modified_base 6: mod_base = OTHER; note = 2'-O-methyladenosine-3'-phosphate
  modified_base 7: mod_base = OTHER; note = 2'-deoxy-2'-fluorouridine-3'-phosphate
  modified_base 8: mod_base = OTHER; note = 2'-O-methylguanosine-3'-phosphate
  modified_base 9: mod_base = OTHER; note = 2'-deoxy-2'-fluoroadenosine-3'-phosphate
  modified_base 10: mod_base = OTHER; note = 2'-deoxy-2'-fluorocytidine-3'-phosphate
  modified_base 11: mod_base = OTHER; note = 2'-deoxy-2'-fluoroadenosine-3'-phosphate
  modified_base 12: mod_base = OTHER; note = 2'-O-methyluridine-3'-phosphate
  modified_base 13: mod_base = OTHER; note = 2'-O-methylcytidine-3'-phosphate
  modified_base 14: mod_base = OTHER; note = 2'-O-methyladenosine-3'-phosphate
  modified_base 15: mod_base = OTHER; note = 2'-O-methylcytidine-3'-phosphate
  modified_base 16: mod_base = OTHER; note = 2'-O-methylguanosine-3'-phosphate
  modified_base 17: mod_base = OTHER; note = 2'-O-methylcytidine-3'-phosphate
  modified_base 18: mod_base = OTHER; note = 2'-O-methyladenosine-3'-phosphate
  modified_base 19: mod_base = OTHER; note = 2'-O-methylcytidine-3'-phosphate
  modified_base 20: mod_base = OTHER; note = 2'-O-methyluridine-3'-phosphate
  modified_base 21: mod_base = OTHER; note = 2'-O-methyluridine-3'-phosphate ((2S,4R)-1-[29-[[2-(acetylamino)-2-deoxy-beta-D-galactopyra nosyl]oxy]-14,14-bis[[3-[[3-[[5-[[2-(acetylamino)-2-deoxy-b eta-D-galactopyranosyl]oxy]-1-oxopentyl]amino]propyl]amino] -3-oxopropoxy]methyl]-1,12,19,25-tetraoxo-16-oxa-13,20,24-t riazanonacos-1-yl]-4-hydroxy-2-pyrrolidinyl)methyl ester
gctggatgacatcacgcactt

SEQ ID NO: 704 - RNA, 21 nt, synthetic construct
  source 1..21: mol_type = other RNA
  modified_base 1: mod_base = OTHER; note = 2'-O-methylcytidine-3'-phosphorothioate
  modified_base 2: mod_base = OTHER; note = 2'-O-methyladenosine-3'-phosphorothioate
  modified_base 3: mod_base = OTHER; note = 2'-O-methylcytidine-3'-phosphate
  modified_base 4: mod_base = OTHER; note = 2'-O-methylcytidine-3'-phosphate
  modified_base 5: mod_base = OTHER; note = 2'-O-methyluridine-3'-phosphate
  modified_base 6: mod_base = OTHER; note = 2'-O-methylcytidine-3'-phosphate
  modified_base 7: mod_base = OTHER; note = 2'-deoxy-2'-fluorocytidine-3'-phosphate
  modified_base 8: mod_base = OTHER; note = 2'-O-methyluridine-3'-phosphate
  modified_base 9: mod_base = OTHER; note = 2'-deoxy-2'-fluorouridine-3'-phosphate
  modified_base 10: mod_base = OTHER; note = 2'-deoxy-2'-fluorocytidine-3'-phosphate
  modified_base 11: mod_base = OTHER; note = 2'-deoxy-2'-fluoroadenosine-3'-phosphate
  modified_base 12: mod_base = OTHER; note = 2'-O-methyladenosine-3'-phosphate
  modified_base 13: mod_base = OTHER; note = 2'-O-methylcytidine-3'-phosphate
  modified_base 14: mod_base = OTHER; note = 2'-O-methyladenosine-3'-phosphate
  modified_base 15: mod_base = OTHER; note = 2'-O-methylcytidine-3'-phosphate
  modified_base 16: mod_base = OTHER; note = 2'-O-methylcytidine-3'-phosphate
  modified_base 17: mod_base = OTHER; note = 2'-O-methyladenosine-3'-phosphate
  modified_base 18: mod_base = OTHER; note = 2'-O-methylcytidine-3'-phosphate
  modified_base 19: mod_base = OTHER; note = 2'-O-methylcytidine-3'-phosphate
  modified_base 20: mod_base = OTHER; note = 2'-O-methyluridine-3'-phosphate
  modified_base 21: mod_base = OTHER; note = 2'-O-methyluridine-3'-phosphate ((2S,4R)-1-[29-[[2-(acetylamino)-2-deoxy-beta-D-galactopyra nosyl]oxy]-14,14-bis[[3-[[3-[[5-[[2-(acetylamino)-2-deoxy-b eta-D-galactopyranosyl]oxy]-1-oxopentyl]amino]propyl]amino] -3-oxopropoxy]methyl]-1,12,19,25-tetraoxo-16-oxa-13,20,24-t riazanonacos-1-yl]-4-hydroxy-2-pyrrolidinyl)methyl ester
cacctccttcaacaccacctt

SEQ ID NO: 705 - RNA, 21 nt, synthetic construct
  source 1..21: mol_type = other RNA
  modified_base 1: mod_base = OTHER; note = 2'-O-methylcytidine-3'-phosphorothioate
  modified_base 2: mod_base = OTHER; note = 2'-O-methyluridine-3'-phosphorothioate
  modified_base 3: mod_base = OTHER; note = 2'-O-methyladenosine-3'-phosphate
  modified_base 4: mod_base = OTHER; note = 2'-O-methyluridine-3'-phosphate
  modified_base 5: mod_base = OTHER; note = 2'-O-methylguanosine-3'-phosphate
  modified_base 6: mod_base = OTHER; note = 2'-O-methylguanosine-3'-phosphate
  modified_base 7: mod_base = OTHER; note = 2'-deoxy-2'-fluorocytidine-3'-phosphate
  modified_base 8: mod_base = OTHER; note = 2'-O-methyladenosine-3'-phosphate
  modified_base 9: mod_base = OTHER; note = 2'-deoxy-2'-fluoroguanosine-3'-phosphate
  modified_base 10: mod_base = OTHER; note = 2'-deoxy-2'-fluorouridine-3'-phosphate
  modified_base 11: mod_base = OTHER; note = 2'-deoxy-2'-fluoroguanosine-3'-phosphate
  modified_base 12: mod_base = OTHER; note = 2'-O-methylcytidine-3'-phosphate
  modified_base 13: mod_base = OTHER; note = 2'-O-methylcytidine-3'-phosphate
  modified_base 14: mod_base = OTHER; note = 2'-O-methyladenosine-3'-phosphate
  modified_base 15: mod_base = OTHER; note = 2'-O-methylguanosine-3'-phosphate
  modified_base 16: mod_base = OTHER; note = 2'-O-methylguanosine-3'-phosphate
  modified_base 17: mod_base = OTHER; note = 2'-O-methyladenosine-3'-phosphate
  modified_base 18: mod_base = OTHER; note = 2'-O-methylcytidine-3'-phosphate
  modified_base 19: mod_base = OTHER; note = 2'-O-methylcytidine-3'-phosphate
  modified_base 20: mod_base = OTHER; note = 2'-O-methyluridine-3'-phosphate
  modified_base 21: mod_base = OTHER; note = 2'-O-methyluridine-3'-phosphate ((2S,4R)-1-[29-[[2-(acetylamino)-2-deoxy-beta-D-galactopyra nosyl]oxy]-14,14-bis[[3-[[3-[[5-[[2-(acetylamino)-2-deoxy-b eta-D-galactopyranosyl]oxy]-1-oxopentyl]amino]propyl]amino] -3-oxopropoxy]methyl]-1,12,19,25-tetraoxo-16-oxa-13,20,24-t riazanonacos-1-yl]-4-hydroxy-2-pyrrolidinyl)methyl ester
ctatggcagtgccaggacctt

SEQ ID NO: 706 - RNA, 21 nt, synthetic construct
  source 1..21: mol_type = other RNA
  modified_base 1: mod_base = OTHER; note = 2'-O-methylcytidine-3'-phosphorothioate
  modified_base 2: mod_base = OTHER; note = 2'-O-methylcytidine-3'-phosphorothioate
  modified_base 3: mod_base = OTHER; note = 2'-O-methyluridine-3'-phosphate
  modified_base 4: mod_base = OTHER; note = 2'-O-methyladenosine-3'-phosphate
  modified_base 5: mod_base = OTHER; note = 2'-O-methyluridine-3'-phosphate
  modified_base 6: mod_base = OTHER; note = 2'-O-methylguanosine-3'-phosphate
  modified_base 7: mod_base = OTHER; note = 2'-deoxy-2'-fluoroadenosine-3'-phosphate
  modified_base 8: mod_base = OTHER; note = 2'-O-methyluridine-3'-phosphate
  modified_base 9: mod_base = OTHER; note = 2'-deoxy-2'-fluoroguanosine-3'-phosphate
  modified_base 10: mod_base = OTHER; note = 2'-deoxy-2'-fluoroadenosine-3'-phosphate
  modified_base 11: mod_base = OTHER; note = 2'-deoxy-2'-fluoroguanosine-3'-phosphate
  modified_base 12: mod_base = OTHER; note = 2'-O-methyladenosine-3'-phosphate
  modified_base 13: mod_base = OTHER; note = 2'-O-methyladenosine-3'-phosphate
  modified_base 14: mod_base = OTHER; note = 2'-O-methyladenosine-3'-phosphate
  modified_base 15: mod_base = OTHER; note = 2'-O-methylcytidine-3'-phosphate
  modified_base 16: mod_base = OTHER; note = 2'-O-methyluridine-3'-phosphate
  modified_base 17: mod_base = OTHER; note = 2'-O-methylcytidine-3'-phosphate
  modified_base 18: mod_base = OTHER; note = 2'-O-methyluridine-3'-phosphate
  modified_base 19: mod_base = OTHER; note = 2'-O-methyladenosine-3'-phosphate
  modified_base 20: mod_base = OTHER; note = 2'-O-methylcytidine-3'-phosphate
  modified_base 21: mod_base = OTHER; note = 2'-O-methyluridine-3'-phosphate ((2S,4R)-1-[29-[[2-(acetylamino)-2-deoxy-beta-D-galactopyra nosyl]oxy]-14,14-bis[[3-[[3-[[5-[[2-(acetylamino)-2-deoxy-b eta-D-galactopyranosyl]oxy]-1-oxopentyl]amino]propyl]amino] -3-oxopropoxy]methyl]-1,12,19,25-tetraoxo-16-oxa-13,20,24-t riazanonacos-1-yl]-4-hydroxy-2-pyrrolidinyl)methyl ester
cctatgatgagaaactctact

SEQ ID NO: 707 - RNA, 21 nt, synthetic construct
  source 1..21: mol_type = other RNA
  modified_base 1: mod_base = OTHER; note = 2'-O-methyluridine-3'-phosphorothioate
  modified_base 2: mod_base = OTHER; note = 2'-O-methyladenosine-3'-phosphorothioate
  modified_base 3: mod_base = OTHER; note = 2'-O-methylcytidine-3'-phosphate
  modified_base 4: mod_base = OTHER; note = 2'-O-methylguanosine-3'-phosphate
  modified_base 5: mod_base = OTHER; note = 2'-O-methyluridine-3'-phosphate
  modified_base 6: mod_base = OTHER; note = 2'-O-methyluridine-3'-phosphate
  modified_base 7: mod_base = OTHER; note = 2'-deoxy-2'-fluorocytidine-3'-phosphate
  modified_base 8: mod_base = OTHER; note = 2'-O-methyluridine-3'-phosphate
  modified_base 9: mod_base = OTHER; note = 2'-deoxy-2'-fluoroguanosine-3'-phosphate
  modified_base 10: mod_base = OTHER; note = 2'-deoxy-2'-fluorouridine-3'-phosphate
  modified_base 11: mod_base = OTHER; note = 2'-deoxy-2'-fluorocytidine-3'-phosphate
  modified_base 12: mod_base = OTHER; note = 2'-O-methylcytidine-3'-phosphate
  modified_base 13: mod_base = OTHER; note = 2'-O-methyladenosine-3'-phosphate
  modified_base 14: mod_base = OTHER; note = 2'-O-methyladenosine-3'-phosphate
  modified_base 15: mod_base = OTHER; note = 2'-O-methylguanosine-3'-phosphate
  modified_base 16: mod_base = OTHER; note = 2'-O-methyladenosine-3'-phosphate
  modified_base 17: mod_base = OTHER; note = 2'-O-methyladenosine-3'-phosphate
  modified_base 18: mod_base = OTHER; note = 2'-O-methyladenosine-3'-phosphate
  modified_base 19: mod_base = OTHER; note = 2'-O-methyluridine-3'-phosphate
  modified_base 20: mod_base = OTHER; note = 2'-O-methylguanosine-3'-phosphate
  modified_base 21: mod_base = OTHER; note = 2'-O-methyluridine-3'-phosphate ((2S,4R)-1-[29-[[2-(acetylamino)-2-deoxy-beta-D-galactopyra nosyl]oxy]-14,14-bis[[3-[[3-[[5-[[2-(acetylamino)-2-deoxy-b eta-D-galactopyranosyl]oxy]-1-oxopentyl]amino]propyl]amino] -3-oxopropoxy]methyl]-1,12,19,25-tetraoxo-16-oxa-13,20,24-t riazanonacos-1-yl]-4-hydroxy-2-pyrrolidinyl)methyl ester
tacgttctgtccaagaaatgt

SEQ ID NO: 708 - RNA, 21 nt, synthetic construct
  source 1..21: mol_type = other RNA
  modified_base 1: mod_base = OTHER; note = 2'-O-methylguanosine-3'-phosphorothioate
  modified_base 2: mod_base = OTHER; note = 2'-O-methyladenosine-3'-phosphorothioate
  modified_base 3: mod_base = OTHER; note = 2'-O-methylcytidine-3'-phosphate
  modified_base 4: mod_base = OTHER; note = 2'-O-methyladenosine-3'-phosphate
  modified_base 5: mod_base = OTHER; note = 2'-O-methylguanosine-3'-phosphate
  modified_base 6: mod_base = OTHER; note = 2'-O-methylcytidine-3'-phosphate
  modified_base 7: mod_base = OTHER; note = 2'-deoxy-2'-fluoroadenosine-3'-phosphate
  modified_base 8: mod_base = OTHER; note = 2'-O-methylguanosine-3'-phosphate
  modified_base 9: mod_base = OTHER; note = 2'-deoxy-2'-fluorocytidine-3'-phosphate
  modified_base 10: mod_base = OTHER; note = 2'-deoxy-2'-fluorouridine-3'-phosphate
  modified_base 11: mod_base = OTHER; note = 2'-deoxy-2'-fluorouridine-3'-phosphate
  modified_base 12: mod_base = OTHER; note = 2'-O-methylcytidine-3'-phosphate
  modified_base 13: mod_base = OTHER; note = 2'-O-methyladenosine-3'-phosphate
  modified_base 14: mod_base = OTHER; note = 2'-O-methylcytidine-3'-phosphate
  modified_base 15: mod_base = OTHER; note = 2'-O-methylcytidine-3'-phosphate
  modified_base 16: mod_base = OTHER; note = 2'-O-methylguanosine-3'-phosphate
  modified_base 17: mod_base = OTHER; note = 2'-O-methyluridine-3'-phosphate
  modified_base 18: mod_base = OTHER; note = 2'-O-methylguanosine-3'-phosphate
  modified_base 19: mod_base = OTHER; note = 2'-O-methylcytidine-3'-phosphate
  modified_base 20: mod_base = OTHER; note = 2'-O-methyluridine-3'-phosphate
  modified_base 21: mod_base = OTHER; note = 2'-O-methyluridine-3'-phosphate ((2S,4R)-1-[29-[[2-(acetylamino)-2-deoxy-beta-D-galactopyra nosyl]oxy]-14,14-bis[[3-[[3-[[5-[[2-(acetylamino)-2-deoxy-b eta-D-galactopyranosyl]oxy]-1-oxopentyl]amino]propyl]amino] -3-oxopropoxy]methyl]-1,12,19,25-tetraoxo-16-oxa-13,20,24-t riazanonacos-1-yl]-4-hydroxy-2-pyrrolidinyl)methyl ester
gacagcagcttcaccgtgctt

SEQ ID NO: 709 - RNA, 21 nt, synthetic construct
  source 1..21: mol_type = other RNA
  modified_base 1: mod_base = OTHER; note = 2'-O-methyladenosine-3'-phosphorothioate
  modified_base 2: mod_base = OTHER; note = 2'-O-methyladenosine-3'-phosphorothioate
  modified_base 3: mod_base = OTHER; note = 2'-O-methylcytidine-3'-phosphate
  modified_base 4: mod_base = OTHER; note = 2'-O-methylguanosine-3'-phosphate
  modified_base 5: mod_base = OTHER; note = 2'-O-methyladenosine-3'-phosphate
  modified_base 6: mod_base = OTHER; note = 2'-O-methylguanosine-3'-phosphate
  modified_base 7: mod_base = OTHER; note = 2'-deoxy-2'-fluoroadenosine-3'-phosphate
  modified_base 8: mod_base = OTHER; note = 2'-O-methyladenosine-3'-phosphate
  modified_base 9: mod_base = OTHER; note = 2'-deoxy-2'-fluorocytidine-3'-phosphate
  modified_base 10: mod_base = OTHER; note = 2'-deoxy-2'-fluorouridine-3'-phosphate
  modified_base 11: mod_base = OTHER; note = 2'-deoxy-2'-fluoroguanosine-3'-phosphate
  modified_base 12: mod_base = OTHER; note = 2'-O-methylcytidine-3'-phosphate
  modified_base 13: mod_base = OTHER; note = 2'-O-methylcytidine-3'-phosphate
  modified_base 14: mod_base = OTHER; note = 2'-O-methyluridine-3'-phosphate
  modified_base 15: mod_base = OTHER; note = 2'-O-methylguanosine-3'-phosphate
  modified_base 16: mod_base = OTHER; note = 2'-O-methyladenosine-3'-phosphate
  modified_base 17: mod_base = OTHER; note = 2'-O-methyladenosine-3'-phosphate
  modified_base 18: mod_base = OTHER; note = 2'-O-methyladenosine-3'-phosphate
  modified_base 19: mod_base = OTHER; note = 2'-O-methylguanosine-3'-phosphate
  modified_base 20: mod_base = OTHER; note = 2'-O-methylcytidine-3'-phosphate
  modified_base 21: mod_base = OTHER; note = 2'-O-methyluridine-3'-phosphate ((2S,4R)-1-[29-[[2-(acetylamino)-2-deoxy-beta-D-galactopyra nosyl]oxy]-14,14-bis[[3-[[3-[[5-[[2-(acetylamino)-2-deoxy-b eta-D-galactopyranosyl]oxy]-1-oxopentyl]amino]propyl]amino] -3-oxopropoxy]methyl]-1,12,19,25-tetraoxo-16-oxa-13,20,24-t riazanonacos-1-yl]-4-hydroxy-2-pyrrolidinyl)methyl ester
aacgagaactgcctgaaagct

SEQ ID NO: 710 - RNA, 21 nt, synthetic construct
  source 1..21: mol_type = other RNA
  modified_base 1: mod_base = OTHER; note = 2'-O-methyluridine-3'-phosphorothioate
  modified_base 2: mod_base = OTHER; note = 2'-O-methylcytidine-3'-phosphorothioate
  modified_base 3: mod_base = OTHER; note = 2'-O-methylcytidine-3'-phosphate
  modified_base 4: mod_base = OTHER; note = 2'-O-methyluridine-3'-phosphate
  modified_base 5: mod_base = OTHER; note = 2'-O-methylcytidine-3'-phosphate
  modified_base 6: mod_base = OTHER; note = 2'-O-methyladenosine-3'-phosphate
  modified_base 7: mod_base = OTHER; note = 2'-deoxy-2'-fluoroadenosine-3'-phosphate
  modified_base 8: mod_base = OTHER; note = 2'-O-methylcytidine-3'-phosphate
  modified_base 9: mod_base = OTHER; note = 2'-deoxy-2'-fluorouridine-3'-phosphate
  modified_base 10: mod_base = OTHER; note = 2'-deoxy-2'-fluorocytidine-3'-phosphate
  modified_base 11: mod_base = OTHER; note = 2'-deoxy-2'-fluorocytidine-3'-phosphate
  modified_base 12: mod_base = OTHER; note = 2'-O-methyladenosine-3'-phosphate
  modified_base 13: mod_base = OTHER; note = 2'-O-methyluridine-3'-phosphate
  modified_base 14: mod_base = OTHER; note = 2'-O-methylcytidine-3'-phosphate
  modified_base 15: mod_base = OTHER; note = 2'-O-methyluridine-3'-phosphate
  modified_base 16: mod_base = OTHER; note = 2'-O-methyladenosine-3'-phosphate
  modified_base 17: mod_base = OTHER; note = 2'-O-methylcytidine-3'-phosphate
  modified_base 18: mod_base = OTHER; note = 2'-O-methyladenosine-3'-phosphate
  modified_base 19: mod_base = OTHER; note = 2'-O-methylcytidine-3'-phosphate
  modified_base 20: mod_base = OTHER; note = 2'-O-methylguanosine-3'-phosphate
  modified_base 21: mod_base = OTHER; note = 2'-O-methyluridine-3'-phosphate ((2S,4R)-1-[29-[[2-(acetylamino)-2-deoxy-beta-D-galactopyra nosyl]oxy]-14,14-bis[[3-[[3-[[5-[[2-(acetylamino)-2-deoxy-b eta-D-galactopyranosyl]oxy]-1-oxopentyl]amino]propyl]amino] -3-oxopropoxy]methyl]-1,12,19,25-tetraoxo-16-oxa-13,20,24-t riazanonacos-1-yl]-4-hydroxy-2-pyrrolidinyl)methyl ester
tcctcaactccatctacacgt

SEQ ID NO: 711 - RNA, 21 nt, synthetic construct
  source 1..21: mol_type = other RNA
  modified_base 1: mod_base = OTHER; note = 2'-O-methylguanosine-3'-phosphorothioate
  modified_base 2: mod_base = OTHER; note = 2'-O-methylcytidine-3'-phosphorothioate
  modified_base 3: mod_base = OTHER; note = 2'-O-methylcytidine-3'-phosphate
  modified_base 4: mod_base = OTHER; note = 2'-O-methyladenosine-3'-phosphate
  modified_base 5: mod_base = OTHER; note = 2'-O-methyladenosine-3'-phosphate
  modified_base 6: mod_base = OTHER; note = 2'-O-methylcytidine-3'-phosphate
  modified_base 7: mod_base = OTHER; note = 2'-deoxy-2'-fluoroadenosine-3'-phosphate
  modified_base 8: mod_base = OTHER; note = 2'-O-methyluridine-3'-phosphate
  modified_base 9: mod_base = OTHER; note = 2'-deoxy-2'-fluorocytidine-3'-phosphate
  modified_base 10: mod_base = OTHER; note = 2'-deoxy-2'-fluoroadenosine-3'-phosphate
  modified_base 11: mod_base = OTHER; note = 2'-deoxy-2'-fluorocytidine-3'-phosphate
  modified_base 12: mod_base = OTHER; note = 2'-O-methylcytidine-3'-phosphate
  modified_base 13: mod_base = OTHER; note = 2'-O-methylcytidine-3'-phosphate
  modified_base 14: mod_base = OTHER; note = 2'-O-methyluridine-3'-phosphate
  modified_base 15: mod_base = OTHER; note = 2'-O-methylguanosine-3'-phosphate
  modified_base 16: mod_base = OTHER; note = 2'-O-methyluridine-3'-phosphate
  modified_base 17: mod_base = OTHER; note = 2'-O-methyluridine-3'-phosphate
  modified_base 18: mod_base = OTHER; note = 2'-O-methylcytidine-3'-phosphate
  modified_base 19: mod_base = OTHER; note = 2'-O-methyladenosine-3'-phosphate
  modified_base 20: mod_base = OTHER; note = 2'-O-methylcytidine-3'-phosphate
  modified_base 21: mod_base = OTHER; note = 2'-O-methyluridine-3'-phosphate ((2S,4R)-1-[29-[[2-(acetylamino)-2-deoxy-beta-D-galactopyra nosyl]oxy]-14,14-bis[[3-[[3-[[5-[[2-(acetylamino)-2-deoxy-b eta-D-galactopyranosyl]oxy]-1-oxopentyl]amino]propyl]amino] -3-oxopropoxy]methyl]-1,12,19,25-tetraoxo-16-oxa-13,20,24-t riazanonacos-1-yl]-4-hydroxy-2-pyrrolidinyl)methyl ester
gccaacatcaccctgttcact

SEQ ID NO: 712 - RNA, 21 nt, synthetic construct
  source 1..21: mol_type = other RNA
  modified_base 1: mod_base = OTHER; note = 2'-O-methyluridine-3'-phosphorothioate
  modified_base 2: mod_base = OTHER; note = 2'-O-methylcytidine-3'-phosphorothioate
  modified_base 3: mod_base = OTHER; note = 2'-O-methylguanosine-3'-phosphate
  modified_base 4: mod_base = OTHER; note = 2'-O-methyladenosine-3'-phosphate
  modified_base 5: mod_base = OTHER; note = 2'-O-methylguanosine-3'-phosphate
  modified_base 6: mod_base = OTHER; note = 2'-O-methylcytidine-3'-phosphate
  modified_base 7: mod_base = OTHER; note = 2'-deoxy-2'-fluorouridine-3'-phosphate
  modified_base 8: mod_base = OTHER; note = 2'-O-methyluridine-3'-phosphate
  modified_base 9: mod_base = OTHER; note = 2'-deoxy-2'-fluorocytidine-3'-phosphate
  modified_base 10: mod_base = OTHER; note = 2'-deoxy-2'-fluorouridine-3'-phosphate
  modified_base 11: mod_base = OTHER; note = 2'-deoxy-2'-fluorouridine-3'-phosphate
  modified_base 12: mod_base = OTHER; note = 2'-O-methylcytidine-3'-phosphate
  modified_base 13: mod_base = OTHER; note = 2'-O-methyladenosine-3'-phosphate
  modified_base 14: mod_base = OTHER; note = 2'-O-methyluridine-3'-phosphate
  modified_base 15: mod_base = OTHER; note = 2'-O-methylcytidine-3'-phosphate
  modified_base 16: mod_base = OTHER; note = 2'-O-methylguanosine-3'-phosphate
  modified_base 17: mod_base = OTHER; note = 2'-O-methyluridine-3'-phosphate
  modified_base 18: mod_base = OTHER; note = 2'-O-methylguanosine-3'-phosphate
  modified_base 19: mod_base = OTHER; note = 2'-O-methylguanosine-3'-phosphate
  modified_base 20: mod_base = OTHER; note = 2'-O-methyluridine-3'-phosphate
  modified_base 21: mod_base = OTHER; note = 2'-O-methyluridine-3'-phosphate ((2S,4R)-1-[29-[[2-(acetylamino)-2-deoxy-beta-D-galactopyra nosyl]oxy]-14,14-bis[[3-[[3-[[5-[[2-(acetylamino)-2-deoxy-b eta-D-galactopyranosyl]oxy]-1-oxopentyl]amino]propyl]amino] -3-oxopropoxy]methyl]-1,12,19,25-tetraoxo-16-oxa-13,20,24-t riazanonacos-1-yl]-4-hydroxy-2-pyrrolidinyl)methyl ester
tcgagcttcttcatcgtggtt

SEQ ID NO: 713 - RNA, 21 nt, synthetic construct
  source 1..21: mol_type = other RNA
  modified_base 1: mod_base = OTHER; note = 2'-O-methylcytidine-3'-phosphorothioate
  modified_base 2: mod_base = OTHER; note = 2'-O-methyladenosine-3'-phosphorothioate
  modified_base 3: mod_base = OTHER; note = 2'-O-methylguanosine-3'-phosphate
  modified_base 4: mod_base = OTHER; note = 2'-O-methylcytidine-3'-phosphate
  modified_base 5: mod_base = OTHER; note = 2'-O-methyluridine-3'-phosphate
  modified_base 6: mod_base = OTHER; note = 2'-O-methylguanosine-3'-phosphate
  modified_base 7: mod_base = OTHER; note = 2'-deoxy-2'-fluorocytidine-3'-phosphate
  modified_base 8: mod_base = OTHER; note = 2'-O-methyluridine-3'-phosphate
  modified_base 9: mod_base = OTHER; note = 2'-deoxy-2'-fluoroguanosine-3'-phosphate
  modified_base 10: mod_base = OTHER; note = 2'-deoxy-2'-fluoroguanosine-3'-phosphate
  modified_base 11: mod_base = OTHER; note = 2'-deoxy-2'-fluorouridine-3'-phosphate
  modified_base 12: mod_base = OTHER; note = 2'-O-methylguanosine-3'-phosphate
  modified_base 13: mod_base = OTHER; note = 2'-O-methylcytidine-3'-phosphate
  modified_base 14: mod_base = OTHER; note = 2'-O-methyladenosine-3'-phosphate
  modified_base 15: mod_base = OTHER; note = 2'-O-methylguanosine-3'-phosphate
  modified_base 16: mod_base = OTHER; note = 2'-O-methylcytidine-3'-phosphate
  modified_base 17: mod_base = OTHER; note = 2'-O-methyluridine-3'-phosphate
  modified_base 18: mod_base = OTHER; note = 2'-O-methylguanosine-3'-phosphate
  modified_base 19: mod_base = OTHER; note = 2'-O-methylguanosine-3'-phosphate
  modified_base 20: mod_base = OTHER; note = 2'-O-methyluridine-3'-phosphate
  modified_base 21: mod_base = OTHER; note = 2'-O-methyluridine-3'-phosphate ((2S,4R)-1-[29-[[2-(acetylamino)-2-deoxy-beta-D-galactopyra nosyl]oxy]-14,14-bis[[3-[[3-[[5-[[2-(acetylamino)-2-deoxy-b eta-D-galactopyranosyl]oxy]-1-oxopentyl]amino]propyl]amino] -3-oxopropoxy]methyl]-1,12,19,25-tetraoxo-16-oxa-13,20,24-t riazanonacos-1-yl]-4-hydroxy-2-pyrrolidinyl)methyl ester
cagctgctggtgcagctggtt

SEQ ID NO: 714 - RNA, 21 nt, synthetic construct
  source 1..21: mol_type = other RNA
  modified_base 1: mod_base = OTHER; note = 2'-O-methylcytidine-3'-phosphorothioate
  modified_base 2: mod_base = OTHER; note = 2'-O-methyluridine-3'-phosphorothioate
  modified_base 3: mod_base = OTHER; note = 2'-O-methylcytidine-3'-phosphate
  modified_base 4: mod_base = OTHER; note = 2'-O-methyladenosine-3'-phosphate
  modified_base 5: mod_base = OTHER; note = 2'-O-methyluridine-3'-phosphate
  modified_base 6: mod_base = OTHER; note = 2'-O-methylguanosine-3'-phosphate
  modified_base 7: mod_base = OTHER; note = 2'-deoxy-2'-fluorocytidine-3'-phosphate
  modified_base 8: mod_base = OTHER; note = 2'-O-methyladenosine-3'-phosphate
  modified_base 9: mod_base = OTHER; note = 2'-deoxy-2'-fluoroguanosine-3'-phosphate
  modified_base 10: mod_base = OTHER; note = 2'-deoxy-2'-fluoroguanosine-3'-phosphate
  modified_base 11: mod_base = OTHER; note = 2'-deoxy-2'-fluorouridine-3'-phosphate
  modified_base 12: mod_base = OTHER; note = 2'-O-methylguanosine-3'-phosphate
  modified_base 13: mod_base = OTHER; note = 2'-O-methyluridine-3'-phosphate
  modified_base 14: mod_base = OTHER; note = 2'-O-methyluridine-3'-phosphate
  modified_base 15: mod_base = OTHER; note = 2'-O-methyluridine-3'-phosphate
  modified_base 16: mod_base = OTHER; note = 2'-O-methylguanosine-3'-phosphate
  modified_base 17: mod_base = OTHER; note = 2'-O-methyluridine-3'-phosphate
  modified_base 18: mod_base = OTHER; note = 2'-O-methylcytidine-3'-phosphate
  modified_base 19: mod_base = OTHER; note = 2'-O-methyladenosine-3'-phosphate
  modified_base 20: mod_base = OTHER; note = 2'-O-methylguanosine-3'-phosphate
  modified_base 21: mod_base = OTHER; note = 2'-O-methyluridine-3'-phosphate ((2S,4R)-1-[29-[[2-(acetylamino)-2-deoxy-beta-D-galactopyra nosyl]oxy]-14,14-bis[[3-[[3-[[5-[[2-(acetylamino)-2-deoxy-b eta-D-galactopyranosyl]oxy]-1-oxopentyl]amino]propyl]amino] -3-oxopropoxy]methyl]-1,12,19,25-tetraoxo-16-oxa-13,20,24-t riazanonacos-1-yl]-4-hydroxy-2-pyrrolidinyl)methyl ester
ctcatgcaggtgtttgtcagt

SEQ ID NO: 715 - RNA, 21 nt, synthetic construct
  source 1..21: mol_type = other RNA
  modified_base 1: mod_base = OTHER; note = 2'-O-methylguanosine-3'-phosphorothioate
  modified_base 2: mod_base = OTHER; note = 2'-O-methyluridine-3'-phosphorothioate
  modified_base 3: mod_base = OTHER; note = 2'-O-methylguanosine-3'-phosphate
  modified_base 4: mod_base = OTHER; note = 2'-O-methylguanosine-3'-phosphate
  modified_base 5: mod_base = OTHER; note = 2'-O-methylguanosine-3'-phosphate
  modified_base 6: mod_base = OTHER; note = 2'-O-methyladenosine-3'-phosphate
  modified_base 7: mod_base = OTHER; note = 2'-deoxy-2'-fluoroadenosine-3'-phosphate
  modified_base 8: mod_base = OTHER; note = 2'-O-methylcytidine-3'-phosphate
  modified_base 9: mod_base = OTHER; note = 2'-deoxy-2'-fluorouridine-3'-phosphate
  modified_base 10: mod_base = OTHER; note = 2'-deoxy-2'-fluorouridine-3'-phosphate
  modified_base 11: mod_base = OTHER; note = 2'-deoxy-2'-fluorocytidine-3'-phosphate
  modified_base 12: mod_base = OTHER; note = 2'-O-methyladenosine-3'-phosphate
  modified_base 13: mod_base = OTHER; note = 2'-O-methyladenosine-3'-phosphate
  modified_base 14: mod_base = OTHER; note = 2'-O-methylcytidine-3'-phosphate
  modified_base 15: mod_base = OTHER; note = 2'-O-methylcytidine-3'-phosphate
  modified_base 16: mod_base = OTHER; note = 2'-O-methyladenosine-3'-phosphate
  modified_base 17: mod_base = OTHER; note = 2'-O-methylguanosine-3'-phosphate
  modified_base 18: mod_base = OTHER; note = 2'-O-methyladenosine-3'-phosphate
  modified_base 19: mod_base = OTHER; note = 2'-O-methyladenosine-3'-phosphate
  modified_base 20: mod_base = OTHER; note = 2'-O-methylcytidine-3'-phosphate
  modified_base 21: mod_base = OTHER; note = 2'-O-methyluridine-3'-phosphate ((2S,4R)-1-[29-[[2-(acetylamino)-2-deoxy-beta-D-galactopyra nosyl]oxy]-14,14-bis[[3-[[3-[[5-[[2-(acetylamino)-2-deoxy-b eta-D-galactopyranosyl]oxy]-1-oxopentyl]amino]propyl]amino] -3-oxopropoxy]methyl]-1,12,19,25-tetraoxo-16-oxa-13,20,24-t riazanonacos-1-yl]-4-hydroxy-2-pyrrolidinyl)methyl ester
gtgggaacttcaaccagaact

SEQ ID NO: 716 - RNA, 21 nt, synthetic construct
  source 1..21: mol_type = other RNA
  modified_base 1: mod_base = OTHER; note = 2'-O-methyluridine-3'-phosphorothioate
  modified_base 2: mod_base = OTHER; note = 2'-O-methylguanosine-3'-phosphorothioate
  modified_base 3: mod_base = OTHER; note = 2'-O-methyladenosine-3'-phosphate
  modified_base 4: mod_base = OTHER; note = 2'-O-methylcytidine-3'-phosphate
  modified_base 5: mod_base = OTHER; note = 2'-O-methylguanosine-3'-phosphate
  modified_base 6: mod_base = OTHER; note = 2'-O-methyladenosine-3'-phosphate
  modified_base 7: mod_base = OTHER; note = 2'-deoxy-2'-fluorocytidine-3'-phosphate
  modified_base 8: mod_base = OTHER; note = 2'-O-methyluridine-3'-phosphate
  modified_base 9: mod_base = OTHER; note = 2'-deoxy-2'-fluorouridine-3'-phosphate
  modified_base 10: mod_base = OTHER; note = 2'-deoxy-2'-fluorocytidine-3'-phosphate
  modified_base 11: mod_base = OTHER; note = 2'-deoxy-2'-fluoroadenosine-3'-phosphate
  modified_base 12: mod_base = OTHER; note = 2'-O-methylcytidine-3'-phosphate
  modified_base 13: mod_base = OTHER; note = 2'-O-methylguanosine-3'-phosphate
  modified_base 14: mod_base = OTHER; note = 2'-O-methylguanosine-3'-phosphate
  modified_base 15: mod_base = OTHER; note = 2'-O-methylcytidine-3'-phosphate
  modified_base 16: mod_base = OTHER; note = 2'-O-methylcytidine-3'-phosphate
  modified_base 17: mod_base = OTHER; note = 2'-O-methylcytidine-3'-phosphate
  modified_base 18: mod_base = OTHER; note = 2'-O-methyluridine-3'-phosphate
  modified_base 19: mod_base = OTHER; note = 2'-O-methylcytidine-3'-phosphate
  modified_base 20: mod_base = OTHER; note = 2'-O-methyladenosine-3'-phosphate
  modified_base 21: mod_base = OTHER; note = 2'-O-methyluridine-3'-phosphate ((2S,4R)-1-[29-[[2-(acetylamino)-2-deoxy-beta-D-galactopyra nosyl]oxy]-14,14-bis[[3-[[3-[[5-[[2-(acetylamino)-2-deoxy-b eta-D-galactopyranosyl]oxy]-1-oxopentyl]amino]propyl]amino] -3-oxopropoxy]methyl]-1,12,19,25-tetraoxo-16-oxa-13,20,24-t riazanonacos-1-yl]-4-hydroxy-2-pyrrolidinyl)methyl ester
tgacgacttcacggccctcat

SEQ ID NO: 717 - RNA, 21 nt, synthetic construct
  source 1..21: mol_type = other RNA
  modified_base 1: mod_base = OTHER; note = 2'-O-methyladenosine-3'-phosphorothioate
  modified_base 2: mod_base = OTHER; note = 2'-O-methylguanosine-3'-phosphorothioate
  modified_base 3: mod_base = OTHER; note = 2'-O-methylcytidine-3'-phosphate
  modified_base 4: mod_base = OTHER; note = 2'-O-methylcytidine-3'-phosphate
  modified_base 5: mod_base = OTHER; note = 2'-O-methyluridine-3'-phosphate
  modified_base 6: mod_base = OTHER; note = 2'-O-methyluridine-3'-phosphate
  modified_base 7: mod_base = OTHER; note = 2'-deoxy-2'-fluorocytidine-3'-phosphate
  modified_base 8: mod_base = OTHER; note = 2'-O-methylguanosine-3'-phosphate
  modified_base 9: mod_base = OTHER; note = 2'-deoxy-2'-fluorocytidine-3'-phosphate
  modified_base 10: mod_base = OTHER; note = 2'-deoxy-2'-fluorocytidine-3'-phosphate
  modified_base 11: mod_base = OTHER; note = 2'-deoxy-2'-fluoroadenosine-3'-phosphate
  modified_base 12: mod_base = OTHER; note = 2'-O-methyladenosine-3'-phosphate
  modified_base 13: mod_base = OTHER; note = 2'-O-methylcytidine-3'-phosphate
  modified_base 14: mod_base = OTHER; note = 2'-O-methyladenosine-3'-phosphate
  modified_base 15: mod_base = OTHER; note = 2'-O-methylcytidine-3'-phosphate
  modified_base 16: mod_base = OTHER; note = 2'-O-methylcytidine-3'-phosphate
  modified_base 17: mod_base = OTHER; note = 2'-O-methyluridine-3'-phosphate
  modified_base 18: mod_base = OTHER; note = 2'-O-methylguanosine-3'-phosphate
  modified_base 19: mod_base = OTHER; note = 2'-O-methylguanosine-3'-phosphate
  modified_base 20: mod_base = OTHER; note = 2'-O-methyladenosine-3'-phosphate
  modified_base 21: mod_base = OTHER; note = 2'-O-methyluridine-3'-phosphate ((2S,4R)-1-[29-[[2-(acetylamino)-2-deoxy-beta-D-galactopyra nosyl]oxy]-14,14-bis[[3-[[3-[[5-[[2-(acetylamino)-2-deoxy-b eta-D-galactopyranosyl]oxy]-1-oxopentyl]amino]propyl]amino] -3-oxopropoxy]methyl]-1,12,19,25-tetraoxo-16-oxa-13,20,24-t riazanonacos-1-yl]-4-hydroxy-2-pyrrolidinyl)methyl ester
agccttcgccaacacctggat

SEQ ID NO: 718 - RNA, 21 nt, synthetic construct
  source 1..21: mol_type = other RNA
  modified_base 1: mod_base = OTHER; note = 2'-O-methylcytidine-3'-phosphorothioate
  modified_base 2: mod_base = OTHER; note = 2'-O-methylcytidine-3'-phosphorothioate
  modified_base 3: mod_base = OTHER; note = 2'-O-methyladenosine-3'-phosphate
  modified_base 4: mod_base = OTHER; note = 2'-O-methylguanosine-3'-phosphate
  modified_base 5: mod_base = OTHER; note = 2'-O-methylguanosine-3'-phosphate
  modified_base 6: mod_base = OTHER; note = 2'-O-methyladenosine-3'-phosphate
  modified_base 7: mod_base = OTHER; note = 2'-deoxy-2'-fluoroadenosine-3'-phosphate
  modified_base 8: mod_base = OTHER; note = 2'-O-methylcytidine-3'-phosphate
  modified_base 9: mod_base = OTHER; note = 2'-deoxy-2'-fluoroadenosine-3'-phosphate
  modified_base 10: mod_base = OTHER; note = 2'-deoxy-2'-fluoroguanosine-3'-phosphate
  modified_base 11: mod_base = OTHER; note = 2'-deoxy-2'-fluorocytidine-3'-phosphate
  modified_base 12: mod_base = OTHER; note = 2'-O-methyluridine-3'-phosphate
  modified_base 13: mod_base = OTHER; note = 2'-O-methyluridine-3'-phosphate
  modified_base 14: mod_base = OTHER; note = 2'-O-methyluridine-3'-phosphate
  modified_base 15: mod_base = OTHER; note = 2'-O-methylguanosine-3'-phosphate
  modified_base 16: mod_base = OTHER; note = 2'-O-methyladenosine-3'-phosphate
  modified_base 17: mod_base = OTHER; note = 2'-O-methylguanosine-3'-phosphate
  modified_base 18: mod_base = OTHER; note = 2'-O-methylguanosine-3'-phosphate
  modified_base 19: mod_base = OTHER; note = 2'-O-methyladenosine-3'-phosphate
  modified_base 20: mod_base = OTHER; note = 2'-O-methylcytidine-3'-phosphate
  modified_base 21: mod_base = OTHER; note = 2'-O-methyluridine-3'-phosphate ((2S,4R)-1-[29-[[2-(acetylamino)-2-deoxy-beta-D-galactopyra nosyl]oxy]-14,14-bis[[3-[[3-[[5-[[2-(acetylamino)-2-deoxy-b eta-D-galactopyranosyl]oxy]-1-oxopentyl]amino]propyl]amino] -3-oxopropoxy]methyl]-1,12,19,25-tetraoxo-16-oxa-13,20,24-t riazanonacos-1-yl]-4-hydroxy-2-pyrrolidinyl)methyl ester
ccaggaacagctttgaggact

SEQ ID NO: 719 - RNA, 21 nt, synthetic construct
  source 1..21: mol_type = other RNA
  modified_base 1: mod_base = OTHER; note = 2'-O-methylguanosine-3'-phosphorothioate
  modified_base 2: mod_base = OTHER; note = 2'-O-methyluridine-3'-phosphorothioate
  modified_base 3: mod_base = OTHER; note = 2'-O-methylguanosine-3'-phosphate
  modified_base 4: mod_base = OTHER; note = 2'-O-methylguanosine-3'-phosphate
  modified_base 5: mod_base = OTHER; note = 2'-O-methyladenosine-3'-phosphate
  modified_base 6: mod_base = OTHER; note = 2'-O-methylguanosine-3'-phosphate
  modified_base 7: mod_base = OTHER; note = 2'-deoxy-2'-fluoroadenosine-3'-phosphate
  modified_base 8: mod_base = OTHER; note = 2'-O-methyladenosine-3'-phosphate
  modified_base 9: mod_base = OTHER; note = 2'-deoxy-2'-fluorouridine-3'-phosphate
  modified_base 10: mod_base = OTHER; note = 2'-deoxy-2'-fluoroguanosine-3'-phosphate
  modified_base 11: mod_base = OTHER; note = 2'-deoxy-2'-fluoroadenosine-3'-phosphate
  modified_base 12: mod_base = OTHER; note = 2'-O-methylguanosine-3'-phosphate
  modified_base 13: mod_base = OTHER; note = 2'-O-methyladenosine-3'-phosphate
  modified_base 14: mod_base = OTHER; note = 2'-O-methyladenosine-3'-phosphate
  modified_base 15: mod_base = OTHER; note = 2'-O-methylcytidine-3'-phosphate
  modified_base 16: mod_base = OTHER; note = 2'-O-methyluridine-3'-phosphate
  modified_base 17: mod_base = OTHER; note = 2'-O-methyladenosine-3'-phosphate
  modified_base 18: mod_base = OTHER; note = 2'-O-methylcytidine-3'-phosphate
  modified_base 19: mod_base = OTHER; note = 2'-O-methylguanosine-3'-phosphate
  modified_base 20: mod_base = OTHER; note = 2'-O-methylcytidine-3'-phosphate
  modified_base 21: mod_base = OTHER; note = 2'-O-methyluridine-3'-phosphate ((2S,4R)-1-[29-[[2-(acetylamino)-2-deoxy-beta-D-galactopyra nosyl]oxy]-14,14-bis[[3-[[3-[[5-[[2-(acetylamino)-2-deoxy-b eta-D-galactopyranosyl]oxy]-1-oxopentyl]amino]propyl]amino] -3-oxopropoxy]methyl]-1,12,19,25-tetraoxo-16-oxa-13,20,24-t riazanonacos-1-yl]-4-hydroxy-2-pyrrolidinyl)methyl ester
gtggagaatgagaactacgct

SEQ ID NO: 720 - RNA, 21 nt, synthetic construct
  source 1..21: mol_type = other RNA
  modified_base 1: mod_base = OTHER; note = 2'-O-methyluridine-3'-phosphorothioate
  modified_base 2: mod_base = OTHER; note = 2'-O-methylcytidine-3'-phosphorothioate
  modified_base 3: mod_base = OTHER; note = 2'-O-methylcytidine-3'-phosphate
  modified_base 4: mod_base = OTHER; note = 2'-O-methylcytidine-3'-phosphate
  modified_base 5: mod_base = OTHER; note = 2'-O-methyladenosine-3'-phosphate
  modified_base 6: mod_base = OTHER; note = 2'-O-methyladenosine-3'-phosphate
  modified_base 7: mod_base = OTHER; note = 2'-deoxy-2'-fluorocytidine-3'-phosphate
  modified_base 8: mod_base = OTHER; note = 2'-O-methyladenosine-3'-phosphate
  modified_base 9: mod_base = OTHER; note = 2'-deoxy-2'-fluoroguanosine-3'-phosphate
  modified_base 10: mod_base = OTHER; note = 2'-deoxy-2'-fluorouridine-3'-phosphate
  modified_base 11: mod_base = OTHER; note = 2'-deoxy-2'-fluoroguanosine-3'-phosphate
  modified_base 12: mod_base = OTHER; note = 2'-O-methylcytidine-3'-phosphate
  modified_base 13: mod_base = OTHER; note = 2'-O-methylcytidine-3'-phosphate
  modified_base 14: mod_base = OTHER; note = 2'-O-methyluridine-3'-phosphate
  modified_base 15: mod_base = OTHER; note = 2'-O-methyluridine-3'-phosphate
  modified_base 16: mod_base = OTHER; note = 2'-O-methylcytidine-3'-phosphate
  modified_base 17: mod_base = OTHER; note = 2'-O-methyluridine-3'-phosphate
  modified_base 18: mod_base = OTHER; note = 2'-O-methylcytidine-3'-phosphate
  modified_base 19: mod_base = OTHER; note = 2'-O-methylguanosine-3'-phosphate
  modified_base 20: mod_base = OTHER; note = 2'-O-methylcytidine-3'-phosphate
  modified_base 21: mod_base = OTHER; note = 2'-O-methyluridine-3'-phosphate ((2S,4R)-1-[29-[[2-(acetylamino)-2-deoxy-beta-D-galactopyra nosyl]oxy]-14,14-bis[[3-[[3-[[5-[[2-(acetylamino)-2-deoxy-b eta-D-galactopyranosyl]oxy]-1-oxopentyl]amino]propyl]amino] -3-oxopropoxy]methyl]-1,12,19,25-tetraoxo-16-oxa-13,20,24-t riazanonacos-1-yl]-4-hydroxy-2-pyrrolidinyl)methyl ester
tcccaacagtgccttctcgct

SEQ ID NO: 721 - RNA, 21 nt, synthetic construct
  source 1..21: mol_type = other RNA
  modified_base 1: mod_base = OTHER; note = 2'-O-methylcytidine-3'-phosphorothioate
  modified_base 2: mod_base = OTHER; note = 2'-O-methyluridine-3'-phosphorothioate
  modified_base 3: mod_base = OTHER; note = 2'-O-methyluridine-3'-phosphate
  modified_base 4: mod_base = OTHER; note = 2'-O-methylcytidine-3'-phosphate
  modified_base 5: mod_base = OTHER; note = 2'-O-methylcytidine-3'-phosphate
  modified_base 6: mod_base = OTHER; note = 2'-O-methyladenosine-3'-phosphate
  modified_base 7: mod_base = OTHER; note = 2'-deoxy-2'-fluorocytidine-3'-phosphate
  modified_base 8: mod_base = OTHER; note = 2'-O-methyluridine-3'-phosphate
  modified_base 9: mod_base = OTHER; note = 2'-deoxy-2'-fluorocytidine-3'-phosphate
  modified_base 10: mod_base = OTHER; note = 2'-deoxy-2'-fluoroguanosine-3'-phosphate
  modified_base 11: mod_base = OTHER; note = 2'-deoxy-2'-fluoroadenosine-3'-phosphate
  modified_base 12: mod_base = OTHER; note = 2'-O-methyladenosine-3'-phosphate
  modified_base 13: mod_base = OTHER; note = 2'-O-methylcytidine-3'-phosphate
  modified_base 14: mod_base = OTHER; note = 2'-O-methyluridine-3'-phosphate
  modified_base 15: mod_base = OTHER; note = 2'-O-methylguanosine-3'-phosphate
  modified_base 16: mod_base = OTHER; note = 2'-O-methylcytidine-3'-phosphate
  modified_base 17: mod_base = OTHER; note = 2'-O-methyladenosine-3'-phosphate
  modified_base 18: mod_base = OTHER; note = 2'-O-methyluridine-3'-phosphate
  modified_base 19: mod_base = OTHER; note = 2'-O-methylguanosine-3'-phosphate
  modified_base 20: mod_base = OTHER; note = 2'-O-methyluridine-3'-phosphate
  modified_base 21: mod_base = OTHER; note = 2'-O-methyluridine-3'-phosphate ((2S,4R)-1-[29-[[2-(acetylamino)-2-deoxy-beta-D-galactopyra nosyl]oxy]-14,14-bis[[3-[[3-[[5-[[2-(acetylamino)-2-deoxy-b eta-D-galactopyranosyl]oxy]-1-oxopentyl]amino]propyl]amino] -3-oxopropoxy]methyl]-1,12,19,25-tetraoxo-16-oxa-13,20,24-t riazanonacos-1-yl]-4-hydroxy-2-pyrrolidinyl)methyl ester
cttccactcgaactgcatgtt

SEQ ID NO: 722 - RNA, 21 nt, synthetic construct
  source 1..21: mol_type = other RNA
  modified_base 1: mod_base = OTHER; note = 2'-O-methylcytidine-3'-phosphorothioate
  modified_base 2: mod_base = OTHER; note = 2'-O-methyladenosine-3'-phosphorothioate
  modified_base 3: mod_base = OTHER; note = 2'-O-methylcytidine-3'-phosphate
  modified_base 4: mod_base = OTHER; note = 2'-O-methylcytidine-3'-phosphate
  modified_base 5: mod_base = OTHER; note = 2'-O-methyluridine-3'-phosphate
  modified_base 6: mod_base = OTHER; note = 2'-O-methylguanosine-3'-phosphate
  modified_base 7: mod_base = OTHER; note = 2'-deoxy-2'-fluorocytidine-3'-phosphate
  modified_base 8: mod_base = OTHER; note = 2'-O-methyladenosine-3'-phosphate
  modified_base 9: mod_base = OTHER; note = 2'-deoxy-2'-fluoroadenosine-3'-phosphate
  modified_base 10: mod_base = OTHER; note = 2'-deoxy-2'-fluorocytidine-3'-phosphate
  modified_base 11: mod_base = OTHER; note = 2'-deoxy-2'-fluorouridine-3'-phosphate
  modified_base 12: mod_base = OTHER; note = 2'-O-methylguanosine-3'-phosphate
  modified_base 13: mod_base = OTHER; note = 2'-O-methyluridine-3'-phosphate
  modified_base 14: mod_base = OTHER; note = 2'-O-methylguanosine-3'-phosphate
  modified_base 15: mod_base = OTHER; note = 2'-O-methyladenosine-3'-phosphate
  modified_base 16: mod_base = OTHER; note = 2'-O-methylguanosine-3'-phosphate
  modified_base 17: mod_base = OTHER; note = 2'-O-methylcytidine-3'-phosphate
  modified_base 18: mod_base = OTHER; note = 2'-O-methylguanosine-3'-phosphate
  modified_base 19: mod_base = OTHER; note = 2'-O-methylguanosine-3'-phosphate
  modified_base 20: mod_base = OTHER; note = 2'-O-methyladenosine-3'-phosphate
  modified_base 21: mod_base = OTHER; note = 2'-O-methyluridine-3'-phosphate ((2S,4R)-1-[29-[[2-(acetylamino)-2-deoxy-beta-D-galactopyra nosyl]oxy]-14,14-bis[[3-[[3-[[5-[[2-(acetylamino)-2-deoxy-b eta-D-galactopyranosyl]oxy]-1-oxopentyl]amino]propyl]amino] -3-oxopropoxy]methyl]-1,12,19,25-tetraoxo-16-oxa-13,20,24-t riazanonacos-1-yl]-4-hydroxy-2-pyrrolidinyl)methyl ester
cacctgcaactgtgagcggat

SEQ ID NO: 723 - RNA, 21 nt, synthetic construct
  source 1..21: mol_type = other RNA
  modified_base 1: mod_base = OTHER; note = 2'-O-methylcytidine-3'-phosphorothioate
  modified_base 2: mod_base = OTHER; note = 2'-O-methylcytidine-3'-phosphorothioate
  modified_base 3: mod_base = OTHER; note = 2'-O-methyluridine-3'-phosphate
  modified_base 4: mod_base = OTHER; note = 2'-O-methylcytidine-3'-phosphate
  modified_base 5: mod_base = OTHER; note = 2'-O-methylcytidine-3'-phosphate
  modified_base 6: mod_base = OTHER; note = 2'-O-methyluridine-3'-phosphate
  modified_base 7: mod_base = OTHER; note = 2'-deoxy-2'-fluoroadenosine-3'-phosphate
  modified_base 8: mod_base = OTHER; note = 2'-O-methyluridine-3'-phosphate
  modified_base 9: mod_base = OTHER; note = 2'-deoxy-2'-fluoroguanosine-3'-phosphate
  modified_base 10: mod_base = OTHER; note = 2'-deoxy-2'-fluorouridine-3'-phosphate
  modified_base 11: mod_base = OTHER; note = 2'-deoxy-2'-fluoroguanosine-3'-phosphate
  modified_base 12: mod_base = OTHER; note = 2'-O-methylcytidine-3'-phosphate
  modified_base 13: mod_base = OTHER; note = 2'-O-methyladenosine-3'-phosphate
  modified_base 14: mod_base = OTHER; note = 2'-O-methylcytidine-3'-phosphate
  modified_base 15: mod_base = OTHER; note = 2'-O-methylguanosine-3'-phosphate
  modified_base 16: mod_base = OTHER; note = 2'-O-methylcytidine-3'-phosphate
  modified_base 17: mod_base = OTHER; note = 2'-O-methylcytidine-3'-phosphate
  modified_base 18: mod_base = OTHER; note = 2'-O-methyluridine-3'-phosphate
  modified_base 19: mod_base = OTHER; note = 2'-O-methylguanosine-3'-phosphate
  modified_base 20: mod_base = OTHER; note = 2'-O-methyluridine-3'-phosphate
  modified_base 21: mod_base = OTHER; note = 2'-O-methyluridine-3'-phosphate ((2S,4R)-1-[29-[[2-(acetylamino)-2-deoxy-beta-D-galactopyra nosyl]oxy]-14,14-bis[[3-[[3-[[5-[[2-(acetylamino)-2-deoxy-b eta-D-galactopyranosyl]oxy]-1-oxopentyl]amino]propyl]amino] -3-oxopropoxy]methyl]-1,12,19,25-tetraoxo-16-oxa-13,20,24-t riazanonacos-1-yl]-4-hydroxy-2-pyrrolidinyl)methyl ester
cctcctatgtgcacgcctgtt

SEQ ID NO: 724 - RNA, 21 nt, synthetic construct
  source 1..21: mol_type = other RNA
  modified_base 1: mod_base = OTHER; note = 2'-O-methylguanosine-3'-phosphorothioate
  modified_base 2: mod_base = OTHER; note = 2'-O-methylguanosine-3'-phosphorothioate
  modified_base 3: mod_base = OTHER; note = 2'-O-methylguanosine-3'-phosphate
  modified_base 4: mod_base = OTHER; note = 2'-O-methylcytidine-3'-phosphate
  modified_base 5: mod_base = OTHER; note = 2'-O-methylguanosine-3'-phosphate
  modified_base 6: mod_base = OTHER; note = 2'-O-methyluridine-3'-phosphate
  modified_base 7: mod_base = OTHER; note = 2'-deoxy-2'-fluoroadenosine-3'-phosphate
  modified_base 8: mod_base = OTHER; note = 2'-O-methylcytidine-3'-phosphate
  modified_base 9: mod_base = OTHER; note = 2'-deoxy-2'-fluoroadenosine-3'-phosphate
  modified_base 10: mod_base = OTHER; note = 2'-deoxy-2'-fluoroguanosine-3'-phosphate
  modified_base 11: mod_base = OTHER; note = 2'-deoxy-2'-fluorocytidine-3'-phosphate
  modified_base 12: mod_base = OTHER; note = 2'-O-methyluridine-3'-phosphate
  modified_base 13: mod_base = OTHER; note = 2'-O-methylcytidine-3'-phosphate
  modified_base 14: mod_base = OTHER; note = 2'-O-methyladenosine-3'-phosphate
  modified_base 15: mod_base = OTHER; note = 2'-O-methylguanosine-3'-phosphate
  modified_base 16: mod_base = OTHER; note = 2'-O-methylcytidine-3'-phosphate
  modified_base 17: mod_base = OTHER; note = 2'-O-methylguanosine-3'-phosphate
  modified_base 18: mod_base = OTHER; note = 2'-O-methyladenosine-3'-phosphate
  modified_base 19: mod_base = OTHER; note = 2'-O-methylcytidine-3'-phosphate
  modified_base 20: mod_base = OTHER; note = 2'-O-methyluridine-3'-phosphate
  modified_base 21: mod_base = OTHER; note = 2'-O-methyluridine-3'-phosphate ((2S,4R)-1-[29-[[2-(acetylamino)-2-deoxy-beta-D-galactopyra nosyl]oxy]-14,14-bis[[3-[[3-[[5-[[2-(acetylamino)-2-deoxy-b eta-D-galactopyranosyl]oxy]-1-oxopentyl]amino]propyl]amino] -3-oxopropoxy]methyl]-1,12,19,25-tetraoxo-16-oxa-13,20,24-t riazanonacos-1-yl]-4-hydroxy-2-pyrrolidinyl)methyl ester
gggcgtacagctcagcgactt

SEQ ID NO: 725 - RNA, 21 nt, synthetic construct
  source 1..21: mol_type = other RNA
  modified_base 1: mod_base = OTHER; note = 2'-O-methyladenosine-3'-phosphorothioate
  modified_base 2: mod_base = OTHER; note = 2'-O-methylcytidine-3'-phosphorothioate
  modified_base 3: mod_base = OTHER; note = 2'-O-methylcytidine-3'-phosphate
  modified_base 4: mod_base = OTHER; note = 2'-O-methyladenosine-3'-phosphate
  modified_base 5: mod_base = OTHER; note = 2'-O-methyladenosine-3'-phosphate
  modified_base 6: mod_base = OTHER; note = 2'-O-methylguanosine-3'-phosphate
  modified_base 7: mod_base = OTHER; note = 2'-deoxy-2'-fluorouridine-3'-phosphate
  modified_base 8: mod_base = OTHER; note = 2'-O-methyladenosine-3'-phosphate
  modified_base 9: mod_base = OTHER; note = 2'-deoxy-2'-fluorocytidine-3'-phosphate
  modified_base 10: mod_base = OTHER; note = 2'-deoxy-2'-fluoroadenosine-3'-phosphate
  modified_base 11: mod_base = OTHER; note = 2'-deoxy-2'-fluorouridine-3'-phosphate
  modified_base 12: mod_base = OTHER; note = 2'-O-methylguanosine-3'-phosphate
  modified_base 13: mod_base = OTHER; note = 2'-O-methylcytidine-3'-phosphate
  modified_base 14: mod_base = OTHER; note = 2'-O-methyladenosine-3'-phosphate
  modified_base 15: mod_base = OTHER; note = 2'-O-methylguanosine-3'-phosphate
  modified_base 16: mod_base = OTHER; note = 2'-O-methyladenosine-3'-phosphate
  modified_base 17: mod_base = OTHER; note = 2'-O-methyladenosine-3'-phosphate
  modified_base 18: mod_base = OTHER; note = 2'-O-methylcytidine-3'-phosphate
  modified_base 19: mod_base = OTHER; note = 2'-O-methyluridine-3'-phosphate
  modified_base 20: mod_base = OTHER; note = 2'-O-methylguanosine-3'-phosphate
  modified_base 21: mod_base = OTHER; note = 2'-O-methyluridine-3'-phosphate ((2S,4R)-1-[29-[[2-(acetylamino)-2-deoxy-beta-D-galactopyra nosyl]oxy]-14,14-bis[[3-[[3-[[5-[[2-(acetylamino)-2-deoxy-b eta-D-galactopyranosyl]oxy]-1-oxopentyl]amino]propyl]amino] -3-oxopropoxy]methyl]-1,12,19,25-tetraoxo-16-oxa-13,20,24-t riazanonacos-1-yl]-4-hydroxy-2-pyrrolidinyl)methyl ester
accaagtacatgcagaactgt

SEQ ID NO: 726 - RNA, 21 nt, synthetic construct
  source 1..21: mol_type = other RNA
  modified_base 1: mod_base = OTHER; note = 2'-O-methyladenosine-3'-phosphorothioate
  modified_base 2: mod_base = OTHER; note = 2'-O-methyladenosine-3'-phosphorothioate
  modified_base 3: mod_base = OTHER; note = 2'-O-methylguanosine-3'-phosphate
  modified_base 4: mod_base = OTHER; note = 2'-O-methyluridine-3'-phosphate
  modified_base 5: mod_base = OTHER; note = 2'-O-methylcytidine-3'-phosphate
  modified_base 6: mod_base = OTHER; note = 2'-O-methylcytidine-3'-phosphate
  modified_base 7: mod_base = OTHER; note = 2'-deoxy-2'-fluorocytidine-3'-phosphate
  modified_base 8: mod_base = OTHER; note = 2'-O-methyladenosine-3'-phosphate
  modified_base 9: mod_base = OTHER; note = 2'-deoxy-2'-fluoroguanosine-3'-phosphate
  modified_base 10: mod_base = OTHER; note = 2'-deoxy-2'-fluorocytidine-3'-phosphate
  modified_base 11: mod_base = OTHER; note = 2'-deoxy-2'-fluoroguanosine-3'-phosphate
  modified_base 12: mod_base = OTHER; note = 2'-O-methylcytidine-3'-phosphate
  modified_base 13: mod_base = OTHER; note = 2'-O-methyluridine-3'-phosphate
  modified_base 14: mod_base = OTHER; note = 2'-O-methyladenosine-3'-phosphate
  modified_base 15: mod_base = OTHER; note = 2'-O-methylcytidine-3'-phosphate
  modified_base 16: mod_base = OTHER; note = 2'-O-methylguanosine-3'-phosphate
  modified_base 17: mod_base = OTHER; note = 2'-O-methylcytidine-3'-phosphate
  modified_base 18: mod_base = OTHER; note = 2'-O-methylcytidine-3'-phosphate
  modified_base 19: mod_base = OTHER; note = 2'-O-methyluridine-3'-phosphate
  modified_base 20: mod_base = OTHER; note = 2'-O-methyladenosine-3'-phosphate
  modified_base 21: mod_base = OTHER; note = 2'-O-methyluridine-3'-phosphate ((2S,4R)-1-[29-[[2-(acetylamino)-2-deoxy-beta-D-galactopyra nosyl]oxy]-14,14-bis[[3-[[3-[[5-[[2-(acetylamino)-2-deoxy-b eta-D-galactopyranosyl]oxy]-1-oxopentyl]amino]propyl]amino] -3-oxopropoxy]methyl]-1,12,19,25-tetraoxo-16-oxa-13,20,24-t riazanonacos-1-yl]-4-hydroxy-2-pyrrolidinyl)methyl ester
aagtcccagcgctacgcctat

SEQ ID NO: 727 - RNA, 21 nt, synthetic construct
  source 1..21: mol_type = other RNA
  modified_base 1: mod_base = OTHER; note = 2'-O-methylguanosine-3'-phosphorothioate
  modified_base 2: mod_base = OTHER; note = 2'-O-methylguanosine-3'-phosphorothioate
  modified_base 3: mod_base = OTHER; note = 2'-O-methyladenosine-3'-phosphate
  modified_base 4: mod_base = OTHER; note = 2'-O-methyluridine-3'-phosphate
  modified_base 5: mod_base = OTHER; note = 2'-O-methylguanosine-3'-phosphate
  modified_base 6: mod_base = OTHER; note = 2'-O-methylcytidine-3'-phosphate
  modified_base 7: mod_base = OTHER; note = 2'-deoxy-2'-fluorocytidine-3'-phosphate
  modified_base 8: mod_base = OTHER; note = 2'-O-methyluridine-3'-phosphate
  modified_base 9: mod_base = OTHER; note = 2'-deoxy-2'-fluoroguanosine-3'-phosphate
  modified_base 10: mod_base = OTHER; note = 2'-deoxy-2'-fluorocytidine-3'-phosphate
  modified_base 11: mod_base = OTHER; note = 2'-deoxy-2'-fluorocytidine-3'-phosphate
  modified_base 12: mod_base = OTHER; note = 2'-O-methyladenosine-3'-phosphate
  modified_base 13: mod_base = OTHER; note = 2'-O-methylguanosine-3'-phosphate
  modified_base 14: mod_base = OTHER; note = 2'-O-methylcytidine-3'-phosphate
  modified_base 15: mod_base = OTHER; note = 2'-O-methylcytidine-3'-phosphate
  modified_base 16: mod_base = OTHER; note = 2'-O-methylcytidine-3'-phosphate
  modified_base 17: mod_base = OTHER; note = 2'-O-methyladenosine-3'-phosphate
  modified_base 18: mod_base = OTHER; note = 2'-O-methylcytidine-3'-phosphate
  modified_base 19: mod_base = OTHER; note = 2'-O-methyluridine-3'-phosphate
  modified_base 20: mod_base = OTHER; note = 2'-O-methyluridine-3'-phosphate
  modified_base 21: mod_base = OTHER; note = 2'-O-methyluridine-3'-phosphate ((2S,4R)-1-[29-[[2-(acetylamino)-2-deoxy-beta-D-galactopyra nosyl]oxy]-14,14-bis[[3-[[3-[[5-[[2-(acetylamino)-2-deoxy-b eta-D-galactopyranosyl]oxy]-1-oxopentyl]amino]propyl]amino] -3-oxopropoxy]methyl]-1,12,19,25-tetraoxo-16-oxa-13,20,24-t riazanonacos-1-yl]-4-hydroxy-2-pyrrolidinyl)methyl ester
ggatgcctgccagcccacttt

SEQ ID NO: 728 - RNA, 21 nt, synthetic construct
  source 1..21: mol_type = other RNA
  modified_base 1: mod_base = OTHER; note = 2'-O-methyluridine-3'-phosphorothioate
  modified_base 2: mod_base = OTHER; note = 2'-O-methylcytidine-3'-phosphorothioate
  modified_base 3: mod_base = OTHER; note = 2'-O-methyladenosine-3'-phosphate
  modified_base 4: mod_base = OTHER; note = 2'-O-methylcytidine-3'-phosphate
  modified_base 5: mod_base = OTHER; note = 2'-O-methylcytidine-3'-phosphate
  modified_base 6: mod_base = OTHER; note = 2'-O-methyluridine-3'-phosphate
  modified_base 7: mod_base = OTHER; note = 2'-deoxy-2'-fluoroguanosine-3'-phosphate
  modified_base 8: mod_base = OTHER; note = 2'-O-methylcytidine-3'-phosphate
  modified_base 9: mod_base = OTHER; note = 2'-deoxy-2'-fluoroadenosine-3'-phosphate
  modified_base 10: mod_base = OTHER; note = 2'-deoxy-2'-fluoroguanosine-3'-phosphate
  modified_base 11: mod_base = OTHER; note = 2'-deoxy-2'-fluorocytidine-3'-phosphate
  modified_base 12: mod_base = OTHER; note = 2'-O-methylguanosine-3'-phosphate
  modified_base 13: mod_base = OTHER; note = 2'-O-methyluridine-3'-phosphate
  modified_base 14: mod_base = OTHER; note = 2'-O-methyluridine-3'-phosphate
  modified_base 15: mod_base = OTHER; note = 2'-O-methyluridine-3'-phosphate
  modified_base 16: mod_base = OTHER; note = 2'-O-methylcytidine-3'-phosphate
  modified_base 17: mod_base = OTHER; note = 2'-O-methylcytidine-3'-phosphate
  modified_base 18: mod_base = OTHER; note = 2'-O-methyluridine-3'-phosphate
  modified_base 19: mod_base = OTHER; note = 2'-O-methyluridine-3'-phosphate
  modified_base 20: mod_base = OTHER; note = 2'-O-methylcytidine-3'-phosphate
  modified_base 21: mod_base = OTHER; note = 2'-O-methyluridine-3'-phosphate ((2S,4R)-1-[29-[[2-(acetylamino)-2-deoxy-beta-D-galactopyra nosyl]oxy]-14,14-bis[[3-[[3-[[5-[[2-(acetylamino)-2-deoxy-b eta-D-galactopyranosyl]oxy]-1-oxopentyl]amino]propyl]amino] -3-oxopropoxy]methyl]-1,12,19,25-tetraoxo-16-oxa-13,20,24-t riazanonacos-1-yl]-4-hydroxy-2-pyrrolidinyl)methyl ester
tcacctgcagcgtttccttct

SEQ ID NO: 729 - RNA, 21 nt, synthetic construct
  source 1..21: mol_type = other RNA
  modified_base 1: mod_base = OTHER; note = 2'-O-methylguanosine-3'-phosphorothioate
  modified_base 2: mod_base = OTHER; note = 2'-O-methylguanosine-3'-phosphorothioate
  modified_base 3: mod_base = OTHER; note = 2'-O-methylguanosine-3'-phosphate
  modified_base 4: mod_base = OTHER; note = 2'-O-methylcytidine-3'-phosphate
  modified_base 5: mod_base = OTHER; note = 2'-O-methyladenosine-3'-phosphate
  modified_base 6: mod_base = OTHER; note = 2'-O-methylcytidine-3'-phosphate
  modified_base 7: mod_base = OTHER; note = 2'-deoxy-2'-fluorocytidine-3'-phosphate
  modified_base 8: mod_base = OTHER; note = 2'-O-methyluridine-3'-phosphate
  modified_base 9: mod_base = OTHER; note = 2'-deoxy-2'-fluorouridine-3'-phosphate
  modified_base 10: mod_base = OTHER; note = 2'-deoxy-2'-fluorocytidine-3'-phosphate
  modified_base 11: mod_base = OTHER; note = 2'-deoxy-2'-fluorocytidine-3'-phosphate
  modified_base 12: mod_base = OTHER; note = 2'-O-methyluridine-3'-phosphate
  modified_base 13: mod_base = OTHER; note = 2'-O-methylcytidine-3'-phosphate
  modified_base 14: mod_base = OTHER; note = 2'-O-methyladenosine-3'-phosphate
  modified_base 15: mod_base = OTHER; note = 2'-O-methyladenosine-3'-phosphate
  modified_base 16: mod_base = OTHER; note = 2'-O-methyluridine-3'-phosphate
  modified_base 17: mod_base = OTHER; note = 2'-O-methylguanosine-3'-phosphate
  modified_base 18: mod_base = OTHER; note = 2'-O-methyladenosine-3'-phosphate
  modified_base 19: mod_base = OTHER; note = 2'-O-methylcytidine-3'-phosphate
  modified_base 20: mod_base = OTHER; note = 2'-O-methylguanosine-3'-phosphate
  modified_base 21: mod_base = OTHER; note = 2'-O-methyluridine-3'-phosphate ((2S,4R)-1-[29-[[2-(acetylamino)-2-deoxy-beta-D-galactopyra nosyl]oxy]-14,14-bis[[3-[[3-[[5-[[2-(acetylamino)-2-deoxy-b eta-D-galactopyranosyl]oxy]-1-oxopentyl]amino]propyl]amino] -3-oxopropoxy]methyl]-1,12,19,25-tetraoxo-16-oxa-13,20,24-t riazanonacos-1-yl]-4-hydroxy-2-pyrrolidinyl)methyl ester
gggcaccttcctcaatgacgt

SEQ ID NO: 730 - RNA, 21 nt, synthetic construct
  source 1..21: mol_type = other RNA
  modified_base 1: mod_base = OTHER; note = 2'-O-methylcytidine-3'-phosphorothioate
  modified_base 2: mod_base = OTHER; note = 2'-O-methyluridine-3'-phosphorothioate
  modified_base 3: mod_base = OTHER; note = 2'-O-methylguanosine-3'-phosphate
  modified_base 4: mod_base = OTHER; note = 2'-O-methylguanosine-3'-phosphate
  modified_base 5: mod_base = OTHER; note = 2'-O-methylcytidine-3'-phosphate
  modified_base 6: mod_base = OTHER; note = 2'-O-methyluridine-3'-phosphate
  modified_base 7: mod_base = OTHER; note = 2'-deoxy-2'-fluorocytidine-3'-phosphate
  modified_base 8: mod_base = OTHER; note = 2'-O-methylcytidine-3'-phosphate
  modified_base 9: mod_base = OTHER; note = 2'-deoxy-2'-fluorouridine-3'-phosphate
  modified_base 10: mod_base = OTHER; note = 2'-deoxy-2'-fluoroguanosine-3'-phosphate
  modified_base 11: mod_base = OTHER; note = 2'-deoxy-2'-fluoroguanosine-3'-phosphate
  modified_base 12: mod_base = OTHER; note = 2'-O-methyladenosine-3'-phosphate
  modified_base 13: mod_base = OTHER; note = 2'-O-methylguanosine-3'-phosphate
  modified_base 14: mod_base = OTHER; note = 2'-O-methyladenosine-3'-phosphate
  modified_base 15: mod_base = OTHER; note = 2'-O-methylguanosine-3'-phosphate
  modified_base 16: mod_base = OTHER; note = 2'-O-methylguanosine-3'-phosphate
  modified_base 17: mod_base = OTHER; note = 2'-O-methyluridine-3'-phosphate
  modified_base 18: mod_base = OTHER; note = 2'-O-methylguanosine-3'-phosphate
  modified_base 19: mod_base = OTHER; note = 2'-O-methylguanosine-3'-phosphate
  modified_base 20: mod_base = OTHER; note = 2'-O-methyluridine-3'-phosphate
  modified_base 21: mod_base = OTHER; note = 2'-O-methyluridine-3'-phosphate ((2S,4R)-1-[29-[[2-(acetylamino)-2-deoxy-beta-D-galactopyra nosyl]oxy]-14,14-bis[[3-[[3-[[5-[[2-(acetylamino)-2-deoxy-b eta-D-galactopyranosyl]oxy]-1-oxopentyl]amino]propyl]amino] -3-oxopropoxy]methyl]-1,12,19,25-tetraoxo-16-oxa-13,20,24-t riazanonacos-1-yl]-4-hydroxy-2-pyrrolidinyl)methyl ester
ctggctcctggagaggtggtt

SEQ ID NO: 731 - RNA, 21 nt, synthetic construct
  source 1..21: mol_type = other RNA
  modified_base 1: mod_base = OTHER; note = 2'-O-methylcytidine-3'-phosphorothioate
  modified_base 2: mod_base = OTHER; note = 2'-O-methylcytidine-3'-phosphorothioate
  modified_base 3: mod_base = OTHER; note = 2'-O-methylguanosine-3'-phosphate
  modified_base 4: mod_base = OTHER; note = 2'-O-methyluridine-3'-phosphate
  modified_base 5: mod_base = OTHER; note = 2'-O-methylguanosine-3'-phosphate
  modified_base 6: mod_base = OTHER; note = 2'-O-methyluridine-3'-phosphate
  modified_base 7: mod_base = OTHER; note = 2'-deoxy-2'-fluoroguanosine-3'-phosphate
  modified_base 8: mod_base = OTHER; note = 2'-O-methyluridine-3'-phosphate
  modified_base 9: mod_base = OTHER; note = 2'-deoxy-2'-fluorouridine-3'-phosphate
  modified_base 10: mod_base = OTHER; note = 2'-deoxy-2'-fluorocytidine-3'-phosphate
  modified_base 11: mod_base = OTHER; note = 2'-deoxy-2'-fluoroadenosine-3'-phosphate
  modified_base 12: mod_base = OTHER; note = 2'-O-methyluridine-3'-phosphate
  modified_base 13: mod_base = OTHER; note = 2'-O-methylguanosine-3'-phosphate
  modified_base 14: mod_base = OTHER; note = 2'-O-methyluridine-3'-phosphate
  modified_base 15: mod_base = OTHER; note = 2'-O-methyladenosine-3'-phosphate
  modified_base 16: mod_base = OTHER; note = 2'-O-methylcytidine-3'-phosphate
  modified_base 17: mod_base = OTHER; note = 2'-O-methylguanosine-3'-phosphate
  modified_base 18: mod_base = OTHER; note = 2'-O-methylguanosine-3'-phosphate
  modified_base 19: mod_base = OTHER; note = 2'-O-methylguanosine-3'-phosphate
  modified_base 20: mod_base = OTHER; note = 2'-O-methyluridine-3'-phosphate
  modified_base 21: mod_base = OTHER; note = 2'-O-methyluridine-3'-phosphate ((2S,4R)-1-[29-[[2-(acetylamino)-2-deoxy-beta-D-galactopyra nosyl]oxy]-14,14-bis[[3-[[3-[[5-[[2-(acetylamino)-2-deoxy-b eta-D-galactopyranosyl]oxy]-1-oxopentyl]amino]propyl]amino] -3-oxopropoxy]methyl]-1,12,19,25-tetraoxo-16-oxa-13,20,24-t riazanonacos-1-yl]-4-hydroxy-2-pyrrolidinyl)methyl ester
ccgtgtgttcatgtacgggtt

SEQ ID NO: 732 - RNA, 21 nt, synthetic construct
  source 1..21: mol_type = other RNA
  modified_base 1: mod_base = OTHER; note = 2'-O-methylcytidine-3'-phosphorothioate
  modified_base 2: mod_base = OTHER; note = 2'-O-methylcytidine-3'-phosphorothioate
  modified_base 3: mod_base = OTHER; note = 2'-O-methyluridine-3'-phosphate
  modified_base 4: mod_base = OTHER; note = 2'-O-methylcytidine-3'-phosphate
  modified_base 5: mod_base = OTHER; note = 2'-O-methyluridine-3'-phosphate
  modified_base 6: mod_base = OTHER; note = 2'-O-methylcytidine-3'-phosphate
  modified_base 7: mod_base = OTHER; note = 2'-deoxy-2'-fluorouridine-3'-phosphate
  modified_base 8: mod_base = OTHER; note = 2'-O-methylguanosine-3'-phosphate
  modified_base 9: mod_base = OTHER; note = 2'-deoxy-2'-fluorocytidine-3'-phosphate
  modified_base 10: mod_base = OTHER; note = 2'-deoxy-2'-fluoroadenosine-3'-phosphate
  modified_base 11: mod_base = OTHER; note = 2'-deoxy-2'-fluoroguanosine-3'-phosphate
  modified_base 12: mod_base = OTHER; note = 2'-O-methyladenosine-3'-phosphate
  modified_base 13: mod_base = OTHER; note = 2'-O-methyladenosine-3'-phosphate
  modified_base 14: mod_base = OTHER; note = 2'-O-methyladenosine-3'-phosphate
  modified_base 15: mod_base = OTHER; note = 2'-O-methyladenosine-3'-phosphate
  modified_base 16: mod_base = OTHER; note = 2'-O-methylguanosine-3'-phosphate
  modified_base 17: mod_base = OTHER; note = 2'-O-methylcytidine-3'-phosphate
  modified_base 18: mod_base = OTHER; note = 2'-O-methyladenosine-3'-phosphate
  modified_base 19: mod_base = OTHER; note = 2'-O-methylcytidine-3'-phosphate
  modified_base 20: mod_base = OTHER; note = 2'-O-methyladenosine-3'-phosphate
  modified_base 21: mod_base = OTHER; note = 2'-O-methyluridine-3'-phosphate ((2S,4R)-1-[29-[[2-(acetylamino)-2-deoxy-beta-D-galactopyra nosyl]oxy]-14,14-bis[[3-[[3-[[5-[[2-(acetylamino)-2-deoxy-b eta-D-galactopyranosyl]oxy]-1-oxopentyl]amino]propyl]amino] -3-oxopropoxy]methyl]-1,12,19,25-tetraoxo-16-oxa-13,20,24-t riazanonacos-1-yl]-4-hydroxy-2-pyrrolidinyl)methyl ester
cctctctgcagaaaagcacat

SEQ ID NO: 733 - RNA, 21 nt, synthetic construct
  source 1..21: mol_type = other RNA
  modified_base 1: mod_base = OTHER; note = 2'-O-methylcytidine-3'-phosphorothioate
  modified_base 2: mod_base = OTHER; note = 2'-O-methylcytidine-3'-phosphorothioate
  modified_base 3: mod_base = OTHER; note = 2'-O-methyluridine-3'-phosphate
  modified_base 4: mod_base = OTHER; note = 2'-O-methylguanosine-3'-phosphate
  modified_base 5: mod_base = OTHER; note = 2'-O-methylguanosine-3'-phosphate
  modified_base 6: mod_base = OTHER; note = 2'-O-methyladenosine-3'-phosphate
  modified_base 7: mod_base = OTHER; note = 2'-deoxy-2'-fluorocytidine-3'-phosphate
  modified_base 8: mod_base = OTHER; note = 2'-O-methyluridine-3'-phosphate
  modified_base 9: mod_base = OTHER; note = 2'-deoxy-2'-fluoroguanosine-3'-phosphate
  modified_base 10: mod_base = OTHER; note = 2'-deoxy-2'-fluorocytidine-3'-phosphate
  modified_base 11: mod_base = OTHER; note = 2'-deoxy-2'-fluoroadenosine-3'-phosphate
  modified_base 12: mod_base = OTHER; note = 2'-O-methylguanosine-3'-phosphate
  modified_base 13: mod_base = OTHER; note = 2'-O-methylcytidine-3'-phosphate
  modified_base 14: mod_base = OTHER; note = 2'-O-methyladenosine-3'-phosphate
  modified_base 15: mod_base = OTHER; note = 2'-O-methyladenosine-3'-phosphate
  modified_base 16: mod_base = OTHER; note = 2'-O-methylcytidine-3'-phosphate
  modified_base 17: mod_base = OTHER; note = 2'-O-methyladenosine-3'-phosphate
  modified_base 18: mod_base = OTHER; note = 2'-O-methylguanosine-3'-phosphate
  modified_base 19: mod_base = OTHER; note = 2'-O-methylcytidine-3'-phosphate
  modified_base 20: mod_base = OTHER; note = 2'-O-methyluridine-3'-phosphate
  modified_base 21: mod_base = OTHER; note = 2'-O-methyluridine-3'-phosphate ((2S,4R)-1-[29-[[2-(acetylamino)-2-deoxy-beta-D-galactopyra nosyl]oxy]-14,14-bis[[3-[[3-[[5-[[2-(acetylamino)-2-deoxy-b eta-D-galactopyranosyl]oxy]-1-oxopentyl]amino]propyl]amino] -3-oxopropoxy]methyl]-1,12,19,25-tetraoxo-16-oxa-13,20,24-t riazanonacos-1-yl]-4-hydroxy-2-pyrrolidinyl)methyl ester
cctggactgcagcaacagctt

SEQ ID NO: 734 - RNA, 21 nt, synthetic construct
  source 1..21: mol_type = other RNA
  modified_base 1: mod_base = OTHER; note = 2'-O-methylguanosine-3'-phosphorothioate
  modified_base 2: mod_base = OTHER; note = 2'-O-methylcytidine-3'-phosphorothioate
  modified_base 3: mod_base = OTHER; note = 2'-O-methyluridine-3'-phosphate
  modified_base 4: mod_base = OTHER; note = 2'-O-methylguanosine-3'-phosphate
  modified_base 5: mod_base = OTHER; note = 2'-O-methyluridine-3'-phosphate
  modified_base 6: mod_base = OTHER; note = 2'-O-methyluridine-3'-phosphate
  modified_base 7: mod_base = OTHER; note = 2'-deoxy-2'-fluorouridine-3'-phosphate
  modified_base 8: mod_base = OTHER; note = 2'-O-methylcytidine-3'-phosphate
  modified_base 9: mod_base = OTHER; note = 2'-deoxy-2'-fluoroadenosine-3'-phosphate
  modified_base 10: mod_base = OTHER; note = 2'-deoxy-2'-fluoroguanosine-3'-phosphate
  modified_base 11: mod_base = OTHER; note = 2'-deoxy-2'-fluorocytidine-3'-phosphate
  modified_base 12: mod_base = OTHER; note = 2'-O-methyladenosine-3'-phosphate
  modified_base 13: mod_base = OTHER; note = 2'-O-methylcytidine-3'-phosphate
  modified_base 14: mod_base = OTHER; note = 2'-O-methyladenosine-3'-phosphate
  modified_base 15: mod_base = OTHER; note = 2'-O-methylcytidine-3'-phosphate
  modified_base 16: mod_base = OTHER; note = 2'-O-methyladenosine-3'-phosphate
  modified_base 17: mod_base = OTHER; note = 2'-O-methylcytidine-3'-phosphate
  modified_base 18: mod_base = OTHER; note = 2'-O-methyluridine-3'-phosphate
  modified_base 19: mod_base = OTHER; note = 2'-O-methylguanosine-3'-phosphate
  modified_base 20: mod_base = OTHER; note = 2'-O-methylcytidine-3'-phosphate
  modified_base 21: mod_base = OTHER; note = 2'-O-methyluridine-3'-phosphate ((2S,4R)-1-[29-[[2-(acetylamino)-2-deoxy-beta-D-galactopyra nosyl]oxy]-14,14-bis[[3-[[3-[[5-[[2-(acetylamino)-2-deoxy-b eta-D-galactopyranosyl]oxy]-1-oxopentyl]amino]propyl]amino] -3-oxopropoxy]methyl]-1,12,19,25-tetraoxo-16-oxa-13,20,24-t riazanonacos-1-yl]-4-hydroxy-2-pyrrolidinyl)methyl ester
gctgtttcagcacacactgct

SEQ ID NO: 735 - RNA, 21 nt, synthetic construct
  source 1..21: mol_type = other RNA
  modified_base 1: mod_base = OTHER; note = 2'-O-methylcytidine-3'-phosphorothioate
  modified_base 2: mod_base = OTHER; note = 2'-O-methyluridine-3'-phosphorothioate
  modified_base 3: mod_base = OTHER; note = 2'-O-methylguanosine-3'-phosphate
  modified_base 4: mod_base = OTHER; note = 2'-O-methylcytidine-3'-phosphate
  modified_base 5: mod_base = OTHER; note = 2'-O-methyladenosine-3'-phosphate
  modified_base 6: mod_base = OTHER; note = 2'-O-methyluridine-3'-phosphate
  modified_base 7: mod_base = OTHER; note = 2'-deoxy-2'-fluorouridine-3'-phosphate
  modified_base 8: mod_base = OTHER; note = 2'-O-methylguanosine-3'-phosphate
  modified_base 9: mod_base = OTHER; note = 2'-deoxy-2'-fluorocytidine-3'-phosphate
  modified_base 10: mod_base = OTHER; note = 2'-deoxy-2'-fluorocytidine-3'-phosphate
  modified_base 11: mod_base = OTHER; note = 2'-deoxy-2'-fluoroguanosine-3'-phosphate
  modified_base 12: mod_base = OTHER; note = 2'-O-methyladenosine-3'-phosphate
  modified_base 13: mod_base = OTHER; note = 2'-O-methylguanosine-3'-phosphate
  modified_base 14: mod_base = OTHER; note = 2'-O-methylguanosine-3'-phosphate
  modified_base 15: mod_base = OTHER; note = 2'-O-methyladenosine-3'-phosphate
  modified_base 16: mod_base = OTHER; note = 2'-O-methylguanosine-3'-phosphate
  modified_base 17: mod_base = OTHER; note = 2'-O-methylguanosine-3'-phosphate
  modified_base 18: mod_base = OTHER; note = 2'-O-methyladenosine-3'-phosphate
  modified_base 19: mod_base = OTHER; note = 2'-O-methylcytidine-3'-phosphate
  modified_base 20: mod_base = OTHER; note = 2'-O-methyluridine-3'-phosphate
  modified_base 21: mod_base = OTHER; note = 2'-O-methyluridine-3'-phosphate ((2S,4R)-1-[29-[[2-(acetylamino)-2-deoxy-beta-D-galactopyra nosyl]oxy]-14,14-bis[[3-[[3-[[5-[[2-(acetylamino)-2-deoxy-b eta-D-galactopyranosyl]oxy]-1-oxopentyl]amino]propyl]amino] -3-oxopropoxy]methyl]-1,12,19,25-tetraoxo-16-oxa-13,20,24-t riazanonacos-1-yl]-4-hydroxy-2-pyrrolidinyl)methyl ester
ctgcattgccgaggaggactt

SEQ ID NO: 736 - RNA, 21 nt, synthetic construct
  source 1..21: mol_type = other RNA
  modified_base 1: mod_base = OTHER; note = 2'-O-methylcytidine-3'-phosphorothioate
  modified_base 2: mod_base = OTHER; note = 2'-O-methyladenosine-3'-phosphorothioate
  modified_base 3: mod_base = OTHER; note = 2'-O-methylcytidine-3'-phosphate
  modified_base 4: mod_base = OTHER; note = 2'-O-methylcytidine-3'-phosphate
  modified_base 5: mod_base = OTHER; note = 2'-O-methyluridine-3'-phosphate
  modified_base 6: mod_base = OTHER; note = 2'-O-methyladenosine-3'-phosphate
  modified_base 7: mod_base = OTHER; note = 2'-deoxy-2'-fluorocytidine-3'-phosphate
  modified_base 8: mod_base = OTHER; note = 2'-O-methyladenosine-3'-phosphate
  modified_base 9: mod_base = OTHER; note = 2'-deoxy-2'-fluoroadenosine-3'-phosphate
  modified_base 10: mod_base = OTHER; note = 2'-deoxy-2'-fluoroguanosine-3'-phosphate
  modified_base 11: mod_base = OTHER; note = 2'-deoxy-2'-fluorocytidine-3'-phosphate
  modified_base 12: mod_base = OTHER; note = 2'-O-methylcytidine-3'-phosphate
  modified_base 13: mod_base = OTHER; note = 2'-O-methyluridine-3'-phosphate
  modified_base 14: mod_base = OTHER; note = 2'-O-methylguanosine-3'-phosphate
  modified_base 15: mod_base = OTHER; note = 2'-O-methylguanosine-3'-phosphate
  modified_base 16: mod_base = OTHER; note = 2'-O-methyladenosine-3'-phosphate
  modified_base 17: mod_base = OTHER; note = 2'-O-methylguanosine-3'-phosphate
  modified_base 18: mod_base = OTHER; note = 2'-O-methyladenosine-3'-phosphate
  modified_base 19: mod_base = OTHER; note = 2'-O-methylguanosine-3'-phosphate
  modified_base 20: mod_base = OTHER; note = 2'-O-methyladenosine-3'-phosphate
  modified_base 21: mod_base = OTHER; note = 2'-O-methyluridine-3'-phosphate ((2S,4R)-1-[29-[[2-(acetylamino)-2-deoxy-beta-D-galactopyra nosyl]oxy]-14,14-bis[[3-[[3-[[5-[[2-(acetylamino)-2-deoxy-b eta-D-galactopyranosyl]oxy]-1-oxopentyl]amino]propyl]amino] -3-oxopropoxy]methyl]-1,12,19,25-tetraoxo-16-oxa-13,20,24-t riazanonacos-1-yl]-4-hydroxy-2-pyrrolidinyl)methyl ester
cacctacaagcctggagagat

SEQ ID NO: 737 - RNA, 21 nt, synthetic construct
  source 1..21: mol_type = other RNA
  modified_base 1: mod_base = OTHER; note = 2'-O-methylcytidine-3'-phosphorothioate
  modified_base 2: mod_base = OTHER; note = 2'-O-methylguanosine-3'-phosphorothioate
  modified_base 3: mod_base = OTHER; note = 2'-O-methyladenosine-3'-phosphate
  modified_base 4: mod_base = OTHER; note = 2'-O-methylcytidine-3'-phosphate
  modified_base 5: mod_base = OTHER; note = 2'-O-methyluridine-3'-phosphate
  modified_base 6: mod_base = OTHER; note = 2'-O-methylguanosine-3'-phosphate
  modified_base 7: mod_base = OTHER; note = 2'-deoxy-2'-fluorocytidine-3'-phosphate
  modified_base 8: mod_base = OTHER; note = 2'-O-methyladenosine-3'-phosphate
  modified_base 9: mod_base = OTHER; note = 2'-deoxy-2'-fluoroadenosine-3'-phosphate
  modified_base 10: mod_base = OTHER; note = 2'-deoxy-2'-fluorocytidine-3'-phosphate
  modified_base 11: mod_base = OTHER; note = 2'-deoxy-2'-fluoroadenosine-3'-phosphate
  modified_base 12: mod_base = OTHER; note = 2'-O-methylcytidine-3'-phosphate
  modified_base 13: mod_base = OTHER; note = 2'-O-methylcytidine-3'-phosphate
  modified_base 14: mod_base = OTHER; note = 2'-O-methyluridine-3'-phosphate
  modified_base 15: mod_base = OTHER; note = 2'-O-methylguanosine-3'-phosphate
  modified_base 16: mod_base = OTHER; note = 2'-O-methylcytidine-3'-phosphate
  modified_base 17: mod_base = OTHER; note = 2'-O-methyladenosine-3'-phosphate
  modified_base 18: mod_base = OTHER; note = 2'-O-methylcytidine-3'-phosphate
  modified_base 19: mod_base = OTHER; note = 2'-O-methylcytidine-3'-phosphate
  modified_base 20: mod_base = OTHER; note = 2'-O-methyluridine-3'-phosphate
  modified_base 21: mod_base = OTHER; note = 2'-O-methyluridine-3'-phosphate ((2S,4R)-1-[29-[[2-(acetylamino)-2-deoxy-beta-D-galactopyra nosyl]oxy]-14,14-bis[[3-[[3-[[5-[[2-(acetylamino)-2-deoxy-b eta-D-galactopyranosyl]oxy]-1-oxopentyl]amino]propyl]amino] -3-oxopropoxy]methyl]-1,12,19,25-tetraoxo-16-oxa-13,20,24-t riazanonacos-1-yl]-4-hydroxy-2-pyrrolidinyl)methyl ester
cgactgcaacacctgcacctt

SEQ ID NO: 738 - RNA, 21 nt, synthetic construct
  source 1..21: mol_type = other RNA
  modified_base 1: mod_base = OTHER; note = 2'-O-methylguanosine-3'-phosphorothioate
  modified_base 2: mod_base = OTHER; note = 2'-O-methyladenosine-3'-phosphorothioate
  modified_base 3: mod_base = OTHER; note = 2'-O-methyladenosine-3'-phosphate
  modified_base 4: mod_base = OTHER; note = 2'-O-methylcytidine-3'-phosphate
  modified_base 5: mod_base = OTHER; note = 2'-O-methylcytidine-3'-phosphate
  modified_base 6: mod_base = OTHER; note = 2'-O-methylguanosine-3'-phosphate
  modified_base 7: mod_base = OTHER; note = 2'-deoxy-2'-fluoroguanosine-3'-phosphate
  modified_base 8: mod_base = OTHER; note = 2'-O-methyladenosine-3'-phosphate
  modified_base 9: mod_base = OTHER; note = 2'-deoxy-2'-fluoroguanosine-3'-phosphate
  modified_base 10: mod_base = OTHER; note = 2'-deoxy-2'-fluoroguanosine-3'-phosphate
  modified_base 11: mod_base = OTHER; note = 2'-deoxy-2'-fluorouridine-3'-phosphate
  modified_base 12: mod_base = OTHER; note = 2'-O-methylguanosine-3'-phosphate
  modified_base 13: mod_base = OTHER; note = 2'-O-methylguanosine-3'-phosphate
  modified_base 14: mod_base = OTHER; note = 2'-O-methylguanosine-3'-phosphate
  modified_base 15: mod_base = OTHER; note = 2'-O-methyladenosine-3'-phosphate
  modified_base 16: mod_base = OTHER; note = 2'-O-methylguanosine-3'-phosphate
  modified_base 17: mod_base = OTHER; note = 2'-O-methyluridine-3'-phosphate
  modified_base 18: mod_base = OTHER; note = 2'-O-methylguanosine-3'-phosphate
  modified_base 19: mod_base = OTHER; note = 2'-O-methylcytidine-3'-phosphate
  modified_base 20: mod_base = OTHER; note = 2'-O-methyladenosine-3'-phosphate
  modified_base 21: mod_base = OTHER; note = 2'-O-methyluridine-3'-phosphate ((2S,4R)-1-[29-[[2-(acetylamino)-2-deoxy-beta-D-galactopyra nosyl]oxy]-14,14-bis[[3-[[3-[[5-[[2-(acetylamino)-2-deoxy-b eta-D-galactopyranosyl]oxy]-1-oxopentyl]amino]propyl]amino] -3-oxopropoxy]methyl]-1,12,19,25-tetraoxo-16-oxa-13,20,24-t riazanonacos-1-yl]-4-hydroxy-2-pyrrolidinyl)methyl ester
gaaccggaggtgggagtgcat

SEQ ID NO: 739 - RNA, 21 nt, synthetic construct
  source 1..21: mol_type = other RNA
  modified_base 1: mod_base = OTHER; note = 2'-O-methyluridine-3'-phosphorothioate
  modified_base 2: mod_base = OTHER; note = 2'-O-methylguanosine-3'-phosphorothioate
  modified_base 3: mod_base = OTHER; note = 2'-O-methylguanosine-3'-phosphate
  modified_base 4: mod_base = OTHER; note = 2'-O-methylcytidine-3'-phosphate
  modified_base 5: mod_base = OTHER; note = 2'-O-methylcytidine-3'-phosphate
  modified_base 6: mod_base = OTHER; note = 2'-O-methyladenosine-3'-phosphate
  modified_base 7: mod_base = OTHER; note = 2'-deoxy-2'-fluorocytidine-3'-phosphate
  modified_base 8: mod_base = OTHER; note = 2'-O-methyluridine-3'-phosphate
  modified_base 9: mod_base = OTHER; note = 2'-deoxy-2'-fluorouridine-3'-phosphate
  modified_base 10: mod_base = OTHER; note = 2'-deoxy-2'-fluorocytidine-3'-phosphate
  modified_base 11: mod_base = OTHER; note = 2'-deoxy-2'-fluoroadenosine-3'-phosphate
  modified_base 12: mod_base = OTHER; note = 2'-O-methyluridine-3'-phosphate
  modified_base 13: mod_base = OTHER; note = 2'-O-methylcytidine-3'-phosphate
  modified_base 14: mod_base = OTHER; note = 2'-O-methyladenosine-3'-phosphate
  modified_base 15: mod_base = OTHER; note = 2'-O-methylcytidine-3'-phosphate
  modified_base 16: mod_base = OTHER; note = 2'-O-methylcytidine-3'-phosphate
  modified_base 17: mod_base = OTHER; note = 2'-O-methyluridine-3'-phosphate
  modified_base 18: mod_base = OTHER; note = 2'-O-methyluridine-3'-phosphate
  modified_base 19: mod_base = OTHER; note = 2'-O-methyluridine-3'-phosphate
  modified_base 20: mod_base = OTHER; note = 2'-O-methylguanosine-3'-phosphate
  modified_base 21: mod_base = OTHER; note = 2'-O-methyluridine-3'-phosphate ((2S,4R)-1-[29-[[2-(acetylamino)-2-deoxy-beta-D-galactopyra nosyl]oxy]-14,14-bis[[3-[[3-[[5-[[2-(acetylamino)-2-deoxy-b eta-D-galactopyranosyl]oxy]-1-oxopentyl]amino]propyl]amino] -3-oxopropoxy]methyl]-1,12,19,25-tetraoxo-16-oxa-13,20,24-t riazanonacos-1-yl]-4-hydroxy-2-pyrrolidinyl)methyl ester
tggccacttcatcacctttgt

SEQ ID NO: 740 - RNA, 21 nt, synthetic construct
  source 1..21: mol_type = other RNA
  modified_base 1: mod_base = OTHER; note = 2'-O-methylcytidine-3'-phosphorothioate
  modified_base 2: mod_base = OTHER; note = 2'-O-methylguanosine-3'-phosphorothioate
  modified_base 3: mod_base = OTHER; note = 2'-O-methyladenosine-3'-phosphate
  modified_base 4: mod_base = OTHER; note = 2'-O-methyluridine-3'-phosphate
  modified_base 5: mod_base = OTHER; note = 2'-O-methylcytidine-3'-phosphate
  modified_base 6: mod_base = OTHER; note = 2'-O-methylguanosine-3'-phosphate
  modified_base 7: mod_base = OTHER; note = 2'-deoxy-2'-fluorocytidine-3'-phosphate
  modified_base 8: mod_base = OTHER; note = 2'-O-methyluridine-3'-phosphate
  modified_base 9: mod_base = OTHER; note = 2'-deoxy-2'-fluoroadenosine-3'-phosphate
  modified_base 10: mod_base = OTHER; note = 2'-deoxy-2'-fluorocytidine-3'-phosphate
  modified_base 11: mod_base = OTHER; note = 2'-deoxy-2'-fluoroadenosine-3'-phosphate
  modified_base 12: mod_base = OTHER; note = 2'-O-methylguanosine-3'-phosphate
  modified_base 13: mod_base = OTHER; note = 2'-O-methylcytidine-3'-phosphate
  modified_base 14: mod_base = OTHER; note = 2'-O-methyluridine-3'-phosphate
  modified_base 15: mod_base = OTHER; note = 2'-O-methyluridine-3'-phosphate
  modified_base 16: mod_base = OTHER; note = 2'-O-methyluridine-3'-phosphate
  modified_base 17: mod_base = OTHER; note = 2'-O-methylguanosine-3'-phosphate
  modified_base 18: mod_base = OTHER; note = 2'-O-methyladenosine-3'-phosphate
  modified_base 19: mod_base = OTHER; note = 2'-O-methyladenosine-3'-phosphate
  modified_base 20: mod_base = OTHER; note = 2'-O-methylguanosine-3'-phosphate
  modified_base 21: mod_base = OTHER; note = 2'-O-methyluridine-3'-phosphate ((2S,4R)-1-[29-[[2-(acetylamino)-2-deoxy-beta-D-galactopyra nosyl]oxy]-14,14-bis[[3-[[3-[[5-[[2-(acetylamino)-2-deoxy-b eta-D-galactopyranosyl]oxy]-1-oxopentyl]amino]propyl]amino] -3-oxopropoxy]methyl]-1,12,19,25-tetraoxo-16-oxa-13,20,24-t riazanonacos-1-yl]-4-hydroxy-2-pyrrolidinyl)methyl ester
cgatcgctacagctttgaagt

SEQ ID NO: 741 - RNA, 21 nt, synthetic construct
  source 1..21: mol_type = other RNA
  modified_base 1: mod_base = OTHER; note = 2'-O-methylguanosine-3'-phosphorothioate
  modified_base 2: mod_base = OTHER; note = 2'-O-methylcytidine-3'-phosphorothioate
  modified_base 3: mod_base = OTHER; note = 2'-O-methyluridine-3'-phosphate
  modified_base 4: mod_base = OTHER; note = 2'-O-methylguanosine-3'-phosphate
  modified_base 5: mod_base = OTHER; note = 2'-O-methylcytidine-3'-phosphate
  modified_base 6: mod_base = OTHER; note = 2'-O-methylguanosine-3'-phosphate
  modified_base 7: mod_base = OTHER; note = 2'-deoxy-2'-fluoroadenosine-3'-phosphate
  modified_base 8: mod_base = OTHER; note = 2'-O-methylguanosine-3'-phosphate
  modified_base 9: mod_base = OTHER; note = 2'-deoxy-2'-fluorouridine-3'-phosphate
  modified_base 10: mod_base = OTHER; note = 2'-deoxy-2'-fluoroadenosine-3'-phosphate
  modified_base 11: mod_base = OTHER; note = 2'-deoxy-2'-fluorocytidine-3'-phosphate
  modified_base 12: mod_base = OTHER; note = 2'-O-methyladenosine-3'-phosphate
  modified_base 13: mod_base = OTHER; note = 2'-O-methyluridine-3'-phosphate
  modified_base 14: mod_base = OTHER; note = 2'-O-methylcytidine-3'-phosphate
  modified_base 15: mod_base = OTHER; note = 2'-O-methyluridine-3'-phosphate
  modified_base 16: mod_base = OTHER; note = 2'-O-methyluridine-3'-phosphate
  modified_base 17: mod_base = OTHER; note = 2'-O-methylguanosine-3'-phosphate
  modified_base 18: mod_base = OTHER; note = 2'-O-methylguanosine-3'-phosphate
  modified_base 19: mod_base = OTHER; note = 2'-O-methylcytidine-3'-phosphate
  modified_base 20: mod_base = OTHER; note = 2'-O-methylcytidine-3'-phosphate
  modified_base 21: mod_base = OTHER; note = 2'-O-methyluridine-3'-phosphate ((2S,4R)-1-[29-[[2-(acetylamino)-2-deoxy-beta-D-galactopyra nosyl]oxy]-14,14-bis[[3-[[3-[[5-[[2-(acetylamino)-2-deoxy-b eta-D-galactopyranosyl]oxy]-1-oxopentyl]amino]propyl]amino] -3-oxopropoxy]methyl]-1,12,19,25-tetraoxo-16-oxa-13,20,24-t riazanonacos-1-yl]-4-hydroxy-2-pyrrolidinyl)methyl ester
gctgcgagtacatcttggcct

SEQ ID NO: 742 - RNA, 21 nt, synthetic construct
  source 1..21: mol_type = other RNA
  modified_base 1: mod_base = OTHER; note = 2'-O-methyluridine-3'-phosphorothioate
  modified_base 2: mod_base = OTHER; note = 2'-O-methylcytidine-3'-phosphorothioate
  modified_base 3: mod_base = OTHER; note = 2'-O-methylcytidine-3'-phosphate
  modified_base 4: mod_base = OTHER; note = 2'-O-methylguanosine-3'-phosphate
  modified_base 5: mod_base = OTHER; note = 2'-O-methylcytidine-3'-phosphate
  modified_base 6: mod_base = OTHER; note = 2'-O-methyladenosine-3'-phosphate
  modified_base 7: mod_base = OTHER; note = 2'-deoxy-2'-fluorouridine-3'-phosphate
  modified_base 8: mod_base = OTHER; note = 2'-O-methylcytidine-3'-phosphate
  modified_base 9: mod_base = OTHER; note = 2'-deoxy-2'-fluoroguanosine-3'-phosphate
  modified_base 10: mod_base = OTHER; note = 2'-deoxy-2'-fluorouridine-3'-phosphate
  modified_base 11: mod_base = OTHER; note = 2'-deoxy-2'-fluorocytidine-3'-phosphate
  modified_base 12: mod_base = OTHER; note = 2'-O-methyladenosine-3'-phosphate
  modified_base 13: mod_base = OTHER; note = 2'-O-methylcytidine-3'-phosphate
  modified_base 14: mod_base = OTHER; note = 2'-O-methylcytidine-3'-phosphate
  modified_base 15: mod_base = OTHER; note = 2'-O-methylguanosine-3'-phosphate
  modified_base 16: mod_base = OTHER; note = 2'-O-methyladenosine-3'-phosphate
  modified_base 17: mod_base = OTHER; note = 2'-O-methylguanosine-3'-phosphate
  modified_base 18: mod_base = OTHER; note = 2'-O-methyladenosine-3'-phosphate
  modified_base 19: mod_base = OTHER; note = 2'-O-methyladenosine-3'-phosphate
  modified_base 20: mod_base = OTHER; note = 2'-O-methylcytidine-3'-phosphate
  modified_base 21: mod_base = OTHER; note = 2'-O-methyluridine-3'-phosphate ((2S,4R)-1-[29-[[2-(acetylamino)-2-deoxy-beta-D-galactopyra nosyl]oxy]-14,14-bis[[3-[[3-[[5-[[2-(acetylamino)-2-deoxy-b eta-D-galactopyranosyl]oxy]-1-oxopentyl]amino]propyl]amino] -3-oxopropoxy]methyl]-1,12,19,25-tetraoxo-16-oxa-13,20,24-t riazanonacos-1-yl]-4-hydroxy-2-pyrrolidinyl)methyl ester
tccgcatcgtcaccgagaact

SEQ ID NO: 743 - RNA, 21 nt, synthetic construct
  source 1..21: mol_type = other RNA
  modified_base 1: mod_base = OTHER; note = 2'-O-methyladenosine-3'-phosphorothioate
  modified_base 2: mod_base = OTHER; note = 2'-O-methyladenosine-3'-phosphorothioate
  modified_base 3: mod_base = OTHER; note = 2'-O-methylguanosine-3'-phosphate
  modified_base 4: mod_base = OTHER; note = 2'-O-methylguanosine-3'-phosphate
  modified_base 5: mod_base = OTHER; note = 2'-O-methylcytidine-3'-phosphate
  modified_base 6: mod_base = OTHER; note = 2'-O-methylcytidine-3'-phosphate
  modified_base 7: mod_base = OTHER; note = 2'-deoxy-2'-fluoroadenosine-3'-phosphate
  modified_base 8: mod_base = OTHER; note = 2'-O-methyluridine-3'-phosphate
  modified_base 9: mod_base = OTHER; note = 2'-deoxy-2'-fluorocytidine-3'-phosphate
  modified_base 10: mod_base = OTHER; note = 2'-deoxy-2'-fluoroadenosine-3'-phosphate
  modified_base 11: mod_base = OTHER; note = 2'-deoxy-2'-fluoroadenosine-3'-phosphate
  modified_base 12: mod_base = OTHER; note = 2'-O-methylguanosine-3'-phosphate
  modified_base 13: mod_base = OTHER; note = 2'-O-methylcytidine-3'-phosphate
  modified_base 14: mod_base = OTHER; note = 2'-O-methyluridine-3'-phosphate
  modified_base 15: mod_base = OTHER; note = 2'-O-methylcytidine-3'-phosphate
  modified_base 16: mod_base = OTHER; note = 2'-O-methyluridine-3'-phosphate
  modified_base 17: mod_base = OTHER; note = 2'-O-methyluridine-3'-phosphate
  modified_base 18: mod_base = OTHER; note = 2'-O-methylcytidine-3'-phosphate
  modified_base 19: mod_base = OTHER; note = 2'-O-methylguanosine-3'-phosphate
  modified_base 20: mod_base = OTHER; note = 2'-O-methyluridine-3'-phosphate
  modified_base 21: mod_base = OTHER; note = 2'-O-methyluridine-3'-phosphate ((2S,4R)-1-[29-[[2-(acetylamino)-2-deoxy-beta-D-galactopyra nosyl]oxy]-14,14-bis[[3-[[3-[[5-[[2-(acetylamino)-2-deoxy-b eta-D-galactopyranosyl]oxy]-1-oxopentyl]amino]propyl]amino] -3-oxopropoxy]methyl]-1,12,19,25-tetraoxo-16-oxa-13,20,24-t riazanonacos-1-yl]-4-hydroxy-2-pyrrolidinyl)methyl ester
aaggccatcaagctcttcgtt

SEQ ID NO: 744 - RNA, 21 nt, synthetic construct
  source 1..21: mol_type = other RNA
  modified_base 1: mod_base = OTHER; note = 2'-O-methylguanosine-3'-phosphorothioate
  modified_base 2: mod_base = OTHER; note = 2'-O-methyladenosine-3'-phosphorothioate
  modified_base 3: mod_base = OTHER; note = 2'-O-methylguanosine-3'-phosphate
  modified_base 4: mod_base = OTHER; note = 2'-O-methylcytidine-3'-phosphate
  modified_base 5: mod_base = OTHER; note = 2'-O-methyluridine-3'-phosphate
  modified_base 6: mod_base = OTHER; note = 2'-O-methyladenosine-3'-phosphate
  modified_base 7: mod_base = OTHER; note = 2'-deoxy-2'-fluorocytidine-3'-phosphate
  modified_base 8: mod_base = OTHER; note = 2'-O-methylguanosine-3'-phosphate
  modified_base 9: mod_base = OTHER; note = 2'-deoxy-2'-fluoroadenosine-3'-phosphate
  modified_base 10: mod_base = OTHER; note = 2'-deoxy-2'-fluoroguanosine-3'-phosphate
  modified_base 11: mod_base = OTHER; note = 2'-deoxy-2'-fluorocytidine-3'-phosphate
  modified_base 12: mod_base = OTHER; note = 2'-O-methyluridine-3'-phosphate
  modified_base 13: mod_base = OTHER; note = 2'-O-methylguanosine-3'-phosphate
  modified_base 14: mod_base = OTHER; note = 2'-O-methyladenosine-3'-phosphate
  modified_base 15: mod_base = OTHER; note = 2'-O-methyluridine-3'-phosphate
  modified_base 16: mod_base = OTHER; note = 2'-O-methylcytidine-3'-phosphate
  modified_base 17: mod_base = OTHER; note = 2'-O-methylcytidine-3'-phosphate
  modified_base 18: mod_base = OTHER; note = 2'-O-methyluridine-3'-phosphate
  modified_base 19: mod_base = OTHER; note = 2'-O-methylcytidine-3'-phosphate
  modified_base 20: mod_base = OTHER; note = 2'-O-methylcytidine-3'-phosphate
  modified_base 21: mod_base = OTHER; note = 2'-O-methyluridine-3'-phosphate ((2S,4R)-1-[29-[[2-(acetylamino)-2-deoxy-beta-D-galactopyra nosyl]oxy]-14,14-bis[[3-[[3-[[5-[[2-(acetylamino)-2-deoxy-b eta-D-galactopyranosyl]oxy]-1-oxopentyl]amino]propyl]amino] -3-oxopropoxy]methyl]-1,12,19,25-tetraoxo-16-oxa-13,20,24-t riazanonacos-1-yl]-4-hydroxy-2-pyrrolidinyl)methyl ester
gagctacgagctgatcctcct

SEQ ID NO: 745 - RNA, 21 nt, synthetic construct
  source 1..21: mol_type = other RNA
  modified_base 1: mod_base = OTHER; note = 2'-O-methylguanosine-3'-phosphorothioate
  modified_base 2: mod_base = OTHER; note = 2'-O-methyladenosine-3'-phosphorothioate
  modified_base 3: mod_base = OTHER; note = 2'-O-methylcytidine-3'-phosphate
  modified_base 4: mod_base = OTHER; note = 2'-O-methylcytidine-3'-phosphate
  modified_base 5: mod_base = OTHER; note = 2'-O-methyluridine-3'-phosphate
  modified_base 6: mod_base = OTHER; note = 2'-O-methyluridine-3'-phosphate
  modified_base 7: mod_base = OTHER; note = 2'-deoxy-2'-fluorouridine-3'-phosphate
  modified_base 8: mod_base = OTHER; note = 2'-O-methyladenosine-3'-phosphate
  modified_base 9: mod_base = OTHER; note = 2'-deoxy-2'-fluoroadenosine-3'-phosphate
  modified_base 10: mod_base = OTHER; note = 2'-deoxy-2'-fluoroguanosine-3'-phosphate
  modified_base 11: mod_base = OTHER; note = 2'-deoxy-2'-fluoroguanosine-3'-phosphate
  modified_base 12: mod_base = OTHER; note = 2'-O-methylcytidine-3'-phosphate
  modified_base 13: mod_base = OTHER; note = 2'-O-methylguanosine-3'-phosphate
  modified_base 14: mod_base = OTHER; note = 2'-O-methylguanosine-3'-phosphate
  modified_base 15: mod_base = OTHER; note = 2'-O-methyluridine-3'-phosphate
  modified_base 16: mod_base = OTHER; note = 2'-O-methylguanosine-3'-phosphate
  modified_base 17: mod_base = OTHER; note = 2'-O-methylguanosine-3'-phosphate
  modified_base 18: mod_base = OTHER; note = 2'-O-methylcytidine-3'-phosphate
  modified_base 19: mod_base = OTHER; note = 2'-O-methylguanosine-3'-phosphate
  modified_base 20: mod_base = OTHER; note = 2'-O-methyladenosine-3'-phosphate
  modified_base 21: mod_base = OTHER; note = 2'-O-methyluridine-3'-phosphate ((2S,4R)-1-[29-[[2-(acetylamino)-2-deoxy-beta-D-galactopyra nosyl]oxy]-14,14-bis[[3-[[3-[[5-[[2-(acetylamino)-2-deoxy-b eta-D-galactopyranosyl]oxy]-1-oxopentyl]amino]propyl]amino] -3-oxopropoxy]methyl]-1,12,19,25-tetraoxo-16-oxa-13,20,24-t riazanonacos-1-yl]-4-hydroxy-2-pyrrolidinyl)methyl ester
gacctttaaggcggtggcgat

SEQ ID NO: 746 - RNA, 21 nt, synthetic construct
  source 1..21: mol_type = other RNA
  modified_base 1: mod_base = OTHER; note = 2'-O-methylcytidine-3'-phosphorothioate
  modified_base 2: mod_base = OTHER; note = 2'-O-methyladenosine-3'-phosphorothioate
  modified_base 3: mod_base = OTHER; note = 2'-O-methylcytidine-3'-phosphate
  modified_base 4: mod_base = OTHER; note = 2'-O-methylcytidine-3'-phosphate
  modified_base 5: mod_base = OTHER; note = 2'-O-methylcytidine-3'-phosphate
  modified_base 6: mod_base = OTHER; note = 2'-O-methyluridine-3'-phosphate
  modified_base 7: mod_base = OTHER; note = 2'-deoxy-2'-fluoroadenosine-3'-phosphate
  modified_base 8: mod_base = OTHER; note = 2'-O-methylcytidine-3'-phosphate
  modified_base 9: mod_base = OTHER; note = 2'-deoxy-2'-fluoroadenosine-3'-phosphate
  modified_base 10: mod_base = OTHER; note = 2'-deoxy-2'-fluoroadenosine-3'-phosphate
  modified_base 11: mod_base = OTHER; note = 2'-deoxy-2'-fluoroguanosine-3'-phosphate
  modified_base 12: mod_base = OTHER; note = 2'-O-methyladenosine-3'-phosphate
  modified_base 13: mod_base = OTHER; note = 2'-O-methyluridine-3'-phosphate
  modified_base 14: mod_base = OTHER; note = 2'-O-methyladenosine-3'-phosphate
  modified_base 15: mod_base = OTHER; note = 2'-O-methylcytidine-3'-phosphate
  modified_base 16: mod_base = OTHER; note = 2'-O-methylguanosine-3'-phosphate
  modified_base 17: mod_base = OTHER; note = 2'-O-methylcytidine-3'-phosphate
  modified_base 18: mod_base = OTHER; note = 2'-O-methyluridine-3'-phosphate
  modified_base 19: mod_base = OTHER; note = 2'-O-methyladenosine-3'-phosphate
  modified_base 20: mod_base = OTHER; note = 2'-O-methylcytidine-3'-phosphate
  modified_base 21: mod_base = OTHER; note = 2'-O-methyluridine-3'-phosphate ((2S,4R)-1-[29-[[2-(acetylamino)-2-deoxy-beta-D-galactopyra nosyl]oxy]-14,14-bis[[3-[[3-[[5-[[2-(acetylamino)-2-deoxy-b eta-D-galactopyranosyl]oxy]-1-oxopentyl]amino]propyl]amino] -3-oxopropoxy]methyl]-1,12,19,25-tetraoxo-16-oxa-13,20,24-t riazanonacos-1-yl]-4-hydroxy-2-pyrrolidinyl)methyl ester
caccctacaagatacgctact

SEQ ID NO: 747 - RNA, 21 nt, synthetic construct
  source 1..21: mol_type = other RNA
  modified_base 1: mod_base = OTHER; note = 2'-O-methyladenosine-3'-phosphorothioate
  modified_base 2: mod_base = OTHER; note = 2'-O-methyluridine-3'-phosphorothioate
  modified_base 3: mod_base = OTHER; note = 2'-O-methylcytidine-3'-phosphate
  modified_base 4: mod_base = OTHER; note = 2'-O-methyluridine-3'-phosphate
  modified_base 5: mod_base = OTHER; note = 2'-O-methyluridine-3'-phosphate
  modified_base 6: mod_base = OTHER; note = 2'-O-methylcytidine-3'-phosphate
  modified_base 7: mod_base = OTHER; note = 2'-deoxy-2'-fluorocytidine-3'-phosphate
  modified_base 8: mod_base = OTHER; note = 2'-O-methyluridine-3'-phosphate
  modified_base 9: mod_base = OTHER; note = 2'-deoxy-2'-fluoroguanosine-3'-phosphate
  modified_base 10: mod_base = OTHER; note = 2'-deoxy-2'-fluoroguanosine-3'-phosphate
  modified_base 11: mod_base = OTHER; note = 2'-deoxy-2'-fluorouridine-3'-phosphate
  modified_base 12: mod_base = OTHER; note = 2'-O-methylcytidine-3'-phosphate
  modified_base 13: mod_base = OTHER; note = 2'-O-methyladenosine-3'-phosphate
  modified_base 14: mod_base = OTHER; note = 2'-O-methyluridine-3'-phosphate
  modified_base 15: mod_base = OTHER; note = 2'-O-methylcytidine-3'-phosphate
  modified_base 16: mod_base = OTHER; note = 2'-O-methylguanosine-3'-phosphate
  modified_base 17: mod_base = OTHER; note = 2'-O-methyladenosine-3'-phosphate
  modified_base 18: mod_base = OTHER; note = 2'-O-methylguanosine-3'-phosphate
  modified_base 19: mod_base = OTHER; note = 2'-O-methyladenosine-3'-phosphate
  modified_base 20: mod_base = OTHER; note = 2'-O-methylcytidine-3'-phosphate
  modified_base 21: mod_base = OTHER; note = 2'-O-methyluridine-3'-phosphate ((2S,4R)-1-[29-[[2-(acetylamino)-2-deoxy-beta-D-galactopyra nosyl]oxy]-14,14-bis[[3-[[3-[[5-[[2-(acetylamino)-2-deoxy-b eta-D-galactopyranosyl]oxy]-1-oxopentyl]amino]propyl]amino] -3-oxopropoxy]methyl]-1,12,19,25-tetraoxo-16-oxa-13,20,24-t riazanonacos-1-yl]-4-hydroxy-2-pyrrolidinyl)methyl ester
atcttcctggtcatcgagact

SEQ ID NO: 748 - RNA, 21 nt, synthetic construct
  source 1..21: mol_type = other RNA
  modified_base 1: mod_base = OTHER; note = 2'-O-methylcytidine-3'-phosphorothioate
  modified_base 2: mod_base = OTHER; note = 2'-O-methyladenosine-3'-phosphorothioate
  modified_base 3: mod_base = OTHER; note = 2'-O-methylguanosine-3'-phosphate
  modified_base 4: mod_base = OTHER; note = 2'-O-methylcytidine-3'-phosphate
  modified_base 5: mod_base = OTHER; note = 2'-O-methylguanosine-3'-phosphate
  modified_base 6: mod_base = OTHER; note = 2'-O-methyluridine-3'-phosphate
  modified_base 7: mod_base = OTHER; note = 2'-deoxy-2'-fluoroguanosine-3'-phosphate
  modified_base 8: mod_base = OTHER; note = 2'-O-methyluridine-3'-phosphate
  modified_base 9: mod_base = OTHER; note = 2'-deoxy-2'-fluorouridine-3'-phosphate
  modified_base 10: mod_base = OTHER; note = 2'-deoxy-2'-fluorocytidine-3'-phosphate
  modified_base 11: mod_base = OTHER; note = 2'-deoxy-2'-fluoroadenosine-3'-phosphate
  modified_base 12: mod_base = OTHER; note = 2'-O-methyluridine-3'-phosphate
  modified_base 13: mod_base = OTHER; note = 2'-O-methylcytidine-3'-phosphate
  modified_base 14: mod_base = OTHER; note = 2'-O-methylcytidine-3'-phosphate
  modified_base 15: mod_base = OTHER; note = 2'-O-methylguanosine-3'-phosphate
  modified_base 16: mod_base = OTHER; note = 2'-O-methyladenosine-3'-phosphate
  modified_base 17: mod_base = OTHER; note = 2'-O-methylcytidine-3'-phosphate
  modified_base 18: mod_base = OTHER; note = 2'-O-methyluridine-3'-phosphate
  modified_base 19: mod_base = OTHER; note = 2'-O-methylguanosine-3'-phosphate
  modified_base 20: mod_base = OTHER; note = 2'-O-methylcytidine-3'-phosphate
  modified_base 21: mod_base = OTHER; note = 2'-O-methyluridine-3'-phosphate ((2S,4R)-1-[29-[[2-(acetylamino)-2-deoxy-beta-D-galactopyra nosyl]oxy]-14,14-bis[[3-[[3-[[5-[[2-(acetylamino)-2-deoxy-b eta-D-galactopyranosyl]oxy]-1-oxopentyl]amino]propyl]amino] -3-oxopropoxy]methyl]-1,12,19,25-tetraoxo-16-oxa-13,20,24-t riazanonacos-1-yl]-4-hydroxy-2-pyrrolidinyl)methyl ester
cagcgtgttcatccgactgct

SEQ ID NO: 749 - RNA, 21 nt, synthetic construct
  source 1..21: mol_type = other RNA
  modified_base 1: mod_base = OTHER; note = 2'-O-methylguanosine-3'-phosphorothioate
  modified_base 2: mod_base = OTHER; note = 2'-O-methylguanosine-3'-phosphorothioate
  modified_base 3: mod_base = OTHER; note = 2'-O-methyladenosine-3'-phosphate
  modified_base 4: mod_base = OTHER; note = 2'-O-methylcytidine-3'-phosphate
  modified_base 5: mod_base = OTHER; note = 2'-O-methyluridine-3'-phosphate
  modified_base 6: mod_base = OTHER; note = 2'-O-methyladenosine-3'-phosphate
  modified_base 7: mod_base = OTHER; note = 2'-deoxy-2'-fluorocytidine-3'-phosphate
  modified_base 8: mod_base = OTHER; note = 2'-O-methyladenosine-3'-phosphate
  modified_base 9: mod_base = OTHER; note = 2'-deoxy-2'-fluoroadenosine-3'-phosphate
  modified_base 10: mod_base = OTHER; note = 2'-deoxy-2'-fluoroguanosine-3'-phosphate
  modified_base 11: mod_base = OTHER; note = 2'-deoxy-2'-fluoroguanosine-3'-phosphate
  modified_base 12: mod_base = OTHER; note = 2'-O-methylguanosine-3'-phosphate
  modified_base 13: mod_base = OTHER; note = 2'-O-methylcytidine-3'-phosphate
  modified_base 14: mod_base = OTHER; note = 2'-O-methyladenosine-3'-phosphate
  modified_base 15: mod_base = OTHER; note = 2'-O-methylguanosine-3'-phosphate
  modified_base 16: mod_base = OTHER; note = 2'-O-methylguanosine-3'-phosphate
  modified_base 17: mod_base = OTHER; note = 2'-O-methylguanosine-3'-phosphate
  modified_base 18: mod_base = OTHER; note = 2'-O-methyluridine-3'-phosphate
  modified_base 19: mod_base = OTHER; note = 2'-O-methylcytidine-3'-phosphate
  modified_base 20: mod_base = OTHER; note = 2'-O-methyluridine-3'-phosphate
  modified_base 21: mod_base = OTHER; note = 2'-O-methyluridine-3'-phosphate ((2S,4R)-1-[29-[[2-(acetylamino)-2-deoxy-beta-D-galactopyra nosyl]oxy]-14,14-bis[[3-[[3-[[5-[[2-(acetylamino)-2-deoxy-b eta-D-galactopyranosyl]oxy]-1-oxopentyl]amino]propyl]amino] -3-oxopropoxy]methyl]-1,12,19,25-tetraoxo-16-oxa-13,20,24-t riazanonacos-1-yl]-4-hydroxy-2-pyrrolidinyl)methyl ester
ggactacaagggcagggtctt

SEQ ID NO: 750 - RNA, 21 nt, synthetic construct
  source 1..21: mol_type = other RNA
  modified_base 1: mod_base = OTHER; note = 2'-O-methylguanosine-3'-phosphorothioate
  modified_base 2: mod_base = OTHER; note = 2'-O-methyladenosine-3'-phosphorothioate
  modified_base 3: mod_base = OTHER; note = 2'-O-methylcytidine-3'-phosphate
  modified_base 4: mod_base = OTHER; note = 2'-O-methyladenosine-3'-phosphate
  modified_base 5: mod_base = OTHER; note = 2'-O-methyladenosine-3'-phosphate
  modified_base 6: mod_base = OTHER; note = 2'-O-methyluridine-3'-phosphate
  modified_base 7: mod_base = OTHER; note = 2'-deoxy-2'-fluoroguanosine-3'-phosphate
  modified_base 8: mod_base = OTHER; note = 2'-O-methylcytidine-3'-phosphate
  modified_base 9: mod_base = OTHER; note = 2'-deoxy-2'-fluorocytidine-3'-phosphate
  modified_base 10: mod_base = OTHER; note = 2'-deoxy-2'-fluoroadenosine-3'-phosphate
  modified_base 11: mod_base = OTHER; note = 2'-deoxy-2'-fluorouridine-3'-phosphate
  modified_base 12: mod_base = OTHER; note = 2'-O-methylcytidine-3'-phosphate
  modified_base 13: mod_base = OTHER; note = 2'-O-methyladenosine-3'-phosphate
  modified_base 14: mod_base = OTHER; note = 2'-O-methyladenosine-3'-phosphate
  modified_base 15: mod_base = OTHER; note = 2'-O-methyluridine-3'-phosphate
  modified_base 16: mod_base = OTHER; note = 2'-O-methylguanosine-3'-phosphate
  modified_base 17: mod_base = OTHER; note = 2'-O-methyladenosine-3'-phosphate
  modified_base 18: mod_base = OTHER; note = 2'-O-methylcytidine-3'-phosphate
  modified_base 19: mod_base = OTHER; note = 2'-O-methyluridine-3'-phosphate
  modified_base 20: mod_base = OTHER; note = 2'-O-methyluridine-3'-phosphate
  modified_base 21: mod_base = OTHER; note = 2'-O-methyluridine-3'-phosphate ((2S,4R)-1-[29-[[2-(acetylamino)-2-deoxy-beta-D-galactopyra nosyl]oxy]-14,14-bis[[3-[[3-[[5-[[2-(acetylamino)-2-deoxy-b eta-D-galactopyranosyl]oxy]-1-oxopentyl]amino]propyl]amino] -3-oxopropoxy]methyl]-1,12,19,25-tetraoxo-16-oxa-13,20,24-t riazanonacos-1-yl]-4-hydroxy-2-pyrrolidinyl)methyl ester
gacaatgccatcaatgacttt

SEQ ID NO: 751 - RNA, 21 nt, synthetic construct
  source 1..21: mol_type = other RNA
  modified_base 1: mod_base = OTHER; note = 2'-O-methylguanosine-3'-phosphorothioate
  modified_base 2: mod_base = OTHER; note = 2'-O-methylcytidine-3'-phosphorothioate
  modified_base 3: mod_base = OTHER; note = 2'-O-methyladenosine-3'-phosphate
  modified_base 4: mod_base = OTHER; note = 2'-O-methylcytidine-3'-phosphate
  modified_base 5: mod_base = OTHER; note = 2'-O-methyluridine-3'-phosphate
  modified_base 6: mod_base = OTHER; note = 2'-O-methylguanosine-3'-phosphate
  modified_base 7: mod_base = OTHER; note = 2'-deoxy-2'-fluoroguanosine-3'-phosphate
  modified_base 8: mod_base = OTHER; note = 2'-O-methyladenosine-3'-phosphate
  modified_base 9: mod_base = OTHER; note = 2'-deoxy-2'-fluoroguanosine-3'-phosphate
  modified_base 10: mod_base = OTHER; note = 2'-deoxy-2'-fluorouridine-3'-phosphate
  modified_base 11: mod_base = OTHER; note = 2'-deoxy-2'-fluorouridine-3'-phosphate
  modified_base 12: mod_base = OTHER; note = 2'-O-methyluridine-3'-phosphate
  modified_base 13: mod_base = OTHER; note = 2'-O-methylguanosine-3'-phosphate
  modified_base 14: mod_base = OTHER; note = 2'-O-methylguanosine-3'-phosphate
  modified_base 15: mod_base = OTHER; note = 2'-O-methylguanosine-3'-phosphate
  modified_base 16: mod_base = OTHER; note = 2'-O-methyladenosine-3'-phosphate
  modified_base 17: mod_base = OTHER; note = 2'-O-methyladenosine-3'-phosphate
  modified_base 18: mod_base = OTHER; note = 2'-O-methylcytidine-3'-phosphate
  modified_base 19: mod_base = OTHER; note = 2'-O-methyladenosine-3'-phosphate
  modified_base 20: mod_base = OTHER; note = 2'-O-methylguanosine-3'-phosphate
  modified_base 21: mod_base = OTHER; note = 2'-O-methyluridine-3'-phosphate ((2S,4R)-1-[29-[[2-(acetylamino)-2-deoxy-beta-D-galactopyra nosyl]oxy]-14,14-bis[[3-[[3-[[5-[[2-(acetylamino)-2-deoxy-b eta-D-galactopyranosyl]oxy]-1-oxopentyl]amino]propyl]amino] -3-oxopropoxy]methyl]-1,12,19,25-tetraoxo-16-oxa-13,20,24-t riazanonacos-1-yl]-4-hydroxy-2-pyrrolidinyl)methyl ester
gcactggagtttgggaacagt

SEQ ID NO: 752 - RNA, 21 nt, synthetic construct
  source 1..21: mol_type = other RNA
  modified_base 1: mod_base = OTHER; note = 2'-O-methylcytidine-3'-phosphorothioate
  modified_base 2: mod_base = OTHER; note = 2'-O-methyladenosine-3'-phosphorothioate
  modified_base 3: mod_base = OTHER; note = 2'-O-methylguanosine-3'-phosphate
  modified_base 4: mod_base = OTHER; note = 2'-O-methyladenosine-3'-phosphate
  modified_base 5: mod_base = OTHER; note = 2'-O-methyladenosine-3'-phosphate
  modified_base 6: mod_base = OTHER; note = 2'-O-methylguanosine-3'-phosphate
  modified_base 7: mod_base = OTHER; note = 2'-deoxy-2'-fluorocytidine-3'-phosphate
  modified_base 8: mod_base = OTHER; note = 2'-O-methyladenosine-3'-phosphate
  modified_base 9: mod_base = OTHER; note = 2'-deoxy-2'-fluoroguanosine-3'-phosphate
  modified_base 10: mod_base = OTHER; note = 2'-deoxy-2'-fluorouridine-3'-phosphate
  modified_base 11: mod_base = OTHER; note = 2'-deoxy-2'-fluoroguanosine-3'-phosphate
  modified_base 12: mod_base = OTHER; note = 2'-O-methylcytidine-3'-phosphate
  modified_base 13: mod_base = OTHER; note = 2'-O-methyladenosine-3'-phosphate
  modified_base 14: mod_base = OTHER; note = 2'-O-methylguanosine-3'-phosphate
  modified_base 15: mod_base = OTHER; note = 2'-O-methylcytidine-3'-phosphate
  modified_base 16: mod_base = OTHER; note = 2'-O-methyladenosine-3'-phosphate
  modified_base 17: mod_base = OTHER; note = 2'-O-methyluridine-3'-phosphate
  modified_base 18: mod_base = OTHER; note = 2'-O-methylcytidine-3'-phosphate
  modified_base 19: mod_base = OTHER; note = 2'-O-methylcytidine-3'-phosphate
  modified_base 20: mod_base = OTHER; note = 2'-O-methyluridine-3'-phosphate
  modified_base 21: mod_base = OTHER; note = 2'-O-methyluridine-3'-phosphate ((2S,4R)-1-[29-[[2-(acetylamino)-2-deoxy-beta-D-galactopyra nosyl]oxy]-14,14-bis[[3-[[3-[[5-[[2-(acetylamino)-2-deoxy-b eta-D-galactopyranosyl]oxy]-1-oxopentyl]amino]propyl]amino] -3-oxopropoxy]methyl]-1,12,19,25-tetraoxo-16-oxa-13,20,24-t riazanonacos-1-yl]-4-hydroxy-2-pyrrolidinyl)methyl ester
cagaagcagtgcagcatcctt

SEQ ID NO: 753 - RNA, 21 nt, synthetic construct
  source 1..21: mol_type = other RNA
  modified_base 1: mod_base = OTHER; note = 2'-O-methylcytidine-3'-phosphorothioate
  modified_base 2: mod_base = OTHER; note = 2'-O-methylcytidine-3'-phosphorothioate
  modified_base 3: mod_base = OTHER; note = 2'-O-methyladenosine-3'-phosphate
  modified_base 4: mod_base = OTHER; note = 2'-O-methylguanosine-3'-phosphate
  modified_base 5: mod_base = OTHER; note = 2'-O-methylguanosine-3'-phosphate
  modified_base 6: mod_base = OTHER; note = 2'-O-methyluridine-3'-phosphate
  modified_base 7: mod_base = OTHER; note = 2'-deoxy-2'-fluorouridine-3'-phosphate
  modified_base 8: mod_base = OTHER; note = 2'-O-methylguanosine-3'-phosphate
  modified_base 9: mod_base = OTHER; note = 2'-deoxy-2'-fluoroadenosine-3'-phosphate
  modified_base 10: mod_base = OTHER; note = 2'-deoxy-2'-fluorocytidine-3'-phosphate
  modified_base 11: mod_base = OTHER; note = 2'-deoxy-2'-fluorouridine-3'-phosphate
  modified_base 12: mod_base = OTHER; note = 2'-O-methylcytidine-3'-phosphate
  modified_base 13: mod_base = OTHER; note = 2'-O-methylcytidine-3'-phosphate
  modified_base 14: mod_base = OTHER; note = 2'-O-methyladenosine-3'-phosphate
  modified_base 15: mod_base = OTHER; note = 2'-O-methylcytidine-3'-phosphate
  modified_base 16: mod_base = OTHER; note = 2'-O-methylcytidine-3'-phosphate
  modified_base 17: mod_base = OTHER; note = 2'-O-methyladenosine-3'-phosphate
  modified_base 18: mod_base = OTHER; note = 2'-O-methyladenosine-3'-phosphate
  modified_base 19: mod_base = OTHER; note = 2'-O-methylguanosine-3'-phosphate
  modified_base 20: mod_base = OTHER; note = 2'-O-methyluridine-3'-phosphate
  modified_base 21: mod_base = OTHER; note = 2'-O-methyluridine-3'-phosphate ((2S,4R)-1-[29-[[2-(acetylamino)-2-deoxy-beta-D-galactopyra nosyl]oxy]-14,14-bis[[3-[[3-[[5-[[2-(acetylamino)-2-deoxy-b eta-D-galactopyranosyl]oxy]-1-oxopentyl]amino]propyl]amino] -3-oxopropoxy]methyl]-1,12,19,25-tetraoxo-16-oxa-13,20,24-t riazanonacos-1-yl]-4-hydroxy-2-pyrrolidinyl)methyl ester
ccaggttgactccaccaagtt

SEQ ID NO: 754 - RNA, 21 nt, synthetic construct
  source 1..21: mol_type = other RNA
  modified_base 1: mod_base = OTHER; note = 2'-O-methylcytidine-3'-phosphorothioate
  modified_base 2: mod_base = OTHER; note = 2'-O-methylguanosine-3'-phosphorothioate
  modified_base 3: mod_base = OTHER; note = 2'-O-methyladenosine-3'-phosphate
  modified_base 4: mod_base = OTHER; note = 2'-O-methylguanosine-3'-phosphate
  modified_base 5: mod_base = OTHER; note = 2'-O-methylguanosine-3'-phosphate
  modified_base 6: mod_base = OTHER; note = 2'-O-methylcytidine-3'-phosphate
  modified_base 7: mod_base = OTHER; note = 2'-deoxy-2'-fluorocytidine-3'-phosphate
  modified_base 8: mod_base = OTHER; note = 2'-O-methyluridine-3'-phosphate
  modified_base 9: mod_base = OTHER; note = 2'-deoxy-2'-fluoroguanosine-3'-phosphate
  modified_base 10: mod_base = OTHER; note = 2'-deoxy-2'-fluorocytidine-3'-phosphate
  modified_base 11: mod_base = OTHER; note = 2'-deoxy-2'-fluoroguanosine-3'-phosphate
  modified_base 12: mod_base = OTHER; note = 2'-O-methyluridine-3'-phosphate
  modified_base 13: mod_base = OTHER; note = 2'-O-methylguanosine-3'-phosphate
  modified_base 14: mod_base = OTHER; note = 2'-O-methyladenosine-3'-phosphate
  modified_base 15: mod_base = OTHER; note = 2'-O-methyladenosine-3'-phosphate
  modified_base 16: mod_base = OTHER; note = 2'-O-methylcytidine-3'-phosphate
  modified_base 17: mod_base = OTHER; note = 2'-O-methylguanosine-3'-phosphate
  modified_base 18: mod_base = OTHER; note = 2'-O-methyladenosine-3'-phosphate
  modified_base 19: mod_base = OTHER; note = 2'-O-methylcytidine-3'-phosphate
  modified_base 20: mod_base = OTHER; note = 2'-O-methylguanosine-3'-phosphate
  modified_base 21: mod_base = OTHER; note = 2'-O-methyluridine-3'-phosphate ((2S,4R)-1-[29-[[2-(acetylamino)-2-deoxy-beta-D-galactopyra nosyl]oxy]-14,14-bis[[3-[[3-[[5-[[2-(acetylamino)-2-deoxy-b eta-D-galactopyranosyl]oxy]-1-oxopentyl]amino]propyl]amino] -3-oxopropoxy]methyl]-1,12,19,25-tetraoxo-16-oxa-13,20,24-t riazanonacos-1-yl]-4-hydroxy-2-pyrrolidinyl)methyl ester
cgaggcctgcgtgaacgacgt

SEQ ID NO: 755 - RNA, 21 nt, synthetic construct
  source 1..21: mol_type = other RNA
  modified_base 1: mod_base = OTHER; note = 2'-O-methyladenosine-3'-phosphorothioate
  modified_base 2: mod_base = OTHER; note = 2'-O-methylcytidine-3'-phosphorothioate
  modified_base 3: mod_base = OTHER; note = 2'-O-methyluridine-3'-phosphate
  modified_base 4: mod_base = OTHER; note = 2'-O-methylguanosine-3'-phosphate
  modified_base 5: mod_base = OTHER; note = 2'-O-methylcytidine-3'-phosphate
  modified_base 6: mod_base = OTHER; note = 2'-O-methylguanosine-3'-phosphate
  modified_base 7: mod_base = OTHER; note = 2'-deoxy-2'-fluoroadenosine-3'-phosphate
  modified_base 8: mod_base = OTHER; note = 2'-O-methylguanosine-3'-phosphate
  modified_base 9: mod_base = OTHER; note = 2'-deoxy-2'-fluorouridine-3'-phosphate
  modified_base 10: mod_base = OTHER; note = 2'-deoxy-2'-fluoroguanosine-3'-phosphate
  modified_base 11: mod_base = OTHER; note = 2'-deoxy-2'-fluorouridine-3'-phosphate
  modified_base 12: mod_base = OTHER; note = 2'-O-methyluridine-3'-phosphate
  modified_base 13: mod_base = OTHER; note = 2'-O-methyluridine-3'-phosphate
  modified_base 14: mod_base = OTHER; note = 2'-O-methylcytidine-3'-phosphate
  modified_base 15: mod_base = OTHER; note = 2'-O-methyluridine-3'-phosphate
  modified_base 16: mod_base = OTHER; note = 2'-O-methylguanosine-3'-phosphate
  modified_base 17: mod_base = OTHER; note = 2'-O-methylcytidine-3'-phosphate
  modified_base 18: mod_base = OTHER; note = 2'-O-methyladenosine-3'-phosphate
  modified_base 19: mod_base = OTHER; note = 2'-O-methylcytidine-3'-phosphate
  modified_base 20: mod_base = OTHER; note = 2'-O-methylguanosine-3'-phosphate
  modified_base 21: mod_base = OTHER; note = 2'-O-methyluridine-3'-phosphate ((2S,4R)-1-[29-[[2-(acetylamino)-2-deoxy-beta-D-galactopyra nosyl]oxy]-14,14-bis[[3-[[3-[[5-[[2-(acetylamino)-2-deoxy-b eta-D-galactopyranosyl]oxy]-1-oxopentyl]amino]propyl]amino] -3-oxopropoxy]methyl]-1,12,19,25-tetraoxo-16-oxa-13,20,24-t riazanonacos-1-yl]-4-hydroxy-2-pyrrolidinyl)methyl ester
actgcgagtgtttctgcacgt

SEQ ID NO: 756 - RNA, 21 nt, synthetic construct
  source 1..21: mol_type = other RNA
  modified_base 1: mod_base = OTHER; note = 2'-O-methyluridine-3'-phosphorothioate
  modified_base 2: mod_base = OTHER; note = 2'-O-methylguanosine-3'-phosphorothioate
  modified_base 3: mod_base = OTHER; note = 2'-O-methyluridine-3'-phosphate
  modified_base 4: mod_base = OTHER; note = 2'-O-methylguanosine-3'-phosphate
  modified_base 5: mod_base = OTHER; note = 2'-O-methyluridine-3'-phosphate
  modified_base 6: mod_base = OTHER; note = 2'-O-methylguanosine-3'-phosphate
  modified_base 7: mod_base = OTHER; note = 2'-deoxy-2'-fluorouridine-3'-phosphate
  modified_base 8: mod_base = OTHER; note = 2'-O-methylguanosine-3'-phosphate
  modified_base 9: mod_base = OTHER; note = 2'-deoxy-2'-fluorouridine-3'-phosphate
  modified_base 10: mod_base = OTHER; note = 2'-deoxy-2'-fluorocytidine-3'-phosphate
  modified_base 11: mod_base = OTHER; note = 2'-deoxy-2'-fluorocytidine-3'-phosphate
  modified_base 12: mod_base = OTHER; note = 2'-O-methyluridine-3'-phosphate
  modified_base 13: mod_base = OTHER; note = 2'-O-methylguanosine-3'-phosphate
  modified_base 14: mod_base = OTHER; note = 2'-O-methylguanosine-3'-phosphate
  modified_base 15: mod_base = OTHER; note = 2'-O-methylcytidine-3'-phosphate
  modified_base 16: mod_base = OTHER; note = 2'-O-methylguanosine-3'-phosphate
  modified_base 17: mod_base = OTHER; note = 2'-O-methylguanosine-3'-phosphate
  modified_base 18: mod_base = OTHER; note = 2'-O-methyladenosine-3'-phosphate
  modified_base 19: mod_base = OTHER; note = 2'-O-methylcytidine-3'-phosphate
  modified_base 20: mod_base = OTHER; note = 2'-O-methyluridine-3'-phosphate
  modified_base 21: mod_base = OTHER; note = 2'-O-methyluridine-3'-phosphate ((2S,4R)-1-[29-[[2-(acetylamino)-2-deoxy-beta-D-galactopyra nosyl]oxy]-14,14-bis[[3-[[3-[[5-[[2-(acetylamino)-2-deoxy-b eta-D-galactopyranosyl]oxy]-1-oxopentyl]amino]propyl]amino] -3-oxopropoxy]methyl]-1,12,19,25-tetraoxo-16-oxa-13,20,24-t riazanonacos-1-yl]-4-hydroxy-2-pyrrolidinyl)methyl ester
tgtgtgtgtcctggcggactt

SEQ ID NO: 757 - RNA, 21 nt, synthetic construct
  source 1..21: mol_type = other RNA
  modified_base 1: mod_base = OTHER; note = 2'-O-methyluridine-3'-phosphorothioate
  modified_base 2: mod_base = OTHER; note = 2'-O-methylguanosine-3'-phosphorothioate
  modified_base 3: mod_base = OTHER; note = 2'-O-methyluridine-3'-phosphate
  modified_base 4: mod_base = OTHER; note = 2'-O-methyluridine-3'-phosphate
  modified_base 5: mod_base = OTHER; note = 2'-O-methylcytidine-3'-phosphate
  modified_base 6: mod_base = OTHER; note = 2'-O-methyluridine-3'-phosphate
  modified_base 7: mod_base = OTHER; note = 2'-deoxy-2'-fluoroguanosine-3'-phosphate
  modified_base 8: mod_base = OTHER; note = 2'-O-methyluridine-3'-phosphate
  modified_base 9: mod_base = OTHER; note = 2'-deoxy-2'-fluoroguanosine-3'-phosphate
  modified_base 10: mod_base = OTHER; note = 2'-deoxy-2'-fluoroadenosine-3'-phosphate
  modified_base 11: mod_base = OTHER; note = 2'-deoxy-2'-fluorocytidine-3'-phosphate
  modified_base 12: mod_base = OTHER; note = 2'-O-methyluridine-3'-phosphate
  modified_base 13: mod_base = OTHER; note = 2'-O-methyluridine-3'-phosphate
  modified_base 14: mod_base = OTHER; note = 2'-O-methylcytidine-3'-phosphate
  modified_base 15: mod_base = OTHER; note = 2'-O-methyluridine-3'-phosphate
  modified_base 16: mod_base = OTHER; note = 2'-O-methyladenosine-3'-phosphate
  modified_base 17: mod_base = OTHER; note = 2'-O-methylcytidine-3'-phosphate
  modified_base 18: mod_base = OTHER; note = 2'-O-methyladenosine-3'-phosphate
  modified_base 19: mod_base = OTHER; note = 2'-O-methyladenosine-3'-phosphate
  modified_base 20: mod_base = OTHER; note = 2'-O-methylcytidine-3'-phosphate
  modified_base 21: mod_base = OTHER; note = 2'-O-methyluridine-3'-phosphate ((2S,4R)-1-[29-[[2-(acetylamino)-2-deoxy-beta-D-galactopyra nosyl]oxy]-14,14-bis[[3-[[3-[[5-[[2-(acetylamino)-2-deoxy-b eta-D-galactopyranosyl]oxy]-1-oxopentyl]amino]propyl]amino] -3-oxopropoxy]methyl]-1,12,19,25-tetraoxo-16-oxa-13,20,24-t riazanonacos-1-yl]-4-hydroxy-2-pyrrolidinyl)methyl ester
tgttctgtgacttctacaact

SEQ ID NO: 758 - RNA, 21 nt, synthetic construct
  source 1..21: mol_type = other RNA
  modified_base 1: mod_base = OTHER; note = 2'-O-methylcytidine-3'-phosphorothioate
  modified_base 2: mod_base = OTHER; note = 2'-O-methyluridine-3'-phosphorothioate
  modified_base 3: mod_base = OTHER; note = 2'-O-methylguanosine-3'-phosphate
  modified_base 4: mod_base = OTHER; note = 2'-O-methyluridine-3'-phosphate
  modified_base 5: mod_base = OTHER; note = 2'-O-methylguanosine-3'-phosphate
  modified_base 6: mod_base = OTHER; note = 2'-O-methyladenosine-3'-phosphate
  modified_base 7: mod_base = OTHER; note = 2'-deoxy-2'-fluoroguanosine-3'-phosphate
  modified_base 8: mod_base = OTHER; note = 2'-O-methyluridine-3'-phosphate
  modified_base 9: mod_base = OTHER; note = 2'-deoxy-2'-fluoroguanosine-3'-phosphate
  modified_base 10: mod_base = OTHER; note = 2'-deoxy-2'-fluoroguanosine-3'-phosphate
  modified_base 11: mod_base = OTHER; note = 2'-deoxy-2'-fluorocytidine-3'-phosphate
  modified_base 12: mod_base = OTHER; note = 2'-O-methyladenosine-3'-phosphate
  modified_base 13: mod_base = OTHER; note = 2'-O-methylcytidine-3'-phosphate
  modified_base 14: mod_base = OTHER; note = 2'-O-methyluridine-3'-phosphate
  modified_base 15: mod_base = OTHER; note = 2'-O-methyladenosine-3'-phosphate
  modified_base 16: mod_base = OTHER; note = 2'-O-methylcytidine-3'-phosphate
  modified_base 17: mod_base = OTHER; note = 2'-O-methylcytidine-3'-phosphate
  modified_base 18: mod_base = OTHER; note = 2'-O-methyladenosine-3'-phosphate
  modified_base 19: mod_base = OTHER; note = 2'-O-methylguanosine-3'-phosphate
  modified_base 20: mod_base = OTHER; note = 2'-O-methylcytidine-3'-phosphate
  modified_base 21: mod_base = OTHER; note = 2'-O-methyluridine-3'-phosphate ((2S,4R)-1-[29-[[2-(acetylamino)-2-deoxy-beta-D-galactopyra nosyl]oxy]-14,14-bis[[3-[[3-[[5-[[2-(acetylamino)-2-deoxy-b eta-D-galactopyranosyl]oxy]-1-oxopentyl]amino]propyl]amino] -3-oxopropoxy]methyl]-1,12,19,25-tetraoxo-16-oxa-13,20,24-t riazanonacos-1-yl]-4-hydroxy-2-pyrrolidinyl)methyl ester
ctgtgagtggcactaccagct

SEQ ID NO: 759 - RNA, 21 nt, synthetic construct
  source 1..21: mol_type = other RNA
  modified_base 1: mod_base = OTHER; note = 2'-O-methylguanosine-3'-phosphorothioate
  modified_base 2: mod_base = OTHER; note = 2'-O-methylcytidine-3'-phosphorothioate
  modified_base 3: mod_base = OTHER; note = 2'-O-methyluridine-3'-phosphate
  modified_base 4: mod_base = OTHER; note = 2'-O-methylguanosine-3'-phosphate
  modified_base 5: mod_base = OTHER; note = 2'-O-methylcytidine-3'-phosphate
  modified_base 6: mod_base = OTHER; note = 2'-O-methyluridine-3'-phosphate
  modified_base 7: mod_base = OTHER; note = 2'-deoxy-2'-fluoroadenosine-3'-phosphate
  modified_base 8: mod_base = OTHER; note = 2'-O-methylcytidine-3'-phosphate
  modified_base 9: mod_base = OTHER; note = 2'-deoxy-2'-fluorocytidine-3'-phosphate
  modified_base 10: mod_base = OTHER; note = 2'-deoxy-2'-fluorocytidine-3'-phosphate
  modified_base 11: mod_base = OTHER; note = 2'-deoxy-2'-fluoroguanosine-3'-phosphate
  modified_base 12: mod_base = OTHER; note = 2'-O-methyladenosine-3'-phosphate
  modified_base 13: mod_base = OTHER; note = 2'-O-methyladenosine-3'-phosphate
  modified_base 14: mod_base = OTHER; note = 2'-O-methylguanosine-3'-phosphate
  modified_base 15: mod_base = OTHER; note = 2'-O-methyluridine-3'-phosphate
  modified_base 16: mod_base = OTHER; note = 2'-O-methylguanosine-3'-phosphate
  modified_base 17: mod_base = OTHER; note = 2'-O-methylcytidine-3'-phosphate
  modified_base 18: mod_base = OTHER; note = 2'-O-methylcytidine-3'-phosphate
  modified_base 19: mod_base = OTHER; note = 2'-O-methylcytidine-3'-phosphate
  modified_base 20: mod_base = OTHER; note = 2'-O-methyladenosine-3'-phosphate
  modified_base 21: mod_base = OTHER; note = 2'-O-methyluridine-3'-phosphate ((2S,4R)-1-[29-[[2-(acetylamino)-2-deoxy-beta-D-galactopyra nosyl]oxy]-14,14-bis[[3-[[3-[[5-[[2-(acetylamino)-2-deoxy-b eta-D-galactopyranosyl]oxy]-1-oxopentyl]amino]propyl]amino] -3-oxopropoxy]methyl]-1,12,19,25-tetraoxo-16-oxa-13,20,24-t riazanonacos-1-yl]-4-hydroxy-2-pyrrolidinyl)methyl ester
gctgctacccgaagtgcccat

SEQ ID NO: 760 - RNA, 21 nt, synthetic construct
  source 1..21: mol_type = other RNA
  modified_base 1: mod_base = OTHER; note = 2'-O-methyladenosine-3'-phosphorothioate
  modified_base 2: mod_base = OTHER; note = 2'-O-methylguanosine-3'-phosphorothioate
  modified_base 3: mod_base = OTHER; note = 2'-O-methylcytidine-3'-phosphate
  modified_base 4: mod_base = OTHER; note = 2'-O-methylcytidine-3'-phosphate
  modified_base 5: mod_base = OTHER; note = 2'-O-methylcytidine-3'-phosphate
  modified_base 6: mod_base = OTHER; note = 2'-O-methyluridine-3'-phosphate
  modified_base 7: mod_base = OTHER; note = 2'-deoxy-2'-fluorouridine-3'-phosphate
  modified_base 8: mod_base = OTHER; note = 2'-O-methylcytidine-3'-phosphate
  modified_base 9: mod_base = OTHER; note = 2'-deoxy-2'-fluorouridine-3'-phosphate
  modified_base 10: mod_base = OTHER; note = 2'-deoxy-2'-fluorouridine-3'-phosphate
  modified_base 11: mod_base = OTHER; note = 2'-deoxy-2'-fluorocytidine-3'-phosphate
  modified_base 12: mod_base = OTHER; note = 2'-O-methyladenosine-3'-phosphate
  modified_base 13: mod_base = OTHER; note = 2'-O-methyladenosine-3'-phosphate
  modified_base 14: mod_base = OTHER; note = 2'-O-methyluridine-3'-phosphate
  modified_base 15: mod_base = OTHER; note = 2'-O-methylguanosine-3'-phosphate
  modified_base 16: mod_base = OTHER; note = 2'-O-methyladenosine-3'-phosphate
  modified_base 17: mod_base = OTHER; note = 2'-O-methylguanosine-3'-phosphate
  modified_base 18: mod_base = OTHER; note = 2'-O-methylguanosine-3'-phosphate
  modified_base 19: mod_base = OTHER; note = 2'-O-methyladenosine-3'-phosphate
  modified_base 20: mod_base = OTHER; note = 2'-O-methylcytidine-3'-phosphate
  modified_base 21: mod_base = OTHER; note = 2'-O-methyluridine-3'-phosphate ((2S,4R)-1-[29-[[2-(acetylamino)-2-deoxy-beta-D-galactopyra nosyl]oxy]-14,14-bis[[3-[[3-[[5-[[2-(acetylamino)-2-deoxy-b eta-D-galactopyranosyl]oxy]-1-oxopentyl]amino]propyl]amino] -3-oxopropoxy]methyl]-1,12,19,25-tetraoxo-16-oxa-13,20,24-t riazanonacos-1-yl]-4-hydroxy-2-pyrrolidinyl)methyl ester
agcccttcttcaatgaggact

SEQ ID NO: 761 - RNA, 21 nt, synthetic construct
  source 1..21: mol_type = other RNA
  modified_base 1: mod_base = OTHER; note = 2'-O-methyladenosine-3'-phosphorothioate
  modified_base 2: mod_base = OTHER; note = 2'-O-methyladenosine-3'-phosphorothioate
  modified_base 3: mod_base = OTHER; note = 2'-O-methylguanosine-3'-phosphate
  modified_base 4: mod_base = OTHER; note = 2'-O-methyluridine-3'-phosphate
  modified_base 5: mod_base = OTHER; note = 2'-O-methylguanosine-3'-phosphate
  modified_base 6: mod_base = OTHER; note = 2'-O-methylcytidine-3'-phosphate
  modified_base 7: mod_base = OTHER; note = 2'-deoxy-2'-fluoroguanosine-3'-phosphate
  modified_base 8: mod_base = OTHER; note = 2'-O-methyluridine-3'-phosphate
  modified_base 9: mod_base = OTHER; note = 2'-deoxy-2'-fluoroguanosine-3'-phosphate
  modified_base 10: mod_base = OTHER; note = 2'-deoxy-2'-fluoroguanosine-3'-phosphate
  modified_base 11: mod_base = OTHER; note = 2'-deoxy-2'-fluorocytidine-3'-phosphate
  modified_base 12: mod_base = OTHER; note = 2'-O-methylcytidine-3'-phosphate
  modified_base 13: mod_base = OTHER; note = 2'-O-methylcytidine-3'-phosphate
  modified_base 14: mod_base = OTHER; note = 2'-O-methyladenosine-3'-phosphate
  modified_base 15: mod_base = OTHER; note = 2'-O-methylguanosine-3'-phosphate
  modified_base 16: mod_base = OTHER; note = 2'-O-methyluridine-3'-phosphate
  modified_base 17: mod_base = OTHER; note = 2'-O-methylguanosine-3'-phosphate
  modified_base 18: mod_base = OTHER; note = 2'-O-methyluridine-3'-phosphate
  modified_base 19: mod_base = OTHER; note = 2'-O-methylguanosine-3'-phosphate
  modified_base 20: mod_base = OTHER; note = 2'-O-methylguanosine-3'-phosphate
  modified_base 21: mod_base = OTHER; note = 2'-O-methyluridine-3'-phosphate ((2S,4R)-1-[29-[[2-(acetylamino)-2-deoxy-beta-D-galactopyra nosyl]oxy]-14,14-bis[[3-[[3-[[5-[[2-(acetylamino)-2-deoxy-b eta-D-galactopyranosyl]oxy]-1-oxopentyl]amino]propyl]amino] -3-oxopropoxy]methyl]-1,12,19,25-tetraoxo-16-oxa-13,20,24-t riazanonacos-1-yl]-4-hydroxy-2-pyrrolidinyl)methyl ester
aagtgcgtggcccagtgtggt

SEQ ID NO: 762 - RNA, 21 nt, synthetic construct
  source 1..21: mol_type = other RNA
  modified_base 1: mod_base = OTHER; note = 2'-O-methylcytidine-3'-phosphorothioate
  modified_base 2: mod_base = OTHER; note = 2'-O-methyluridine-3'-phosphorothioate
  modified_base 3: mod_base = OTHER; note = 2'-O-methyladenosine-3'-phosphate
  modified_base 4: mod_base = OTHER; note = 2'-O-methylcytidine-3'-phosphate
  modified_base 5: mod_base = OTHER; note = 2'-O-methylguanosine-3'-phosphate
  modified_base 6: mod_base = OTHER; note = 2'-O-methyladenosine-3'-phosphate
  modified_base 7: mod_base = OTHER; note = 2'-deoxy-2'-fluorocytidine-3'-phosphate
  modified_base 8: mod_base = OTHER; note = 2'-O-methyladenosine-3'-phosphate
  modified_base 9: mod_base = OTHER; note = 2'-deoxy-2'-fluoroadenosine-3'-phosphate
  modified_base 10: mod_base = OTHER; note = 2'-deoxy-2'-fluoroguanosine-3'-phosphate
  modified_base 11: mod_base = OTHER; note = 2'-deoxy-2'-fluoroguanosine-3'-phosphate
  modified_base 12: mod_base = OTHER; note = 2'-O-methyladenosine-3'-phosphate
  modified_base 13: mod_base = OTHER; note = 2'-O-methylcytidine-3'-phosphate
  modified_base 14: mod_base = OTHER; note = 2'-O-methylguanosine-3'-phosphate
  modified_base 15: mod_base = OTHER; note = 2'-O-methylguanosine-3'-phosphate
  modified_base 16: mod_base = OTHER; note = 2'-O-methyladenosine-3'-phosphate
  modified_base 17: mod_base = OTHER; note = 2'-O-methyladenosine-3'-phosphate
  modified_base 18: mod_base = OTHER; note = 2'-O-methyladenosine-3'-phosphate
  modified_base 19: mod_base = OTHER; note = 2'-O-methylcytidine-3'-phosphate
  modified_base 20: mod_base = OTHER; note = 2'-O-methyluridine-3'-phosphate
  modified_base 21: mod_base = OTHER; note = 2'-O-methyluridine-3'-phosphate ((2S,4R)-1-[29-[[2-(acetylamino)-2-deoxy-beta-D-galactopyra nosyl]oxy]-14,14-bis[[3-[[3-[[5-[[2-(acetylamino)-2-deoxy-b eta-D-galactopyranosyl]oxy]-1-oxopentyl]amino]propyl]amino] -3-oxopropoxy]methyl]-1,12,19,25-tetraoxo-16-oxa-13,20,24-t riazanonacos-1-yl]-4-hydroxy-2-pyrrolidinyl)methyl ester
ctacgacaaggacggaaactt

SEQ ID NO: 763 - RNA, 21 nt, synthetic construct
  source 1..21: mol_type = other RNA
  modified_base 1: mod_base = OTHER; note = 2'-O-methyladenosine-3'-phosphorothioate
  modified_base 2: mod_base = OTHER; note = 2'-O-methyluridine-3'-phosphorothioate
  modified_base 3: mod_base = OTHER; note = 2'-O-methylguanosine-3'-phosphate
  modified_base 4: mod_base = OTHER; note = 2'-O-methyladenosine-3'-phosphate
  modified_base 5: mod_base = OTHER; note = 2'-O-methylcytidine-3'-phosphate
  modified_base 6: mod_base = OTHER; note = 2'-O-methylguanosine-3'-phosphate
  modified_base 7: mod_base = OTHER; note = 2'-deoxy-2'-fluorouridine-3'-phosphate
  modified_base 8: mod_base = OTHER; note = 2'-O-methylcytidine-3'-phosphate
  modified_base 9: mod_base = OTHER; note = 2'-deoxy-2'-fluoroguanosine-3'-phosphate
  modified_base 10: mod_base = OTHER; note = 2'-deoxy-2'-fluoroguanosine-3'-phosphate
  modified_base 11: mod_base = OTHER; note = 2'-deoxy-2'-fluorouridine-3'-phosphate
  modified_base 12: mod_base = OTHER; note = 2'-O-methylguanosine-3'-phosphate
  modified_base 13: mod_base = OTHER; note = 2'-O-methylcytidine-3'-phosphate
  modified_base 14: mod_base = OTHER; note = 2'-O-methyladenosine-3'-phosphate
  modified_base 15: mod_base = OTHER; note = 2'-O-methyladenosine-3'-phosphate
  modified_base 16: mod_base = OTHER; note = 2'-O-methylguanosine-3'-phosphate
  modified_base 17: mod_base = OTHER; note = 2'-O-methylguanosine-3'-phosphate
  modified_base 18: mod_base = OTHER; note = 2'-O-methylguanosine-3'-phosphate
  modified_base 19: mod_base = OTHER; note = 2'-O-methyluridine-3'-phosphate
  modified_base 20: mod_base = OTHER; note = 2'-O-methylcytidine-3'-phosphate
  modified_base 21: mod_base = OTHER; note = 2'-O-methyluridine-3'-phosphate ((2S,4R)-1-[29-[[2-(acetylamino)-2-deoxy-beta-D-galactopyra nosyl]oxy]-14,14-bis[[3-[[3-[[5-[[2-(acetylamino)-2-deoxy-b eta-D-galactopyranosyl]oxy]-1-oxopentyl]amino]propyl]amino] -3-oxopropoxy]methyl]-1,12,19,25-tetraoxo-16-oxa-13,20,24-t riazanonacos-1-yl]-4-hydroxy-2-pyrrolidinyl)methyl ester
atgacgtcggtgcaagggtct

SEQ ID NO: 764 - RNA, 21 nt, synthetic construct
  source 1..21: mol_type = other RNA
  modified_base 1: mod_base = OTHER; note = 2'-O-methylcytidine-3'-phosphorothioate
  modified_base 2: mod_base = OTHER; note = 2'-O-methylcytidine-3'-phosphorothioate
  modified_base 3: mod_base = OTHER; note = 2'-O-methyladenosine-3'-phosphate
  modified_base 4: mod_base = OTHER; note = 2'-O-methylguanosine-3'-phosphate
  modified_base 5: mod_base = OTHER; note = 2'-O-methyladenosine-3'-phosphate
  modified_base 6: mod_base = OTHER; note = 2'-O-methylguanosine-3'-phosphate
  modified_base 7: mod_base = OTHER; note = 2'-deoxy-2'-fluorocytidine-3'-phosphate
  modified_base 8: mod_base = OTHER; note = 2'-O-methyluridine-3'-phosphate
  modified_base 9: mod_base = OTHER; note = 2'-deoxy-2'-fluoroguanosine-3'-phosphate
  modified_base 10: mod_base = OTHER; note = 2'-deoxy-2'-fluorouridine-3'-phosphate
  modified_base 11: mod_base = OTHER; note = 2'-deoxy-2'-fluoroadenosine-3'-phosphate
  modified_base 12: mod_base = OTHER; note = 2'-O-methyladenosine-3'-phosphate
  modified_base 13: mod_base = OTHER; note = 2'-O-methylcytidine-3'-phosphate
  modified_base 14: mod_base = OTHER; note = 2'-O-methyluridine-3'-phosphate
  modified_base 15: mod_base = OTHER; note = 2'-O-methylguanosine-3'-phosphate
  modified_base 16: mod_base = OTHER; note = 2'-O-methylcytidine-3'-phosphate
  modified_base 17: mod_base = OTHER; note = 2'-O-methyladenosine-3'-phosphate
  modified_base 18: mod_base = OTHER; note = 2'-O-methylcytidine-3'-phosphate
  modified_base 19: mod_base = OTHER; note = 2'-O-methyladenosine-3'-phosphate
  modified_base 20: mod_base = OTHER; note = 2'-O-methylcytidine-3'-phosphate
  modified_base 21: mod_base = OTHER; note = 2'-O-methyluridine-3'-phosphate ((2S,4R)-1-[29-[[2-(acetylamino)-2-deoxy-beta-D-galactopyra nosyl]oxy]-14,14-bis[[3-[[3-[[5-[[2-(acetylamino)-2-deoxy-b eta-D-galactopyranosyl]oxy]-1-oxopentyl]amino]propyl]amino] -3-oxopropoxy]methyl]-1,12,19,25-tetraoxo-16-oxa-13,20,24-t riazanonacos-1-yl]-4-hydroxy-2-pyrrolidinyl)methyl ester
ccagagctgtaactgcacact

SEQ ID NO: 765 - RNA, 21 nt, synthetic construct
  source 1..21: mol_type = other RNA
  modified_base 1: mod_base = OTHER; note = 2'-O-methylcytidine-3'-phosphorothioate
  modified_base 2: mod_base = OTHER; note = 2'-O-methyladenosine-3'-phosphorothioate
  modified_base 3: mod_base = OTHER; note = 2'-O-methylguanosine-3'-phosphate
  modified_base 4: mod_base = OTHER; note = 2'-O-methyluridine-3'-phosphate
  modified_base 5: mod_base = OTHER; note = 2'-O-methylguanosine-3'-phosphate
  modified_base 6: mod_base = OTHER; note = 2'-O-methylcytidine-3'-phosphate
  modified_base 7: mod_base = OTHER; note = 2'-deoxy-2'-fluoroguanosine-3'-phosphate
  modified_base 8: mod_base = OTHER; note = 2'-O-methylcytidine-3'-phosphate
  modified_base 9: mod_base = OTHER; note = 2'-deoxy-2'-fluorouridine-3'-phosphate
  modified_base 10: mod_base = OTHER; note = 2'-deoxy-2'-fluorocytidine-3'-phosphate
  modified_base 11: mod_base = OTHER; note = 2'-deoxy-2'-fluoroadenosine-3'-phosphate
  modified_base 12: mod_base = OTHER; note = 2'-O-methylcytidine-3'-phosphate
  modified_base 13: mod_base = OTHER; note = 2'-O-methyladenosine-3'-phosphate
  modified_base 14: mod_base = OTHER; note = 2'-O-methylguanosine-3'-phosphate
  modified_base 15: mod_base = OTHER; note = 2'-O-methylcytidine-3'-phosphate
  modified_base 16: mod_base = OTHER; note = 2'-O-methylcytidine-3'-phosphate
  modified_base 17: mod_base = OTHER; note = 2'-O-methyluridine-3'-phosphate
  modified_base 18: mod_base = OTHER; note = 2'-O-methyluridine-3'-phosphate
  modified_base 19: mod_base = OTHER; note = 2'-O-methylguanosine-3'-phosphate
  modified_base 20: mod_base = OTHER; note = 2'-O-methyladenosine-3'-phosphate
  modified_base 21: mod_base = OTHER; note = 2'-O-methyluridine-3'-phosphate ((2S,4R)-1-[29-[[2-(acetylamino)-2-deoxy-beta-D-galactopyra nosyl]oxy]-14,14-bis[[3-[[3-[[5-[[2-(acetylamino)-2-deoxy-b eta-D-galactopyranosyl]oxy]-1-oxopentyl]amino]propyl]amino] -3-oxopropoxy]methyl]-1,12,19,25-tetraoxo-16-oxa-13,20,24-t riazanonacos-1-yl]-4-hydroxy-2-pyrrolidinyl)methyl ester
cagtgcgctcacagccttgat

SEQ ID NO: 766 - RNA, 21 nt, synthetic construct
  source 1..21: mol_type = other RNA
  modified_base 1: mod_base = OTHER; note = 2'-O-methyluridine-3'-phosphorothioate
  modified_base 2: mod_base = OTHER; note = 2'-O-methylguanosine-3'-phosphorothioate
  modified_base 3: mod_base = OTHER; note = 2'-O-methylcytidine-3'-phosphate
  modified_base 4: mod_base = OTHER; note = 2'-O-methyladenosine-3'-phosphate
  modified_base 5: mod_base = OTHER; note = 2'-O-methylcytidine-3'-phosphate
  modified_base 6: mod_base = OTHER; note = 2'-O-methylcytidine-3'-phosphate
  modified_base 7: mod_base = OTHER; note = 2'-deoxy-2'-fluorouridine-3'-phosphate
  modified_base 8: mod_base = OTHER; note = 2'-O-methyladenosine-3'-phosphate
  modified_base 9: mod_base = OTHER; note = 2'-deoxy-2'-fluorouridine-3'-phosphate
  modified_base 10: mod_base = OTHER; note = 2'-deoxy-2'-fluoroguanosine-3'-phosphate
  modified_base 11: mod_base = OTHER; note = 2'-deoxy-2'-fluoroadenosine-3'-phosphate
  modified_base 12: mod_base = OTHER; note = 2'-O-methylguanosine-3'-phosphate
  modified_base 13: mod_base = OTHER; note = 2'-O-methylguanosine-3'-phosphate
  modified_base 14: mod_base = OTHER; note = 2'-O-methyladenosine-3'-phosphate
  modified_base 15: mod_base = OTHER; note = 2'-O-methylcytidine-3'-phosphate
  modified_base 16: mod_base = OTHER; note = 2'-O-methyladenosine-3'-phosphate
  modified_base 17: mod_base = OTHER; note = 2'-O-methylguanosine-3'-phosphate
  modified_base 18: mod_base = OTHER; note = 2'-O-methylguanosine-3'-phosphate
  modified_base 19: mod_base = OTHER; note = 2'-O-methyladenosine-3'-phosphate
  modified_base 20: mod_base = OTHER; note = 2'-O-methylcytidine-3'-phosphate
  modified_base 21: mod_base = OTHER; note = 2'-O-methyluridine-3'-phosphate ((2S,4R)-1-[29-[[2-(acetylamino)-2-deoxy-beta-D-galactopyra nosyl]oxy]-14,14-bis[[3-[[3-[[5-[[2-(acetylamino)-2-deoxy-b eta-D-galactopyranosyl]oxy]-1-oxopentyl]amino]propyl]amino] -3-oxopropoxy]methyl]-1,12,19,25-tetraoxo-16-oxa-13,20,24-t riazanonacos-1-yl]-4-hydroxy-2-pyrrolidinyl)methyl ester
tgcacctatgaggacaggact

SEQ ID NO: 767 - RNA, 21 nt, synthetic construct
  source 1..21: mol_type = other RNA
  modified_base 1: mod_base = OTHER; note = 2'-O-methylcytidine-3'-phosphorothioate
  modified_base 2: mod_base = OTHER; note = 2'-O-methyladenosine-3'-phosphorothioate
  modified_base 3: mod_base = OTHER; note = 2'-O-methylguanosine-3'-phosphate
  modified_base 4: mod_base = OTHER; note = 2'-O-methylguanosine-3'-phosphate
  modified_base 5: mod_base = OTHER; note = 2'-O-methyladenosine-3'-phosphate
  modified_base 6: mod_base = OTHER; note = 2'-O-methylcytidine-3'-phosphate
  modified_base 7: mod_base = OTHER; note = 2'-deoxy-2'-fluoroguanosine-3'-phosphate
  modified_base 8: mod_base = OTHER; note = 2'-O-methyluridine-3'-phosphate
  modified_base 9: mod_base = OTHER; note = 2'-deoxy-2'-fluorocytidine-3'-phosphate
  modified_base 10: mod_base = OTHER; note = 2'-deoxy-2'-fluoroadenosine-3'-phosphate
  modified_base 11: mod_base = OTHER; note = 2'-deoxy-2'-fluorouridine-3'-phosphate
  modified_base 12: mod_base = OTHER; note = 2'-O-methylcytidine-3'-phosphate
  modified_base 13: mod_base = OTHER; note = 2'-O-methyluridine-3'-phosphate
  modified_base 14: mod_base = OTHER; note = 2'-O-methyladenosine-3'-phosphate
  modified_base 15: mod_base = OTHER; note = 2'-O-methylcytidine-3'-phosphate
  modified_base 16: mod_base = OTHER; note = 2'-O-methyladenosine-3'-phosphate
  modified_base 17: mod_base = OTHER; note = 2'-O-methyladenosine-3'-phosphate
  modified_base 18: mod_base = OTHER; note = 2'-O-methylcytidine-3'-phosphate
  modified_base 19: mod_base = OTHER; note = 2'-O-methyladenosine-3'-phosphate
  modified_base 20: mod_base = OTHER; note = 2'-O-methylcytidine-3'-phosphate
  modified_base 21: mod_base = OTHER; note = 2'-O-methyluridine-3'-phosphate ((2S,4R)-1-[29-[[2-(acetylamino)-2-deoxy-beta-D-galactopyra nosyl]oxy]-14,14-bis[[3-[[3-[[5-[[2-(acetylamino)-2-deoxy-b eta-D-galactopyranosyl]oxy]-1-oxopentyl]amino]propyl]amino] -3-oxopropoxy]methyl]-1,12,19,25-tetraoxo-16-oxa-13,20,24-t riazanonacos-1-yl]-4-hydroxy-2-pyrrolidinyl)methyl ester
caggacgtcatctacaacact

SEQ ID NO: 768 - RNA, 21 nt, synthetic construct
  source 1..21: mol_type = other RNA
  modified_base 1: mod_base = OTHER; note = 2'-O-methylcytidine-3'-phosphorothioate
  modified_base 2: mod_base = OTHER; note = 2'-O-methylguanosine-3'-phosphorothioate
  modified_base 3: mod_base = OTHER; note = 2'-O-methylcytidine-3'-phosphate
  modified_base 4: mod_base = OTHER; note = 2'-O-methylcytidine-3'-phosphate
  modified_base 5: mod_base = OTHER; note = 2'-O-methyluridine-3'-phosphate
  modified_base 6: mod_base = OTHER; note = 2'-O-methylguanosine-3'-phosphate
  modified_base 7: mod_base = OTHER; note = 2'-deoxy-2'-fluorocytidine-3'-phosphate
  modified_base 8: mod_base = OTHER; note = 2'-O-methyluridine-3'-phosphate
  modified_base 9: mod_base = OTHER; note = 2'-deoxy-2'-fluorouridine-3'-phosphate
  modified_base 10: mod_base = OTHER; note = 2'-deoxy-2'-fluoroguanosine-3'-phosphate
  modified_base 11: mod_base = OTHER; note = 2'-deoxy-2'-fluoroadenosine-3'-phosphate
  modified_base 12: mod_base = OTHER; note = 2'-O-methyluridine-3'-phosphate
  modified_base 13: mod_base = OTHER; note = 2'-O-methylcytidine-3'-phosphate
  modified_base 14: mod_base = OTHER; note = 2'-O-methylguanosine-3'-phosphate
  modified_base 15: mod_base = OTHER; note = 2'-O-methylcytidine-3'-phosphate
  modified_base 16: mod_base = OTHER; note = 2'-O-methylcytidine-3'-phosphate
  modified_base 17: mod_base = OTHER; note = 2'-O-methyladenosine-3'-phosphate
  modified_base 18: mod_base = OTHER; note = 2'-O-methyluridine-3'-phosphate
  modified_base 19: mod_base = OTHER; note = 2'-O-methylcytidine-3'-phosphate
  modified_base 20: mod_base = OTHER; note = 2'-O-methyluridine-3'-phosphate
  modified_base 21: mod_base = OTHER; note = 2'-O-methyluridine-3'-phosphate ((2S,4R)-1-[29-[[2-(acetylamino)-2-deoxy-beta-D-galactopyra nosyl]oxy]-14,14-bis[[3-[[3-[[5-[[2-(acetylamino)-2-deoxy-b eta-D-galactopyranosyl]oxy]-1-oxopentyl]amino]propyl]amino] -3-oxopropoxy]methyl]-1,12,19,25-tetraoxo-16-oxa-13,20,24-t riazanonacos-1-yl]-4-hydroxy-2-pyrrolidinyl)methyl ester
cgcctgcttgatcgccatctt

SEQ ID NO: 769 - RNA, 21 nt, synthetic construct
  source 1..21: mol_type = other RNA
  modified_base 1: mod_base = OTHER; note = 2'-O-methyladenosine-3'-phosphorothioate
  modified_base 2: mod_base = OTHER; note = 2'-O-methylcytidine-3'-phosphorothioate
  modified_base 3: mod_base = OTHER; note = 2'-O-methylcytidine-3'-phosphate
  modified_base 4: mod_base = OTHER; note = 2'-O-methyladenosine-3'-phosphate
  modified_base 5: mod_base = OTHER; note = 2'-O-methyluridine-3'-phosphate
  modified_base 6: mod_base = OTHER; note = 2'-O-methylcytidine-3'-phosphate
  modified_base 7: mod_base = OTHER; note = 2'-deoxy-2'-fluoroadenosine-3'-phosphate
  modified_base 8: mod_base = OTHER; note = 2'-O-methyluridine-3'-phosphate
  modified_base 9: mod_base = OTHER; note = 2'-deoxy-2'-fluorocytidine-3'-phosphate
  modified_base 10: mod_base = OTHER; note = 2'-deoxy-2'-fluoroadenosine-3'-phosphate
  modified_base 11: mod_base = OTHER; note = 2'-deoxy-2'-fluoroguanosine-3'-phosphate
  modified_base 12: mod_base = OTHER; note = 2'-O-methylguanosine-3'-phosphate
  modified_base 13: mod_base = OTHER; note = 2'-O-methyladenosine-3'-phosphate
  modified_base 14: mod_base = OTHER; note = 2'-O-methyladenosine-3'-phosphate
  modified_base 15: mod_base = OTHER; note = 2'-O-methylguanosine-3'-phosphate
  modified_base 16: mod_base = OTHER; note = 2'-O-methylguanosine-3'-phosphate
  modified_base 17: mod_base = OTHER; note = 2'-O-methylcytidine-3'-phosphate
  modified_base 18: mod_base = OTHER; note = 2'-O-methyluridine-3'-phosphate
  modified_base 19: mod_base = OTHER; note = 2'-O-methylguanosine-3'-phosphate
  modified_base 20: mod_base = OTHER; note = 2'-O-methyluridine-3'-phosphate
  modified_base 21: mod_base = OTHER; note = 2'-O-methyluridine-3'-phosphate ((2S,4R)-1-[29-[[2-(acetylamino)-2-deoxy-beta-D-galactopyra nosyl]oxy]-14,14-bis[[3-[[3-[[5-[[2-(acetylamino)-2-deoxy-b eta-D-galactopyranosyl]oxy]-1-oxopentyl]amino]propyl]amino] -3-oxopropoxy]methyl]-1,12,19,25-tetraoxo-16-oxa-13,20,24-t riazanonacos-1-yl]-4-hydroxy-2-pyrrolidinyl)methyl ester
accatcatcaggaaggctgtt

SEQ ID NO: 770 - RNA, 21 nt, synthetic construct
  source 1..21: mol_type = other RNA
  modified_base 1: mod_base = OTHER; note = 2'-O-methylcytidine-3'-phosphorothioate
  modified_base 2: mod_base = OTHER; note = 2'-O-methylcytidine-3'-phosphorothioate
  modified_base 3: mod_base = OTHER; note = 2'-O-methyladenosine-3'-phosphate
  modified_base 4: mod_base = OTHER; note = 2'-O-methylcytidine-3'-phosphate
  modified_base 5: mod_base = OTHER; note = 2'-O-methyladenosine-3'-phosphate
  modified_base 6: mod_base = OTHER; note = 2'-O-methyladenosine-3'-phosphate
  modified_base 7: mod_base = OTHER; note = 2'-deoxy-2'-fluorocytidine-3'-phosphate
  modified_base 8: mod_base = OTHER; note = 2'-O-methylguanosine-3'-phosphate
  modified_base 9: mod_base = OTHER; note = 2'-deoxy-2'-fluorocytidine-3'-phosphate
  modified_base 10: mod_base = OTHER; note = 2'-deoxy-2'-fluorocytidine-3'-phosphate
  modified_base 11: mod_base = OTHER; note = 2'-deoxy-2'-fluoroadenosine-3'-phosphate
  modified_base 12: mod_base = OTHER; note = 2'-O-methyluridine-3'-phosphate
  modified_base 13: mod_base = OTHER; note = 2'-O-methyluridine-3'-phosphate
  modified_base 14: mod_base = OTHER; note = 2'-O-methylcytidine-3'-phosphate
  modified_base 15: mod_base = OTHER; note = 2'-O-methyladenosine-3'-phosphate
  modified_base 16: mod_base = OTHER; note = 2'-O-methylcytidine-3'-phosphate
  modified_base 17: mod_base = OTHER; note = 2'-O-methylcytidine-3'-phosphate
  modified_base 18: mod_base = OTHER; note = 2'-O-methyluridine-3'-phosphate
  modified_base 19: mod_base = OTHER; note = 2'-O-methyluridine-3'-phosphate
  modified_base 20: mod_base = OTHER; note = 2'-O-methylcytidine-3'-phosphate
  modified_base 21: mod_base = OTHER; note = 2'-O-methyluridine-3'-phosphate ((2S,4R)-1-[29-[[2-(acetylamino)-2-deoxy-beta-D-galactopyra nosyl]oxy]-14,14-bis[[3-[[3-[[5-[[2-(acetylamino)-2-deoxy-b eta-D-galactopyranosyl]oxy]-1-oxopentyl]amino]propyl]amino] -3-oxopropoxy]methyl]-1,12,19,25-tetraoxo-16-oxa-13,20,24-t riazanonacos-1-yl]-4-hydroxy-2-pyrrolidinyl)methyl ester
ccacaacgccattcaccttct

SEQ ID NO: 771 - RNA, 21 nt, synthetic construct
  source 1..21: mol_type = other RNA
  modified_base 1: mod_base = OTHER; note = 2'-O-methyluridine-3'-phosphorothioate
  modified_base 2: mod_base = OTHER; note = 2'-O-methylcytidine-3'-phosphorothioate
  modified_base 3: mod_base = OTHER; note = 2'-O-methylcytidine-3'-phosphate
  modified_base 4: mod_base = OTHER; note = 2'-O-methyladenosine-3'-phosphate
  modified_base 5: mod_base = OTHER; note = 2'-O-methylcytidine-3'-phosphate
  modified_base 6: mod_base = OTHER; note = 2'-O-methylcytidine-3'-phosphate
  modified_base 7: mod_base = OTHER; note = 2'-deoxy-2'-fluoroguanosine-3'-phosphate
  modified_base 8: mod_base = OTHER; note = 2'-O-methyluridine-3'-phosphate
  modified_base 9: mod_base = OTHER; note = 2'-deoxy-2'-fluoroguanosine-3'-phosphate
  modified_base 10: mod_base = OTHER; note = 2'-deoxy-2'-fluorouridine-3'-phosphate
  modified_base 11: mod_base = OTHER; note = 2'-deoxy-2'-fluoroguanosine-3'-phosphate
  modified_base 12: mod_base = OTHER; note = 2'-O-methyluridine-3'-phosphate
  modified_base 13: mod_base = OTHER; note = 2'-O-methylguanosine-3'-phosphate
  modified_base 14: mod_base = OTHER; note = 2'-O-methyluridine-3'-phosphate
  modified_base 15: mod_base = OTHER; note = 2'-O-methylcytidine-3'-phosphate
  modified_base 16: mod_base = OTHER; note = 2'-O-methylcytidine-3'-phosphate
  modified_base 17: mod_base = OTHER; note = 2'-O-methylguanosine-3'-phosphate
  modified_base 18: mod_base = OTHER; note = 2'-O-methylcytidine-3'-phosphate
  modified_base 19: mod_base = OTHER; note = 2'-O-methylguanosine-3'-phosphate
  modified_base 20: mod_base = OTHER; note = 2'-O-methyladenosine-3'-phosphate
  modified_base 21: mod_base = OTHER; note = 2'-O-methyluridine-3'-phosphate ((2S,4R)-1-[29-[[2-(acetylamino)-2-deoxy-beta-D-galactopyra nosyl]oxy]-14,14-bis[[3-[[3-[[5-[[2-(acetylamino)-2-deoxy-b eta-D-galactopyranosyl]oxy]-1-oxopentyl]amino]propyl]amino] -3-oxopropoxy]methyl]-1,12,19,25-tetraoxo-16-oxa-13,20,24-t riazanonacos-1-yl]-4-hydroxy-2-pyrrolidinyl)methyl ester
tccaccgtgtgtgtccgcgat

SEQ ID NO: 772 - RNA, 21 nt, synthetic construct
  source 1..21: mol_type = other RNA
  modified_base 1: mod_base = OTHER; note = 2'-O-methylguanosine-3'-phosphorothioate
  modified_base 2: mod_base = OTHER; note = 2'-O-methyluridine-3'-phosphorothioate
  modified_base 3: mod_base = OTHER; note = 2'-O-methylcytidine-3'-phosphate
  modified_base 4: mod_base = OTHER; note = 2'-O-methylcytidine-3'-phosphate
  modified_base 5: mod_base = OTHER; note = 2'-O-methyladenosine-3'-phosphate
  modified_base 6: mod_base = OTHER; note = 2'-O-methylguanosine-3'-phosphate
  modified_base 7: mod_base = OTHER; note = 2'-deoxy-2'-fluorocytidine-3'-phosphate
  modified_base 8: mod_base = OTHER; note = 2'-O-methyluridine-3'-phosphate
  modified_base 9: mod_base = OTHER; note = 2'-deoxy-2'-fluoroguanosine-3'-phosphate
  modified_base 10: mod_base = OTHER; note = 2'-deoxy-2'-fluoroguanosine-3'-phosphate
  modified_base 11: mod_base = OTHER; note = 2'-deoxy-2'-fluorouridine-3'-phosphate
  modified_base 12: mod_base = OTHER; note = 2'-O-methyladenosine-3'-phosphate
  modified_base 13: mod_base = OTHER; note = 2'-O-methylcytidine-3'-phosphate
  modified_base 14: mod_base = OTHER; note = 2'-O-methyladenosine-3'-phosphate
  modified_base 15: mod_base = OTHER; note = 2'-O-methyladenosine-3'-phosphate
  modified_base 16: mod_base = OTHER; note = 2'-O-methyluridine-3'-phosphate
  modified_base 17: mod_base = OTHER; note = 2'-O-methylguanosine-3'-phosphate
  modified_base 18: mod_base = OTHER; note = 2'-O-methylguanosine-3'-phosphate
  modified_base 19: mod_base = OTHER; note = 2'-O-methylguanosine-3'-phosphate
  modified_base 20: mod_base = OTHER; note = 2'-O-methylcytidine-3'-phosphate
  modified_base 21: mod_base = OTHER; note = 2'-O-methyluridine-3'-phosphate ((2S,4R)-1-[29-[[2-(acetylamino)-2-deoxy-beta-D-galactopyra nosyl]oxy]-14,14-bis[[3-[[3-[[5-[[2-(acetylamino)-2-deoxy-b eta-D-galactopyranosyl]oxy]-1-oxopentyl]amino]propyl]amino] -3-oxopropoxy]methyl]-1,12,19,25-tetraoxo-16-oxa-13,20,24-t riazanonacos-1-yl]-4-hydroxy-2-pyrrolidinyl)methyl ester
gtccagctggtacaatgggct

SEQ ID NO: 773 - RNA, 21 nt, synthetic construct
  source 1..21: mol_type = other RNA
  modified_base 1: mod_base = OTHER; note = 2'-O-methylguanosine-3'-phosphorothioate
  modified_base 2: mod_base = OTHER; note = 2'-O-methyladenosine-3'-phosphorothioate
  modified_base 3: mod_base = OTHER; note = 2'-O-methylcytidine-3'-phosphate
  modified_base 4: mod_base = OTHER; note = 2'-O-methyluridine-3'-phosphate
  modified_base 5: mod_base = OTHER; note = 2'-O-methyluridine-3'-phosphate
  modified_base 6: mod_base = OTHER; note = 2'-O-methyluridine-3'-phosphate
  modified_base 7: mod_base = OTHER; note = 2'-deoxy-2'-fluoroguanosine-3'-phosphate
  modified_base 8: mod_base = OTHER; note = 2'-O-methyladenosine-3'-phosphate
  modified_base 9: mod_base = OTHER; note = 2'-deoxy-2'-fluoroguanosine-3'-phosphate
  modified_base 10: mod_base = OTHER; note = 2'-deoxy-2'-fluoroadenosine-3'-phosphate
  modified_base 11: mod_base = OTHER; note = 2'-deoxy-2'-fluorocytidine-3'-phosphate
  modified_base 12: mod_base = OTHER; note = 2'-O-methylguanosine-3'-phosphate
  modified_base 13: mod_base = OTHER; note = 2'-O-methyluridine-3'-phosphate
  modified_base 14: mod_base = OTHER; note = 2'-O-methyluridine-3'-phosphate
  modified_base 15: mod_base = OTHER; note = 2'-O-methyluridine-3'-phosphate
  modified_base 16: mod_base = OTHER; note = 2'-O-methylguanosine-3'-phosphate
  modified_base 17: mod_base = OTHER; note = 2'-O-methyladenosine-3'-phosphate
  modified_base 18: mod_base = OTHER; note = 2'-O-methyladenosine-3'-phosphate
  modified_base 19: mod_base = OTHER; note = 2'-O-methyladenosine-3'-phosphate
  modified_base 20: mod_base = OTHER; note = 2'-O-methyladenosine-3'-phosphate
  modified_base 21: mod_base = OTHER; note = 2'-O-methyluridine-3'-phosphate ((2S,4R)-1-[29-[[2-(acetylamino)-2-deoxy-beta-D-galactopyra nosyl]oxy]-14,14-bis[[3-[[3-[[5-[[2-(acetylamino)-2-deoxy-b eta-D-galactopyranosyl]oxy]-1-oxopentyl]amino]propyl]amino] -3-oxopropoxy]methyl]-1,12,19,25-tetraoxo-16-oxa-13,20,24-t riazanonacos-1-yl]-4-hydroxy-2-pyrrolidinyl)methyl ester
gactttgagacgtttgaaaat

SEQ ID NO: 774 - RNA, 21 nt, synthetic construct
  source 1..21: mol_type = other RNA
  modified_base 1: mod_base = OTHER; note = 2'-O-methyladenosine-3'-phosphorothioate
  modified_base 2: mod_base = OTHER; note = 2'-O-methylguanosine-3'-phosphorothioate
  modified_base 3: mod_base = OTHER; note = 2'-O-methyladenosine-3'-phosphate
  modified_base 4: mod_base = OTHER; note = 2'-O-methylguanosine-3'-phosphate
  modified_base 5: mod_base = OTHER; note = 2'-O-methylguanosine-3'-phosphate
  modified_base 6: mod_base = OTHER; note = 2'-O-methylguanosine-3'-phosphate
  modified_base 7: mod_base = OTHER; note = 2'-deoxy-2'-fluorouridine-3'-phosphate
  modified_base 8: mod_base = OTHER; note = 2'-O-methyladenosine-3'-phosphate
  modified_base 9: mod_base = OTHER; note = 2'-deoxy-2'-fluorocytidine-3'-phosphate
  modified_base 10: mod_base = OTHER; note = 2'-deoxy-2'-fluorocytidine-3'-phosphate
  modified_base 11: mod_base = OTHER; note = 2'-deoxy-2'-fluoroadenosine-3'-phosphate
  modified_base 12: mod_base = OTHER; note = 2'-O-methylguanosine-3'-phosphate
  modified_base 13: mod_base = OTHER; note = 2'-O-methylguanosine-3'-phosphate
  modified_base 14: mod_base = OTHER; note = 2'-O-methyluridine-3'-phosphate
  modified_base 15: mod_base = OTHER; note = 2'-O-methyladenosine-3'-phosphate
  modified_base 16: mod_base = OTHER; note = 2'-O-methyluridine-3'-phosphate
  modified_base 17: mod_base = OTHER; note = 2'-O-methylguanosine-3'-phosphate
  modified_base 18: mod_base = OTHER; note = 2'-O-methylcytidine-3'-phosphate
  modified_base 19: mod_base = OTHER; note = 2'-O-methylcytidine-3'-phosphate
  modified_base 20: mod_base = OTHER; note = 2'-O-methylcytidine-3'-phosphate
  modified_base 21: mod_base = OTHER; note = 2'-O-methyluridine-3'-phosphate ((2S,4R)-1-[29-[[2-(acetylamino)-2-deoxy-beta-D-galactopyra nosyl]oxy]-14,14-bis[[3-[[3-[[5-[[2-(acetylamino)-2-deoxy-b eta-D-galactopyranosyl]oxy]-1-oxopentyl]amino]propyl]amino] -3-oxopropoxy]methyl]-1,12,19,25-tetraoxo-16-oxa-13,20,24-t riazanonacos-1-yl]-4-hydroxy-2-pyrrolidinyl)methyl ester
agagggtaccaggtatgccct

SEQ ID NO: 775 - RNA, 21 nt, synthetic construct
  source 1..21: mol_type = other RNA
  modified_base 1: mod_base = OTHER; note = 2'-O-methylguanosine-3'-phosphorothioate
  modified_base 2: mod_base = OTHER; note = 2'-O-methylcytidine-3'-phosphorothioate
  modified_base 3: mod_base = OTHER; note = 2'-O-methyluridine-3'-phosphate
  modified_base 4: mod_base = OTHER; note = 2'-O-methylguanosine-3'-phosphate
  modified_base 5: mod_base = OTHER; note = 2'-O-methylguanosine-3'-phosphate
  modified_base 6: mod_base = OTHER; note = 2'-O-methylcytidine-3'-phosphate
  modified_base 7: mod_base = OTHER; note = 2'-deoxy-2'-fluorouridine-3'-phosphate
  modified_base 8: mod_base = OTHER; note = 2'-O-methylguanosine-3'-phosphate
  modified_base 9: mod_base = OTHER; note = 2'-deoxy-2'-fluoroadenosine-3'-phosphate
  modified_base 10: mod_base = OTHER; note = 2'-deoxy-2'-fluorocytidine-3'-phosphate
  modified_base 11: mod_base = OTHER; note = 2'-deoxy-2'-fluoroadenosine-3'-phosphate
  modified_base 12: mod_base = OTHER; note = 2'-O-methyluridine-3'-phosphate
  modified_base 13: mod_base = OTHER; note = 2'-O-methylcytidine-3'-phosphate
  modified_base 14: mod_base = OTHER; note = 2'-O-methylguanosine-3'-phosphate
  modified_base 15: mod_base = OTHER; note = 2'-O-methyladenosine-3'-phosphate
  modified_base 16: mod_base = OTHER; note = 2'-O-methylguanosine-3'-phosphate
  modified_base 17: mod_base = OTHER; note = 2'-O-methyluridine-3'-phosphate
  modified_base 18: mod_base = OTHER; note = 2'-O-methylguanosine-3'-phosphate
  modified_base 19: mod_base = OTHER; note = 2'-O-methylcytidine-3'-phosphate
  modified_base 20: mod_base = OTHER; note = 2'-O-methylcytidine-3'-phosphate
  modified_base 21: mod_base = OTHER; note = 2'-O-methyluridine-3'-phosphate ((2S,4R)-1-[29-[[2-(acetylamino)-2-deoxy-beta-D-galactopyra nosyl]oxy]-14,14-bis[[3-[[3-[[5-[[2-(acetylamino)-2-deoxy-b eta-D-galactopyranosyl]oxy]-1-oxopentyl]amino]propyl]amino] -3-oxopropoxy]methyl]-1,12,19,25-tetraoxo-16-oxa-13,20,24-t riazanonacos-1-yl]-4-hydroxy-2-pyrrolidinyl)methyl ester
gctggctgacatcgagtgcct

SEQ ID NO: 776 - RNA, 21 nt, synthetic construct
  source 1..21: mol_type = other RNA
  modified_base 1: mod_base = OTHER; note = 2'-O-methylcytidine-3'-phosphorothioate
  modified_base 2: mod_base = OTHER; note = 2'-O-methyluridine-3'-phosphorothioate
  modified_base 3: mod_base = OTHER; note = 2'-O-methyluridine-3'-phosphate
  modified_base 4: mod_base = OTHER; note = 2'-O-methylcytidine-3'-phosphate
  modified_base 5: mod_base = OTHER; note = 2'-O-methylcytidine-3'-phosphate
  modified_base 6: mod_base = OTHER; note = 2'-O-methylcytidine-3'-phosphate
  modified_base 7: mod_base = OTHER; note = 2'-deoxy-2'-fluoroguanosine-3'-phosphate
  modified_base 8: mod_base = OTHER; note = 2'-O-methyladenosine-3'-phosphate
  modified_base 9: mod_base = OTHER; note = 2'-deoxy-2'-fluorocytidine-3'-phosphate
  modified_base 10: mod_base = OTHER; note = 2'-deoxy-2'-fluoroadenosine-3'-phosphate
  modified_base 11: mod_base = OTHER; note = 2'-deoxy-2'-fluorouridine-3'-phosphate
  modified_base 12: mod_base = OTHER; note = 2'-O-methylguanosine-3'-phosphate
  modified_base 13: mod_base = OTHER; note = 2'-O-methylcytidine-3'-phosphate
  modified_base 14: mod_base = OTHER; note = 2'-O-methylcytidine-3'-phosphate
  modified_base 15: mod_base = OTHER; note = 2'-O-methylguanosine-3'-phosphate
  modified_base 16: mod_base = OTHER; note = 2'-O-methylcytidine-3'-phosphate
  modified_base 17: mod_base = OTHER; note = 2'-O-methyluridine-3'-phosphate
  modified_base 18: mod_base = OTHER; note = 2'-O-methylguanosine-3'-phosphate
  modified_base 19: mod_base = OTHER; note = 2'-O-methylguanosine-3'-phosphate
  modified_base 20: mod_base = OTHER; note = 2'-O-methyladenosine-3'-phosphate
  modified_base 21: mod_base = OTHER; note = 2'-O-methyluridine-3'-phosphate ((2S,4R)-1-[29-[[2-(acetylamino)-2-deoxy-beta-D-galactopyra nosyl]oxy]-14,14-bis[[3-[[3-[[5-[[2-(acetylamino)-2-deoxy-b eta-D-galactopyranosyl]oxy]-1-oxopentyl]amino]propyl]amino] -3-oxopropoxy]methyl]-1,12,19,25-tetraoxo-16-oxa-13,20,24-t riazanonacos-1-yl]-4-hydroxy-2-pyrrolidinyl)methyl ester
cttcccgacatgccgctggat

SEQ ID NO: 777 - RNA, 21 nt, synthetic construct
  source 1..21: mol_type = other RNA
  modified_base 1: mod_base = OTHER; note = 2'-O-methylcytidine-3'-phosphorothioate
  modified_base 2: mod_base = OTHER; note = 2'-O-methyladenosine-3'-phosphorothioate
  modified_base 3: mod_base = OTHER; note = 2'-O-methylguanosine-3'-phosphate
  modified_base 4: mod_base = OTHER; note = 2'-O-methylguanosine-3'-phosphate
  modified_base 5: mod_base = OTHER; note = 2'-O-methyluridine-3'-phosphate
  modified_base 6: mod_base = OTHER; note = 2'-O-methylguanosine-3'-phosphate
  modified_base 7: mod_base = OTHER; note = 2'-deoxy-2'-fluoroguanosine-3'-phosphate
  modified_base 8: mod_base = OTHER; note = 2'-O-methyladenosine-3'-phosphate
  modified_base 9: mod_base = OTHER; note = 2'-deoxy-2'-fluorocytidine-3'-phosphate
  modified_base 10: mod_base = OTHER; note = 2'-deoxy-2'-fluorouridine-3'-phosphate
  modified_base 11: mod_base = OTHER; note = 2'-deoxy-2'-fluoroguanosine-3'-phosphate
  modified_base 12: mod_base = OTHER; note = 2'-O-methyluridine-3'-phosphate
  modified_base 13: mod_base = OTHER; note = 2'-O-methylguanosine-3'-phosphate
  modified_base 14: mod_base = OTHER; note = 2'-O-methyladenosine-3'-phosphate
  modified_base 15: mod_base = OTHER; note = 2'-O-methylcytidine-3'-phosphate
  modified_base 16: mod_base = OTHER; note = 2'-O-methylcytidine-3'-phosphate
  modified_base 17: mod_base = OTHER; note = 2'-O-methylguanosine-3'-phosphate
  modified_base 18: mod_base = OTHER; note = 2'-O-methylcytidine-3'-phosphate
  modified_base 19: mod_base = OTHER; note = 2'-O-methyladenosine-3'-phosphate
  modified_base 20: mod_base = OTHER; note = 2'-O-methyluridine-3'-phosphate
  modified_base 21: mod_base = OTHER; note = 2'-O-methyluridine-3'-phosphate ((2S,4R)-1-[29-[[2-(acetylamino)-2-deoxy-beta-D-galactopyra nosyl]oxy]-14,14-bis[[3-[[3-[[5-[[2-(acetylamino)-2-deoxy-b eta-D-galactopyranosyl]oxy]-1-oxopentyl]amino]propyl]amino] -3-oxopropoxy]methyl]-1,12,19,25-tetraoxo-16-oxa-13,20,24-t riazanonacos-1-yl]-4-hydroxy-2-pyrrolidinyl)methyl ester
caggtggactgtgaccgcatt

SEQ ID NO: 778 - RNA, 21 nt, synthetic construct
  source 1..21: mol_type = other RNA
  modified_base 1: mod_base = OTHER; note = 2'-O-methylcytidine-3'-phosphorothioate
  modified_base 2: mod_base = OTHER; note = 2'-O-methylguanosine-3'-phosphorothioate
  modified_base 3: mod_base = OTHER; note = 2'-O-methylcytidine-3'-phosphate
  modified_base 4: mod_base = OTHER; note = 2'-O-methylcytidine-3'-phosphate
  modified_base 5: mod_base = OTHER; note = 2'-O-methyladenosine-3'-phosphate
  modified_base 6: mod_base = OTHER; note = 2'-O-methyladenosine-3'-phosphate
  modified_base 7: mod_base = OTHER; note = 2'-deoxy-2'-fluorocytidine-3'-phosphate
  modified_base 8: mod_base = OTHER; note = 2'-O-methyladenosine-3'-phosphate
  modified_base 9: mod_base = OTHER; note = 2'-deoxy-2'-fluoroguanosine-3'-phosphate
  modified_base 10: mod_base = OTHER; note = 2'-deoxy-2'-fluorocytidine-3'-phosphate
  modified_base 11: mod_base = OTHER; note = 2'-deoxy-2'-fluorocytidine-3'-phosphate
  modified_base 12: mod_base = OTHER; note = 2'-O-methyladenosine-3'-phosphate
  modified_base 13: mod_base = OTHER; note = 2'-O-methyladenosine-3'-phosphate
  modified_base 14: mod_base = OTHER; note = 2'-O-methylcytidine-3'-phosphate
  modified_base 15: mod_base = OTHER; note = 2'-O-methyladenosine-3'-phosphate
  modified_base 16: mod_base = OTHER; note = 2'-O-methylguanosine-3'-phosphate
  modified_base 17: mod_base = OTHER; note = 2'-O-methyladenosine-3'-phosphate
  modified_base 18: mod_base = OTHER; note = 2'-O-methylguanosine-3'-phosphate
  modified_base 19: mod_base = OTHER; note = 2'-O-methyluridine-3'-phosphate
  modified_base 20: mod_base = OTHER; note = 2'-O-methylcytidine-3'-phosphate
  modified_base 21: mod_base = OTHER; note = 2'-O-methyluridine-3'-phosphate ((2S,4R)-1-[29-[[2-(acetylamino)-2-deoxy-beta-D-galactopyra nosyl]oxy]-14,14-bis[[3-[[3-[[5-[[2-(acetylamino)-2-deoxy-b eta-D-galactopyranosyl]oxy]-1-oxopentyl]amino]propyl]amino] -3-oxopropoxy]methyl]-1,12,19,25-tetraoxo-16-oxa-13,20,24-t riazanonacos-1-yl]-4-hydroxy-2-pyrrolidinyl)methyl ester
cgccaacagccaacagagtct

SEQ ID NO: 779 - RNA, 21 nt, synthetic construct
  source 1..21: mol_type = other RNA
  modified_base 1: mod_base = OTHER; note = 2'-O-methylcytidine-3'-phosphorothioate
  modified_base 2: mod_base = OTHER; note = 2'-O-methyluridine-3'-phosphorothioate
  modified_base 3: mod_base = OTHER; note = 2'-O-methylcytidine-3'-phosphate
  modified_base 4: mod_base = OTHER; note = 2'-O-methyluridine-3'-phosphate
  modified_base 5: mod_base = OTHER; note = 2'-O-methylguanosine-3'-phosphate
  modified_base 6: mod_base = OTHER; note = 2'-O-methyluridine-3'-phosphate
  modified_base 7: mod_base = OTHER; note = 2'-deoxy-2'-fluorocytidine-3'-phosphate
  modified_base 8: mod_base = OTHER; note = 2'-O-methyladenosine-3'-phosphate
  modified_base 9: mod_base = OTHER; note = 2'-deoxy-2'-fluorocytidine-3'-phosphate
  modified_base 10: mod_base = OTHER; note = 2'-deoxy-2'-fluoroguanosine-3'-phosphate
  modified_base 11: mod_base = OTHER; note = 2'-deoxy-2'-fluoroadenosine-3'-phosphate
  modified_base 12: mod_base = OTHER; note = 2'-O-methylcytidine-3'-phosphate
  modified_base 13: mod_base = OTHER; note = 2'-O-methyluridine-3'-phosphate
  modified_base 14: mod_base = OTHER; note = 2'-O-methyladenosine-3'-phosphate
  modified_base 15: mod_base = OTHER; note = 2'-O-methylcytidine-3'-phosphate
  modified_base 16: mod_base = OTHER; note = 2'-O-methylguanosine-3'-phosphate
  modified_base 17: mod_base = OTHER; note = 2'-O-methyladenosine-3'-phosphate
  modified_base 18: mod_base = OTHER; note = 2'-O-methylguanosine-3'-phosphate
  modified_base 19: mod_base = OTHER; note = 2'-O-methylcytidine-3'-phosphate
  modified_base 20: mod_base = OTHER; note = 2'-O-methyluridine-3'-phosphate
  modified_base 21: mod_base = OTHER; note = 2'-O-methyluridine-3'-phosphate ((2S,4R)-1-[29-[[2-(acetylamino)-2-deoxy-beta-D-galactopyra nosyl]oxy]-14,14-bis[[3-[[3-[[5-[[2-(acetylamino)-2-deoxy-b eta-D-galactopyranosyl]oxy]-1-oxopentyl]amino]propyl]amino] -3-oxopropoxy]methyl]-1,12,19,25-tetraoxo-16-oxa-13,20,24-t riazanonacos-1-yl]-4-hydroxy-2-pyrrolidinyl)methyl ester
ctctgtcacgactacgagctt

SEQ ID NO: 780 - RNA, 21 nt, synthetic construct
  source 1..21: mol_type = other RNA
  modified_base 1: mod_base = OTHER; note = 2'-O-methyluridine-3'-phosphorothioate
  modified_base 2: mod_base = OTHER; note = 2'-O-methylcytidine-3'-phosphorothioate
  modified_base 3: mod_base = OTHER; note = 2'-O-methyluridine-3'-phosphate
  modified_base 4: mod_base = OTHER; note = 2'-O-methylcytidine-3'-phosphate
  modified_base 5: mod_base = OTHER; note = 2'-O-methyluridine-3'-phosphate
  modified_base 6: mod_base = OTHER; note = 2'-O-methylguanosine-3'-phosphate
  modified_base 7: mod_base = OTHER; note = 2'-deoxy-2'-fluorocytidine-3'-phosphate
  modified_base 8: mod_base = OTHER; note = 2'-O-methyluridine-3'-phosphate
  modified_base 9: mod_base = OTHER; note = 2'-deoxy-2'-fluoroguanosine-3'-phosphate
  modified_base 10: mod_base = OTHER; note = 2'-deoxy-2'-fluorocytidine-3'-phosphate
  modified_base 11: mod_base = OTHER; note = 2'-deoxy-2'-fluoroguanosine-3'-phosphate
  modified_base 12: mod_base = OTHER; note = 2'-O-methyladenosine-3'-phosphate
  modified_base 13: mod_base = OTHER; note = 2'-O-methyladenosine-3'-phosphate
  modified_base 14: mod_base = OTHER; note = 2'-O-methyluridine-3'-phosphate
  modified_base 15: mod_base = OTHER; note = 2'-O-methyladenosine-3'-phosphate
  modified_base 16: mod_base = OTHER; note = 2'-O-methylcytidine-3'-phosphate
  modified_base 17: mod_base = OTHER; note = 2'-O-methylguanosine-3'-phosphate
  modified_base 18: mod_base = OTHER; note = 2'-O-methyluridine-3'-phosphate
  modified_base 19: mod_base = OTHER; note = 2'-O-methylguanosine-3'-phosphate
  modified_base 20: mod_base = OTHER; note = 2'-O-methylcytidine-3'-phosphate
  modified_base 21: mod_base = OTHER; note = 2'-O-methyluridine-3'-phosphate ((2S,4R)-1-[29-[[2-(acetylamino)-2-deoxy-beta-D-galactopyra nosyl]oxy]-14,14-bis[[3-[[3-[[5-[[2-(acetylamino)-2-deoxy-b eta-D-galactopyranosyl]oxy]-1-oxopentyl]amino]propyl]amino] -3-oxopropoxy]methyl]-1,12,19,25-tetraoxo-16-oxa-13,20,24-t riazanonacos-1-yl]-4-hydroxy-2-pyrrolidinyl)methyl ester
tctctgctgcgaatacgtgct

SEQ ID NO: 781 - RNA, 21 nt, synthetic construct
  source 1..21: mol_type = other RNA
  modified_base 1: mod_base = OTHER; note = 2'-O-methylcytidine-3'-phosphorothioate
  modified_base 2: mod_base = OTHER; note = 2'-O-methyladenosine-3'-phosphorothioate
  modified_base 3: mod_base = OTHER; note = 2'-O-methylcytidine-3'-phosphate
  modified_base 4: mod_base = OTHER; note = 2'-O-methylguanosine-3'-phosphate
  modified_base 5: mod_base = OTHER; note = 2'-O-methylguanosine-3'-phosphate
  modified_base 6: mod_base = OTHER; note = 2'-O-methyladenosine-3'-phosphate
  modified_base 7: mod_base = OTHER; note = 2'-deoxy-2'-fluoroguanosine-3'-phosphate
  modified_base 8: mod_base = OTHER; note = 2'-O-methylcytidine-3'-phosphate
  modified_base 9: mod_base = OTHER; note = 2'-deoxy-2'-fluorocytidine-3'-phosphate
  modified_base 10: mod_base = OTHER; note = 2'-deoxy-2'-fluorouridine-3'-phosphate
  modified_base 11: mod_base = OTHER; note = 2'-deoxy-2'-fluoroguanosine-3'-phosphate
  modified_base 12: mod_base = OTHER; note = 2'-O-methylcytidine-3'-phosphate
  modified_base 13: mod_base = OTHER; note = 2'-O-methyluridine-3'-phosphate
  modified_base 14: mod_base = OTHER; note = 2'-O-methylguanosine-3'-phosphate
  modified_base 15: mod_base = OTHER; note = 2'-O-methyluridine-3'-phosphate
  modified_base 16: mod_base = OTHER; note = 2'-O-methylguanosine-3'-phosphate
  modified_base 17: mod_base = OTHER; note = 2'-O-methylcytidine-3'-phosphate
  modified_base 18: mod_base = OTHER; note = 2'-O-methylcytidine-3'-phosphate
  modified_base 19: mod_base = OTHER; note = 2'-O-methyluridine-3'-phosphate
  modified_base 20: mod_base = OTHER; note = 2'-O-methyladenosine-3'-phosphate
  modified_base 21: mod_base = OTHER; note = 2'-O-methyluridine-3'-phosphate ((2S,4R)-1-[29-[[2-(acetylamino)-2-deoxy-beta-D-galactopyra nosyl]oxy]-14,14-bis[[3-[[3-[[5-[[2-(acetylamino)-2-deoxy-b eta-D-galactopyranosyl]oxy]-1-oxopentyl]amino]propyl]amino] -3-oxopropoxy]methyl]-1,12,19,25-tetraoxo-16-oxa-13,20,24-t riazanonacos-1-yl]-4-hydroxy-2-pyrrolidinyl)methyl ester
cacggagcctgctgtgcctat

SEQ ID NO: 782 - RNA, 21 nt, synthetic construct
  source 1..21: mol_type = other RNA
  modified_base 1: mod_base = OTHER; note = 2'-O-methyladenosine-3'-phosphorothioate
  modified_base 2: mod_base = OTHER; note = 2'-O-methylguanosine-3'-phosphorothioate
  modified_base 3: mod_base = OTHER; note = 2'-O-methyladenosine-3'-phosphate
  modified_base 4: mod_base = OTHER; note = 2'-O-methylcytidine-3'-phosphate
  modified_base 5: mod_base = OTHER; note = 2'-O-methylcytidine-3'-phosphate
  modified_base 6: mod_base = OTHER; note = 2'-O-methyladenosine-3'-phosphate
  modified_base 7: mod_base = OTHER; note = 2'-deoxy-2'-fluorocytidine-3'-phosphate
  modified_base 8: mod_base = OTHER; note = 2'-O-methyladenosine-3'-phosphate
  modified_base 9: mod_base = OTHER; note = 2'-deoxy-2'-fluoroguanosine-3'-phosphate
  modified_base 10: mod_base = OTHER; note = 2'-deoxy-2'-fluorocytidine-3'-phosphate
  modified_base 11: mod_base = OTHER; note = 2'-deoxy-2'-fluoroadenosine-3'-phosphate
  modified_base 12: mod_base = OTHER; note = 2'-O-methyladenosine-3'-phosphate
  modified_base 13: mod_base = OTHER; note = 2'-O-methylcytidine-3'-phosphate
  modified_base 14: mod_base = OTHER; note = 2'-O-methylcytidine-3'-phosphate
  modified_base 15: mod_base = OTHER; note = 2'-O-methylguanosine-3'-phosphate
  modified_base 16: mod_base = OTHER; note = 2'-O-methyladenosine-3'-phosphate
  modified_base 17: mod_base = OTHER; note = 2'-O-methyladenosine-3'-phosphate
  modified_base 18: mod_base = OTHER; note = 2'-O-methyladenosine-3'-phosphate
  modified_base 19: mod_base = OTHER; note = 2'-O-methyladenosine-3'-phosphate
  modified_base 20: mod_base = OTHER; note = 2'-O-methylguanosine-3'-phosphate
  modified_base 21: mod_base = OTHER; note = 2'-O-methyluridine-3'-phosphate ((2S,4R)-1-[29-[[2-(acetylamino)-2-deoxy-beta-D-galactopyra nosyl]oxy]-14,14-bis[[3-[[3-[[5-[[2-(acetylamino)-2-deoxy-b eta-D-galactopyranosyl]oxy]-1-oxopentyl]amino]propyl]amino] -3-oxopropoxy]methyl]-1,12,19,25-tetraoxo-16-oxa-13,20,24-t riazanonacos-1-yl]-4-hydroxy-2-pyrrolidinyl)methyl ester
agaccacagcaaccgaaaagt

SEQ ID NO: 783 - RNA, 21 nt, synthetic construct
  source 1..21: mol_type = other RNA
  modified_base 1: mod_base = OTHER; note = 2'-O-methylcytidine-3'-phosphorothioate
  modified_base 2: mod_base = OTHER; note = 2'-O-methyluridine-3'-phosphorothioate
  modified_base 3: mod_base = OTHER; note = 2'-O-methylcytidine-3'-phosphate
  modified_base 4: mod_base = OTHER; note = 2'-O-methylguanosine-3'-phosphate
  modified_base 5: mod_base = OTHER; note = 2'-O-methylcytidine-3'-phosphate
  modified_base 6: mod_base = OTHER; note = 2'-O-methyladenosine-3'-phosphate
  modified_base 7: mod_base = OTHER; note = 2'-deoxy-2'-fluoroguanosine-3'-phosphate
  modified_base 8: mod_base = OTHER; note = 2'-O-methyladenosine-3'-phosphate
  modified_base 9: mod_base = OTHER; note = 2'-deoxy-2'-fluorocytidine-3'-phosphate
  modified_base 10: mod_base = OTHER; note = 2'-deoxy-2'-fluorouridine-3'-phosphate
  modified_base 11: mod_base = OTHER; note = 2'-deoxy-2'-fluoroguanosine-3'-phosphate
  modified_base 12: mod_base = OTHER; note = 2'-O-methylguanosine-3'-phosphate
  modified_base 13: mod_base = OTHER; note = 2'-O-methylguanosine-3'-phosphate
  modified_base 14: mod_base = OTHER; note = 2'-O-methyluridine-3'-phosphate
  modified_base 15: mod_base = OTHER; note = 2'-O-methylcytidine-3'-phosphate
  modified_base 16: mod_base = OTHER; note = 2'-O-methylcytidine-3'-phosphate
  modified_base 17: mod_base = OTHER; note = 2'-O-methyladenosine-3'-phosphate
  modified_base 18: mod_base = OTHER; note = 2'-O-methylguanosine-3'-phosphate
  modified_base 19: mod_base = OTHER; note = 2'-O-methylcytidine-3'-phosphate
  modified_base 20: mod_base = OTHER; note = 2'-O-methyluridine-3'-phosphate
  modified_base 21: mod_base = OTHER; note = 2'-O-methyluridine-3'-phosphate ((2S,4R)-1-[29-[[2-(acetylamino)-2-deoxy-beta-D-galactopyra nosyl]oxy]-14,14-bis[[3-[[3-[[5-[[2-(acetylamino)-2-deoxy-b eta-D-galactopyranosyl]oxy]-1-oxopentyl]amino]propyl]amino] -3-oxopropoxy]methyl]-1,12,19,25-tetraoxo-16-oxa-13,20,24-t riazanonacos-1-yl]-4-hydroxy-2-pyrrolidinyl)methyl ester
ctcgcagactgggtccagctt

SEQ ID NO: 784 - RNA, 21 nt, synthetic construct
  source 1..21: mol_type = other RNA
  modified_base 1: mod_base = OTHER; note = 2'-O-methylguanosine-3'-phosphorothioate
  modified_base 2: mod_base = OTHER; note = 2'-O-methyluridine-3'-phosphorothioate
  modified_base 3: mod_base = OTHER; note = 2'-O-methylguanosine-3'-phosphate
  modified_base 4: mod_base = OTHER; note = 2'-O-methylguanosine-3'-phosphate
  modified_base 5: mod_base = OTHER; note = 2'-O-methyladenosine-3'-phosphate
  modified_base 6: mod_base = OTHER; note = 2'-O-methylcytidine-3'-phosphate
  modified_base 7: mod_base = OTHER; note = 2'-deoxy-2'-fluoroadenosine-3'-phosphate
  modified_base 8: mod_base = OTHER; note = 2'-O-methylguanosine-3'-phosphate
  modified_base 9: mod_base = OTHER; note = 2'-deoxy-2'-fluoroadenosine-3'-phosphate
  modified_base 10: mod_base = OTHER; note = 2'-deoxy-2'-fluoroguanosine-3'-phosphate
  modified_base 11: mod_base = OTHER; note = 2'-deoxy-2'-fluorouridine-3'-phosphate
  modified_base 12: mod_base = OTHER; note = 2'-O-methylguanosine-3'-phosphate
  modified_base 13: mod_base = OTHER; note = 2'-O-methylguanosine-3'-phosphate
  modified_base 14: mod_base = OTHER; note = 2'-O-methyluridine-3'-phosphate
  modified_base 15: mod_base = OTHER; note = 2'-O-methyluridine-3'-phosphate
  modified_base 16: mod_base = OTHER; note = 2'-O-methyluridine-3'-phosphate
  modified_base 17: mod_base = OTHER; note = 2'-O-methylguanosine-3'-phosphate
  modified_base 18: mod_base = OTHER; note = 2'-O-methyladenosine-3'-phosphate
  modified_base 19: mod_base = OTHER; note = 2'-O-methyluridine-3'-phosphate
  modified_base 20: mod_base = OTHER; note = 2'-O-methylguanosine-3'-phosphate
  modified_base 21: mod_base = OTHER; note = 2'-O-methyluridine-3'-phosphate ((2S,4R)-1-[29-[[2-(acetylamino)-2-deoxy-beta-D-galactopyra nosyl]oxy]-14,14-bis[[3-[[3-[[5-[[2-(acetylamino)-2-deoxy-b eta-D-galactopyranosyl]oxy]-1-oxopentyl]amino]propyl]amino] -3-oxopropoxy]methyl]-1,12,19,25-tetraoxo-16-oxa-13,20,24-t riazanonacos-1-yl]-4-hydroxy-2-pyrrolidinyl)methyl ester
gtggacagagtggtttgatgt

SEQ ID NO: 785 - RNA, 21 nt, synthetic construct
  source 1..21: mol_type = other RNA
  modified_base 1: mod_base = OTHER; note = 2'-O-methylcytidine-3'-phosphorothioate
  modified_base 2: mod_base = OTHER; note = 2'-O-methyladenosine-3'-phosphorothioate
  modified_base 3: mod_base = OTHER; note = 2'-O-methyladenosine-3'-phosphate
  modified_base 4: mod_base = OTHER; note = 2'-O-methylguanosine-3'-phosphate
  modified_base 5: mod_base = OTHER; note = 2'-O-methyluridine-3'-phosphate
  modified_base 6: mod_base = OTHER; note = 2'-O-methylcytidine-3'-phosphate
  modified_base 7: mod_base = OTHER; note = 2'-deoxy-2'-fluorouridine-3'-phosphate
  modified_base 8: mod_base = OTHER; note = 2'-O-methylguanosine-3'-phosphate
  modified_base 9: mod_base = OTHER; note = 2'-deoxy-2'-fluoroadenosine-3'-phosphate
  modified_base 10: mod_base = OTHER; note = 2'-deoxy-2'-fluoroadenosine-3'-phosphate
  modified_base 11: mod_base = OTHER; note = 2'-deoxy-2'-fluorocytidine-3'-phosphate
  modified_base 12: mod_base = OTHER; note = 2'-O-methyladenosine-3'-phosphate
  modified_base 13: mod_base = OTHER; note = 2'-O-methyladenosine-3'-phosphate
  modified_base 14: mod_base = OTHER; note = 2'-O-methylcytidine-3'-phosphate
  modified_base 15: mod_base = OTHER; note = 2'-O-methyluridine-3'-phosphate
  modified_base 16: mod_base = OTHER; note = 2'-O-methyluridine-3'-phosphate
  modified_base 17: mod_base = OTHER; note = 2'-O-methylguanosine-3'-phosphate
  modified_base 18: mod_base = OTHER; note = 2'-O-methylguanosine-3'-phosphate
  modified_base 19: mod_base = OTHER; note = 2'-O-methyladenosine-3'-phosphate
  modified_base 20: mod_base = OTHER; note = 2'-O-methylguanosine-3'-phosphate
  modified_base 21: mod_base = OTHER; note = 2'-O-methyluridine-3'-phosphate ((2S,4R)-1-[29-[[2-(acetylamino)-2-deoxy-beta-D-galactopyra nosyl]oxy]-14,14-bis[[3-[[3-[[5-[[2-(acetylamino)-2-deoxy-b eta-D-galactopyranosyl]oxy]-1-oxopentyl]amino]propyl]amino] -3-oxopropoxy]methyl]-1,12,19,25-tetraoxo-16-oxa-13,20,24-t riazanonacos-1-yl]-4-hydroxy-2-pyrrolidinyl)methyl ester
caagtctgaacaacttggagt

SEQ ID NO: 786 - RNA, 21 nt, synthetic construct
  source 1..21: mol_type = other RNA
  modified_base 1: mod_base = OTHER; note = 2'-O-methyluridine-3'-phosphorothioate
  modified_base 2: mod_base = OTHER; note = 2'-O-methyluridine-3'-phosphorothioate
  modified_base 3: mod_base = OTHER; note = 2'-O-methylguanosine-3'-phosphate
  modified_base 4: mod_base = OTHER; note = 2'-O-methyladenosine-3'-phosphate
  modified_base 5: mod_base = OTHER; note = 2'-O-methylguanosine-3'-phosphate
  modified_base 6: mod_base = OTHER; note = 2'-O-methyluridine-3'-phosphate
  modified_base 7: mod_base = OTHER; note = 2'-deoxy-2'-fluorocytidine-3'-phosphate
  modified_base 8: mod_base = OTHER; note = 2'-O-methylcytidine-3'-phosphate
  modified_base 9: mod_base = OTHER; note = 2'-deoxy-2'-fluorouridine-3'-phosphate
  modified_base 10: mod_base = OTHER; note = 2'-deoxy-2'-fluoroadenosine-3'-phosphate
  modified_base 11: mod_base = OTHER; note = 2'-deoxy-2'-fluorocytidine-3'-phosphate
  modified_base 12: mod_base = OTHER; note = 2'-O-methylguanosine-3'-phosphate
  modified_base 13: mod_base = OTHER; note = 2'-O-methyladenosine-3'-phosphate
  modified_base 14: mod_base = OTHER; note = 2'-O-methyluridine-3'-phosphate
  modified_base 15: mod_base = OTHER; note = 2'-O-methyladenosine-3'-phosphate
  modified_base 16: mod_base = OTHER; note = 2'-O-methyladenosine-3'-phosphate
  modified_base 17: mod_base = OTHER; note = 2'-O-methylguanosine-3'-phosphate
  modified_base 18: mod_base = OTHER; note = 2'-O-methyladenosine-3'-phosphate
  modified_base 19: mod_base = OTHER; note = 2'-O-methyluridine-3'-phosphate
  modified_base 20: mod_base = OTHER; note = 2'-O-methylcytidine-3'-phosphate
  modified_base 21: mod_base = OTHER; note = 2'-O-methyluridine-3'-phosphate ((2S,4R)-1-[29-[[2-(acetylamino)-2-deoxy-beta-D-galactopyra nosyl]oxy]-14,14-bis[[3-[[3-[[5-[[2-(acetylamino)-2-deoxy-b eta-D-galactopyranosyl]oxy]-1-oxopentyl]amino]propyl]amino] -3-oxopropoxy]methyl]-1,12,19,25-tetraoxo-16-oxa-13,20,24-t riazanonacos-1-yl]-4-hydroxy-2-pyrrolidinyl)methyl ester
ttgagtcctacgataagatct

SEQ ID NO: 787 - RNA, 21 nt, synthetic construct
  source 1..21: mol_type = other RNA
  modified_base 1: mod_base = OTHER; note = 2'-O-methylguanosine-3'-phosphorothioate
  modified_base 2: mod_base = OTHER; note = 2'-O-methylcytidine-3'-phosphorothioate
  modified_base 3: mod_base = OTHER; note = 2'-O-methyladenosine-3'-phosphate
  modified_base 4: mod_base = OTHER; note = 2'-O-methylguanosine-3'-phosphate
  modified_base 5: mod_base = OTHER; note = 2'-O-methylcytidine-3'-phosphate
  modified_base 6: mod_base = OTHER; note = 2'-O-methylcytidine-3'-phosphate
  modified_base 7: mod_base = OTHER; note = 2'-deoxy-2'-fluorouridine-3'-phosphate
  modified_base 8: mod_base = OTHER; note = 2'-O-methyladenosine-3'-phosphate
  modified_base 9: mod_base = OTHER; note = 2'-deoxy-2'-fluoroadenosine-3'-phosphate
  modified_base 10: mod_base = OTHER; note = 2'-deoxy-2'-fluoroguanosine-3'-phosphate
  modified_base 11: mod_base = OTHER; note = 2'-deoxy-2'-fluoroguanosine-3'-phosphate
  modified_base 12: mod_base = OTHER; note = 2'-O-methyladenosine-3'-phosphate
  modified_base 13: mod_base = OTHER; note = 2'-O-methylcytidine-3'-phosphate
  modified_base 14: mod_base = OTHER; note = 2'-O-methyladenosine-3'-phosphate
  modified_base 15: mod_base = OTHER; note = 2'-O-methyluridine-3'-phosphate
  modified_base 16: mod_base = OTHER; note = 2'-O-methyladenosine-3'-phosphate
  modified_base 17: mod_base = OTHER; note = 2'-O-methylguanosine-3'-phosphate
  modified_base 18: mod_base = OTHER; note = 2'-O-methyladenosine-3'-phosphate
  modified_base 19: mod_base = OTHER; note = 2'-O-methylguanosine-3'-phosphate
  modified_base 20: mod_base = OTHER; note = 2'-O-methyluridine-3'-phosphate
  modified_base 21: mod_base = OTHER; note = 2'-O-methyluridine-3'-phosphate ((2S,4R)-1-[29-[[2-(acetylamino)-2-deoxy-beta-D-galactopyra nosyl]oxy]-14,14-bis[[3-[[3-[[5-[[2-(acetylamino)-2-deoxy-b eta-D-galactopyranosyl]oxy]-1-oxopentyl]amino]propyl]amino] -3-oxopropoxy]methyl]-1,12,19,25-tetraoxo-16-oxa-13,20,24-t riazanonacos-1-yl]-4-hydroxy-2-pyrrolidinyl)methyl ester
gcagcctaaggacatagagtt

SEQ ID NO: 788 - RNA, 21 nt, synthetic construct
  source 1..21: mol_type = other RNA
  modified_base 1: mod_base = OTHER; note = 2'-O-methylcytidine-3'-phosphorothioate
  modified_base 2: mod_base = OTHER; note = 2'-O-methyluridine-3'-phosphorothioate
  modified_base 3: mod_base = OTHER; note = 2'-O-methylguanosine-3'-phosphate
  modified_base 4: mod_base = OTHER; note = 2'-O-methylguanosine-3'-phosphate
  modified_base 5: mod_base = OTHER; note = 2'-O-methyladenosine-3'-phosphate
  modified_base 6: mod_base = OTHER; note = 2'-O-methylcytidine-3'-phosphate
  modified_base 7: mod_base = OTHER; note = 2'-deoxy-2'-fluorocytidine-3'-phosphate
  modified_base 8: mod_base = OTHER; note = 2'-O-methylcytidine-3'-phosphate
  modified_base 9: mod_base = OTHER; note = 2'-deoxy-2'-fluorouridine-3'-phosphate
  modified_base 10: mod_base = OTHER; note = 2'-deoxy-2'-fluoroguanosine-3'-phosphate
  modified_base 11: mod_base = OTHER; note = 2'-deoxy-2'-fluoroguanosine-3'-phosphate
  modified_base 12: mod_base = OTHER; note = 2'-O-methylcytidine-3'-phosphate
  modified_base 13: mod_base = OTHER; note = 2'-O-methyladenosine-3'-phosphate
  modified_base 14: mod_base = OTHER; note = 2'-O-methylcytidine-3'-phosphate
  modified_base 15: mod_base = OTHER; note = 2'-O-methyladenosine-3'-phosphate
  modified_base 16: mod_base = OTHER; note = 2'-O-methylguanosine-3'-phosphate
  modified_base 17: mod_base = OTHER; note = 2'-O-methylguanosine-3'-phosphate
  modified_base 18: mod_base = OTHER; note = 2'-O-methyluridine-3'-phosphate
  modified_base 19: mod_base = OTHER; note = 2'-O-methylguanosine-3'-phosphate
  modified_base 20: mod_base = OTHER; note = 2'-O-methylguanosine-3'-phosphate
  modified_base 21: mod_base = OTHER; note = 2'-O-methyluridine-3'-phosphate ((2S,4R)-1-[29-[[2-(acetylamino)-2-deoxy-beta-D-galactopyra nosyl]oxy]-14,14-bis[[3-[[3-[[5-[[2-(acetylamino)-2-deoxy-b eta-D-galactopyranosyl]oxy]-1-oxopentyl]amino]propyl]amino] -3-oxopropoxy]methyl]-1,12,19,25-tetraoxo-16-oxa-13,20,24-t riazanonacos-1-yl]-4-hydroxy-2-pyrrolidinyl)methyl ester
ctggaccctggcacaggtggt

SEQ ID NO: 789 - RNA, 21 nt, synthetic construct
  source 1..21: mol_type = other RNA
  modified_base 1: mod_base = OTHER; note = 2'-O-methylguanosine-3'-phosphorothioate
  modified_base 2: mod_base = OTHER; note = 2'-O-methylcytidine-3'-phosphorothioate
  modified_base 3: mod_base = OTHER; note = 2'-O-methyladenosine-3'-phosphate
  modified_base 4: mod_base = OTHER; note = 2'-O-methylcytidine-3'-phosphate
  modified_base 5: mod_base = OTHER; note = 2'-O-methyluridine-3'-phosphate
  modified_base 6: mod_base = OTHER; note = 2'-O-methylguanosine-3'-phosphate
  modified_base 7: mod_base = OTHER; note = 2'-deoxy-2'-fluorouridine-3'-phosphate
  modified_base 8: mod_base = OTHER; note = 2'-O-methylguanosine-3'-phosphate
  modified_base 9: mod_base = OTHER; note = 2'-deoxy-2'-fluoroadenosine-3'-phosphate
  modified_base 10: mod_base = OTHER; note = 2'-deoxy-2'-fluorocytidine-3'-phosphate
  modified_base 11: mod_base = OTHER; note = 2'-deoxy-2'-fluoroguanosine-3'-phosphate
  modified_base 12: mod_base = OTHER; note = 2'-O-methyluridine-3'-phosphate
  modified_base 13: mod_base = OTHER; note = 2'-O-methylcytidine-3'-phosphate
  modified_base 14: mod_base = OTHER; note = 2'-O-methylcytidine-3'-phosphate
  modified_base 15: mod_base = OTHER; note = 2'-O-methyladenosine-3'-phosphate
  modified_base 16: mod_base = OTHER; note = 2'-O-methylcytidine-3'-phosphate
  modified_base 17: mod_base = OTHER; note = 2'-O-methyluridine-3'-phosphate
  modified_base 18: mod_base = OTHER; note = 2'-O-methyluridine-3'-phosphate
  modified_base 19: mod_base = OTHER; note = 2'-O-methylcytidine-3'-phosphate
  modified_base 20: mod_base = OTHER; note = 2'-O-methylguanosine-3'-phosphate
  modified_base 21: mod_base = OTHER; note = 2'-O-methyluridine-3'-phosphate ((2S,4R)-1-[29-[[2-(acetylamino)-2-deoxy-beta-D-galactopyra nosyl]oxy]-14,14-bis[[3-[[3-[[5-[[2-(acetylamino)-2-deoxy-b eta-D-galactopyranosyl]oxy]-1-oxopentyl]amino]propyl]amino] -3-oxopropoxy]methyl]-1,12,19,25-tetraoxo-16-oxa-13,20,24-t riazanonacos-1-yl]-4-hydroxy-2-pyrrolidinyl)methyl ester
gcactgtgacgtccacttcgt

SEQ ID NO: 790 - RNA, 21 nt, synthetic construct
  source 1..21: mol_type = other RNA
  modified_base 1: mod_base = OTHER; note = 2'-O-methylguanosine-3'-phosphorothioate
  modified_base 2: mod_base = OTHER; note = 2'-O-methyluridine-3'-phosphorothioate
  modified_base 3: mod_base = OTHER; note = 2'-O-methylguanosine-3'-phosphate
  modified_base 4: mod_base = OTHER; note = 2'-O-methylcytidine-3'-phosphate
  modified_base 5: mod_base = OTHER; note = 2'-O-methyladenosine-3'-phosphate
  modified_base 6: mod_base = OTHER; note = 2'-O-methylguanosine-3'-phosphate
  modified_base 7: mod_base = OTHER; note = 2'-deoxy-2'-fluoroguanosine-3'-phosphate
  modified_base 8: mod_base = OTHER; note = 2'-O-methyladenosine-3'-phosphate
  modified_base 9: mod_base = OTHER; note = 2'-deoxy-2'-fluoroadenosine-3'-phosphate
  modified_base 10: mod_base = OTHER; note = 2'-deoxy-2'-fluorocytidine-3'-phosphate
  modified_base 11: mod_base = OTHER; note = 2'-deoxy-2'-fluorouridine-3'-phosphate
  modified_base 12: mod_base = OTHER; note = 2'-O-methylguanosine-3'-phosphate
  modified_base 13: mod_base = OTHER; note = 2'-O-methylguanosine-3'-phosphate
  modified_base 14: mod_base = OTHER; note = 2'-O-methylguanosine-3'-phosphate
  modified_base 15: mod_base = OTHER; note = 2'-O-methyladenosine-3'-phosphate
  modified_base 16: mod_base = OTHER; note = 2'-O-methylguanosine-3'-phosphate
  modified_base 17: mod_base = OTHER; note = 2'-O-methylcytidine-3'-phosphate
  modified_base 18: mod_base = OTHER; note = 2'-O-methyladenosine-3'-phosphate
  modified_base 19: mod_base = OTHER; note = 2'-O-methylguanosine-3'-phosphate
  modified_base 20: mod_base = OTHER; note = 2'-O-methylguanosine-3'-phosphate
  modified_base 21: mod_base = OTHER; note = 2'-O-methyluridine-3'-phosphate ((2S,4R)-1-[29-[[2-(acetylamino)-2-deoxy-beta-D-galactopyra nosyl]oxy]-14,14-bis[[3-[[3-[[5-[[2-(acetylamino)-2-deoxy-b eta-D-galactopyranosyl]oxy]-1-oxopentyl]amino]propyl]amino] -3-oxopropoxy]methyl]-1,12,19,25-tetraoxo-16-oxa-13,20,24-t riazanonacos-1-yl]-4-hydroxy-2-pyrrolidinyl)methyl ester
gtgcaggaactgggagcaggt

SEQ ID NO: 791 - RNA, 21 nt, synthetic construct
  source 1..21: mol_type = other RNA
  modified_base 1: mod_base = OTHER; note = 2'-O-methylcytidine-3'-phosphorothioate
  modified_base 2: mod_base = OTHER; note = 2'-O-methyladenosine-3'-phosphorothioate
  modified_base 3: mod_base = OTHER; note = 2'-O-methyladenosine-3'-phosphate
  modified_base 4: mod_base = OTHER; note = 2'-O-methylguanosine-3'-phosphate
  modified_base 5: mod_base = OTHER; note = 2'-O-methyladenosine-3'-phosphate
  modified_base 6: mod_base = OTHER; note = 2'-O-methyluridine-3'-phosphate
  modified_base 7: mod_base = OTHER; note = 2'-deoxy-2'-fluoroguanosine-3'-phosphate
  modified_base 8: mod_base = OTHER; note = 2'-O-methyluridine-3'-phosphate
  modified_base 9: mod_base = OTHER; note = 2'-deoxy-2'-fluoroguanosine-3'-phosphate
  modified_base 10: mod_base = OTHER; note = 2'-deoxy-2'-fluorocytidine-3'-phosphate
  modified_base 11: mod_base = OTHER; note = 2'-deoxy-2'-fluorouridine-3'-phosphate
  modified_base 12: mod_base = OTHER; note = 2'-O-methyladenosine-3'-phosphate
  modified_base 13: mod_base = OTHER; note = 2'-O-methylcytidine-3'-phosphate
  modified_base 14: mod_base = OTHER; note = 2'-O-methyladenosine-3'-phosphate
  modified_base 15: mod_base = OTHER; note = 2'-O-methyladenosine-3'-phosphate
  modified_base 16: mod_base = OTHER; note = 2'-O-methylcytidine-3'-phosphate
  modified_base 17: mod_base = OTHER; note = 2'-O-methyluridine-3'-phosphate
  modified_base 18: mod_base = OTHER; note = 2'-O-methyladenosine-3'-phosphate
  modified_base 19: mod_base = OTHER; note = 2'-O-methylcytidine-3'-phosphate
  modified_base 20: mod_base = OTHER; note = 2'-O-methyladenosine-3'-phosphate
  modified_base 21: mod_base = OTHER; note = 2'-O-methyluridine-3'-phosphate ((2S,4R)-1-[29-[[2-(acetylamino)-2-deoxy-beta-D-galactopyra nosyl]oxy]-14,14-bis[[3-[[3-[[5-[[2-(acetylamino)-2-deoxy-b eta-D-galactopyranosyl]oxy]-1-oxopentyl]amino]propyl]amino] -3-oxopropoxy]methyl]-1,12,19,25-tetraoxo-16-oxa-13,20,24-t riazanonacos-1-yl]-4-hydroxy-2-pyrrolidinyl)methyl ester
caagatgtgctacaactacat

SEQ ID NO: 792 - RNA, 21 nt, synthetic construct
  source 1..21: mol_type = other RNA
  modified_base 1: mod_base = OTHER; note = 2'-O-methylcytidine-3'-phosphorothioate
  modified_base 2: mod_base = OTHER; note = 2'-O-methyluridine-3'-phosphorothioate
  modified_base 3: mod_base = OTHER; note = 2'-O-methylguanosine-3'-phosphate
  modified_base 4: mod_base = OTHER; note = 2'-O-methylcytidine-3'-phosphate
  modified_base 5: mod_base = OTHER; note = 2'-O-methyluridine-3'-phosphate
  modified_base 6: mod_base = OTHER; note = 2'-O-methylguanosine-3'-phosphate
  modified_base 7: mod_base = OTHER; note = 2'-deoxy-2'-fluorocytidine-3'-phosphate
  modified_base 8: mod_base = OTHER; note = 2'-O-methyladenosine-3'-phosphate
  modified_base 9: mod_base = OTHER; note = 2'-deoxy-2'-fluoroguanosine-3'-phosphate
  modified_base 10: mod_base = OTHER; note = 2'-deoxy-2'-fluorouridine-3'-phosphate
  modified_base 11: mod_base = OTHER; note = 2'-deoxy-2'-fluoroguanosine-3'-phosphate
  modified_base 12: mod_base = OTHER; note = 2'-O-methyladenosine-3'-phosphate
  modified_base 13: mod_base = OTHER; note = 2'-O-methylcytidine-3'-phosphate
  modified_base 14: mod_base = OTHER; note = 2'-O-methylguanosine-3'-phosphate
  modified_base 15: mod_base = OTHER; note = 2'-O-methyladenosine-3'-phosphate
  modified_base 16: mod_base = OTHER; note = 2'-O-methylcytidine-3'-phosphate
  modified_base 17: mod_base = OTHER; note = 2'-O-methylcytidine-3'-phosphate
  modified_base 18: mod_base = OTHER; note = 2'-O-methyladenosine-3'-phosphate
  modified_base 19: mod_base = OTHER; note = 2'-O-methylcytidine-3'-phosphate
  modified_base 20: mod_base = OTHER; note = 2'-O-methyluridine-3'-phosphate
  modified_base 21: mod_base = OTHER; note = 2'-O-methyluridine-3'-phosphate ((2S,4R)-1-[29-[[2-(acetylamino)-2-deoxy-beta-D-galactopyra nosyl]oxy]-14,14-bis[[3-[[3-[[5-[[2-(acetylamino)-2-deoxy-b eta-D-galactopyranosyl]oxy]-1-oxopentyl]amino]propyl]amino] -3-oxopropoxy]methyl]-1,12,19,25-tetraoxo-16-oxa-13,20,24-t riazanonacos-1-yl]-4-hydroxy-2-pyrrolidinyl)methyl ester
ctgctgcagtgacgaccactt

SEQ ID NO: 793 - RNA, 21 nt, synthetic construct
  source 1..21: mol_type = other RNA
  modified_base 1: mod_base = OTHER; note = 2'-O-methylcytidine-3'-phosphorothioate
  modified_base 2: mod_base = OTHER; note = 2'-O-methylguanosine-3'-phosphorothioate
  modified_base 3: mod_base = OTHER; note = 2'-O-methyladenosine-3'-phosphate
  modified_base 4: mod_base = OTHER; note = 2'-O-methylcytidine-3'-phosphate
  modified_base 5: mod_base = OTHER; note = 2'-O-methylcytidine-3'-phosphate
  modified_base 6: mod_base = OTHER; note = 2'-O-methyladenosine-3'-phosphate
  modified_base 7: mod_base = OTHER; note = 2'-deoxy-2'-fluorocytidine-3'-phosphate
  modified_base 8: mod_base = OTHER; note = 2'-O-methyladenosine-3'-phosphate
  modified_base 9: mod_base = OTHER; note = 2'-deoxy-2'-fluoroguanosine-3'-phosphate
  modified_base 10: mod_base = OTHER; note = 2'-deoxy-2'-fluoroadenosine-3'-phosphate
  modified_base 11: mod_base = OTHER; note = 2'-deoxy-2'-fluoroguanosine-3'-phosphate
  modified_base 12: mod_base = OTHER; note = 2'-O-methylcytidine-3'-phosphate
  modified_base 13: mod_base = OTHER; note = 2'-O-methyluridine-3'-phosphate
  modified_base 14: mod_base = OTHER; note = 2'-O-methylguanosine-3'-phosphate
  modified_base 15: mod_base = OTHER; note = 2'-O-methylguanosine-3'-phosphate
  modified_base 16: mod_base = OTHER; note = 2'-O-methyladenosine-3'-phosphate
  modified_base 17: mod_base = OTHER; note = 2'-O-methylguanosine-3'-phosphate
  modified_base 18: mod_base = OTHER; note = 2'-O-methyladenosine-3'-phosphate
  modified_base 19: mod_base = OTHER; note = 2'-O-methylcytidine-3'-phosphate
  modified_base 20: mod_base = OTHER; note = 2'-O-methylguanosine-3'-phosphate
  modified_base 21: mod_base = OTHER; note = 2'-O-methyluridine-3'-phosphate ((2S,4R)-1-[29-[[2-(acetylamino)-2-deoxy-beta-D-galactopyra nosyl]oxy]-14,14-bis[[3-[[3-[[5-[[2-(acetylamino)-2-deoxy-b eta-D-galactopyranosyl]oxy]-1-oxopentyl]amino]propyl]amino] -3-oxopropoxy]methyl]-1,12,19,25-tetraoxo-16-oxa-13,20,24-t riazanonacos-1-yl]-4-hydroxy-2-pyrrolidinyl)methyl ester
cgaccacagagctggagacgt

SEQ ID NO: 794 - RNA, 21 nt, synthetic construct
  source 1..21: mol_type = other RNA
  modified_base 1: mod_base = OTHER; note = 2'-O-methyladenosine-3'-phosphorothioate
  modified_base 2: mod_base = OTHER; note = 2'-O-methylcytidine-3'-phosphorothioate
  modified_base 3: mod_base = OTHER; note = 2'-O-methylcytidine-3'-phosphate
  modified_base 4: mod_base = OTHER; note = 2'-O-methylcytidine-3'-phosphate
  modified_base 5: mod_base = OTHER; note = 2'-O-methyladenosine-3'-phosphate
  modified_base 6: mod_base = OTHER; note = 2'-O-methylguanosine-3'-phosphate
  modified_base 7: mod_base = OTHER; note = 2'-deoxy-2'-fluoroguanosine-3'-phosphate
  modified_base 8: mod_base = OTHER; note = 2'-O-methylcytidine-3'-phosphate
  modified_base 9: mod_base = OTHER; note = 2'-deoxy-2'-fluorocytidine-3'-phosphate
  modified_base 10: mod_base = OTHER; note = 2'-deoxy-2'-fluorocytidine-3'-phosphate
  modified_base 11: mod_base = OTHER; note = 2'-deoxy-2'-fluorouridine-3'-phosphate
  modified_base 12: mod_base = OTHER; note = 2'-O-methylguanosine-3'-phosphate
  modified_base 13: mod_base = OTHER; note = 2'-O-methyluridine-3'-phosphate
  modified_base 14: mod_base = OTHER; note = 2'-O-methyluridine-3'-phosphate
  modified_base 15: mod_base = OTHER; note = 2'-O-methylcytidine-3'-phosphate
  modified_base 16: mod_base = OTHER; note = 2'-O-methyluridine-3'-phosphate
  modified_base 17: mod_base = OTHER; note = 2'-O-methylcytidine-3'-phosphate
  modified_base 18: mod_base = OTHER; note = 2'-O-methyladenosine-3'-phosphate
  modified_base 19: mod_base = OTHER; note = 2'-O-methyladenosine-3'-phosphate
  modified_base 20: mod_base = OTHER; note = 2'-O-methylcytidine-3'-phosphate
  modified_base 21: mod_base = OTHER; note = 2'-O-methyluridine-3'-phosphate ((2S,4R)-1-[29-[[2-(acetylamino)-2-deoxy-beta-D-galactopyra nosyl]oxy]-14,14-bis[[3-[[3-[[5-[[2-(acetylamino)-2-deoxy-b eta-D-galactopyranosyl]oxy]-1-oxopentyl]amino]propyl]amino] -3-oxopropoxy]methyl]-1,12,19,25-tetraoxo-16-oxa-13,20,24-t riazanonacos-1-yl]-4-hydroxy-2-pyrrolidinyl)methyl ester
acccaggccctgttctcaact

SEQ ID NO: 795 - RNA, 21 nt, synthetic construct
  source 1..21: mol_type = other RNA
  modified_base 1: mod_base = OTHER; note = 2'-O-methylcytidine-3'-phosphorothioate
  modified_base 2: mod_base = OTHER; note = 2'-O-methyluridine-3'-phosphorothioate
  modified_base 3: mod_base = OTHER; note = 2'-O-methylcytidine-3'-phosphate
  modified_base 4: mod_base = OTHER; note = 2'-O-methyluridine-3'-phosphate
  modified_base 5: mod_base = OTHER; note = 2'-O-methylcytidine-3'-phosphate
  modified_base 6: mod_base = OTHER; note = 2'-O-methyladenosine-3'-phosphate
  modified_base 7: mod_base = OTHER; note = 2'-deoxy-2'-fluoroguanosine-3'-phosphate
  modified_base 8: mod_base = OTHER; note = 2'-O-methyladenosine-3'-phosphate
  modified_base 9: mod_base = OTHER; note = 2'-deoxy-2'-fluoroadenosine-3'-phosphate
  modified_base 10: mod_base = OTHER; note = 2'-deoxy-2'-fluoroguanosine-3'-phosphate
  modified_base 11: mod_base = OTHER; note = 2'-deoxy-2'-fluoroguanosine-3'-phosphate
  modified_base 12: mod_base = OTHER; note = 2'-O-methyladenosine-3'-phosphate
  modified_base 13: mod_base = OTHER; note = 2'-O-methylcytidine-3'-phosphate
  modified_base 14: mod_base = OTHER; note = 2'-O-methyluridine-3'-phosphate
  modified_base 15: mod_base = OTHER; note = 2'-O-methylguanosine-3'-phosphate
  modified_base 16: mod_base = OTHER; note = 2'-O-methyladenosine-3'-phosphate
  modified_base 17: mod_base = OTHER; note = 2'-O-methylcytidine-3'-phosphate
  modified_base 18: mod_base = OTHER; note = 2'-O-methyladenosine-3'-phosphate
  modified_base 19: mod_base = OTHER; note = 2'-O-methyluridine-3'-phosphate
  modified_base 20: mod_base = OTHER; note = 2'-O-methylcytidine-3'-phosphate
  modified_base 21: mod_base = OTHER; note = 2'-O-methyluridine-3'-phosphate ((2S,4R)-1-[29-[[2-(acetylamino)-2-deoxy-beta-D-galactopyra nosyl]oxy]-14,14-bis[[3-[[3-[[5-[[2-(acetylamino)-2-deoxy-b eta-D-galactopyranosyl]oxy]-1-oxopentyl]amino]propyl]amino] -3-oxopropoxy]methyl]-1,12,19,25-tetraoxo-16-oxa-13,20,24-t riazanonacos-1-yl]-4-hydroxy-2-pyrrolidinyl)methyl ester
ctctcagaaggactgacatct

SEQ ID NO: 796 - RNA, 21 nt, synthetic construct
  source 1..21: mol_type = other RNA
  modified_base 1: mod_base = OTHER; note = 2'-O-methylcytidine-3'-phosphorothioate
  modified_base 2: mod_base = OTHER; note = 2'-O-methyladenosine-3'-phosphorothioate
  modified_base 3: mod_base = OTHER; note = 2'-O-methylguanosine-3'-phosphate
  modified_base 4: mod_base = OTHER; note = 2'-O-methyladenosine-3'-phosphate
  modified_base 5: mod_base = OTHER; note = 2'-O-methyluridine-3'-phosphate
  modified_base 6: mod_base = OTHER; note = 2'-O-methyladenosine-3'-phosphate
  modified_base 7: mod_base = OTHER; note = 2'-deoxy-2'-fluorocytidine-3'-phosphate
  modified_base 8: mod_base = OTHER; note = 2'-O-methyladenosine-3'-phosphate
  modified_base 9: mod_base = OTHER; note = 2'-deoxy-2'-fluorocytidine-3'-phosphate
  modified_base 10: mod_base = OTHER; note = 2'-deoxy-2'-fluoroadenosine-3'-phosphate
  modified_base 11: mod_base = OTHER; note = 2'-deoxy-2'-fluoroadenosine-3'-phosphate
  modified_base 12: mod_base = OTHER; note = 2'-O-methylguanosine-3'-phosphate
  modified_base 13: mod_base = OTHER; note = 2'-O-methylcytidine-3'-phosphate
  modified_base 14: mod_base = OTHER; note = 2'-O-methyladenosine-3'-phosphate
  modified_base 15: mod_base = OTHER; note = 2'-O-methylcytidine-3'-phosphate
  modified_base 16: mod_base = OTHER; note = 2'-O-methylcytidine-3'-phosphate
  modified_base 17: mod_base = OTHER; note = 2'-O-methylcytidine-3'-phosphate
  modified_base 18: mod_base = OTHER; note = 2'-O-methyluridine-3'-phosphate
  modified_base 19: mod_base = OTHER; note = 2'-O-methyluridine-3'-phosphate
  modified_base 20: mod_base = OTHER; note = 2'-O-methylguanosine-3'-phosphate
  modified_base 21: mod_base = OTHER; note = 2'-O-methyluridine-3'-phosphate ((2S,4R)-1-[29-[[2-(acetylamino)-2-deoxy-beta-D-galactopyra nosyl]oxy]-14,14-bis[[3-[[3-[[5-[[2-(acetylamino)-2-deoxy-b eta-D-galactopyranosyl]oxy]-1-oxopentyl]amino]propyl]amino] -3-oxopropoxy]methyl]-1,12,19,25-tetraoxo-16-oxa-13,20,24-t riazanonacos-1-yl]-4-hydroxy-2-pyrrolidinyl)methyl ester
cagatacacaagcacccttgt

SEQ ID NO: 797 - RNA, 21 nt, synthetic construct
  source 1..21: mol_type = other RNA
  modified_base 1: mod_base = OTHER; note = 2'-O-methylguanosine-3'-phosphorothioate
  modified_base 2: mod_base = OTHER; note = 2'-O-methylcytidine-3'-phosphorothioate
  modified_base 3: mod_base = OTHER; note = 2'-O-methyluridine-3'-phosphate
  modified_base 4: mod_base = OTHER; note = 2'-O-methylcytidine-3'-phosphate
  modified_base 5: mod_base = OTHER; note = 2'-O-methylcytidine-3'-phosphate
  modified_base 6: mod_base = OTHER; note = 2'-O-methyladenosine-3'-phosphate
  modified_base 7: mod_base = OTHER; note = 2'-deoxy-2'-fluorocytidine-3'-phosphate
  modified_base 8: mod_base = OTHER; note = 2'-O-methyladenosine-3'-phosphate
  modified_base 9: mod_base = OTHER; note = 2'-deoxy-2'-fluoroguanosine-3'-phosphate
  modified_base 10: mod_base = OTHER; note = 2'-deoxy-2'-fluoroadenosine-3'-phosphate
  modified_base 11: mod_base = OTHER; note = 2'-deoxy-2'-fluoroadenosine-3'-phosphate
  modified_base 12: mod_base = OTHER; note = 2'-O-methylcytidine-3'-phosphate
  modified_base 13: mod_base = OTHER; note = 2'-O-methylcytidine-3'-phosphate
  modified_base 14: mod_base = OTHER; note = 2'-O-methylcytidine-3'-phosphate
  modified_base 15: mod_base = OTHER; note = 2'-O-methyladenosine-3'-phosphate
  modified_base 16: mod_base = OTHER; note = 2'-O-methylcytidine-3'-phosphate
  modified_base 17: mod_base = OTHER; note = 2'-O-methyluridine-3'-phosphate
  modified_base 18: mod_base = OTHER; note = 2'-O-methylguanosine-3'-phosphate
  modified_base 19: mod_base = OTHER; note = 2'-O-methyluridine-3'-phosphate
  modified_base 20: mod_base = OTHER; note = 2'-O-methylcytidine-3'-phosphate
  modified_base 21: mod_base = OTHER; note = 2'-O-methyluridine-3'-phosphate ((2S,4R)-1-[29-[[2-(acetylamino)-2-deoxy-beta-D-galactopyra nosyl]oxy]-14,14-bis[[3-[[3-[[5-[[2-(acetylamino)-2-deoxy-b eta-D-galactopyranosyl]oxy]-1-oxopentyl]amino]propyl]amino] -3-oxopropoxy]methyl]-1,12,19,25-tetraoxo-16-oxa-13,20,24-t riazanonacos-1-yl]-4-hydroxy-2-pyrrolidinyl)methyl ester
gctccacagaacccactgtct

SEQ ID NO: 798 - RNA, 21 nt, synthetic construct
  source 1..21: mol_type = other RNA
  modified_base 1: mod_base = OTHER; note = 2'-O-methylcytidine-3'-phosphorothioate
  modified_base 2: mod_base = OTHER; note = 2'-O-methyladenosine-3'-phosphorothioate
  modified_base 3: mod_base = OTHER; note = 2'-O-methylcytidine-3'-phosphate
  modified_base 4: mod_base = OTHER; note = 2'-O-methylcytidine-3'-phosphate
  modified_base 5: mod_base = OTHER; note = 2'-O-methylcytidine-3'-phosphate
  modified_base 6: mod_base = OTHER; note = 2'-O-methyluridine-3'-phosphate
  modified_base 7: mod_base = OTHER; note = 2'-deoxy-2'-fluorouridine-3'-phosphate
  modified_base 8: mod_base = OTHER; note = 2'-O-methylcytidine-3'-phosphate
  modified_base 9: mod_base = OTHER; note = 2'-deoxy-2'-fluorocytidine-3'-phosphate
  modified_base 10: mod_base = OTHER; note = 2'-deoxy-2'-fluoroadenosine-3'-phosphate
  modified_base 11: mod_base = OTHER; note = 2'-deoxy-2'-fluoroadenosine-3'-phosphate
  modified_base 12: mod_base = OTHER; note = 2'-O-methylcytidine-3'-phosphate
  modified_base 13: mod_base = OTHER; note = 2'-O-methyladenosine-3'-phosphate
  modified_base 14: mod_base = OTHER; note = 2'-O-methylcytidine-3'-phosphate
  modified_base 15: mod_base = OTHER; note = 2'-O-methylguanosine-3'-phosphate
  modified_base 16: mod_base = OTHER; note = 2'-O-methylcytidine-3'-phosphate
  modified_base 17: mod_base = OTHER; note = 2'-O-methyluridine-3'-phosphate
  modified_base 18: mod_base = OTHER; note = 2'-O-methylcytidine-3'-phosphate
  modified_base 19: mod_base = OTHER; note = 2'-O-methyladenosine-3'-phosphate
  modified_base 20: mod_base = OTHER; note = 2'-O-methylguanosine-3'-phosphate
  modified_base 21: mod_base = OTHER; note = 2'-O-methyluridine-3'-phosphate ((2S,4R)-1-[29-[[2-(acetylamino)-2-deoxy-beta-D-galactopyra nosyl]oxy]-14,14-bis[[3-[[3-[[5-[[2-(acetylamino)-2-deoxy-b eta-D-galactopyranosyl]oxy]-1-oxopentyl]amino]propyl]amino] -3-oxopropoxy]methyl]-1,12,19,25-tetraoxo-16-oxa-13,20,24-t riazanonacos-1-yl]-4-hydroxy-2-pyrrolidinyl)methyl ester
cacccttccaacacgctcagt

SEQ ID NO: 799 - RNA, 21 nt, synthetic construct
  source 1..21: mol_type = other RNA
  modified_base 1: mod_base = OTHER; note = 2'-O-methylcytidine-3'-phosphorothioate
  modified_base 2: mod_base = OTHER; note = 2'-O-methyladenosine-3'-phosphorothioate
  modified_base 3: mod_base = OTHER; note = 2'-O-methyladenosine-3'-phosphate
  modified_base 4: mod_base = OTHER; note = 2'-O-methylcytidine-3'-phosphate
  modified_base 5: mod_base = OTHER; note = 2'-O-methyladenosine-3'-phosphate
  modified_base 6: mod_base = OTHER; note = 2'-O-methyladenosine-3'-phosphate
  modified_base 7: mod_base = OTHER; note = 2'-deoxy-2'-fluorocytidine-3'-phosphate
  modified_base 8: mod_base = OTHER; note = 2'-O-methyladenosine-3'-phosphate
  modified_base 9: mod_base = OTHER; note = 2'-deoxy-2'-fluoroadenosine-3'-phosphate
  modified_base 10: mod_base = OTHER; note = 2'-deoxy-2'-fluorouridine-3'-phosphate
  modified_base 11: mod_base = OTHER; note = 2'-deoxy-2'-fluoroguanosine-3'-phosphate
  modified_base 12: mod_base = OTHER; note = 2'-O-methylguanosine-3'-phosphate
  modified_base 13: mod_base = OTHER; note = 2'-O-methylcytidine-3'-phosphate
  modified_base 14: mod_base = OTHER; note = 2'-O-methyladenosine-3'-phosphate
  modified_base 15: mod_base = OTHER; note = 2'-O-methyladenosine-3'-phosphate
  modified_base 16: mod_base = OTHER; note = 2'-O-methylcytidine-3'-phosphate
  modified_base 17: mod_base = OTHER; note = 2'-O-methylcytidine-3'-phosphate
  modified_base 18: mod_base = OTHER; note = 2'-O-methyluridine-3'-phosphate
  modified_base 19: mod_base = OTHER; note = 2'-O-methylcytidine-3'-phosphate
  modified_base 20: mod_base = OTHER; note = 2'-O-methylcytidine-3'-phosphate
  modified_base 21: mod_base = OTHER; note = 2'-O-methyluridine-3'-phosphate ((2S,4R)-1-[29-[[2-(acetylamino)-2-deoxy-beta-D-galactopyra nosyl]oxy]-14,14-bis[[3-[[3-[[5-[[2-(acetylamino)-2-deoxy-b eta-D-galactopyranosyl]oxy]-1-oxopentyl]amino]propyl]amino] -3-oxopropoxy]methyl]-1,12,19,25-tetraoxo-16-oxa-13,20,24-t riazanonacos-1-yl]-4-hydroxy-2-pyrrolidinyl)methyl ester
caacaacaatggcaacctcct

SEQ ID NO: 800 - RNA, 21 nt, synthetic construct
  source 1..21: mol_type = other RNA
  modified_base 1: mod_base = OTHER; note = 2'-O-methyladenosine-3'-phosphorothioate
  modified_base 2: mod_base = OTHER; note = 2'-O-methylcytidine-3'-phosphorothioate
  modified_base 3: mod_base = OTHER; note = 2'-O-methylcytidine-3'-phosphate
  modified_base 4: mod_base = OTHER; note = 2'-O-methylguanosine-3'-phosphate
  modified_base 5: mod_base = OTHER; note = 2'-O-methylcytidine-3'-phosphate
  modified_base 6: mod_base = OTHER; note = 2'-O-methyluridine-3'-phosphate
  modified_base 7: mod_base = OTHER; note = 2'-deoxy-2'-fluorouridine-3'-phosphate
  modified_base 8: mod_base = OTHER; note = 2'-O-methylcytidine-3'-phosphate
  modified_base 9: mod_base = OTHER; note = 2'-deoxy-2'-fluorocytidine-3'-phosphate
  modified_base 10: mod_base = OTHER; note = 2'-deoxy-2'-fluoroadenosine-3'-phosphate
  modified_base 11: mod_base = OTHER; note = 2'-deoxy-2'-fluoroadenosine-3'-phosphate
  modified_base 12: mod_base = OTHER; note = 2'-O-methyladenosine-3'-phosphate
  modified_base 13: mod_base = OTHER; note = 2'-O-methylguanosine-3'-phosphate
  modified_base 14: mod_base = OTHER; note = 2'-O-methyladenosine-3'-phosphate
  modified_base 15: mod_base = OTHER; note = 2'-O-methylguanosine-3'-phosphate
  modified_base 16: mod_base = OTHER; note = 2'-O-methylcytidine-3'-phosphate
  modified_base 17: mod_base = OTHER; note = 2'-O-methylcytidine-3'-phosphate
  modified_base 18: mod_base = OTHER; note = 2'-O-methylguanosine-3'-phosphate
  modified_base 19: mod_base = OTHER; note = 2'-O-methylcytidine-3'-phosphate
  modified_base 20: mod_base = OTHER; note = 2'-O-methyluridine-3'-phosphate
  modified_base 21: mod_base = OTHER; note = 2'-O-methyluridine-3'-phosphate ((2S,4R)-1-[29-[[2-(acetylamino)-2-deoxy-beta-D-galactopyra nosyl]oxy]-14,14-bis[[3-[[3-[[5-[[2-(acetylamino)-2-deoxy-b eta-D-galactopyranosyl]oxy]-1-oxopentyl]amino]propyl]amino] -3-oxopropoxy]methyl]-1,12,19,25-tetraoxo-16-oxa-13,20,24-t riazanonacos-1-yl]-4-hydroxy-2-pyrrolidinyl)methyl ester
accgcttccaaagagccgctt

SEQ ID NO: 801 - RNA, 21 nt, synthetic construct
  source 1..21: mol_type = other RNA
  modified_base 1: mod_base = OTHER; note = 2'-O-methylcytidine-3'-phosphorothioate
  modified_base 2: mod_base = OTHER; note = 2'-O-methylcytidine-3'-phosphorothioate
  modified_base 3: mod_base = OTHER; note = 2'-O-methyladenosine-3'-phosphate
  modified_base 4: mod_base = OTHER; note = 2'-O-methyladenosine-3'-phosphate
  modified_base 5: mod_base = OTHER; note = 2'-O-methylcytidine-3'-phosphate
  modified_base 6: mod_base = OTHER; note = 2'-O-methyladenosine-3'-phosphate
  modified_base 7: mod_base = OTHER; note = 2'-deoxy-2'-fluorocytidine-3'-phosphate
  modified_base 8: mod_base = OTHER; note = 2'-O-methyluridine-3'-phosphate
  modified_base 9: mod_base = OTHER; note = 2'-deoxy-2'-fluorocytidine-3'-phosphate
  modified_base 10: mod_base = OTHER; note = 2'-deoxy-2'-fluoroadenosine-3'-phosphate
  modified_base 11: mod_base = OTHER; note = 2'-deoxy-2'-fluorocytidine-3'-phosphate
  modified_base 12: mod_base = OTHER; note = 2'-O-methylguanosine-3'-phosphate
  modified_base 13: mod_base = OTHER; note = 2'-O-methyladenosine-3'-phosphate
  modified_base 14: mod_base = OTHER; note = 2'-O-methylguanosine-3'-phosphate
  modified_base 15: mod_base = OTHER; note = 2'-O-methylcytidine-3'-phosphate
  modified_base 16: mod_base = OTHER; note = 2'-O-methylguanosine-3'-phosphate
  modified_base 17: mod_base = OTHER; note = 2'-O-methyladenosine-3'-phosphate
  modified_base 18: mod_base = OTHER; note = 2'-O-methylguanosine-3'-phosphate
  modified_base 19: mod_base = OTHER; note = 2'-O-methylcytidine-3'-phosphate
  modified_base 20: mod_base = OTHER; note = 2'-O-methyluridine-3'-phosphate
  modified_base 21: mod_base = OTHER; note = 2'-O-methyluridine-3'-phosphate ((2S,4R)-1-[29-[[2-(acetylamino)-2-deoxy-beta-D-galactopyra nosyl]oxy]-14,14-bis[[3-[[3-[[5-[[2-(acetylamino)-2-deoxy-b eta-D-galactopyranosyl]oxy]-1-oxopentyl]amino]propyl]amino] -3-oxopropoxy]methyl]-1,12,19,25-tetraoxo-16-oxa-13,20,24-t riazanonacos-1-yl]-4-hydroxy-2-pyrrolidinyl)methyl ester
ccaacactcacgagcgagctt

SEQ ID NO: 802 - RNA, 21 nt, synthetic construct
  source 1..21: mol_type = other RNA
  modified_base 1: mod_base = OTHER; note = 2'-O-methylcytidine-3'-phosphorothioate
  modified_base 2: mod_base = OTHER; note = 2'-O-methyladenosine-3'-phosphorothioate
  modified_base 3: mod_base = OTHER; note = 2'-O-methylcytidine-3'-phosphate
  modified_base 4: mod_base = OTHER; note = 2'-O-methylcytidine-3'-phosphate
  modified_base 5: mod_base = OTHER; note = 2'-O-methyluridine-3'-phosphate
  modified_base 6: mod_base = OTHER; note = 2'-O-methylcytidine-3'-phosphate
  modified_base 7: mod_base = OTHER; note = 2'-deoxy-2'-fluorouridine-3'-phosphate
  modified_base 8: mod_base = OTHER; note = 2'-O-methylcytidine-3'-phosphate
  modified_base 9: mod_base = OTHER; note = 2'-deoxy-2'-fluoroadenosine-3'-phosphate
  modified_base 10: mod_base = OTHER; note = 2'-deoxy-2'-fluoroguanosine-3'-phosphate
  modified_base 11: mod_base = OTHER; note = 2'-deoxy-2'-fluoroguanosine-3'-phosphate
  modified_base 12: mod_base = OTHER; note = 2'-O-methylcytidine-3'-phosphate
  modified_base 13: mod_base = OTHER; note = 2'-O-methylcytidine-3'-phosphate
  modified_base 14: mod_base = OTHER; note = 2'-O-methylguanosine-3'-phosphate
  modified_base 15: mod_base = OTHER; note = 2'-O-methyladenosine-3'-phosphate
  modified_base 16: mod_base = OTHER; note = 2'-O-methylguanosine-3'-phosphate
  modified_base 17: mod_base = OTHER; note = 2'-O-methyladenosine-3'-phosphate
  modified_base 18: mod_base = OTHER; note = 2'-O-methylcytidine-3'-phosphate
  modified_base 19: mod_base = OTHER; note = 2'-O-methylcytidine-3'-phosphate
  modified_base 20: mod_base = OTHER; note = 2'-O-methyladenosine-3'-phosphate
  modified_base 21: mod_base = OTHER; note = 2'-O-methyluridine-3'-phosphate ((2S,4R)-1-[29-[[2-(acetylamino)-2-deoxy-beta-D-galactopyra nosyl]oxy]-14,14-bis[[3-[[3-[[5-[[2-(acetylamino)-2-deoxy-b eta-D-galactopyranosyl]oxy]-1-oxopentyl]amino]propyl]amino] -3-oxopropoxy]methyl]-1,12,19,25-tetraoxo-16-oxa-13,20,24-t riazanonacos-1-yl]-4-hydroxy-2-pyrrolidinyl)methyl ester
cacctctcaggccgagaccat

SEQ ID NO: 803 - RNA, 21 nt, synthetic construct
  source 1..21: mol_type = other RNA
  modified_base 1: mod_base = OTHER; note = 2'-O-methylcytidine-3'-phosphorothioate
  modified_base 2: mod_base = OTHER; note = 2'-O-methylcytidine-3'-phosphorothioate
  modified_base 3: mod_base = OTHER; note = 2'-O-methyladenosine-3'-phosphate
  modified_base 4: mod_base = OTHER; note = 2'-O-methylguanosine-3'-phosphate
  modified_base 5: mod_base = OTHER; note = 2'-O-methylguanosine-3'-phosphate
  modified_base 6: mod_base = OTHER; note = 2'-O-methyladenosine-3'-phosphate
  modified_base 7: mod_base = OTHER; note = 2'-deoxy-2'-fluorocytidine-3'-phosphate
  modified_base 8: mod_base = OTHER; note = 2'-O-methyladenosine-3'-phosphate
  modified_base 9: mod_base = OTHER; note = 2'-deoxy-2'-fluoroguanosine-3'-phosphate
  modified_base 10: mod_base = OTHER; note = 2'-deoxy-2'-fluoroadenosine-3'-phosphate
  modified_base 11: mod_base = OTHER; note = 2'-deoxy-2'-fluoroguanosine-3'-phosphate
  modified_base 12: mod_base = OTHER; note = 2'-O-methyladenosine-3'-phosphate
  modified_base 13: mod_base = OTHER; note = 2'-O-methylcytidine-3'-phosphate
  modified_base 14: mod_base = OTHER; note = 2'-O-methylguanosine-3'-phosphate
  modified_base 15: mod_base = OTHER; note = 2'-O-methyladenosine-3'-phosphate
  modified_base 16: mod_base = OTHER; note = 2'-O-methylcytidine-3'-phosphate
  modified_base 17: mod_base = OTHER; note = 2'-O-methyladenosine-3'-phosphate
  modified_base 18: mod_base = OTHER; note = 2'-O-methyladenosine-3'-phosphate
  modified_base 19: mod_base = OTHER; note = 2'-O-methyluridine-3'-phosphate
  modified_base 20: mod_base = OTHER; note = 2'-O-methylguanosine-3'-phosphate
  modified_base 21: mod_base = OTHER; note = 2'-O-methyluridine-3'-phosphate ((2S,4R)-1-[29-[[2-(acetylamino)-2-deoxy-beta-D-galactopyra nosyl]oxy]-14,14-bis[[3-[[3-[[5-[[2-(acetylamino)-2-deoxy-b eta-D-galactopyranosyl]oxy]-1-oxopentyl]amino]propyl]amino] -3-oxopropoxy]methyl]-1,12,19,25-tetraoxo-16-oxa-13,20,24-t riazanonacos-1-yl]-4-hydroxy-2-pyrrolidinyl)methyl ester
ccaggacagagacgacaatgt

SEQ ID NO: 804 - RNA, 21 nt, synthetic construct
  source 1..21: mol_type = other RNA
  modified_base 1: mod_base = OTHER; note = 2'-O-methylcytidine-3'-phosphorothioate
  modified_base 2: mod_base = OTHER; note = 2'-O-methyluridine-3'-phosphorothioate
  modified_base 3: mod_base = OTHER; note = 2'-O-methyluridine-3'-phosphate
  modified_base 4: mod_base = OTHER; note = 2'-O-methylguanosine-3'-phosphate
  modified_base 5: mod_base = OTHER; note = 2'-O-methyladenosine-3'-phosphate
  modified_base 6: mod_base = OTHER; note = 2'-O-methylcytidine-3'-phosphate
  modified_base 7: mod_base = OTHER; note = 2'-deoxy-2'-fluorouridine-3'-phosphate
  modified_base 8: mod_base = OTHER; note = 2'-O-methyladenosine-3'-phosphate
  modified_base 9: mod_base = OTHER; note = 2'-deoxy-2'-fluoroadenosine-3'-phosphate
  modified_base 10: mod_base = OTHER; note = 2'-deoxy-2'-fluorocytidine-3'-phosphate
  modified_base 11: mod_base = OTHER; note = 2'-deoxy-2'-fluoroadenosine-3'-phosphate
  modified_base 12: mod_base = OTHER; note = 2'-O-methylcytidine-3'-phosphate
  modified_base 13: mod_base = OTHER; note = 2'-O-methylcytidine-3'-phosphate
  modified_base 14: mod_base = OTHER; note = 2'-O-methyladenosine-3'-phosphate
  modified_base 15: mod_base = OTHER; note = 2'-O-methylcytidine-3'-phosphate
  modified_base 16: mod_base = OTHER; note = 2'-O-methylcytidine-3'-phosphate
  modified_base 17: mod_base = OTHER; note = 2'-O-methyladenosine-3'-phosphate
  modified_base 18: mod_base = OTHER; note = 2'-O-methylcytidine-3'-phosphate
  modified_base 19: mod_base = OTHER; note = 2'-O-methylcytidine-3'-phosphate
  modified_base 20: mod_base = OTHER; note = 2'-O-methyladenosine-3'-phosphate
  modified_base 21: mod_base = OTHER; note = 2'-O-methyluridine-3'-phosphate ((2S,4R)-1-[29-[[2-(acetylamino)-2-deoxy-beta-D-galactopyra nosyl]oxy]-14,14-bis[[3-[[3-[[5-[[2-(acetylamino)-2-deoxy-b eta-D-galactopyranosyl]oxy]-1-oxopentyl]amino]propyl]amino] -3-oxopropoxy]methyl]-1,12,19,25-tetraoxo-16-oxa-13,20,24-t riazanonacos-1-yl]-4-hydroxy-2-pyrrolidinyl)methyl ester
cttgactaacaccaccaccat

SEQ ID NO: 805 - RNA, 21 nt, synthetic construct
  source 1..21: mol_type = other RNA
  modified_base 1: mod_base = OTHER; note = 2'-O-methylcytidine-3'-phosphorothioate
  modified_base 2: mod_base = OTHER; note = 2'-O-methyluridine-3'-phosphorothioate
  modified_base 3: mod_base = OTHER; note = 2'-O-methylguanosine-3'-phosphate
  modified_base 4: mod_base = OTHER; note = 2'-O-methyluridine-3'-phosphate
  modified_base 5: mod_base = OTHER; note = 2'-O-methylcytidine-3'-phosphate
  modified_base 6: mod_base = OTHER; note = 2'-O-methyladenosine-3'-phosphate
  modified_base 7: mod_base = OTHER; note = 2'-deoxy-2'-fluoroadenosine-3'-phosphate
  modified_base 8: mod_base = OTHER; note = 2'-O-methylcytidine-3'-phosphate
  modified_base 9: mod_base = OTHER; note = 2'-deoxy-2'-fluorocytidine-3'-phosphate
  modified_base 10: mod_base = OTHER; note = 2'-deoxy-2'-fluoroguanosine-3'-phosphate
  modified_base 11: mod_base = OTHER; note = 2'-deoxy-2'-fluoroadenosine-3'-phosphate
  modified_base 12: mod_base = OTHER; note = 2'-O-methyladenosine-3'-phosphate
  modified_base 13: mod_base = OTHER; note = 2'-O-methylguanosine-3'-phosphate
  modified_base 14: mod_base = OTHER; note = 2'-O-methyluridine-3'-phosphate
  modified_base 15: mod_base = OTHER; note = 2'-O-methylguanosine-3'-phosphate
  modified_base 16: mod_base = OTHER; note = 2'-O-methyluridine-3'-phosphate
  modified_base 17: mod_base = OTHER; note = 2'-O-methylguanosine-3'-phosphate
  modified_base 18: mod_base = OTHER; note = 2'-O-methyladenosine-3'-phosphate
  modified_base 19: mod_base = OTHER; note = 2'-O-methylguanosine-3'-phosphate
  modified_base 20: mod_base = OTHER; note = 2'-O-methyluridine-3'-phosphate
  modified_base 21: mod_base = OTHER; note = 2'-O-methyluridine-3'-phosphate ((2S,4R)-1-[29-[[2-(acetylamino)-2-deoxy-beta-D-galactopyra nosyl]oxy]-14,14-bis[[3-[[3-[[5-[[2-(acetylamino)-2-deoxy-b eta-D-galactopyranosyl]oxy]-1-oxopentyl]amino]propyl]amino] -3-oxopropoxy]methyl]-1,12,19,25-tetraoxo-16-oxa-13,20,24-t riazanonacos-1-yl]-4-hydroxy-2-pyrrolidinyl)methyl ester
ctgtcaaccgaagtgtgagtt

SEQ ID NO: 806 - RNA, 21 nt, synthetic construct
  source 1..21: mol_type = other RNA
  modified_base 1: mod_base = OTHER; note = 2'-O-methylcytidine-3'-phosphorothioate
  modified_base 2: mod_base = OTHER; note = 2'-O-methylguanosine-3'-phosphorothioate
  modified_base 3: mod_base = OTHER; note = 2'-O-methyluridine-3'-phosphate
  modified_base 4: mod_base = OTHER; note = 2'-O-methylguanosine-3'-phosphate
  modified_base 5: mod_base = OTHER; note = 2'-O-methylguanosine-3'-phosphate
  modified_base 6: mod_base = OTHER; note = 2'-O-methyladenosine-3'-phosphate
  modified_base 7: mod_base = OTHER; note = 2'-deoxy-2'-fluorocytidine-3'-phosphate
  modified_base 8: mod_base = OTHER; note = 2'-O-methyluridine-3'-phosphate
  modified_base 9: mod_base = OTHER; note = 2'-deoxy-2'-fluorouridine-3'-phosphate
  modified_base 10: mod_base = OTHER; note = 2'-deoxy-2'-fluorocytidine-3'-phosphate
  modified_base 11: mod_base = OTHER; note = 2'-deoxy-2'-fluorocytidine-3'-phosphate
  modified_base 12: mod_base = OTHER; note = 2'-O-methylcytidine-3'-phosphate
  modified_base 13: mod_base = OTHER; note = 2'-O-methyladenosine-3'-phosphate
  modified_base 14: mod_base = OTHER; note = 2'-O-methyladenosine-3'-phosphate
  modified_base 15: mod_base = OTHER; note = 2'-O-methylcytidine-3'-phosphate
  modified_base 16: mod_base = OTHER; note = 2'-O-methylcytidine-3'-phosphate
  modified_base 17: mod_base = OTHER; note = 2'-O-methyluridine-3'-phosphate
  modified_base 18: mod_base = OTHER; note = 2'-O-methylcytidine-3'-phosphate
  modified_base 19: mod_base = OTHER; note = 2'-O-methyladenosine-3'-phosphate
  modified_base 20: mod_base = OTHER; note = 2'-O-methylguanosine-3'-phosphate
  modified_base 21: mod_base = OTHER; note = 2'-O-methyluridine-3'-phosphate ((2S,4R)-1-[29-[[2-(acetylamino)-2-deoxy-beta-D-galactopyra nosyl]oxy]-14,14-bis[[3-[[3-[[5-[[2-(acetylamino)-2-deoxy-b eta-D-galactopyranosyl]oxy]-1-oxopentyl]amino]propyl]amino] -3-oxopropoxy]methyl]-1,12,19,25-tetraoxo-16-oxa-13,20,24-t riazanonacos-1-yl]-4-hydroxy-2-pyrrolidinyl)methyl ester
cgtggacttcccaacctcagt

SEQ ID NO: 807 - RNA, 21 nt, synthetic construct
  source 1..21: mol_type = other RNA
  modified_base 1: mod_base = OTHER; note = 2'-O-methyladenosine-3'-phosphorothioate
  modified_base 2: mod_base = OTHER; note = 2'-O-methylcytidine-3'-phosphorothioate
  modified_base 3: mod_base = OTHER; note = 2'-O-methyladenosine-3'-phosphate
  modified_base 4: mod_base = OTHER; note = 2'-O-methyluridine-3'-phosphate
  modified_base 5: mod_base = OTHER; note = 2'-O-methylguanosine-3'-phosphate
  modified_base 6: mod_base = OTHER; note = 2'-O-methylguanosine-3'-phosphate
  modified_base 7: mod_base = OTHER; note = 2'-deoxy-2'-fluoroadenosine-3'-phosphate
  modified_base 8: mod_base = OTHER; note = 2'-O-methyladenosine-3'-phosphate
  modified_base 9: mod_base = OTHER; note = 2'-deoxy-2'-fluoroadenosine-3'-phosphate
  modified_base 10: mod_base = OTHER; note = 2'-deoxy-2'-fluorocytidine-3'-phosphate
  modified_base 11: mod_base = OTHER; note = 2'-deoxy-2'-fluorouridine-3'-phosphate
  modified_base 12: mod_base = OTHER; note = 2'-O-methyluridine-3'-phosphate
  modified_base 13: mod_base = OTHER; note = 2'-O-methyluridine-3'-phosphate
  modified_base 14: mod_base = OTHER; note = 2'-O-methyluridine-3'-phosphate
  modified_base 15: mod_base = OTHER; note = 2'-O-methylguanosine-3'-phosphate
  modified_base 16: mod_base = OTHER; note = 2'-O-methyladenosine-3'-phosphate
  modified_base 17: mod_base = OTHER; note = 2'-O-methyladenosine-3'-phosphate
  modified_base 18: mod_base = OTHER; note = 2'-O-methyladenosine-3'-phosphate
  modified_base 19: mod_base = OTHER; note = 2'-O-methyladenosine-3'-phosphate
  modified_base 20: mod_base = OTHER; note = 2'-O-methylcytidine-3'-phosphate
  modified_base 21: mod_base = OTHER; note = 2'-O-methyluridine-3'-phosphate ((2S,4R)-1-[29-[[2-(acetylamino)-2-deoxy-beta-D-galactopyra nosyl]oxy]-14,14-bis[[3-[[3-[[5-[[2-(acetylamino)-2-deoxy-b eta-D-galactopyranosyl]oxy]-1-oxopentyl]amino]propyl]amino] -3-oxopropoxy]methyl]-1,12,19,25-tetraoxo-16-oxa-13,20,24-t riazanonacos-1-yl]-4-hydroxy-2-pyrrolidinyl)methyl ester
acatggaaacttttgaaaact

SEQ ID NO: 808 - RNA, 21 nt, synthetic construct
  source 1..21: mol_type = other RNA
  modified_base 1: mod_base = OTHER; note = 2'-O-methylguanosine-3'-phosphorothioate
  modified_base 2: mod_base = OTHER; note = 2'-O-methylcytidine-3'-phosphorothioate
  modified_base 3: mod_base = OTHER; note = 2'-O-methyladenosine-3'-phosphate
  modified_base 4: mod_base = OTHER; note = 2'-O-methylcytidine-3'-phosphate
  modified_base 5: mod_base = OTHER; note = 2'-O-methylcytidine-3'-phosphate
  modified_base 6: mod_base = OTHER; note = 2'-O-methyladenosine-3'-phosphate
  modified_base 7: mod_base = OTHER; note = 2'-deoxy-2'-fluoroadenosine-3'-phosphate
  modified_base 8: mod_base = OTHER; note = 2'-O-methyladenosine-3'-phosphate
  modified_base 9: mod_base = OTHER; note = 2'-deoxy-2'-fluoroguanosine-3'-phosphate
  modified_base 10: mod_base = OTHER; note = 2'-deoxy-2'-fluoroadenosine-3'-phosphate
  modified_base 11: mod_base = OTHER; note = 2'-deoxy-2'-fluoroguanosine-3'-phosphate
  modified_base 12: mod_base = OTHER; note = 2'-O-methylcytidine-3'-phosphate
  modified_base 13: mod_base = OTHER; note = 2'-O-methyladenosine-3'-phosphate
  modified_base 14: mod_base = OTHER; note = 2'-O-methyluridine-3'-phosphate
  modified_base 15: mod_base = OTHER; note = 2'-O-methyladenosine-3'-phosphate
  modified_base 16: mod_base = OTHER; note = 2'-O-methylguanosine-3'-phosphate
  modified_base 17: mod_base = OTHER; note = 2'-O-methyladenosine-3'-phosphate
  modified_base 18: mod_base = OTHER; note = 2'-O-methylguanosine-3'-phosphate
  modified_base 19: mod_base = OTHER; note = 2'-O-methyluridine-3'-phosphate
  modified_base 20: mod_base = OTHER; note = 2'-O-methylguanosine-3'-phosphate
  modified_base 21: mod_base = OTHER; note = 2'-O-methyluridine-3'-phosphate ((2S,4R)-1-[29-[[2-(acetylamino)-2-deoxy-beta-D-galactopyra nosyl]oxy]-14,14-bis[[3-[[3-[[5-[[2-(acetylamino)-2-deoxy-b eta-D-galactopyranosyl]oxy]-1-oxopentyl]amino]propyl]amino] -3-oxopropoxy]methyl]-1,12,19,25-tetraoxo-16-oxa-13,20,24-t riazanonacos-1-yl]-4-hydroxy-2-pyrrolidinyl)methyl ester
gcaccaaagagcatagagtgt

SEQ ID NO: 809 - RNA, 21 nt, synthetic construct
  source 1..21: mol_type = other RNA
  modified_base 1: mod_base = OTHER; note = 2'-O-methylguanosine-3'-phosphorothioate
  modified_base 2: mod_base = OTHER; note = 2'-O-methylguanosine-3'-phosphorothioate
  modified_base 3: mod_base = OTHER; note = 2'-O-methyluridine-3'-phosphate
  modified_base 4: mod_base = OTHER; note = 2'-O-methyladenosine-3'-phosphate
  modified_base 5: mod_base = OTHER; note = 2'-O-methyladenosine-3'-phosphate
  modified_base 6: mod_base = OTHER; note = 2'-O-methylguanosine-3'-phosphate
  modified_base 7: mod_base = OTHER; note = 2'-deoxy-2'-fluorocytidine-3'-phosphate
  modified_base 8: mod_base = OTHER; note = 2'-O-methyladenosine-3'-phosphate
  modified_base 9: mod_base = OTHER; note = 2'-deoxy-2'-fluorouridine-3'-phosphate
  modified_base 10: mod_base = OTHER; note = 2'-deoxy-2'-fluorocytidine-3'-phosphate
  modified_base 11: mod_base = OTHER; note = 2'-deoxy-2'-fluoroguanosine-3'-phosphate
  modified_base 12: mod_base = OTHER; note = 2'-O-methyladenosine-3'-phosphate
  modified_base 13: mod_base = OTHER; note = 2'-O-methylcytidine-3'-phosphate
  modified_base 14: mod_base = OTHER; note = 2'-O-methylcytidine-3'-phosphate
  modified_base 15: mod_base = OTHER; note = 2'-O-methyladenosine-3'-phosphate
  modified_base 16: mod_base = OTHER; note = 2'-O-methylguanosine-3'-phosphate
  modified_base 17: mod_base = OTHER; note = 2'-O-methylguanosine-3'-phosphate
  modified_base 18: mod_base = OTHER; note = 2'-O-methyluridine-3'-phosphate
  modified_base 19: mod_base = OTHER; note = 2'-O-methylcytidine-3'-phosphate
  modified_base 20: mod_base = OTHER; note = 2'-O-methylguanosine-3'-phosphate
  modified_base 21: mod_base = OTHER; note = 2'-O-methyluridine-3'-phosphate ((2S,4R)-1-[29-[[2-(acetylamino)-2-deoxy-beta-D-galactopyra nosyl]oxy]-14,14-bis[[3-[[3-[[5-[[2-(acetylamino)-2-deoxy-b eta-D-galactopyranosyl]oxy]-1-oxopentyl]amino]propyl]amino] -3-oxopropoxy]methyl]-1,12,19,25-tetraoxo-16-oxa-13,20,24-t riazanonacos-1-yl]-4-hydroxy-2-pyrrolidinyl)methyl ester
ggtaagcatcgaccaggtcgt

SEQ ID NO: 810 - RNA, 21 nt, synthetic construct
  source 1..21: mol_type = other RNA
  modified_base 1: mod_base = OTHER; note = 2'-O-methylcytidine-3'-phosphorothioate
  modified_base 2: mod_base = OTHER; note = 2'-O-methyluridine-3'-phosphorothioate
  modified_base 3: mod_base = OTHER; note = 2'-O-methylguanosine-3'-phosphate
  modified_base 4: mod_base = OTHER; note = 2'-O-methyladenosine-3'-phosphate
  modified_base 5: mod_base = OTHER; note = 2'-O-methylcytidine-3'-phosphate
  modified_base 6: mod_base = OTHER; note = 2'-O-methylcytidine-3'-phosphate
  modified_base 7: mod_base = OTHER; note = 2'-deoxy-2'-fluorouridine-3'-phosphate
  modified_base 8: mod_base = OTHER; note = 2'-O-methylguanosine-3'-phosphate
  modified_base 9: mod_base = OTHER; note = 2'-deoxy-2'-fluorocytidine-3'-phosphate
  modified_base 10: mod_base = OTHER; note = 2'-deoxy-2'-fluoroadenosine-3'-phosphate
  modified_base 11: mod_base = OTHER; note = 2'-deoxy-2'-fluoroguanosine-3'-phosphate
  modified_base 12: mod_base = OTHER; note = 2'-O-methylcytidine-3'-phosphate
  modified_base 13: mod_base = OTHER; note = 2'-O-methylcytidine-3'-phosphate
  modified_base 14: mod_base = OTHER; note = 2'-O-methyluridine-3'-phosphate
  modified_base 15: mod_base = OTHER; note = 2'-O-methylguanosine-3'-phosphate
  modified_base 16: mod_base = OTHER; note = 2'-O-methylguanosine-3'-phosphate
  modified_base 17: mod_base = OTHER; note = 2'-O-methyladenosine-3'-phosphate
  modified_base 18: mod_base = OTHER; note = 2'-O-methylguanosine-3'-phosphate
  modified_base 19: mod_base = OTHER; note = 2'-O-methyladenosine-3'-phosphate
  modified_base 20: mod_base = OTHER; note = 2'-O-methylcytidine-3'-phosphate
  modified_base 21: mod_base = OTHER; note = 2'-O-methyluridine-3'-phosphate ((2S,4R)-1-[29-[[2-(acetylamino)-2-deoxy-beta-D-galactopyra nosyl]oxy]-14,14-bis[[3-[[3-[[5-[[2-(acetylamino)-2-deoxy-b eta-D-galactopyranosyl]oxy]-1-oxopentyl]amino]propyl]amino] -3-oxopropoxy]methyl]-1,12,19,25-tetraoxo-16-oxa-13,20,24-t riazanonacos-1-yl]-4-hydroxy-2-pyrrolidinyl)methyl ester
ctgacctgcagcctggagact

SEQ ID NO: 811 - RNA, 21 nt, synthetic construct
  source 1..21: mol_type = other RNA
  modified_base 1: mod_base = OTHER; note = 2'-O-methyluridine-3'-phosphorothioate
  modified_base 2: mod_base = OTHER; note = 2'-O-methylguanosine-3'-phosphorothioate
  modified_base 3: mod_base = OTHER; note = 2'-O-methylcytidine-3'-phosphate
  modified_base 4: mod_base = OTHER; note = 2'-O-methyladenosine-3'-phosphate
  modified_base 5: mod_base = OTHER; note = 2'-O-methyladenosine-3'-phosphate
  modified_base 6: mod_base = OTHER; note = 2'-O-methylguanosine-3'-phosphate
  modified_base 7: mod_base = OTHER; note = 2'-deoxy-2'-fluoroadenosine-3'-phosphate
  modified_base 8: mod_base = OTHER; note = 2'-O-methyladenosine-3'-phosphate
  modified_base 9: mod_base = OTHER; note = 2'-deoxy-2'-fluorocytidine-3'-phosphate
  modified_base 10: mod_base = OTHER; note = 2'-deoxy-2'-fluoroguanosine-3'-phosphate
  modified_base 11: mod_base = OTHER; note = 2'-deoxy-2'-fluoroadenosine-3'-phosphate
  modified_base 12: mod_base = OTHER; note = 2'-O-methyladenosine-3'-phosphate
  modified_base 13: mod_base = OTHER; note = 2'-O-methylguanosine-3'-phosphate
  modified_base 14: mod_base = OTHER; note = 2'-O-methyladenosine-3'-phosphate
  modified_base 15: mod_base = OTHER; note = 2'-O-methylcytidine-3'-phosphate
  modified_base 16: mod_base = OTHER; note = 2'-O-methylcytidine-3'-phosphate
  modified_base 17: mod_base = OTHER; note = 2'-O-methyladenosine-3'-phosphate
  modified_base 18: mod_base = OTHER; note = 2'-O-methylguanosine-3'-phosphate
  modified_base 19: mod_base = OTHER; note = 2'-O-methyladenosine-3'-phosphate
  modified_base 20: mod_base = OTHER; note = 2'-O-methylcytidine-3'-phosphate
  modified_base 21: mod_base = OTHER; note = 2'-O-methyluridine-3'-phosphate ((2S,4R)-1-[29-[[2-(acetylamino)-2-deoxy-beta-D-galactopyra nosyl]oxy]-14,14-bis[[3-[[3-[[5-[[2-(acetylamino)-2-deoxy-b eta-D-galactopyranosyl]oxy]-1-oxopentyl]amino]propyl]amino] -3-oxopropoxy]methyl]-1,12,19,25-tetraoxo-16-oxa-13,20,24-t riazanonacos-1-yl]-4-hydroxy-2-pyrrolidinyl)methyl ester
tgcaagaacgaagaccagact

SEQ ID NO: 812 - RNA, 21 nt, synthetic construct
  source 1..21: mol_type = other RNA
  modified_base 1: mod_base = OTHER; note = 2'-O-methyluridine-3'-phosphorothioate
  modified_base 2: mod_base = OTHER; note = 2'-O-methylcytidine-3'-phosphorothioate
  modified_base 3: mod_base = OTHER; note = 2'-O-methyladenosine-3'-phosphate
  modified_base 4: mod_base = OTHER; note = 2'-O-methyladenosine-3'-phosphate
  modified_base 5: mod_base = OTHER; note = 2'-O-methylcytidine-3'-phosphate
  modified_base 6: mod_base = OTHER; note = 2'-O-methyladenosine-3'-phosphate
  modified_base 7: mod_base = OTHER; note = 2'-deoxy-2'-fluorouridine-3'-phosphate
  modified_base 8: mod_base = OTHER; note = 2'-O-methylguanosine-3'-phosphate
  modified_base 9: mod_base = OTHER; note = 2'-deoxy-2'-fluorouridine-3'-phosphate
  modified_base 10: mod_base = OTHER; note = 2'-deoxy-2'-fluoroguanosine-3'-phosphate
  modified_base 11: mod_base = OTHER; note = 2'-deoxy-2'-fluorocytidine-3'-phosphate
  modified_base 12: mod_base = OTHER; note = 2'-O-methyluridine-3'-phosphate
  modified_base 13: mod_base = OTHER; note = 2'-O-methyluridine-3'-phosphate
  modified_base 14: mod_base = OTHER; note = 2'-O-methylcytidine-3'-phosphate
  modified_base 15: mod_base = OTHER; note = 2'-O-methyladenosine-3'-phosphate
  modified_base 16: mod_base = OTHER; note = 2'-O-methyladenosine-3'-phosphate
  modified_base 17: mod_base = OTHER; note = 2'-O-methylcytidine-3'-phosphate
  modified_base 18: mod_base = OTHER; note = 2'-O-methyluridine-3'-phosphate
  modified_base 19: mod_base = OTHER; note = 2'-O-methyladenosine-3'-phosphate
  modified_base 20: mod_base = OTHER; note = 2'-O-methylcytidine-3'-phosphate
  modified_base 21: mod_base = OTHER; note = 2'-O-methyluridine-3'-phosphate ((2S,4R)-1-[29-[[2-(acetylamino)-2-deoxy-beta-D-galactopyra nosyl]oxy]-14,14-bis[[3-[[3-[[5-[[2-(acetylamino)-2-deoxy-b eta-D-galactopyranosyl]oxy]-1-oxopentyl]amino]propyl]amino] -3-oxopropoxy]methyl]-1,12,19,25-tetraoxo-16-oxa-13,20,24-t riazanonacos-1-yl]-4-hydroxy-2-pyrrolidinyl)methyl ester
tcaacatgtgcttcaactact

SEQ ID NO: 813 - RNA, 21 nt, synthetic construct
  source 1..21: mol_type = other RNA
  modified_base 1: mod_base = OTHER; note = 2'-O-methyluridine-3'-phosphorothioate
  modified_base 2: mod_base = OTHER; note = 2'-O-methylguanosine-3'-phosphorothioate
  modified_base 3: mod_base = OTHER; note = 2'-O-methylcytidine-3'-phosphate
  modified_base 4: mod_base = OTHER; note = 2'-O-methylguanosine-3'-phosphate
  modified_base 5: mod_base = OTHER; note = 2'-O-methyluridine-3'-phosphate
  modified_base 6: mod_base = OTHER; note = 2'-O-methylguanosine-3'-phosphate
  modified_base 7: mod_base = OTHER; note = 2'-deoxy-2'-fluorouridine-3'-phosphate
  modified_base 8: mod_base = OTHER; note = 2'-O-methylguanosine-3'-phosphate
  modified_base 9: mod_base = OTHER; note = 2'-deoxy-2'-fluorocytidine-3'-phosphate
  modified_base 10: mod_base = OTHER; note = 2'-deoxy-2'-fluorouridine-3'-phosphate
  modified_base 11: mod_base = OTHER; note = 2'-deoxy-2'-fluorouridine-3'-phosphate
  modified_base 12: mod_base = OTHER; note = 2'-O-methyluridine-3'-phosphate
  modified_base 13: mod_base = OTHER; note = 2'-O-methylguanosine-3'-phosphate
  modified_base 14: mod_base = OTHER; note = 2'-O-methylcytidine-3'-phosphate
  modified_base 15: mod_base = OTHER; note = 2'-O-methyluridine-3'-phosphate
  modified_base 16: mod_base = OTHER; note = 2'-O-methylguanosine-3'-phosphate
  modified_base 17: mod_base = OTHER; note = 2'-O-methyluridine-3'-phosphate
  modified_base 18: mod_base = OTHER; note = 2'-O-methylguanosine-3'-phosphate
  modified_base 19: mod_base = OTHER; note = 2'-O-methyladenosine-3'-phosphate
  modified_base 20: mod_base = OTHER; note = 2'-O-methylcytidine-3'-phosphate
  modified_base 21: mod_base = OTHER; note = 2'-O-methyluridine-3'-phosphate ((2S,4R)-1-[29-[[2-(acetylamino)-2-deoxy-beta-D-galactopyra nosyl]oxy]-14,14-bis[[3-[[3-[[5-[[2-(acetylamino)-2-deoxy-b eta-D-galactopyranosyl]oxy]-1-oxopentyl]amino]propyl]amino] -3-oxopropoxy]methyl]-1,12,19,25-tetraoxo-16-oxa-13,20,24-t riazanonacos-1-yl]-4-hydroxy-2-pyrrolidinyl)methyl ester
tgcgtgtgctttgctgtgact

SEQ ID NO: 814 - RNA, 21 nt, synthetic construct
  source 1..21: mol_type = other RNA
  modified_base 1: mod_base = OTHER; note = 2'-O-methylcytidine-3'-phosphorothioate
  modified_base 2: mod_base = OTHER; note = 2'-O-methyluridine-3'-phosphorothioate
  modified_base 3: mod_base = OTHER; note = 2'-O-methylcytidine-3'-phosphate
  modified_base 4: mod_base = OTHER; note = 2'-O-methylcytidine-3'-phosphate
  modified_base 5: mod_base = OTHER; note = 2'-O-methyladenosine-3'-phosphate
  modified_base 6: mod_base = OTHER; note = 2'-O-methylcytidine-3'-phosphate
  modified_base 7: mod_base = OTHER; note = 2'-deoxy-2'-fluorocytidine-3'-phosphate
  modified_base 8: mod_base = OTHER; note = 2'-O-methylcytidine-3'-phosphate
  modified_base 9: mod_base = OTHER; note = 2'-deoxy-2'-fluorouridine-3'-phosphate
  modified_base 10: mod_base = OTHER; note = 2'-deoxy-2'-fluoroguanosine-3'-phosphate
  modified_base 11: mod_base = OTHER; note = 2'-deoxy-2'-fluoroadenosine-3'-phosphate
  modified_base 12: mod_base = OTHER; note = 2'-O-methylguanosine-3'-phosphate
  modified_base 13: mod_base = OTHER; note = 2'-O-methyladenosine-3'-phosphate
  modified_base 14: mod_base = OTHER; note = 2'-O-methyladenosine-3'-phosphate
  modified_base 15: mod_base = OTHER; note = 2'-O-methylcytidine-3'-phosphate
  modified_base 16: mod_base = OTHER; note = 2'-O-methyladenosine-3'-phosphate
  modified_base 17: mod_base = OTHER; note = 2'-O-methylguanosine-3'-phosphate
  modified_base 18: mod_base = OTHER; note = 2'-O-methylcytidine-3'-phosphate
  modified_base 19: mod_base = OTHER; note = 2'-O-methyluridine-3'-phosphate
  modified_base 20: mod_base = OTHER; note = 2'-O-methylcytidine-3'-phosphate
  modified_base 21: mod_base = OTHER; note = 2'-O-methyluridine-3'-phosphate ((2S,4R)-1-[29-[[2-(acetylamino)-2-deoxy-beta-D-galactopyra nosyl]oxy]-14,14-bis[[3-[[3-[[5-[[2-(acetylamino)-2-deoxy-b eta-D-galactopyranosyl]oxy]-1-oxopentyl]amino]propyl]amino] -3-oxopropoxy]methyl]-1,12,19,25-tetraoxo-16-oxa-13,20,24-t riazanonacos-1-yl]-4-hydroxy-2-pyrrolidinyl)methyl ester
ctccaccctgagaacagctct

SEQ ID NO: 815 - RNA, 21 nt, synthetic construct
  source 1..21: mol_type = other RNA
  modified_base 1: mod_base = OTHER; note = 2'-O-methyluridine-3'-phosphorothioate
  modified_base 2: mod_base = OTHER; note = 2'-O-methylcytidine-3'-phosphorothioate
  modified_base 3: mod_base = OTHER; note = 2'-O-methylcytidine-3'-phosphate
  modified_base 4: mod_base = OTHER; note = 2'-O-methylcytidine-3'-phosphate
  modified_base 5: mod_base = OTHER; note = 2'-O-methyladenosine-3'-phosphate
  modified_base 6: mod_base = OTHER; note = 2'-O-methyladenosine-3'-phosphate
  modified_base 7: mod_base = OTHER; note = 2'-deoxy-2'-fluoroadenosine-3'-phosphate
  modified_base 8: mod_base = OTHER; note = 2'-O-methylguanosine-3'-phosphate
  modified_base 9: mod_base = OTHER; note = 2'-deoxy-2'-fluorouridine-3'-phosphate
  modified_base 10: mod_base = OTHER; note = 2'-deoxy-2'-fluoroguanosine-3'-phosphate
  modified_base 11: mod_base = OTHER; note = 2'-deoxy-2'-fluorocytidine-3'-phosphate
  modified_base 12: mod_base = OTHER; note = 2'-O-methyluridine-3'-phosphate
  modified_base 13: mod_base = OTHER; note = 2'-O-methylguanosine-3'-phosphate
  modified_base 14: mod_base = OTHER; note = 2'-O-methyladenosine-3'-phosphate
  modified_base 15: mod_base = OTHER; note = 2'-O-methylcytidine-3'-phosphate
  modified_base 16: mod_base = OTHER; note = 2'-O-methylcytidine-3'-phosphate
  modified_base 17: mod_base = OTHER; note = 2'-O-methyladenosine-3'-phosphate
  modified_base 18: mod_base = OTHER; note = 2'-O-methylcytidine-3'-phosphate
  modified_base 19: mod_base = OTHER; note = 2'-O-methylcytidine-3'-phosphate
  modified_base 20: mod_base = OTHER; note = 2'-O-methyladenosine-3'-phosphate
  modified_base 21: mod_base = OTHER; note = 2'-O-methyluridine-3'-phosphate ((2S,4R)-1-[29-[[2-(acetylamino)-2-deoxy-beta-D-galactopyra nosyl]oxy]-14,14-bis[[3-[[3-[[5-[[2-(acetylamino)-2-deoxy-b eta-D-galactopyranosyl]oxy]-1-oxopentyl]amino]propyl]amino] -3-oxopropoxy]methyl]-1,12,19,25-tetraoxo-16-oxa-13,20,24-t riazanonacos-1-yl]-4-hydroxy-2-pyrrolidinyl)methyl ester
tcccaaagtgctgaccaccat

SEQ ID NO: 816 - RNA, 21 nt, synthetic construct
  source 1..21: mol_type = other RNA
  modified_base 1: mod_base = OTHER; note = 2'-O-methyluridine-3'-phosphorothioate
  modified_base 2: mod_base = OTHER; note = 2'-O-methyluridine-3'-phosphorothioate
  modified_base 3: mod_base = OTHER; note = 2'-O-methylcytidine-3'-phosphate
  modified_base 4: mod_base = OTHER; note = 2'-O-methylcytidine-3'-phosphate
  modified_base 5: mod_base = OTHER; note = 2'-O-methyluridine-3'-phosphate
  modified_base 6: mod_base = OTHER; note = 2'-O-methylcytidine-3'-phosphate
  modified_base 7: mod_base = OTHER; note = 2'-deoxy-2'-fluorocytidine-3'-phosphate
  modified_base 8: mod_base = OTHER; note = 2'-O-methylcytidine-3'-phosphate
  modified_base 9: mod_base = OTHER; note = 2'-deoxy-2'-fluorouridine-3'-phosphate
  modified_base 10: mod_base = OTHER; note = 2'-deoxy-2'-fluoroguanosine-3'-phosphate
  modified_base 11: mod_base = OTHER; note = 2'-deoxy-2'-fluoroguanosine-3'-phosphate
  modified_base 12: mod_base = OTHER; note = 2'-O-methylguanosine-3'-phosphate
  modified_base 13: mod_base = OTHER; note = 2'-O-methylcytidine-3'-phosphate
  modified_base 14: mod_base = OTHER; note = 2'-O-methyladenosine-3'-phosphate
  modified_base 15: mod_base = OTHER; note = 2'-O-methylcytidine-3'-phosphate
  modified_base 16: mod_base = OTHER; note = 2'-O-methylcytidine-3'-phosphate
  modified_base 17: mod_base = OTHER; note = 2'-O-methyladenosine-3'-phosphate
  modified_base 18: mod_base = OTHER; note = 2'-O-methylcytidine-3'-phosphate
  modified_base 19: mod_base = OTHER; note = 2'-O-methylcytidine-3'-phosphate
  modified_base 20: mod_base = OTHER; note = 2'-O-methyluridine-3'-phosphate
  modified_base 21: mod_base = OTHER; note = 2'-O-methyluridine-3'-phosphate ((2S,4R)-1-[29-[[2-(acetylamino)-2-deoxy-beta-D-galactopyra nosyl]oxy]-14,14-bis[[3-[[3-[[5-[[2-(acetylamino)-2-deoxy-b eta-D-galactopyranosyl]oxy]-1-oxopentyl]amino]propyl]amino] -3-oxopropoxy]methyl]-1,12,19,25-tetraoxo-16-oxa-13,20,24-t riazanonacos-1-yl]-4-hydroxy-2-pyrrolidinyl)methyl ester
ttcctccctgggcaccacctt

SEQ ID NO: 817 - RNA, 21 nt, synthetic construct
  source 1..21: mol_type = other RNA
  modified_base 1: mod_base = OTHER; note = 2'-O-methyluridine-3'-phosphorothioate
  modified_base 2: mod_base = OTHER; note = 2'-O-methylguanosine-3'-phosphorothioate
  modified_base 3: mod_base = OTHER; note = 2'-O-methylcytidine-3'-phosphate
  modified_base 4: mod_base = OTHER; note = 2'-O-methylcytidine-3'-phosphate
  modified_base 5: mod_base = OTHER; note = 2'-O-methyladenosine-3'-phosphate
  modified_base 6: mod_base = OTHER; note = 2'-O-methyladenosine-3'-phosphate
  modified_base 7: mod_base = OTHER; note = 2'-deoxy-2'-fluorocytidine-3'-phosphate
  modified_base 8: mod_base = OTHER; note = 2'-O-methyluridine-3'-phosphate
  modified_base 9: mod_base = OTHER; note = 2'-deoxy-2'-fluoroadenosine-3'-phosphate
  modified_base 10: mod_base = OTHER; note = 2'-deoxy-2'-fluorocytidine-3'-phosphate
  modified_base 11: mod_base = OTHER; note = 2'-deoxy-2'-fluorocytidine-3'-phosphate
  modified_base 12: mod_base = OTHER; note = 2'-O-methyladenosine-3'-phosphate
  modified_base 13: mod_base = OTHER; note = 2'-O-methylcytidine-3'-phosphate
  modified_base 14: mod_base = OTHER; note = 2'-O-methyladenosine-3'-phosphate
  modified_base 15: mod_base = OTHER; note = 2'-O-methyladenosine-3'-phosphate
  modified_base 16: mod_base = OTHER; note = 2'-O-methylcytidine-3'-phosphate
  modified_base 17: mod_base = OTHER; note = 2'-O-methylcytidine-3'-phosphate
  modified_base 18: mod_base = OTHER; note = 2'-O-methyladenosine-3'-phosphate
  modified_base 19: mod_base = OTHER; note = 2'-O-methylcytidine-3'-phosphate
  modified_base 20: mod_base = OTHER; note = 2'-O-methylguanosine-3'-phosphate
  modified_base 21: mod_base = OTHER; note = 2'-O-methyluridine-3'-phosphate ((2S,4R)-1-[29-[[2-(acetylamino)-2-deoxy-beta-D-galactopyra nosyl]oxy]-14,14-bis[[3-[[3-[[5-[[2-(acetylamino)-2-deoxy-b eta-D-galactopyranosyl]oxy]-1-oxopentyl]amino]propyl]amino] -3-oxopropoxy]methyl]-1,12,19,25-tetraoxo-16-oxa-13,20,24-t riazanonacos-1-yl]-4-hydroxy-2-pyrrolidinyl)methyl ester
tgccaactaccacaaccacgt

SEQ ID NO: 818 - RNA, 21 nt, synthetic construct
  source 1..21: mol_type = other RNA
  modified_base 1: mod_base = OTHER; note = 2'-O-methylcytidine-3'-phosphorothioate
  modified_base 2: mod_base = OTHER; note = 2'-O-methyladenosine-3'-phosphorothioate
  modified_base 3: mod_base = OTHER; note = 2'-O-methylcytidine-3'-phosphate
  modified_base 4: mod_base = OTHER; note = 2'-O-methyladenosine-3'-phosphate
  modified_base 5: mod_base = OTHER; note = 2'-O-methylcytidine-3'-phosphate
  modified_base 6: mod_base = OTHER; note = 2'-O-methylcytidine-3'-phosphate
  modified_base 7: mod_base = OTHER; note = 2'-deoxy-2'-fluorocytidine-3'-phosphate
  modified_base 8: mod_base = OTHER; note = 2'-O-methyladenosine-3'-phosphate
  modified_base 9: mod_base = OTHER; note = 2'-deoxy-2'-fluorocytidine-3'-phosphate
  modified_base 10: mod_base = OTHER; note = 2'-deoxy-2'-fluoroadenosine-3'-phosphate
  modified_base 11: mod_base = OTHER; note = 2'-deoxy-2'-fluoroadenosine-3'-phosphate
  modified_base 12: mod_base = OTHER; note = 2'-O-methylcytidine-3'-phosphate
  modified_base 13: mod_base = OTHER; note = 2'-O-methylcytidine-3'-phosphate
  modified_base 14: mod_base = OTHER; note = 2'-O-methyladenosine-3'-phosphate
  modified_base 15: mod_base = OTHER; note = 2'-O-methylguanosine-3'-phosphate
  modified_base 16: mod_base = OTHER; note = 2'-O-methyladenosine-3'-phosphate
  modified_base 17: mod_base = OTHER; note = 2'-O-methylguanosine-3'-phosphate
  modified_base 18: mod_base = OTHER; note = 2'-O-methylguanosine-3'-phosphate
  modified_base 19: mod_base = OTHER; note = 2'-O-methylcytidine-3'-phosphate
  modified_base 20: mod_base = OTHER; note = 2'-O-methyluridine-3'-phosphate
  modified_base 21: mod_base = OTHER; note = 2'-O-methyluridine-3'-phosphate ((2S,4R)-1-[29-[[2-(acetylamino)-2-deoxy-beta-D-galactopyra nosyl]oxy]-14,14-bis[[3-[[3-[[5-[[2-(acetylamino)-2-deoxy-b eta-D-galactopyranosyl]oxy]-1-oxopentyl]amino]propyl]amino] -3-oxopropoxy]methyl]-1,12,19,25-tetraoxo-16-oxa-13,20,24-t riazanonacos-1-yl]-4-hydroxy-2-pyrrolidinyl)methyl ester
cacacccacaaccagaggctt

SEQ ID NO: 819 - RNA, 21 nt, synthetic construct
  source 1..21: mol_type = other RNA
  modified_base 1: mod_base = OTHER; note = 2'-O-methylguanosine-3'-phosphorothioate
  modified_base 2: mod_base = OTHER; note = 2'-O-methyladenosine-3'-phosphorothioate
  modified_base 3: mod_base = OTHER; note = 2'-O-methylcytidine-3'-phosphate
  modified_base 4: mod_base = OTHER; note = 2'-O-methylcytidine-3'-phosphate
  modified_base 5: mod_base = OTHER; note = 2'-O-methyluridine-3'-phosphate
  modified_base 6: mod_base = OTHER; note = 2'-O-methylguanosine-3'-phosphate
  modified_base 7: mod_base = OTHER; note = 2'-deoxy-2'-fluoroguanosine-3'-phosphate
  modified_base 8: mod_base = OTHER; note = 2'-O-methyladenosine-3'-phosphate
  modified_base 9: mod_base = OTHER; note = 2'-deoxy-2'-fluorouridine-3'-phosphate
  modified_base 10: mod_base = OTHER; note = 2'-deoxy-2'-fluorocytidine-3'-phosphate
  modified_base 11: mod_base = OTHER; note = 2'-deoxy-2'-fluorocytidine-3'-phosphate
  modified_base 12: mod_base = OTHER; note = 2'-O-methyluridine-3'-phosphate
  modified_base 13: mod_base = OTHER; note = 2'-O-methylcytidine-3'-phosphate
  modified_base 14: mod_base = OTHER; note = 2'-O-methyladenosine-3'-phosphate
  modified_base 15: mod_base = OTHER; note = 2'-O-methylcytidine-3'-phosphate
  modified_base 16: mod_base = OTHER; note = 2'-O-methyladenosine-3'-phosphate
  modified_base 17: mod_base = OTHER; note = 2'-O-methyladenosine-3'-phosphate
  modified_base 18: mod_base = OTHER; note = 2'-O-methyladenosine-3'-phosphate
  modified_base 19: mod_base = OTHER; note = 2'-O-methylguanosine-3'-phosphate
  modified_base 20: mod_base = OTHER; note = 2'-O-methylcytidine-3'-phosphate
  modified_base 21: mod_base = OTHER; note = 2'-O-methyluridine-3'-phosphate ((2S,4R)-1-[29-[[2-(acetylamino)-2-deoxy-beta-D-galactopyra nosyl]oxy]-14,14-bis[[3-[[3-[[5-[[2-(acetylamino)-2-deoxy-b eta-D-galactopyranosyl]oxy]-1-oxopentyl]amino]propyl]amino] -3-oxopropoxy]methyl]-1,12,19,25-tetraoxo-16-oxa-13,20,24-t riazanonacos-1-yl]-4-hydroxy-2-pyrrolidinyl)methyl ester
gacctggatcctcacaaagct

SEQ ID NO: 820 - RNA, 21 nt, synthetic construct
  source 1..21: mol_type = other RNA
  modified_base 1: mod_base = OTHER; note = 2'-O-methylcytidine-3'-phosphorothioate
  modified_base 2: mod_base = OTHER; note = 2'-O-methyluridine-3'-phosphorothioate
  modified_base 3: mod_base = OTHER; note = 2'-O-methyladenosine-3'-phosphate
  modified_base 4: mod_base = OTHER; note = 2'-O-methylcytidine-3'-phosphate
  modified_base 5: mod_base = OTHER; note = 2'-O-methylcytidine-3'-phosphate
  modified_base 6: mod_base = OTHER; note = 2'-O-methyladenosine-3'-phosphate
  modified_base 7: mod_base = OTHER; note = 2'-deoxy-2'-fluoroguanosine-3'-phosphate
  modified_base 8: mod_base = OTHER; note = 2'-O-methylcytidine-3'-phosphate
  modified_base 9: mod_base = OTHER; note = 2'-deoxy-2'-fluoroguanosine-3'-phosphate
  modified_base 10: mod_base = OTHER; note = 2'-deoxy-2'-fluorouridine-3'-phosphate
  modified_base 11: mod_base = OTHER; note = 2'-deoxy-2'-fluorouridine-3'-phosphate
  modified_base 12: mod_base = OTHER; note = 2'-O-methyladenosine-3'-phosphate
  modified_base 13: mod_base = OTHER; note = 2'-O-methylcytidine-3'-phosphate
  modified_base 14: mod_base = OTHER; note = 2'-O-methyladenosine-3'-phosphate
  modified_base 15: mod_base = OTHER; note = 2'-O-methylcytidine-3'-phosphate
  modified_base 16: mod_base = OTHER; note = 2'-O-methylcytidine-3'-phosphate
  modified_base 17: mod_base = OTHER; note = 2'-O-methylcytidine-3'-phosphate
  modified_base 18: mod_base = OTHER; note = 2'-O-methyladenosine-3'-phosphate
  modified_base 19: mod_base = OTHER; note = 2'-O-methyluridine-3'-phosphate
  modified_base 20: mod_base = OTHER; note = 2'-O-methylcytidine-3'-phosphate
  modified_base 21: mod_base = OTHER; note = 2'-O-methyluridine-3'-phosphate ((2S,4R)-1-[29-[[2-(acetylamino)-2-deoxy-beta-D-galactopyra nosyl]oxy]-14,14-bis[[3-[[3-[[5-[[2-(acetylamino)-2-deoxy-b eta-D-galactopyranosyl]oxy]-1-oxopentyl]amino]propyl]amino] -3-oxopropoxy]methyl]-1,12,19,25-tetraoxo-16-oxa-13,20,24-t riazanonacos-1-yl]-4-hydroxy-2-pyrrolidinyl)methyl ester
ctaccagcgttacacccatct

SEQ ID NO: 821 - RNA, 21 nt, synthetic construct
  source 1..21: mol_type = other RNA
  modified_base 1: mod_base = OTHER; note = 2'-O-methylcytidine-3'-phosphorothioate
  modified_base 2: mod_base = OTHER; note = 2'-O-methylcytidine-3'-phosphorothioate
  modified_base 3: mod_base = OTHER; note = 2'-O-methyladenosine-3'-phosphate
  modified_base 4: mod_base = OTHER; note = 2'-O-methylcytidine-3'-phosphate
  modified_base 5: mod_base = OTHER; note = 2'-O-methyladenosine-3'-phosphate
  modified_base 6: mod_base = OTHER; note = 2'-O-methyladenosine-3'-phosphate
  modified_base 7: mod_base = OTHER; note = 2'-deoxy-2'-fluorocytidine-3'-phosphate
  modified_base 8: mod_base = OTHER; note = 2'-O-methyladenosine-3'-phosphate
  modified_base 9: mod_base = OTHER; note = 2'-deoxy-2'-fluoroguanosine-3'-phosphate
  modified_base 10: mod_base = OTHER; note = 2'-deoxy-2'-fluorocytidine-3'-phosphate
  modified_base 11: mod_base = OTHER; note = 2'-deoxy-2'-fluorocytidine-3'-phosphate
  modified_base 12: mod_base = OTHER; note = 2'-O-methyladenosine-3'-phosphate
  modified_base 13: mod_base = OTHER; note = 2'-O-methylcytidine-3'-phosphate
  modified_base 14: mod_base = OTHER; note = 2'-O-methyluridine-3'-phosphate
  modified_base 15: mod_base = OTHER; note = 2'-O-methyladenosine-3'-phosphate
  modified_base 16: mod_base = OTHER; note = 2'-O-methylcytidine-3'-phosphate
  modified_base 17: mod_base = OTHER; note = 2'-O-methylguanosine-3'-phosphate
  modified_base 18: mod_base = OTHER; note = 2'-O-methyladenosine-3'-phosphate
  modified_base 19: mod_base = OTHER; note = 2'-O-methylcytidine-3'-phosphate
  modified_base 20: mod_base = OTHER; note = 2'-O-methyluridine-3'-phosphate
  modified_base 21: mod_base = OTHER; note = 2'-O-methyluridine-3'-phosphate ((2S,4R)-1-[29-[[2-(acetylamino)-2-deoxy-beta-D-galactopyra nosyl]oxy]-14,14-bis[[3-[[3-[[5-[[2-(acetylamino)-2-deoxy-b eta-D-galactopyranosyl]oxy]-1-oxopentyl]amino]propyl]amino] -3-oxopropoxy]methyl]-1,12,19,25-tetraoxo-16-oxa-13,20,24-t riazanonacos-1-yl]-4-hydroxy-2-pyrrolidinyl)methyl ester
ccacaacagccactacgactt

SEQ ID NO: 822 - RNA, 21 nt, synthetic construct
  source 1..21: mol_type = other RNA
  modified_base 1: mod_base = OTHER; note = 2'-O-methylcytidine-3'-phosphorothioate
  modified_base 2: mod_base = OTHER; note = 2'-O-methyladenosine-3'-phosphorothioate
  modified_base 3: mod_base = OTHER; note = 2'-O-methylguanosine-3'-phosphate
  modified_base 4: mod_base = OTHER; note = 2'-O-methylcytidine-3'-phosphate
  modified_base 5: mod_base = OTHER; note = 2'-O-methyluridine-3'-phosphate
  modified_base 6: mod_base = OTHER; note = 2'-O-methylcytidine-3'-phosphate
  modified_base 7: mod_base = OTHER; note = 2'-deoxy-2'-fluorocytidine-3'-phosphate
  modified_base 8: mod_base = OTHER; note = 2'-O-methyladenosine-3'-phosphate
  modified_base 9: mod_base = OTHER; note = 2'-deoxy-2'-fluoroadenosine-3'-phosphate
  modified_base 10: mod_base = OTHER; note = 2'-deoxy-2'-fluoroadenosine-3'-phosphate
  modified_base 11: mod_base = OTHER; note = 2'-deoxy-2'-fluoroguanosine-3'-phosphate
  modified_base 12: mod_base = OTHER; note = 2'-O-methylcytidine-3'-phosphate
  modified_base 13: mod_base = OTHER; note = 2'-O-methylcytidine-3'-phosphate
  modified_base 14: mod_base = OTHER; note = 2'-O-methyladenosine-3'-phosphate
  modified_base 15: mod_base = OTHER; note = 2'-O-methylcytidine-3'-phosphate
  modified_base 16: mod_base = OTHER; note = 2'-O-methyluridine-3'-phosphate
  modified_base 17: mod_base = OTHER; note = 2'-O-methylcytidine-3'-phosphate
  modified_base 18: mod_base = OTHER; note = 2'-O-methylcytidine-3'-phosphate
  modified_base 19: mod_base = OTHER; note = 2'-O-methylcytidine-3'-phosphate
  modified_base 20: mod_base = OTHER; note = 2'-O-methyluridine-3'-phosphate
  modified_base 21: mod_base = OTHER; note = 2'-O-methyluridine-3'-phosphate ((2S,4R)-1-[29-[[2-(acetylamino)-2-deoxy-beta-D-galactopyra nosyl]oxy]-14,14-bis[[3-[[3-[[5-[[2-(acetylamino)-2-deoxy-b eta-D-galactopyranosyl]oxy]-1-oxopentyl]amino]propyl]amino] -3-oxopropoxy]methyl]-1,12,19,25-tetraoxo-16-oxa-13,20,24-t riazanonacos-1-yl]-4-hydroxy-2-pyrrolidinyl)methyl ester
cagctccaaagccactccctt

SEQ ID NO: 823 - RNA, 21 nt, synthetic construct
  source 1..21: mol_type = other RNA
  modified_base 1: mod_base = OTHER; note = 2'-O-methylguanosine-3'-phosphorothioate
  modified_base 2: mod_base = OTHER; note = 2'-O-methylcytidine-3'-phosphorothioate
  modified_base 3: mod_base = OTHER; note = 2'-O-methylcytidine-3'-phosphate
  modified_base 4: mod_base = OTHER; note = 2'-O-methylcytidine-3'-phosphate
  modified_base 5: mod_base = OTHER; note = 2'-O-methyluridine-3'-phosphate
  modified_base 6: mod_base = OTHER; note = 2'-O-methyluridine-3'-phosphate
  modified_base 7: mod_base = OTHER; note = 2'-deoxy-2'-fluorocytidine-3'-phosphate
  modified_base 8: mod_base = OTHER; note = 2'-O-methylcytidine-3'-phosphate
  modified_base 9: mod_base = OTHER; note = 2'-deoxy-2'-fluoroadenosine-3'-phosphate
  modified_base 10: mod_base = OTHER; note = 2'-deoxy-2'-fluoroguanosine-3'-phosphate
  modified_base 11: mod_base = OTHER; note = 2'-deoxy-2'-fluorocytidine-3'-phosphate
  modified_base 12: mod_base = OTHER; note = 2'-O-methyladenosine-3'-phosphate
  modified_base 13: mod_base = OTHER; note = 2'-O-methylcytidine-3'-phosphate
  modified_base 14: mod_base = OTHER; note = 2'-O-methyluridine-3'-phosphate
  modified_base 15: mod_base = OTHER; note = 2'-O-methylguanosine-3'-phosphate
  modified_base 16: mod_base = OTHER; note = 2'-O-methyladenosine-3'-phosphate
  modified_base 17: mod_base = OTHER; note = 2'-O-methylguanosine-3'-phosphate
  modified_base 18: mod_base = OTHER; note = 2'-O-methyladenosine-3'-phosphate
  modified_base 19: mod_base = OTHER; note = 2'-O-methyladenosine-3'-phosphate
  modified_base 20: mod_base = OTHER; note = 2'-O-methylguanosine-3'-phosphate
  modified_base 21: mod_base = OTHER; note = 2'-O-methyluridine-3'-phosphate ((2S,4R)-1-[29-[[2-(acetylamino)-2-deoxy-beta-D-galactopyra nosyl]oxy]-14,14-bis[[3-[[3-[[5-[[2-(acetylamino)-2-deoxy-b eta-D-galactopyranosyl]oxy]-1-oxopentyl]amino]propyl]amino] -3-oxopropoxy]methyl]-1,12,19,25-tetraoxo-16-oxa-13,20,24-t riazanonacos-1-yl]-4-hydroxy-2-pyrrolidinyl)methyl ester
gcccttccagcactgagaagt

SEQ ID NO: 824 - RNA, 21 nt, synthetic construct
  source 1..21: mol_type = other RNA
  modified_base 1: mod_base = OTHER; note = 2'-O-methylcytidine-3'-phosphorothioate
  modified_base 2: mod_base = OTHER; note = 2'-O-methylcytidine-3'-phosphorothioate
  modified_base 3: mod_base = OTHER; note = 2'-O-methyluridine-3'-phosphate
  modified_base 4: mod_base = OTHER; note = 2'-O-methyladenosine-3'-phosphate
  modified_base 5: mod_base = OTHER; note = 2'-O-methyluridine-3'-phosphate
  modified_base 6: mod_base = OTHER; note = 2'-O-methylcytidine-3'-phosphate
  modified_base 7: mod_base = OTHER; note = 2'-deoxy-2'-fluoroadenosine-3'-phosphate
  modified_base 8: mod_base = OTHER; note = 2'-O-methylcytidine-3'-phosphate
  modified_base 9: mod_base = OTHER; note = 2'-deoxy-2'-fluoroadenosine-3'-phosphate
  modified_base 10: mod_base = OTHER; note = 2'-deoxy-2'-fluoroguanosine-3'-phosphate
  modified_base 11: mod_base = OTHER; note = 2'-deoxy-2'-fluoroadenosine-3'-phosphate
  modified_base 12: mod_base = OTHER; note = 2'-O-methylcytidine-3'-phosphate
  modified_base 13: mod_base = OTHER; note = 2'-O-methylcytidine-3'-phosphate
  modified_base 14: mod_base = OTHER; note = 2'-O-methyladenosine-3'-phosphate
  modified_base 15: mod_base = OTHER; note = 2'-O-methylcytidine-3'-phosphate
  modified_base 16: mod_base = OTHER; note = 2'-O-methylcytidine-3'-phosphate
  modified_base 17: mod_base = OTHER; note = 2'-O-methyladenosine-3'-phosphate
  modified_base 18: mod_base = OTHER; note = 2'-O-methylcytidine-3'-phosphate
  modified_base 19: mod_base = OTHER; note = 2'-O-methyladenosine-3'-phosphate
  modified_base 20: mod_base = OTHER; note = 2'-O-methylcytidine-3'-phosphate
  modified_base 21: mod_base = OTHER; note = 2'-O-methyluridine-3'-phosphate ((2S,4R)-1-[29-[[2-(acetylamino)-2-deoxy-beta-D-galactopyra nosyl]oxy]-14,14-bis[[3-[[3-[[5-[[2-(acetylamino)-2-deoxy-b eta-D-galactopyranosyl]oxy]-1-oxopentyl]amino]propyl]amino] -3-oxopropoxy]methyl]-1,12,19,25-tetraoxo-16-oxa-13,20,24-t riazanonacos-1-yl]-4-hydroxy-2-pyrrolidinyl)methyl ester
cctatcacagaccaccacact

SEQ ID NO: 825 - RNA, 21 nt, synthetic construct
  source 1..21: mol_type = other RNA
  modified_base 1: mod_base = OTHER; note = 2'-O-methylguanosine-3'-phosphorothioate
  modified_base 2: mod_base = OTHER; note = 2'-O-methylguanosine-3'-phosphorothioate
  modified_base 3: mod_base = OTHER; note = 2'-O-methylcytidine-3'-phosphate
  modified_base 4: mod_base = OTHER; note = 2'-O-methylcytidine-3'-phosphate
  modified_base 5: mod_base = OTHER; note = 2'-O-methyladenosine-3'-phosphate
  modified_base 6: mod_base = OTHER; note = 2'-O-methylcytidine-3'-phosphate
  modified_base 7: mod_base = OTHER; note = 2'-deoxy-2'-fluorocytidine-3'-phosphate
  modified_base 8: mod_base = OTHER; note = 2'-O-methyladenosine-3'-phosphate
  modified_base 9: mod_base = OTHER; note = 2'-deoxy-2'-fluorouridine-3'-phosphate
  modified_base 10: mod_base = OTHER; note = 2'-deoxy-2'-fluoroguanosine-3'-phosphate
  modified_base 11: mod_base = OTHER; note = 2'-deoxy-2'-fluorouridine-3'-phosphate
  modified_base 12: mod_base = OTHER; note = 2'-O-methylcytidine-3'-phosphate
  modified_base 13: mod_base = OTHER; note = 2'-O-methylcytidine-3'-phosphate
  modified_base 14: mod_base = OTHER; note = 2'-O-methyladenosine-3'-phosphate
  modified_base 15: mod_base = OTHER; note = 2'-O-methylcytidine-3'-phosphate
  modified_base 16: mod_base = OTHER; note = 2'-O-methyladenosine-3'-phosphate
  modified_base 17: mod_base = OTHER; note = 2'-O-methylguanosine-3'-phosphate
  modified_base 18: mod_base = OTHER; note = 2'-O-methylcytidine-3'-phosphate
  modified_base 19: mod_base = OTHER; note = 2'-O-methylcytidine-3'-phosphate
  modified_base 20: mod_base = OTHER; note = 2'-O-methyladenosine-3'-phosphate
  modified_base 21: mod_base = OTHER; note = 2'-O-methyluridine-3'-phosphate ((2S,4R)-1-[29-[[2-(acetylamino)-2-deoxy-beta-D-galactopyra nosyl]oxy]-14,14-bis[[3-[[3-[[5-[[2-(acetylamino)-2-deoxy-b eta-D-galactopyranosyl]oxy]-1-oxopentyl]amino]propyl]amino] -3-oxopropoxy]methyl]-1,12,19,25-tetraoxo-16-oxa-13,20,24-t riazanonacos-1-yl]-4-hydroxy-2-pyrrolidinyl)methyl ester
ggccaccatgtccacagccat

SEQ ID NO: 826 - RNA, 21 nt, synthetic construct
  source 1..21: mol_type = other RNA
  modified_base 1: mod_base = OTHER; note = 2'-O-methylcytidine-3'-phosphorothioate
  modified_base 2: mod_base = OTHER; note = 2'-O-methylcytidine-3'-phosphorothioate
  modified_base 3: mod_base = OTHER; note = 2'-O-methyluridine-3'-phosphate
  modified_base 4: mod_base = OTHER; note = 2'-O-methylcytidine-3'-phosphate
  modified_base 5: mod_base = OTHER; note = 2'-O-methylcytidine-3'-phosphate
  modified_base 6: mod_base = OTHER; note = 2'-O-methyluridine-3'-phosphate
  modified_base 7: mod_base = OTHER; note = 2'-deoxy-2'-fluorocytidine-3'-phosphate
  modified_base 8: mod_base = OTHER; note = 2'-O-methylcytidine-3'-phosphate
  modified_base 9: mod_base = OTHER; note = 2'-deoxy-2'-fluoroadenosine-3'-phosphate
  modified_base 10: mod_base = OTHER; note = 2'-deoxy-2'-fluorocytidine-3'-phosphate
  modified_base 11: mod_base = OTHER; note = 2'-deoxy-2'-fluorouridine-3'-phosphate
  modified_base 12: mod_base = OTHER; note = 2'-O-methylcytidine-3'-phosphate
  modified_base 13: mod_base = OTHER; note = 2'-O-methylcytidine-3'-phosphate
  modified_base 14: mod_base = OTHER; note = 2'-O-methyladenosine-3'-phosphate
  modified_base 15: mod_base = OTHER; note = 2'-O-methylguanosine-3'-phosphate
  modified_base 16: mod_base = OTHER; note = 2'-O-methyladenosine-3'-phosphate
  modified_base 17: mod_base = OTHER; note = 2'-O-methylguanosine-3'-phosphate
  modified_base 18: mod_base = OTHER; note = 2'-O-methyladenosine-3'-phosphate
  modified_base 19: mod_base = OTHER; note = 2'-O-methylcytidine-3'-phosphate
  modified_base 20: mod_base = OTHER; note = 2'-O-methyluridine-3'-phosphate
  modified_base 21: mod_base = OTHER; note = 2'-O-methyluridine-3'-phosphate ((2S,4R)-1-[29-[[2-(acetylamino)-2-deoxy-beta-D-galactopyra nosyl]oxy]-14,14-bis[[3-[[3-[[5-[[2-(acetylamino)-2-deoxy-b eta-D-galactopyranosyl]oxy]-1-oxopentyl]amino]propyl]amino] -3-oxopropoxy]methyl]-1,12,19,25-tetraoxo-16-oxa-13,20,24-t riazanonacos-1-yl]-4-hydroxy-2-pyrrolidinyl)methyl ester
cctcctccactccagagactt

SEQ ID NO: 827 - RNA, 21 nt, synthetic construct
  source 1..21: mol_type = other RNA
  modified_base 1: mod_base = OTHER; note = 2'-O-methylcytidine-3'-phosphorothioate
  modified_base 2: mod_base = OTHER; note = 2'-O-methyladenosine-3'-phosphorothioate
  modified_base 3: mod_base = OTHER; note = 2'-O-methylcytidine-3'-phosphate
  modified_base 4: mod_base = OTHER; note = 2'-O-methyladenosine-3'-phosphate
  modified_base 5: mod_base = OTHER; note = 2'-O-methylcytidine-3'-phosphate
  modified_base 6: mod_base = OTHER; note = 2'-O-methylcytidine-3'-phosphate
  modified_base 7: mod_base = OTHER; note = 2'-deoxy-2'-fluorouridine-3'-phosphate
  modified_base 8: mod_base = OTHER; note = 2'-O-methylcytidine-3'-phosphate
  modified_base 9: mod_base = OTHER; note = 2'-deoxy-2'-fluorocytidine-3'-phosphate
  modified_base 10: mod_base = OTHER; note = 2'-deoxy-2'-fluoroadenosine-3'-phosphate
  modified_base 11: mod_base = OTHER; note = 2'-deoxy-2'-fluorocytidine-3'-phosphate
  modified_base 12: mod_base = OTHER; note = 2'-O-methyladenosine-3'-phosphate
  modified_base 13: mod_base = OTHER; note = 2'-O-methylguanosine-3'-phosphate
  modified_base 14: mod_base = OTHER; note = 2'-O-methyluridine-3'-phosphate
  modified_base 15: mod_base = OTHER; note = 2'-O-methylguanosine-3'-phosphate
  modified_base 16: mod_base = OTHER; note = 2'-O-methylcytidine-3'-phosphate
  modified_base 17: mod_base = OTHER; note = 2'-O-methyluridine-3'-phosphate
  modified_base 18: mod_base = OTHER; note = 2'-O-methyluridine-3'-phosphate
  modified_base 19: mod_base = OTHER; note = 2'-O-methyladenosine-3'-phosphate
  modified_base 20: mod_base = OTHER; note = 2'-O-methylcytidine-3'-phosphate
  modified_base 21: mod_base = OTHER; note = 2'-O-methyluridine-3'-phosphate ((2S,4R)-1-[29-[[2-(acetylamino)-2-deoxy-beta-D-galactopyra nosyl]oxy]-14,14-bis[[3-[[3-[[5-[[2-(acetylamino)-2-deoxy-b eta-D-galactopyranosyl]oxy]-1-oxopentyl]amino]propyl]amino] -3-oxopropoxy]methyl]-1,12,19,25-tetraoxo-16-oxa-13,20,24-t riazanonacos-1-yl]-4-hydroxy-2-pyrrolidinyl)methyl ester
cacacctccacagtgcttact

SEQ ID NO: 828 - RNA, 21 nt, synthetic construct
  source 1..21: mol_type = other RNA
  modified_base 1: mod_base = OTHER; note = 2'-O-methylcytidine-3'-phosphorothioate
  modified_base 2: mod_base = OTHER; note = 2'-O-methyladenosine-3'-phosphorothioate
  modified_base 3: mod_base = OTHER; note = 2'-O-methylguanosine-3'-phosphate
  modified_base 4: mod_base = OTHER; note = 2'-O-methylguanosine-3'-phosphate
  modified_base 5: mod_base = OTHER; note = 2'-O-methyladenosine-3'-phosphate
  modified_base 6: mod_base = OTHER; note = 2'-O-methyladenosine-3'-phosphate
  modified_base 7: mod_base = OTHER; note = 2'-deoxy-2'-fluorocytidine-3'-phosphate
  modified_base 8: mod_base = OTHER; note = 2'-O-methyladenosine-3'-phosphate
  modified_base 9: mod_base = OTHER; note = 2'-deoxy-2'-fluoroguanosine-3'-phosphate
  modified_base 10: mod_base = OTHER; note = 2'-deoxy-2'-fluorocytidine-3'-phosphate
  modified_base 11: mod_base = OTHER; note = 2'-deoxy-2'-fluorouridine-3'-phosphate
  modified_base 12: mod_base = OTHER; note = 2'-O-methylcytidine-3'-phosphate
  modified_base 13: mod_base = OTHER; note = 2'-O-methyladenosine-3'-phosphate
  modified_base 14: mod_base = OTHER; note = 2'-O-methylcytidine-3'-phosphate
  modified_base 15: mod_base = OTHER; note = 2'-O-methyladenosine-3'-phosphate
  modified_base 16: mod_base = OTHER; note = 2'-O-methylcytidine-3'-phosphate
  modified_base 17: mod_base = OTHER; note = 2'-O-methyluridine-3'-phosphate
  modified_base 18: mod_base = OTHER; note = 2'-O-methyladenosine-3'-phosphate
  modified_base 19: mod_base = OTHER; note = 2'-O-methylcytidine-3'-phosphate
  modified_base 20: mod_base = OTHER; note = 2'-O-methylcytidine-3'-phosphate
  modified_base 21: mod_base = OTHER; note = 2'-O-methyluridine-3'-phosphate ((2S,4R)-1-[29-[[2-(acetylamino)-2-deoxy-beta-D-galactopyra nosyl]oxy]-14,14-bis[[3-[[3-[[5-[[2-(acetylamino)-2-deoxy-b eta-D-galactopyranosyl]oxy]-1-oxopentyl]amino]propyl]amino] -3-oxopropoxy]methyl]-1,12,19,25-tetraoxo-16-oxa-13,20,24-t riazanonacos-1-yl]-4-hydroxy-2-pyrrolidinyl)methyl ester
caggaacagctcacactacct

SEQ ID NO: 829 - RNA, 21 nt, synthetic construct
  source 1..21: mol_type = other RNA
  modified_base 1: mod_base = OTHER; note = 2'-O-methyluridine-3'-phosphorothioate
  modified_base 2: mod_base = OTHER; note = 2'-O-methylcytidine-3'-phosphorothioate
  modified_base 3: mod_base = OTHER; note = 2'-O-methylcytidine-3'-phosphate
  modified_base 4: mod_base = OTHER; note = 2'-O-methyladenosine-3'-phosphate
  modified_base 5: mod_base = OTHER; note = 2'-O-methylguanosine-3'-phosphate
  modified_base 6: mod_base = OTHER; note = 2'-O-methyluridine-3'-phosphate
  modified_base 7: mod_base = OTHER; note = 2'-deoxy-2'-fluoroguanosine-3'-phosphate
  modified_base 8: mod_base = OTHER; note = 2'-O-methyluridine-3'-phosphate
  modified_base 9: mod_base = OTHER; note = 2'-deoxy-2'-fluoroguanosine-3'-phosphate
  modified_base 10: mod_base = OTHER; note = 2'-deoxy-2'-fluoroguanosine-3'-phosphate
  modified_base 11: mod_base = OTHER; note = 2'-deoxy-2'-fluoroadenosine-3'-phosphate
  modified_base 12: mod_base = OTHER; note = 2'-O-methyluridine-3'-phosphate
  modified_base 13: mod_base = OTHER; note = 2'-O-methylcytidine-3'-phosphate
  modified_base 14: mod_base = OTHER; note = 2'-O-methyladenosine-3'-phosphate
  modified_base 15: mod_base = OTHER; note = 2'-O-methylguanosine-3'-phosphate
  modified_base 16: mod_base = OTHER; note = 2'-O-methylcytidine-3'-phosphate
  modified_base 17: mod_base = OTHER; note = 2'-O-methyladenosine-3'-phosphate
  modified_base 18: mod_base = OTHER; note = 2'-O-methylcytidine-3'-phosphate
  modified_base 19: mod_base = OTHER; note = 2'-O-methyladenosine-3'-phosphate
  modified_base 20: mod_base = OTHER; note = 2'-O-methyladenosine-3'-phosphate
  modified_base 21: mod_base = OTHER; note = 2'-O-methyluridine-3'-phosphate ((2S,4R)-1-[29-[[2-(acetylamino)-2-deoxy-beta-D-galactopyra nosyl]oxy]-14,14-bis[[3-[[3-[[5-[[2-(acetylamino)-2-deoxy-b eta-D-galactopyranosyl]oxy]-1-oxopentyl]amino]propyl]amino] -3-oxopropoxy]methyl]-1,12,19,25-tetraoxo-16-oxa-13,20,24-t riazanonacos-1-yl]-4-hydroxy-2-pyrrolidinyl)methyl ester
tccagtgtggatcagcacaat

SEQ ID NO: 830 - RNA, 21 nt, synthetic construct
  source 1..21: mol_type = other RNA
  modified_base 1: mod_base = OTHER; note = 2'-O-methylcytidine-3'-phosphorothioate
  modified_base 2: mod_base = OTHER; note = 2'-O-methyluridine-3'-phosphorothioate
  modified_base 3: mod_base = OTHER; note = 2'-O-methylcytidine-3'-phosphate
  modified_base 4: mod_base = OTHER; note = 2'-O-methylcytidine-3'-phosphate
  modified_base 5: mod_base = OTHER; note = 2'-O-methyluridine-3'-phosphate
  modified_base 6: mod_base = OTHER; note = 2'-O-methylguanosine-3'-phosphate
  modified_base 7: mod_base = OTHER; note = 2'-deoxy-2'-fluoroguanosine-3'-phosphate
  modified_base 8: mod_base = OTHER; note = 2'-O-methylguanosine-3'-phosphate
  modified_base 9: mod_base = OTHER; note = 2'-deoxy-2'-fluoroadenosine-3'-phosphate
  modified_base 10: mod_base = OTHER; note = 2'-deoxy-2'-fluorocytidine-3'-phosphate
  modified_base 11: mod_base = OTHER; note = 2'-deoxy-2'-fluoroadenosine-3'-phosphate
  modified_base 12: mod_base = OTHER; note = 2'-O-methyladenosine-3'-phosphate
  modified_base 13: mod_base = OTHER; note = 2'-O-methylcytidine-3'-phosphate
  modified_base 14: mod_base = OTHER; note = 2'-O-methyluridine-3'-phosphate
  modified_base 15: mod_base = OTHER; note = 2'-O-methylcytidine-3'-phosphate
  modified_base 16: mod_base = OTHER; note = 2'-O-methylcytidine-3'-phosphate
  modified_base 17: mod_base = OTHER; note = 2'-O-methylcytidine-3'-phosphate
  modified_base 18: mod_base = OTHER; note = 2'-O-methyladenosine-3'-phosphate
  modified_base 19: mod_base = OTHER; note = 2'-O-methyluridine-3'-phosphate
  modified_base 20: mod_base = OTHER; note = 2'-O-methylcytidine-3'-phosphate
  modified_base 21: mod_base = OTHER; note = 2'-O-methyluridine-3'-phosphate ((2S,4R)-1-[29-[[2-(acetylamino)-2-deoxy-beta-D-galactopyra nosyl]oxy]-14,14-bis[[3-[[3-[[5-[[2-(acetylamino)-2-deoxy-b eta-D-galactopyranosyl]oxy]-1-oxopentyl]amino]propyl]amino] -3-oxopropoxy]methyl]-1,12,19,25-tetraoxo-16-oxa-13,20,24-t riazanonacos-1-yl]-4-hydroxy-2-pyrrolidinyl)methyl ester
ctcctgggacaactcccatct

SEQ ID NO: 831 - RNA, 21 nt, synthetic construct
  source 1..21: mol_type = other RNA
  modified_base 1: mod_base = OTHER; note = 2'-O-methylcytidine-3'-phosphorothioate
  modified_base 2: mod_base = OTHER; note = 2'-O-methyladenosine-3'-phosphorothioate
  modified_base 3: mod_base = OTHER; note = 2'-O-methylguanosine-3'-phosphate
  modified_base 4: mod_base = OTHER; note = 2'-O-methylcytidine-3'-phosphate
  modified_base 5: mod_base = OTHER; note = 2'-O-methyladenosine-3'-phosphate
  modified_base 6: mod_base = OTHER; note = 2'-O-methyladenosine-3'-phosphate
  modified_base 7: mod_base = OTHER; note = 2'-deoxy-2'-fluorocytidine-3'-phosphate
  modified_base 8: mod_base = OTHER; note = 2'-O-methyladenosine-3'-phosphate
  modified_base 9: mod_base = OTHER; note = 2'-deoxy-2'-fluorocytidine-3'-phosphate
  modified_base 10: mod_base = OTHER; note = 2'-deoxy-2'-fluoroadenosine-3'-phosphate
  modified_base 11: mod_base = OTHER; note = 2'-deoxy-2'-fluoroguanosine-3'-phosphate
  modified_base 12: mod_base = OTHER; note = 2'-O-methyluridine-3'-phosphate
  modified_base 13: mod_base = OTHER; note = 2'-O-methylguanosine-3'-phosphate
  modified_base 14: mod_base = OTHER; note = 2'-O-methyladenosine-3'-phosphate
  modified_base 15: mod_base = OTHER; note = 2'-O-methylcytidine-3'-phosphate
  modified_base 16: mod_base = OTHER; note = 2'-O-methyluridine-3'-phosphate
  modified_base 17: mod_base = OTHER; note = 2'-O-methylcytidine-3'-phosphate
  modified_base 18: mod_base = OTHER; note = 2'-O-methylcytidine-3'-phosphate
  modified_base 19: mod_base = OTHER; note = 2'-O-methylcytidine-3'-phosphate
  modified_base 20: mod_base = OTHER; note = 2'-O-methyluridine-3'-phosphate
  modified_base 21: mod_base = OTHER; note = 2'-O-methyluridine-3'-phosphate ((2S,4R)-1-[29-[[2-(acetylamino)-2-deoxy-beta-D-galactopyra nosyl]oxy]-14,14-bis[[3-[[3-[[5-[[2-(acetylamino)-2-deoxy-b eta-D-galactopyranosyl]oxy]-1-oxopentyl]amino]propyl]amino] -3-oxopropoxy]methyl]-1,12,19,25-tetraoxo-16-oxa-13,20,24-t riazanonacos-1-yl]-4-hydroxy-2-pyrrolidinyl)methyl ester
cagcaacacagtgactccctt

SEQ ID NO: 832 - RNA, 21 nt, synthetic construct
  source 1..21: mol_type = other RNA
  modified_base 1: mod_base = OTHER; note = 2'-O-methyladenosine-3'-phosphorothioate
  modified_base 2: mod_base = OTHER; note = 2'-O-methylguanosine-3'-phosphorothioate
  modified_base 3: mod_base = OTHER; note = 2'-O-methyluridine-3'-phosphate
  modified_base 4: mod_base = OTHER; note = 2'-O-methylguanosine-3'-phosphate
  modified_base 5: mod_base = OTHER; note = 2'-O-methylcytidine-3'-phosphate
  modified_base 6: mod_base = OTHER; note = 2'-O-methylcytidine-3'-phosphate
  modified_base 7: mod_base = OTHER; note = 2'-deoxy-2'-fluoroguanosine-3'-phosphate
  modified_base 8: mod_base = OTHER; note = 2'-O-methyladenosine-3'-phosphate
  modified_base 9: mod_base = OTHER; note = 2'-deoxy-2'-fluoroadenosine-3'-phosphate
  modified_base 10: mod_base = OTHER; note = 2'-deoxy-2'-fluorocytidine-3'-phosphate
  modified_base 11: mod_base = OTHER; note = 2'-deoxy-2'-fluoroadenosine-3'-phosphate
  modified_base 12: mod_base = OTHER; note = 2'-O-methylcytidine-3'-phosphate
  modified_base 13: mod_base = OTHER; note = 2'-O-methylcytidine-3'-phosphate
  modified_base 14: mod_base = OTHER; note = 2'-O-methyladenosine-3'-phosphate
  modified_base 15: mod_base = OTHER; note = 2'-O-methyluridine-3'-phosphate
  modified_base 16: mod_base = OTHER; note = 2'-O-methylguanosine-3'-phosphate
  modified_base 17: mod_base = OTHER; note = 2'-O-methylguanosine-3'-phosphate
  modified_base 18: mod_base = OTHER; note = 2'-O-methylcytidine-3'-phosphate
  modified_base 19: mod_base = OTHER; note = 2'-O-methylcytidine-3'-phosphate
  modified_base 20: mod_base = OTHER; note = 2'-O-methyladenosine-3'-phosphate
  modified_base 21: mod_base = OTHER; note = 2'-O-methyluridine-3'-phosphate ((2S,4R)-1-[29-[[2-(acetylamino)-2-deoxy-beta-D-galactopyra nosyl]oxy]-14,14-bis[[3-[[3-[[5-[[2-(acetylamino)-2-deoxy-b eta-D-galactopyranosyl]oxy]-1-oxopentyl]amino]propyl]amino] -3-oxopropoxy]methyl]-1,12,19,25-tetraoxo-16-oxa-13,20,24-t riazanonacos-1-yl]-4-hydroxy-2-pyrrolidinyl)methyl ester
agtgccgaacaccatggccat

SEQ ID NO: 833 - RNA, 21 nt, synthetic construct
  source 1..21: mol_type = other RNA
  modified_base 1: mod_base = OTHER; note = 2'-O-methylguanosine-3'-phosphorothioate
  modified_base 2: mod_base = OTHER; note = 2'-O-methylguanosine-3'-phosphorothioate
  modified_base 3: mod_base = OTHER; note = 2'-O-methyluridine-3'-phosphate
  modified_base 4: mod_base = OTHER; note = 2'-O-methylguanosine-3'-phosphate
  modified_base 5: mod_base = OTHER; note = 2'-O-methyladenosine-3'-phosphate
  modified_base 6: mod_base = OTHER; note = 2'-O-methylcytidine-3'-phosphate
  modified_base 7: mod_base = OTHER; note = 2'-deoxy-2'-fluorouridine-3'-phosphate
  modified_base 8: mod_base = OTHER; note = 2'-O-methyluridine-3'-phosphate
  modified_base 9: mod_base = OTHER; note = 2'-deoxy-2'-fluorocytidine-3'-phosphate
  modified_base 10: mod_base = OTHER; note = 2'-deoxy-2'-fluorocytidine-3'-phosphate
  modified_base 11: mod_base = OTHER; note = 2'-deoxy-2'-fluorocytidine-3'-phosphate
  modified_base 12: mod_base = OTHER; note = 2'-O-methyladenosine-3'-phosphate
  modified_base 13: mod_base = OTHER; note = 2'-O-methylcytidine-3'-phosphate
  modified_base 14: mod_base = OTHER; note = 2'-O-methyladenosine-3'-phosphate
  modified_base 15: mod_base = OTHER; note = 2'-O-methylcytidine-3'-phosphate
  modified_base 16: mod_base = OTHER; note = 2'-O-methylcytidine-3'-phosphate
  modified_base 17: mod_base = OTHER; note = 2'-O-methylcytidine-3'-phosphate
  modified_base 18: mod_base = OTHER; note = 2'-O-methyluridine-3'-phosphate
  modified_base 19: mod_base = OTHER; note = 2'-O-methyladenosine-3'-phosphate
  modified_base 20: mod_base = OTHER; note = 2'-O-methylguanosine-3'-phosphate
  modified_base 21: mod_base = OTHER; note = 2'-O-methyluridine-3'-phosphate ((2S,4R)-1-[29-[[2-(acetylamino)-2-deoxy-beta-D-galactopyra nosyl]oxy]-14,14-bis[[3-[[3-[[5-[[2-(acetylamino)-2-deoxy-b eta-D-galactopyranosyl]oxy]-1-oxopentyl]amino]propyl]amino] -3-oxopropoxy]methyl]-1,12,19,25-tetraoxo-16-oxa-13,20,24-t riazanonacos-1-yl]-4-hydroxy-2-pyrrolidinyl)methyl ester
ggtgacttcccacaccctagt

SEQ ID NO: 834 - RNA, 21 nt, synthetic construct
  source 1..21: mol_type = other RNA
  modified_base 1: mod_base = OTHER; note = 2'-O-methylcytidine-3'-phosphorothioate
  modified_base 2: mod_base = OTHER; note = 2'-O-methylguanosine-3'-phosphorothioate
  modified_base 3: mod_base = OTHER; note = 2'-O-methyladenosine-3'-phosphate
  modified_base 4: mod_base = OTHER; note = 2'-O-methylcytidine-3'-phosphate
  modified_base 5: mod_base = OTHER; note = 2'-O-methyluridine-3'-phosphate
  modified_base 6: mod_base = OTHER; note = 2'-O-methylcytidine-3'-phosphate
  modified_base 7: mod_base = OTHER; note = 2'-deoxy-2'-fluorocytidine-3'-phosphate
  modified_base 8: mod_base = OTHER; note = 2'-O-methyladenosine-3'-phosphate
  modified_base 9: mod_base = OTHER; note = 2'-deoxy-2'-fluoroguanosine-3'-phosphate
  modified_base 10: mod_base = OTHER; note = 2'-deoxy-2'-fluorocytidine-3'-phosphate
  modified_base 11: mod_base = OTHER; note = 2'-deoxy-2'-fluorocytidine-3'-phosphate
  modified_base 12: mod_base = OTHER; note = 2'-O-methylcytidine-3'-phosphate
  modified_base 13: mod_base = OTHER; note = 2'-O-methyluridine-3'-phosphate
  modified_base 14: mod_base = OTHER; note = 2'-O-methyluridine-3'-phosphate
  modified_base 15: mod_base = OTHER; note = 2'-O-methyluridine-3'-phosphate
  modified_base 16: mod_base = OTHER; note = 2'-O-methylcytidine-3'-phosphate
  modified_base 17: mod_base = OTHER; note = 2'-O-methylcytidine-3'-phosphate
  modified_base 18: mod_base = OTHER; note = 2'-O-methyladenosine-3'-phosphate
  modified_base 19: mod_base = OTHER; note = 2'-O-methylguanosine-3'-phosphate
  modified_base 20: mod_base = OTHER; note = 2'-O-methylcytidine-3'-phosphate
  modified_base 21: mod_base = OTHER; note = 2'-O-methyluridine-3'-phosphate ((2S,4R)-1-[29-[[2-(acetylamino)-2-deoxy-beta-D-galactopyra nosyl]oxy]-14,14-bis[[3-[[3-[[5-[[2-(acetylamino)-2-deoxy-b eta-D-galactopyranosyl]oxy]-1-oxopentyl]amino]propyl]amino] -3-oxopropoxy]methyl]-1,12,19,25-tetraoxo-16-oxa-13,20,24-t riazanonacos-1-yl]-4-hydroxy-2-pyrrolidinyl)methyl ester
cgactccagccctttccagct

SEQ ID NO: 835 - RNA, 21 nt, synthetic construct
  source 1..21: mol_type = other RNA
  modified_base 1: mod_base = OTHER; note = 2'-O-methyluridine-3'-phosphorothioate
  modified_base 2: mod_base = OTHER; note = 2'-O-methyladenosine-3'-phosphorothioate
  modified_base 3: mod_base = OTHER; note = 2'-O-methylguanosine-3'-phosphate
  modified_base 4: mod_base = OTHER; note = 2'-O-methylcytidine-3'-phosphate
  modified_base 5: mod_base = OTHER; note = 2'-O-methyladenosine-3'-phosphate
  modified_base 6: mod_base = OTHER; note = 2'-O-methylguanosine-3'-phosphate
  modified_base 7: mod_base = OTHER; note = 2'-deoxy-2'-fluorocytidine-3'-phosphate
  modified_base 8: mod_base = OTHER; note = 2'-O-methyladenosine-3'-phosphate
  modified_base 9: mod_base = OTHER; note = 2'-deoxy-2'-fluoroguanosine-3'-phosphate
  modified_base 10: mod_base = OTHER; note = 2'-deoxy-2'-fluoroadenosine-3'-phosphate
  modified_base 11: mod_base = OTHER; note = 2'-deoxy-2'-fluoroadenosine-3'-phosphate
  modified_base 12: mod_base = OTHER; note = 2'-O-methylcytidine-3'-phosphate
  modified_base 13: mod_base = OTHER; note = 2'-O-methylcytidine-3'-phosphate
  modified_base 14: mod_base = OTHER; note = 2'-O-methyladenosine-3'-phosphate
  modified_base 15: mod_base = OTHER; note = 2'-O-methylcytidine-3'-phosphate
  modified_base 16: mod_base = OTHER; note = 2'-O-methylcytidine-3'-phosphate
  modified_base 17: mod_base = OTHER; note = 2'-O-methylguanosine-3'-phosphate
  modified_base 18: mod_base = OTHER; note = 2'-O-methyladenosine-3'-phosphate
  modified_base 19: mod_base = OTHER; note = 2'-O-methylguanosine-3'-phosphate
  modified_base 20: mod_base = OTHER; note = 2'-O-methyluridine-3'-phosphate
  modified_base 21: mod_base = OTHER; note = 2'-O-methyluridine-3'-phosphate ((2S,4R)-1-[29-[[2-(acetylamino)-2-deoxy-beta-D-galactopyra nosyl]oxy]-14,14-bis[[3-[[3-[[5-[[2-(acetylamino)-2-deoxy-b eta-D-galactopyranosyl]oxy]-1-oxopentyl]amino]propyl]amino] -3-oxopropoxy]methyl]-1,12,19,25-tetraoxo-16-oxa-13,20,24-t riazanonacos-1-yl]-4-hydroxy-2-pyrrolidinyl)methyl ester
tagcagcagaaccaccgagtt

SEQ ID NO: 836 - RNA, 21 nt, synthetic construct
  source 1..21: mol_type = other RNA
  modified_base 1: mod_base = OTHER; note = 2'-O-methylguanosine-3'-phosphorothioate
  modified_base 2: mod_base = OTHER; note = 2'-O-methylcytidine-3'-phosphorothioate
  modified_base 3: mod_base = OTHER; note = 2'-O-methyluridine-3'-phosphate
  modified_base 4: mod_base = OTHER; note = 2'-O-methylcytidine-3'-phosphate
  modified_base 5: mod_base = OTHER; note = 2'-O-methyladenosine-3'-phosphate
  modified_base 6: mod_base = OTHER; note = 2'-O-methylcytidine-3'-phosphate
  modified_base 7: mod_base = OTHER; note = 2'-deoxy-2'-fluoroadenosine-3'-phosphate
  modified_base 8: mod_base = OTHER; note = 2'-O-methylcytidine-3'-phosphate
  modified_base 9: mod_base = OTHER; note = 2'-deoxy-2'-fluorouridine-3'-phosphate
  modified_base 10: mod_base = OTHER; note = 2'-deoxy-2'-fluoroadenosine-3'-phosphate
  modified_base 11: mod_base = OTHER; note = 2'-deoxy-2'-fluorocytidine-3'-phosphate
  modified_base 12: mod_base = OTHER; note = 2'-O-methylcytidine-3'-phosphate
  modified_base 13: mod_base = OTHER; note = 2'-O-methyladenosine-3'-phosphate
  modified_base 14: mod_base = OTHER; note = 2'-O-methyladenosine-3'-phosphate
  modified_base 15: mod_base = OTHER; note = 2'-O-methyladenosine-3'-phosphate
  modified_base 16: mod_base = OTHER; note = 2'-O-methylguanosine-3'-phosphate
  modified_base 17: mod_base = OTHER; note = 2'-O-methyluridine-3'-phosphate
  modified_base 18: mod_base = OTHER; note = 2'-O-methylguanosine-3'-phosphate
  modified_base 19: mod_base = OTHER; note = 2'-O-methylcytidine-3'-phosphate
  modified_base 20: mod_base = OTHER; note = 2'-O-methyluridine-3'-phosphate
  modified_base 21: mod_base = OTHER; note = 2'-O-methyluridine-3'-phosphate ((2S,4R)-1-[29-[[2-(acetylamino)-2-deoxy-beta-D-galactopyra nosyl]oxy]-14,14-bis[[3-[[3-[[5-[[2-(acetylamino)-2-deoxy-b eta-D-galactopyranosyl]oxy]-1-oxopentyl]amino]propyl]amino] -3-oxopropoxy]methyl]-1,12,19,25-tetraoxo-16-oxa-13,20,24-t riazanonacos-1-yl]-4-hydroxy-2-pyrrolidinyl)methyl ester
gctcacactaccaaagtgctt

SEQ ID NO: 837 - RNA, 21 nt, synthetic construct
  source 1..21: mol_type = other RNA
  modified_base 1: mod_base = OTHER; note = 2'-O-methyladenosine-3'-phosphorothioate
  modified_base 2: mod_base = OTHER; note = 2'-O-methylcytidine-3'-phosphorothioate
  modified_base 3: mod_base = OTHER; note = 2'-O-methylguanosine-3'-phosphate
  modified_base 4: mod_base = OTHER; note = 2'-O-methylcytidine-3'-phosphate
  modified_base 5: mod_base = OTHER; note = 2'-O-methyluridine-3'-phosphate
  modified_base 6: mod_base = OTHER; note = 2'-O-methyluridine-3'-phosphate
  modified_base 7: mod_base = OTHER; note = 2'-deoxy-2'-fluorocytidine-3'-phosphate
  modified_base 8: mod_base = OTHER; note = 2'-O-methylcytidine-3'-phosphate
  modified_base 9: mod_base = OTHER; note = 2'-deoxy-2'-fluoroadenosine-3'-phosphate
  modified_base 10: mod_base = OTHER; note = 2'-deoxy-2'-fluoroguanosine-3'-phosphate
  modified_base 11: mod_base = OTHER; note = 2'-deoxy-2'-fluorouridine-3'-phosphate
  modified_base 12: mod_base = OTHER; note = 2'-O-methylguanosine-3'-phosphate
  modified_base 13: mod_base = OTHER; note = 2'-O-methyluridine-3'-phosphate
  modified_base 14: mod_base = OTHER; note = 2'-O-methylguanosine-3'-phosphate
  modified_base 15: mod_base = OTHER; note = 2'-O-methylguanosine-3'-phosphate
  modified_base 16: mod_base = OTHER; note = 2'-O-methyladenosine-3'-phosphate
  modified_base 17: mod_base = OTHER; note = 2'-O-methyluridine-3'-phosphate
  modified_base 18: mod_base = OTHER; note = 2'-O-methylcytidine-3'-phosphate
  modified_base 19: mod_base = OTHER; note = 2'-O-methyladenosine-3'-phosphate
  modified_base 20: mod_base = OTHER; note = 2'-O-methylguanosine-3'-phosphate
  modified_base 21: mod_base = OTHER; note = 2'-O-methyluridine-3'-phosphate ((2S,4R)-1-[29-[[2-(acetylamino)-2-deoxy-beta-D-galactopyra nosyl]oxy]-14,14-bis[[3-[[3-[[5-[[2-(acetylamino)-2-deoxy-b eta-D-galactopyranosyl]oxy]-1-oxopentyl]amino]propyl]amino] -3-oxopropoxy]methyl]-1,12,19,25-tetraoxo-16-oxa-13,20,24-t riazanonacos-1-yl]-4-hydroxy-2-pyrrolidinyl)methyl ester
acgcttccagtgtggatcagt

SEQ ID NO: 838 - RNA, 21 nt, synthetic construct
  source 1..21: mol_type = other RNA
  modified_base 1: mod_base = OTHER; note = 2'-O-methylcytidine-3'-phosphorothioate
  modified_base 2: mod_base = OTHER; note = 2'-O-methyladenosine-3'-phosphorothioate
  modified_base 3: mod_base = OTHER; note = 2'-O-methylcytidine-3'-phosphate
  modified_base 4: mod_base = OTHER; note = 2'-O-methylcytidine-3'-phosphate
  modified_base 5: mod_base = OTHER; note = 2'-O-methylcytidine-3'-phosphate
  modified_base 6: mod_base = OTHER; note = 2'-O-methyladenosine-3'-phosphate
  modified_base 7: mod_base = OTHER; note = 2'-deoxy-2'-fluorocytidine-3'-phosphate
  modified_base 8: mod_base = OTHER; note = 2'-O-methyladenosine-3'-phosphate
  modified_base 9: mod_base = OTHER; note = 2'-deoxy-2'-fluoroadenosine-3'-phosphate
  modified_base 10: mod_base = OTHER; note = 2'-deoxy-2'-fluorocytidine-3'-phosphate
  modified_base 11: mod_base = OTHER; note = 2'-deoxy-2'-fluorocytidine-3'-phosphate
  modified_base 12: mod_base = OTHER; note = 2'-O-methyladenosine-3'-phosphate
  modified_base 13: mod_base = OTHER; note = 2'-O-methylguanosine-3'-phosphate
  modified_base 14: mod_base = OTHER; note = 2'-O-methyladenosine-3'-phosphate
  modified_base 15: mod_base = OTHER; note = 2'-O-methylguanosine-3'-phosphate
  modified_base 16: mod_base = OTHER; note = 2'-O-methylguanosine-3'-phosphate
  modified_base 17: mod_base = OTHER; note = 2'-O-methyluridine-3'-phosphate
  modified_base 18: mod_base = OTHER; note = 2'-O-methyluridine-3'-phosphate
  modified_base 19: mod_base = OTHER; note = 2'-O-methylcytidine-3'-phosphate
  modified_base 20: mod_base = OTHER; note = 2'-O-methylcytidine-3'-phosphate
  modified_base 21: mod_base = OTHER; note = 2'-O-methyluridine-3'-phosphate ((2S,4R)-1-[29-[[2-(acetylamino)-2-deoxy-beta-D-galactopyra nosyl]oxy]-14,14-bis[[3-[[3-[[5-[[2-(acetylamino)-2-deoxy-b eta-D-galactopyranosyl]oxy]-1-oxopentyl]amino]propyl]amino] -3-oxopropoxy]methyl]-1,12,19,25-tetraoxo-16-oxa-13,20,24-t riazanonacos-1-yl]-4-hydroxy-2-pyrrolidinyl)methyl ester
cacccacaaccagaggttcct

SEQ ID NO: 839 - RNA, 21 nt, synthetic construct
  source 1..21: mol_type = other RNA
  modified_base 1: mod_base = OTHER; note = 2'-O-methylcytidine-3'-phosphorothioate
  modified_base 2: mod_base = OTHER; note = 2'-O-methyladenosine-3'-phosphorothioate
  modified_base 3: mod_base = OTHER; note = 2'-O-methylcytidine-3'-phosphate
  modified_base 4: mod_base = OTHER; note = 2'-O-methylguanosine-3'-phosphate
  modified_base 5: mod_base = OTHER; note = 2'-O-methylguanosine-3'-phosphate
  modified_base 6: mod_base = OTHER; note = 2'-O-methyluridine-3'-phosphate
  modified_base 7: mod_base = OTHER; note = 2'-deoxy-2'-fluoroguanosine-3'-phosphate
  modified_base 8: mod_base = OTHER; note = 2'-O-methylguanosine-3'-phosphate
  modified_base 9: mod_base = OTHER; note = 2'-deoxy-2'-fluorouridine-3'-phosphate
  modified_base 10: mod_base = OTHER; note = 2'-deoxy-2'-fluoroguanosine-3'-phosphate
  modified_base 11: mod_base = OTHER; note = 2'-deoxy-2'-fluoroadenosine-3'-phosphate
  modified_base 12: mod_base = OTHER; note = 2'-O-methylcytidine-3'-phosphate
  modified_base 13: mod_base = OTHER; note = 2'-O-methylcytidine-3'-phosphate
  modified_base 14: mod_base = OTHER; note = 2'-O-methyladenosine-3'-phosphate
  modified_base 15: mod_base = OTHER; note = 2'-O-methyluridine-3'-phosphate
  modified_base 16: mod_base = OTHER; note = 2'-O-methylguanosine-3'-phosphate
  modified_base 17: mod_base = OTHER; note = 2'-O-methylguanosine-3'-phosphate
  modified_base 18: mod_base = OTHER; note = 2'-O-methylguanosine-3'-phosphate
  modified_base 19: mod_base = OTHER; note = 2'-O-methylcytidine-3'-phosphate
  modified_base 20: mod_base = OTHER; note = 2'-O-methyluridine-3'-phosphate
  modified_base 21: mod_base = OTHER; note = 2'-O-methyluridine-3'-phosphate ((2S,4R)-1-[29-[[2-(acetylamino)-2-deoxy-beta-D-galactopyra nosyl]oxy]-14,14-bis[[3-[[3-[[5-[[2-(acetylamino)-2-deoxy-b eta-D-galactopyranosyl]oxy]-1-oxopentyl]amino]propyl]amino] -3-oxopropoxy]methyl]-1,12,19,25-tetraoxo-16-oxa-13,20,24-t riazanonacos-1-yl]-4-hydroxy-2-pyrrolidinyl)methyl ester
cacggtggtgaccatgggctt

SEQ ID NO: 840 - RNA, 21 nt, synthetic construct
  source 1..21: mol_type = other RNA
  modified_base 1: mod_base = OTHER; note = 2'-O-methyladenosine-3'-phosphorothioate
  modified_base 2: mod_base = OTHER; note = 2'-O-methylcytidine-3'-phosphorothioate
  modified_base 3: mod_base = OTHER; note = 2'-O-methylcytidine-3'-phosphate
  modified_base 4: mod_base = OTHER; note = 2'-O-methylguanosine-3'-phosphate
  modified_base 5: mod_base = OTHER; note = 2'-O-methylcytidine-3'-phosphate
  modified_base 6: mod_base = OTHER; note = 2'-O-methylcytidine-3'-phosphate
  modified_base 7: mod_base = OTHER; note = 2'-deoxy-2'-fluoroadenosine-3'-phosphate
  modified_base 8: mod_base = OTHER; note = 2'-O-methylcytidine-3'-phosphate
  modified_base 9: mod_base = OTHER; note = 2'-deoxy-2'-fluoroadenosine-3'-phosphate
  modified_base 10: mod_base = OTHER; note = 2'-deoxy-2'-fluoroguanosine-3'-phosphate
  modified_base 11: mod_base = OTHER; note = 2'-deoxy-2'-fluorouridine-3'-phosphate
  modified_base 12: mod_base = OTHER; note = 2'-O-methylguanosine-3'-phosphate
  modified_base 13: mod_base = OTHER; note = 2'-O-methylcytidine-3'-phosphate
  modified_base 14: mod_base = OTHER; note = 2'-O-methyluridine-3'-phosphate
  modified_base 15: mod_base = OTHER; note = 2'-O-methylguanosine-3'-phosphate
  modified_base 16: mod_base = OTHER; note = 2'-O-methyladenosine-3'-phosphate
  modified_base 17: mod_base = OTHER; note = 2'-O-methylcytidine-3'-phosphate
  modified_base 18: mod_base = OTHER; note = 2'-O-methylcytidine-3'-phosphate
  modified_base 19: mod_base = OTHER; note = 2'-O-methyladenosine-3'-phosphate
  modified_base 20: mod_base = OTHER; note = 2'-O-methylcytidine-3'-phosphate
  modified_base 21: mod_base = OTHER; note = 2'-O-methyluridine-3'-phosphate ((2S,4R)-1-[29-[[2-(acetylamino)-2-deoxy-beta-D-galactopyra nosyl]oxy]-14,14-bis[[3-[[3-[[5-[[2-(acetylamino)-2-deoxy-b eta-D-galactopyranosyl]oxy]-1-oxopentyl]amino]propyl]amino] -3-oxopropoxy]methyl]-1,12,19,25-tetraoxo-16-oxa-13,20,24-t riazanonacos-1-yl]-4-hydroxy-2-pyrrolidinyl)methyl ester
accgccacagtgctgaccact

SEQ ID NO: 841 - RNA, 21 nt, synthetic construct
  source 1..21: mol_type = other RNA
  modified_base 1: mod_base = OTHER; note = 2'-O-methylcytidine-3'-phosphorothioate
  modified_base 2: mod_base = OTHER; note = 2'-O-methylcytidine-3'-phosphorothioate
  modified_base 3: mod_base = OTHER; note = 2'-O-methyladenosine-3'-phosphate
  modified_base 4: mod_base = OTHER; note = 2'-O-methylcytidine-3'-phosphate
  modified_base 5: mod_base = OTHER; note = 2'-O-methyluridine-3'-phosphate
  modified_base 6: mod_base = OTHER; note = 2'-O-methyladenosine-3'-phosphate
  modified_base 7: mod_base = OTHER; note = 2'-deoxy-2'-fluorocytidine-3'-phosphate
  modified_base 8: mod_base = OTHER; note = 2'-O-methylguanosine-3'-phosphate
  modified_base 9: mod_base = OTHER; note = 2'-deoxy-2'-fluoroadenosine-3'-phosphate
  modified_base 10: mod_base = OTHER; note = 2'-deoxy-2'-fluorocytidine-3'-phosphate
  modified_base 11: mod_base = OTHER; note = 2'-deoxy-2'-fluorouridine-3'-phosphate
  modified_base 12: mod_base = OTHER; note = 2'-O-methylguanosine-3'-phosphate
  modified_base 13: mod_base = OTHER; note = 2'-O-methyladenosine-3'-phosphate
  modified_base 14: mod_base = OTHER; note = 2'-O-methylguanosine-3'-phosphate
  modified_base 15: mod_base = OTHER; note = 2'-O-methyluridine-3'-phosphate
  modified_base 16: mod_base = OTHER; note = 2'-O-methylcytidine-3'-phosphate
  modified_base 17: mod_base = OTHER; note = 2'-O-methylcytidine-3'-phosphate
  modified_base 18: mod_base = OTHER; note = 2'-O-methyladenosine-3'-phosphate
  modified_base 19: mod_base = OTHER; note = 2'-O-methylcytidine-3'-phosphate
  modified_base 20: mod_base = OTHER; note = 2'-O-methyluridine-3'-phosphate
  modified_base 21: mod_base = OTHER; note = 2'-O-methyluridine-3'-phosphate ((2S,4R)-1-[29-[[2-(acetylamino)-2-deoxy-beta-D-galactopyra nosyl]oxy]-14,14-bis[[3-[[3-[[5-[[2-(acetylamino)-2-deoxy-b eta-D-galactopyranosyl]oxy]-1-oxopentyl]amino]propyl]amino] -3-oxopropoxy]methyl]-1,12,19,25-tetraoxo-16-oxa-13,20,24-t riazanonacos-1-yl]-4-hydroxy-2-pyrrolidinyl)methyl ester
ccactacgactgagtccactt

SEQ ID NO: 842 - RNA, 21 nt, synthetic construct
  source 1..21: mol_type = other RNA
  modified_base 1: mod_base = OTHER; note = 2'-O-methylguanosine-3'-phosphorothioate
  modified_base 2: mod_base = OTHER; note = 2'-O-methylcytidine-3'-phosphorothioate
  modified_base 3: mod_base = OTHER; note = 2'-O-methyluridine-3'-phosphate
  modified_base 4: mod_base = OTHER; note = 2'-O-methylcytidine-3'-phosphate
  modified_base 5: mod_base = OTHER; note = 2'-O-methylcytidine-3'-phosphate
  modified_base 6: mod_base = OTHER; note = 2'-O-methyladenosine-3'-phosphate
  modified_base 7: mod_base = OTHER; note = 2'-deoxy-2'-fluoroadenosine-3'-phosphate
  modified_base 8: mod_base = OTHER; note = 2'-O-methyladenosine-3'-phosphate
  modified_base 9: mod_base = OTHER; note = 2'-deoxy-2'-fluoroguanosine-3'-phosphate
  modified_base 10: mod_base = OTHER; note = 2'-deoxy-2'-fluorocytidine-3'-phosphate
  modified_base 11: mod_base = OTHER; note = 2'-deoxy-2'-fluorocytidine-3'-phosphate
  modified_base 12: mod_base = OTHER; note = 2'-O-methyladenosine-3'-phosphate
  modified_base 13: mod_base = OTHER; note = 2'-O-methylcytidine-3'-phosphate
  modified_base 14: mod_base = OTHER; note = 2'-O-methyluridine-3'-phosphate
  modified_base 15: mod_base = OTHER; note = 2'-O-methylcytidine-3'-phosphate
  modified_base 16: mod_base = OTHER; note = 2'-O-methylcytidine-3'-phosphate
  modified_base 17: mod_base = OTHER; note = 2'-O-methylcytidine-3'-phosphate
  modified_base 18: mod_base = OTHER; note = 2'-O-methyluridine-3'-phosphate
  modified_base 19: mod_base = OTHER; note = 2'-O-methyluridine-3'-phosphate
  modified_base 20: mod_base = OTHER; note = 2'-O-methylcytidine-3'-phosphate
  modified_base 21: mod_base = OTHER; note = 2'-O-methyluridine-3'-phosphate ((2S,4R)-1-[29-[[2-(acetylamino)-2-deoxy-beta-D-galactopyra nosyl]oxy]-14,14-bis[[3-[[3-[[5-[[2-(acetylamino)-2-deoxy-b eta-D-galactopyranosyl]oxy]-1-oxopentyl]amino]propyl]amino] -3-oxopropoxy]methyl]-1,12,19,25-tetraoxo-16-oxa-13,20,24-t riazanonacos-1-yl]-4-hydroxy-2-pyrrolidinyl)methyl ester
gctccaaagccactcccttct

SEQ ID NO: 843 - RNA, 21 nt, synthetic construct
  source 1..21: mol_type = other RNA
  modified_base 1: mod_base = OTHER; note = 2'-O-methylcytidine-3'-phosphorothioate
  modified_base 2: mod_base = OTHER; note = 2'-O-methyluridine-3'-phosphorothioate
  modified_base 3: mod_base = OTHER; note = 2'-O-methylcytidine-3'-phosphate
  modified_base 4: mod_base = OTHER; note = 2'-O-methylcytidine-3'-phosphate
  modified_base 5: mod_base = OTHER; note = 2'-O-methyladenosine-3'-phosphate
  modified_base 6: mod_base = OTHER; note = 2'-O-methylguanosine-3'-phosphate
  modified_base 7: mod_base = OTHER; note = 2'-deoxy-2'-fluoroguanosine-3'-phosphate
  modified_base 8: mod_base = OTHER; note = 2'-O-methylguanosine-3'-phosphate
  modified_base 9: mod_base = OTHER; note = 2'-deoxy-2'-fluoroadenosine-3'-phosphate
  modified_base 10: mod_base = OTHER; note = 2'-deoxy-2'-fluorocytidine-3'-phosphate
  modified_base 11: mod_base = OTHER; note = 2'-deoxy-2'-fluoroadenosine-3'-phosphate
  modified_base 12: mod_base = OTHER; note = 2'-O-methyladenosine-3'-phosphate
  modified_base 13: mod_base = OTHER; note = 2'-O-methylcytidine-3'-phosphate
  modified_base 14: mod_base = OTHER; note = 2'-O-methyladenosine-3'-phosphate
  modified_base 15: mod_base = OTHER; note = 2'-O-methylcytidine-3'-phosphate
  modified_base 16: mod_base = OTHER; note = 2'-O-methylcytidine-3'-phosphate
  modified_base 17: mod_base = OTHER; note = 2'-O-methyluridine-3'-phosphate
  modified_base 18: mod_base = OTHER; note = 2'-O-methyladenosine-3'-phosphate
  modified_base 19: mod_base = OTHER; note = 2'-O-methyluridine-3'-phosphate
  modified_base 20: mod_base = OTHER; note = 2'-O-methylcytidine-3'-phosphate
  modified_base 21: mod_base = OTHER; note = 2'-O-methyluridine-3'-phosphate ((2S,4R)-1-[29-[[2-(acetylamino)-2-deoxy-beta-D-galactopyra nosyl]oxy]-14,14-bis[[3-[[3-[[5-[[2-(acetylamino)-2-deoxy-b eta-D-galactopyranosyl]oxy]-1-oxopentyl]amino]propyl]amino] -3-oxopropoxy]methyl]-1,12,19,25-tetraoxo-16-oxa-13,20,24-t riazanonacos-1-yl]-4-hydroxy-2-pyrrolidinyl)methyl ester
ctccagggacaacacctatct

SEQ ID NO: 844 - RNA, 21 nt, synthetic construct
  source 1..21: mol_type = other RNA
  modified_base 1: mod_base = OTHER; note = 2'-O-methylcytidine-3'-phosphorothioate
  modified_base 2: mod_base = OTHER; note = 2'-O-methyladenosine-3'-phosphorothioate
  modified_base 3: mod_base = OTHER; note = 2'-O-methylguanosine-3'-phosphate
  modified_base 4: mod_base = OTHER; note = 2'-O-methylcytidine-3'-phosphate
  modified_base 5: mod_base = OTHER; note = 2'-O-methyladenosine-3'-phosphate
  modified_base 6: mod_base = OTHER; note = 2'-O-methylguanosine-3'-phosphate
  modified_base 7: mod_base = OTHER; note = 2'-deoxy-2'-fluorocytidine-3'-phosphate
  modified_base 8: mod_base = OTHER; note = 2'-O-methyladenosine-3'-phosphate
  modified_base 9: mod_base = OTHER; note = 2'-deoxy-2'-fluorocytidine-3'-phosphate
  modified_base 10: mod_base = OTHER; note = 2'-deoxy-2'-fluoroadenosine-3'-phosphate
  modified_base 11: mod_base = OTHER; note = 2'-deoxy-2'-fluoroguanosine-3'-phosphate
  modified_base 12: mod_base = OTHER; note = 2'-O-methyluridine-3'-phosphate
  modified_base 13: mod_base = OTHER; note = 2'-O-methylguanosine-3'-phosphate
  modified_base 14: mod_base = OTHER; note = 2'-O-methyladenosine-3'-phosphate
  modified_base 15: mod_base = OTHER; note = 2'-O-methylcytidine-3'-phosphate
  modified_base 16: mod_base = OTHER; note = 2'-O-methyluridine-3'-phosphate
  modified_base 17: mod_base = OTHER; note = 2'-O-methylcytidine-3'-phosphate
  modified_base 18: mod_base = OTHER; note = 2'-O-methylcytidine-3'-phosphate
  modified_base 19: mod_base = OTHER; note = 2'-O-methylcytidine-3'-phosphate
  modified_base 20: mod_base = OTHER; note = 2'-O-methyluridine-3'-phosphate
  modified_base 21: mod_base = OTHER; note = 2'-O-methyluridine-3'-phosphate ((2S,4R)-1-[29-[[2-(acetylamino)-2-deoxy-beta-D-galactopyra nosyl]oxy]-14,14-bis[[3-[[3-[[5-[[2-(acetylamino)-2-deoxy-b eta-D-galactopyranosyl]oxy]-1-oxopentyl]amino]propyl]amino] -3-oxopropoxy]methyl]-1,12,19,25-tetraoxo-16-oxa-13,20,24-t riazanonacos-1-yl]-4-hydroxy-2-pyrrolidinyl)methyl ester
cagcagcacagtgactccctt

SEQ ID NO: 845 - RNA, 21 nt, synthetic construct
  source 1..21: mol_type = other RNA
  modified_base 1: mod_base = OTHER; note = 2'-O-methyluridine-3'-phosphorothioate
  modified_base 2: mod_base = OTHER; note = 2'-O-methylguanosine-3'-phosphorothioate
  modified_base 3: mod_base = OTHER; note = 2'-O-methylcytidine-3'-phosphate
  modified_base 4: mod_base = OTHER; note = 2'-O-methylcytidine-3'-phosphate
  modified_base 5: mod_base = OTHER; note = 2'-O-methylcytidine-3'-phosphate
  modified_base 6: mod_base = OTHER; note = 2'-O-methyluridine-3'-phosphate
  modified_base 7: mod_base = OTHER; note = 2'-deoxy-2'-fluoroadenosine-3'-phosphate
  modified_base 8: mod_base = OTHER; note = 2'-O-methylguanosine-3'-phosphate
  modified_base 9: mod_base = OTHER; note = 2'-deoxy-2'-fluoroguanosine-3'-phosphate
  modified_base 10: mod_base = OTHER; note = 2'-deoxy-2'-fluoroguanosine-3'-phosphate
  modified_base 11: mod_base = OTHER; note = 2'-deoxy-2'-fluoroadenosine-3'-phosphate
  modified_base 12: mod_base = OTHER; note = 2'-O-methylcytidine-3'-phosphate
  modified_base 13: mod_base = OTHER; note = 2'-O-methylcytidine-3'-phosphate
  modified_base 14: mod_base = OTHER; note = 2'-O-methyladenosine-3'-phosphate
  modified_base 15: mod_base = OTHER; note = 2'-O-methylcytidine-3'-phosphate
  modified_base 16: mod_base = OTHER; note = 2'-O-methylcytidine-3'-phosphate
  modified_base 17: mod_base = OTHER; note = 2'-O-methylcytidine-3'-phosphate
  modified_base 18: mod_base = OTHER; note = 2'-O-methyladenosine-3'-phosphate
  modified_base 19: mod_base = OTHER; note = 2'-O-methylcytidine-3'-phosphate
  modified_base 20: mod_base = OTHER; note = 2'-O-methyladenosine-3'-phosphate
  modified_base 21: mod_base = OTHER; note = 2'-O-methyluridine-3'-phosphate ((2S,4R)-1-[29-[[2-(acetylamino)-2-deoxy-beta-D-galactopyra nosyl]oxy]-14,14-bis[[3-[[3-[[5-[[2-(acetylamino)-2-deoxy-b eta-D-galactopyranosyl]oxy]-1-oxopentyl]amino]propyl]amino] -3-oxopropoxy]methyl]-1,12,19,25-tetraoxo-16-oxa-13,20,24-t riazanonacos-1-yl]-4-hydroxy-2-pyrrolidinyl)methyl ester
tgccctagggaccacccacat

SEQ ID NO: 846 - RNA, 21 nt, synthetic construct
  source 1..21: mol_type = other RNA
  modified_base 1: mod_base = OTHER; note = 2'-O-methylcytidine-3'-phosphorothioate
  modified_base 2: mod_base = OTHER; note = 2'-O-methyladenosine-3'-phosphorothioate
  modified_base 3: mod_base = OTHER; note = 2'-O-methylcytidine-3'-phosphate
  modified_base 4: mod_base = OTHER; note = 2'-O-methyladenosine-3'-phosphate
  modified_base 5: mod_base = OTHER; note = 2'-O-methylcytidine-3'-phosphate
  modified_base 6: mod_base = OTHER; note = 2'-O-methyladenosine-3'-phosphate
  modified_base 7: mod_base = OTHER; note = 2'-deoxy-2'-fluorocytidine-3'-phosphate
  modified_base 8: mod_base = OTHER; note = 2'-O-methylguanosine-3'-phosphate
  modified_base 9: mod_base = OTHER; note = 2'-deoxy-2'-fluoroguanosine-3'-phosphate
  modified_base 10: mod_base = OTHER; note = 2'-deoxy-2'-fluoroguanosine-3'-phosphate
  modified_base 11: mod_base = OTHER; note = 2'-deoxy-2'-fluorocytidine-3'-phosphate
  modified_base 12: mod_base = OTHER; note = 2'-O-methylguanosine-3'-phosphate
  modified_base 13: mod_base = OTHER; note = 2'-O-methyladenosine-3'-phosphate
  modified_base 14: mod_base = OTHER; note = 2'-O-methyluridine-3'-phosphate
  modified_base 15: mod_base = OTHER; note = 2'-O-methylcytidine-3'-phosphate
  modified_base 16: mod_base = OTHER; note = 2'-O-methylcytidine-3'-phosphate
  modified_base 17: mod_base = OTHER; note = 2'-O-methylcytidine-3'-phosphate
  modified_base 18: mod_base = OTHER; note = 2'-O-methyluridine-3'-phosphate
  modified_base 19: mod_base = OTHER; note = 2'-O-methylguanosine-3'-phosphate
  modified_base 20: mod_base = OTHER; note = 2'-O-methyluridine-3'-phosphate
  modified_base 21: mod_base = OTHER; note = 2'-O-methyluridine-3'-phosphate ((2S,4R)-1-[29-[[2-(acetylamino)-2-deoxy-beta-D-galactopyra nosyl]oxy]-14,14-bis[[3-[[3-[[5-[[2-(acetylamino)-2-deoxy-b eta-D-galactopyranosyl]oxy]-1-oxopentyl]amino]propyl]amino] -3-oxopropoxy]methyl]-1,12,19,25-tetraoxo-16-oxa-13,20,24-t riazanonacos-1-yl]-4-hydroxy-2-pyrrolidinyl)methyl ester
cacacacgggcgatccctgtt

SEQ ID NO: 847 - RNA, 21 nt, synthetic construct
  source 1..21: mol_type = other RNA
  modified_base 1: mod_base = OTHER; note = 2'-O-methyladenosine-3'-phosphorothioate
  modified_base 2: mod_base = OTHER; note = 2'-O-methylguanosine-3'-phosphorothioate
  modified_base 3: mod_base = OTHER; note = 2'-O-methylcytidine-3'-phosphate
  modified_base 4: mod_base = OTHER; note = 2'-O-methylcytidine-3'-phosphate
  modified_base 5: mod_base = OTHER; note = 2'-O-methyluridine-3'-phosphate
  modified_base 6: mod_base = OTHER; note = 2'-O-methylguanosine-3'-phosphate
  modified_base 7: mod_base = OTHER; note = 2'-deoxy-2'-fluoroguanosine-3'-phosphate
  modified_base 8: mod_base = OTHER; note = 2'-O-methyladenosine-3'-phosphate
  modified_base 9: mod_base = OTHER; note = 2'-deoxy-2'-fluorocytidine-3'-phosphate
  modified_base 10: mod_base = OTHER; note = 2'-deoxy-2'-fluorouridine-3'-phosphate
  modified_base 11: mod_base = OTHER; note = 2'-deoxy-2'-fluorouridine-3'-phosphate
  modified_base 12: mod_base = OTHER; note = 2'-O-methylcytidine-3'-phosphate
  modified_base 13: mod_base = OTHER; note = 2'-O-methylguanosine-3'-phosphate
  modified_base 14: mod_base = OTHER; note = 2'-O-methylguanosine-3'-phosphate
  modified_base 15: mod_base = OTHER; note = 2'-O-methylcytidine-3'-phosphate
  modified_base 16: mod_base = OTHER; note = 2'-O-methylcytidine-3'-phosphate
  modified_base 17: mod_base = OTHER; note = 2'-O-methyladenosine-3'-phosphate
  modified_base 18: mod_base = OTHER; note = 2'-O-methylcytidine-3'-phosphate
  modified_base 19: mod_base = OTHER; note = 2'-O-methylcytidine-3'-phosphate
  modified_base 20: mod_base = OTHER; note = 2'-O-methyluridine-3'-phosphate
  modified_base 21: mod_base = OTHER; note = 2'-O-methyluridine-3'-phosphate ((2S,4R)-1-[29-[[2-(acetylamino)-2-deoxy-beta-D-galactopyra nosyl]oxy]-14,14-bis[[3-[[3-[[5-[[2-(acetylamino)-2-deoxy-b eta-D-galactopyranosyl]oxy]-1-oxopentyl]amino]propyl]amino] -3-oxopropoxy]methyl]-1,12,19,25-tetraoxo-16-oxa-13,20,24-t riazanonacos-1-yl]-4-hydroxy-2-pyrrolidinyl)methyl ester
agcctggacttcggccacctt

SEQ ID NO: 848 - RNA, 21 nt, synthetic construct
  source 1..21: mol_type = other RNA
  modified_base 1: mod_base = OTHER; note = 2'-O-methyladenosine-3'-phosphorothioate
  modified_base 2: mod_base = OTHER; note = 2'-O-methylcytidine-3'-phosphorothioate
  modified_base 3: mod_base = OTHER; note = 2'-O-methylcytidine-3'-phosphate
  modified_base 4: mod_base = OTHER; note = 2'-O-methylcytidine-3'-phosphate
  modified_base 5: mod_base = OTHER; note = 2'-O-methyladenosine-3'-phosphate
  modified_base 6: mod_base = OTHER; note = 2'-O-methylcytidine-3'-phosphate
  modified_base 7: mod_base = OTHER; note = 2'-deoxy-2'-fluoroadenosine-3'-phosphate
  modified_base 8: mod_base = OTHER; note = 2'-O-methyluridine-3'-phosphate
  modified_base 9: mod_base = OTHER; note = 2'-deoxy-2'-fluorocytidine-3'-phosphate
  modified_base 10: mod_base = OTHER; note = 2'-deoxy-2'-fluoroadenosine-3'-phosphate
  modified_base 11: mod_base = OTHER; note = 2'-deoxy-2'-fluorocytidine-3'-phosphate
  modified_base 12: mod_base = OTHER; note = 2'-O-methyladenosine-3'-phosphate
  modified_base 13: mod_base = OTHER; note = 2'-O-methylguanosine-3'-phosphate
  modified_base 14: mod_base = OTHER; note = 2'-O-methyladenosine-3'-phosphate
  modified_base 15: mod_base = OTHER; note = 2'-O-methylguanosine-3'-phosphate
  modified_base 16: mod_base = OTHER; note = 2'-O-methylcytidine-3'-phosphate
  modified_base 17: mod_base = OTHER; note = 2'-O-methylcytidine-3'-phosphate
  modified_base 18: mod_base = OTHER; note = 2'-O-methyluridine-3'-phosphate
  modified_base 19: mod_base = OTHER; note = 2'-O-methyluridine-3'-phosphate
  modified_base 20: mod_base = OTHER; note = 2'-O-methylcytidine-3'-phosphate
  modified_base 21: mod_base = OTHER; note = 2'-O-methyluridine-3'-phosphate ((2S,4R)-1-[29-[[2-(acetylamino)-2-deoxy-beta-D-galactopyra nosyl]oxy]-14,14-bis[[3-[[3-[[5-[[2-(acetylamino)-2-deoxy-b eta-D-galactopyranosyl]oxy]-1-oxopentyl]amino]propyl]amino] -3-oxopropoxy]methyl]-1,12,19,25-tetraoxo-16-oxa-13,20,24-t riazanonacos-1-yl]-4-hydroxy-2-pyrrolidinyl)methyl ester
acccacatcacagagccttct

SEQ ID NO: 849 - RNA, 21 nt, synthetic construct
  source 1..21: mol_type = other RNA
  modified_base 1: mod_base = OTHER; note = 2'-O-methylcytidine-3'-phosphorothioate
  modified_base 2: mod_base = OTHER; note = 2'-O-methyladenosine-3'-phosphorothioate
  modified_base 3: mod_base = OTHER; note = 2'-O-methyladenosine-3'-phosphate
  modified_base 4: mod_base = OTHER; note = 2'-O-methylcytidine-3'-phosphate
  modified_base 5: mod_base = OTHER; note = 2'-O-methylcytidine-3'-phosphate
  modified_base 6: mod_base = OTHER; note = 2'-O-methyladenosine-3'-phosphate
  modified_base 7: mod_base = OTHER; note = 2'-deoxy-2'-fluorocytidine-3'-phosphate
  modified_base 8: mod_base = OTHER; note = 2'-O-methylcytidine-3'-phosphate
  modified_base 9: mod_base = OTHER; note = 2'-deoxy-2'-fluoroguanosine-3'-phosphate
  modified_base 10: mod_base = OTHER; note = 2'-deoxy-2'-fluoroguanosine-3'-phosphate
  modified_base 11: mod_base = OTHER; note = 2'-deoxy-2'-fluorouridine-3'-phosphate
  modified_base 12: mod_base = OTHER; note = 2'-O-methyladenosine-3'-phosphate
  modified_base 13: mod_base = OTHER; note = 2'-O-methylcytidine-3'-phosphate
  modified_base 14: mod_base = OTHER; note = 2'-O-methylcytidine-3'-phosphate
  modified_base 15: mod_base = OTHER; note = 2'-O-methyladenosine-3'-phosphate
  modified_base 16: mod_base = OTHER; note = 2'-O-methylcytidine-3'-phosphate
  modified_base 17: mod_base = OTHER; note = 2'-O-methylcytidine-3'-phosphate
  modified_base 18: mod_base = OTHER; note = 2'-O-methylcytidine-3'-phosphate
  modified_base 19: mod_base = OTHER; note = 2'-O-methyladenosine-3'-phosphate
  modified_base 20: mod_base = OTHER; note = 2'-O-methylguanosine-3'-phosphate
  modified_base 21: mod_base = OTHER; note = 2'-O-methyluridine-3'-phosphate ((2S,4R)-1-[29-[[2-(acetylamino)-2-deoxy-beta-D-galactopyra nosyl]oxy]-14,14-bis[[3-[[3-[[5-[[2-(acetylamino)-2-deoxy-b eta-D-galactopyranosyl]oxy]-1-oxopentyl]amino]propyl]amino] -3-oxopropoxy]methyl]-1,12,19,25-tetraoxo-16-oxa-13,20,24-t riazanonacos-1-yl]-4-hydroxy-2-pyrrolidinyl)methyl ester
caaccaccggtaccacccagt

SEQ ID NO: 850 - RNA, 21 nt, synthetic construct
  source 1..21: mol_type = other RNA
  modified_base 1: mod_base = OTHER; note = 2'-O-methyladenosine-3'-phosphorothioate
  modified_base 2: mod_base = OTHER; note = 2'-O-methylcytidine-3'-phosphorothioate
  modified_base 3: mod_base = OTHER; note = 2'-O-methylcytidine-3'-phosphate
  modified_base 4: mod_base = OTHER; note = 2'-O-methylcytidine-3'-phosphate
  modified_base 5: mod_base = OTHER; note = 2'-O-methyladenosine-3'-phosphate
  modified_base 6: mod_base = OTHER; note = 2'-O-methylguanosine-3'-phosphate
  modified_base 7: mod_base = OTHER; note = 2'-deoxy-2'-fluorocytidine-3'-phosphate
  modified_base 8: mod_base = OTHER; note = 2'-O-methyladenosine-3'-phosphate
  modified_base 9: mod_base = OTHER; note = 2'-deoxy-2'-fluoroadenosine-3'-phosphate
  modified_base 10: mod_base = OTHER; note = 2'-deoxy-2'-fluoroguanosine-3'-phosphate
  modified_base 11: mod_base = OTHER; note = 2'-deoxy-2'-fluoroadenosine-3'-phosphate
  modified_base 12: mod_base = OTHER; note = 2'-O-methylcytidine-3'-phosphate
  modified_base 13: mod_base = OTHER; note = 2'-O-methylcytidine-3'-phosphate
  modified_base 14: mod_base = OTHER; note = 2'-O-methylcytidine-3'-phosphate
  modified_base 15: mod_base = OTHER; note = 2'-O-methylguanosine-3'-phosphate
  modified_base 16: mod_base = OTHER; note = 2'-O-methylcytidine-3'-phosphate
  modified_base 17: mod_base = OTHER; note = 2'-O-methyladenosine-3'-phosphate
  modified_base 18: mod_base = OTHER; note = 2'-O-methylcytidine-3'-phosphate
  modified_base 19: mod_base = OTHER; note = 2'-O-methylcytidine-3'-phosphate
  modified_base 20: mod_base = OTHER; note = 2'-O-methyluridine-3'-phosphate
  modified_base 21: mod_base = OTHER; note = 2'-O-methyluridine-3'-phosphate ((2S,4R)-1-[29-[[2-(acetylamino)-2-deoxy-beta-D-galactopyra nosyl]oxy]-14,14-bis[[3-[[3-[[5-[[2-(acetylamino)-2-deoxy-b eta-D-galactopyranosyl]oxy]-1-oxopentyl]amino]propyl]amino] -3-oxopropoxy]methyl]-1,12,19,25-tetraoxo-16-oxa-13,20,24-t riazanonacos-1-yl]-4-hydroxy-2-pyrrolidinyl)methyl ester
acccagcaagacccgcacctt

SEQ ID NO: 851 - RNA, 21 nt, synthetic construct
  source 1..21: mol_type = other RNA
  modified_base 1: mod_base = OTHER; note = 2'-O-methylguanosine-3'-phosphorothioate
  modified_base 2: mod_base = OTHER; note = 2'-O-methyluridine-3'-phosphorothioate
  modified_base 3: mod_base = OTHER; note = 2'-O-methylguanosine-3'-phosphate
  modified_base 4: mod_base = OTHER; note = 2'-O-methylguanosine-3'-phosphate
  modified_base 5: mod_base = OTHER; note = 2'-O-methylcytidine-3'-phosphate
  modified_base 6: mod_base = OTHER; note = 2'-O-methyluridine-3'-phosphate
  modified_base 7: mod_base = OTHER; note = 2'-deoxy-2'-fluoroguanosine-3'-phosphate
  modified_base 8: mod_base = OTHER; note = 2'-O-methylguanosine-3'-phosphate
  modified_base 9: mod_base = OTHER; note = 2'-deoxy-2'-fluoroadenosine-3'-phosphate
  modified_base 10: mod_base = OTHER; note = 2'-deoxy-2'-fluorocytidine-3'-phosphate
  modified_base 11: mod_base = OTHER; note = 2'-deoxy-2'-fluorouridine-3'-phosphate
  modified_base 12: mod_base = OTHER; note = 2'-O-methyladenosine-3'-phosphate
  modified_base 13: mod_base = OTHER; note = 2'-O-methylcytidine-3'-phosphate
  modified_base 14: mod_base = OTHER; note = 2'-O-methyladenosine-3'-phosphate
  modified_base 15: mod_base = OTHER; note = 2'-O-methylguanosine-3'-phosphate
  modified_base 16: mod_base = OTHER; note = 2'-O-methylcytidine-3'-phosphate
  modified_base 17: mod_base = OTHER; note = 2'-O-methyluridine-3'-phosphate
  modified_base 18: mod_base = OTHER; note = 2'-O-methyladenosine-3'-phosphate
  modified_base 19: mod_base = OTHER; note = 2'-O-methylcytidine-3'-phosphate
  modified_base 20: mod_base = OTHER; note = 2'-O-methylcytidine-3'-phosphate
  modified_base 21: mod_base = OTHER; note = 2'-O-methyluridine-3'-phosphate ((2S,4R)-1-[29-[[2-(acetylamino)-2-deoxy-beta-D-galactopyra nosyl]oxy]-14,14-bis[[3-[[3-[[5-[[2-(acetylamino)-2-deoxy-b eta-D-galactopyranosyl]oxy]-1-oxopentyl]amino]propyl]amino] -3-oxopropoxy]methyl]-1,12,19,25-tetraoxo-16-oxa-13,20,24-t riazanonacos-1-yl]-4-hydroxy-2-pyrrolidinyl)methyl ester
gtggctggactacagctacct

SEQ ID NO: 852 - RNA, 21 nt, synthetic construct
  source 1..21: mol_type = other RNA
  modified_base 1: mod_base = OTHER; note = 2'-O-methyluridine-3'-phosphorothioate
  modified_base 2: mod_base = OTHER; note = 2'-O-methyluridine-3'-phosphorothioate
  modified_base 3: mod_base = OTHER; note = 2'-O-methylguanosine-3'-phosphate
  modified_base 4: mod_base = OTHER; note = 2'-O-methyladenosine-3'-phosphate
  modified_base 5: mod_base = OTHER; note = 2'-O-methylcytidine-3'-phosphate
  modified_base 6: mod_base = OTHER; note = 2'-O-methyladenosine-3'-phosphate
  modified_base 7: mod_base = OTHER; note = 2'-deoxy-2'-fluorocytidine-3'-phosphate
  modified_base 8: mod_base = OTHER; note = 2'-O-methylcytidine-3'-phosphate
  modified_base 9: mod_base = OTHER; note = 2'-deoxy-2'-fluorouridine-3'-phosphate
  modified_base 10: mod_base = OTHER; note = 2'-deoxy-2'-fluoroadenosine-3'-phosphate
  modified_base 11: mod_base = OTHER; note = 2'-deoxy-2'-fluorocytidine-3'-phosphate
  modified_base 12: mod_base = OTHER; note = 2'-O-methyluridine-3'-phosphate
  modified_base 13: mod_base = OTHER; note = 2'-O-methylcytidine-3'-phosphate
  modified_base 14: mod_base = OTHER; note = 2'-O-methylcytidine-3'-phosphate
  modified_base 15: mod_base = OTHER; note = 2'-O-methyladenosine-3'-phosphate
  modified_base 16: mod_base = OTHER; note = 2'-O-methyladenosine-3'-phosphate
  modified_base 17: mod_base = OTHER; note = 2'-O-methylcytidine-3'-phosphate
  modified_base 18: mod_base = OTHER; note = 2'-O-methyladenosine-3'-phosphate
  modified_base 19: mod_base = OTHER; note = 2'-O-methyluridine-3'-phosphate
  modified_base 20: mod_base = OTHER; note = 2'-O-methylcytidine-3'-phosphate
  modified_base 21: mod_base = OTHER; note = 2'-O-methyluridine-3'-phosphate ((2S,4R)-1-[29-[[2-(acetylamino)-2-deoxy-beta-D-galactopyra nosyl]oxy]-14,14-bis[[3-[[3-[[5-[[2-(acetylamino)-2-deoxy-b eta-D-galactopyranosyl]oxy]-1-oxopentyl]amino]propyl]amino] -3-oxopropoxy]methyl]-1,12,19,25-tetraoxo-16-oxa-13,20,24-t riazanonacos-1-yl]-4-hydroxy-2-pyrrolidinyl)methyl ester
ttgacacctactccaacatct

SEQ ID NO: 853 - RNA, 21 nt, synthetic construct
  source 1..21: mol_type = other RNA
  modified_base 1: mod_base = OTHER; note = 2'-O-methyluridine-3'-phosphorothioate
  modified_base 2: mod_base = OTHER; note = 2'-O-methyluridine-3'-phosphorothioate
  modified_base 3: mod_base = OTHER; note = 2'-O-methylguanosine-3'-phosphate
  modified_base 4: mod_base = OTHER; note = 2'-O-methylguanosine-3'-phosphate
  modified_base 5: mod_base = OTHER; note = 2'-O-methylguanosine-3'-phosphate
  modified_base 6: mod_base = OTHER; note = 2'-O-methylcytidine-3'-phosphate
  modified_base 7: mod_base = OTHER; note = 2'-deoxy-2'-fluorocytidine-3'-phosphate
  modified_base 8: mod_base = OTHER; note = 2'-O-methyladenosine-3'-phosphate
  modified_base 9: mod_base = OTHER; note = 2'-deoxy-2'-fluoroguanosine-3'-phosphate
  modified_base 10: mod_base = OTHER; note = 2'-deoxy-2'-fluoroguanosine-3'-phosphate
  modified_base 11: mod_base = OTHER; note = 2'-deoxy-2'-fluorouridine-3'-phosphate
  modified_base 12: mod_base = OTHER; note = 2'-O-methylcytidine-3'-phosphate
  modified_base 13: mod_base = OTHER; note = 2'-O-methylguanosine-3'-phosphate
  modified_base 14: mod_base = OTHER; note = 2'-O-methyluridine-3'-phosphate
  modified_base 15: mod_base = OTHER; note = 2'-O-methylguanosine-3'-phosphate
  modified_base 16: mod_base = OTHER; note = 2'-O-methylguanosine-3'-phosphate
  modified_base 17: mod_base = OTHER; note = 2'-O-methyladenosine-3'-phosphate
  modified_base 18: mod_base = OTHER; note = 2'-O-methyladenosine-3'-phosphate
  modified_base 19: mod_base = OTHER; note = 2'-O-methyluridine-3'-phosphate
  modified_base 20: mod_base = OTHER; note = 2'-O-methylguanosine-3'-phosphate
  modified_base 21: mod_base = OTHER; note = 2'-O-methyluridine-3'-phosphate ((2S,4R)-1-[29-[[2-(acetylamino)-2-deoxy-beta-D-galactopyra nosyl]oxy]-14,14-bis[[3-[[3-[[5-[[2-(acetylamino)-2-deoxy-b eta-D-galactopyranosyl]oxy]-1-oxopentyl]amino]propyl]amino] -3-oxopropoxy]methyl]-1,12,19,25-tetraoxo-16-oxa-13,20,24-t riazanonacos-1-yl]-4-hydroxy-2-pyrrolidinyl)methyl ester
ttgggccaggtcgtggaatgt

SEQ ID NO: 854 - RNA, 21 nt, synthetic construct
  source 1..21: mol_type = other RNA
  modified_base 1: mod_base = OTHER; note = 2'-O-methylcytidine-3'-phosphorothioate
  modified_base 2: mod_base = OTHER; note = 2'-O-methylcytidine-3'-phosphorothioate
  modified_base 3: mod_base = OTHER; note = 2'-O-methyluridine-3'-phosphate
  modified_base 4: mod_base = OTHER; note = 2'-O-methylguanosine-3'-phosphate
  modified_base 5: mod_base = OTHER; note = 2'-O-methylguanosine-3'-phosphate
  modified_base 6: mod_base = OTHER; note = 2'-O-methyladenosine-3'-phosphate
  modified_base 7: mod_base = OTHER; note = 2'-deoxy-2'-fluorocytidine-3'-phosphate
  modified_base 8: mod_base = OTHER; note = 2'-O-methyluridine-3'-phosphate
  modified_base 9: mod_base = OTHER; note = 2'-deoxy-2'-fluorouridine-3'-phosphate
  modified_base 10: mod_base = OTHER; note = 2'-deoxy-2'-fluorouridine-3'-phosphate
  modified_base 11: mod_base = OTHER; note = 2'-deoxy-2'-fluoroguanosine-3'-phosphate
  modified_base 12: mod_base = OTHER; note = 2'-O-methylguanosine-3'-phosphate
  modified_base 13: mod_base = OTHER; note = 2'-O-methylcytidine-3'-phosphate
  modified_base 14: mod_base = OTHER; note = 2'-O-methylcytidine-3'-phosphate
  modified_base 15: mod_base = OTHER; note = 2'-O-methyluridine-3'-phosphate
  modified_base 16: mod_base = OTHER; note = 2'-O-methylguanosine-3'-phosphate
  modified_base 17: mod_base = OTHER; note = 2'-O-methylguanosine-3'-phosphate
  modified_base 18: mod_base = OTHER; note = 2'-O-methyluridine-3'-phosphate
  modified_base 19: mod_base = OTHER; note = 2'-O-methylcytidine-3'-phosphate
  modified_base 20: mod_base = OTHER; note = 2'-O-methyluridine-3'-phosphate
  modified_base 21: mod_base = OTHER; note = 2'-O-methyluridine-3'-phosphate ((2S,4R)-1-[29-[[2-(acetylamino)-2-deoxy-beta-D-galactopyra nosyl]oxy]-14,14-bis[[3-[[3-[[5-[[2-(acetylamino)-2-deoxy-b eta-D-galactopyranosyl]oxy]-1-oxopentyl]amino]propyl]amino] -3-oxopropoxy]methyl]-1,12,19,25-tetraoxo-16-oxa-13,20,24-t riazanonacos-1-yl]-4-hydroxy-2-pyrrolidinyl)methyl ester
cctggactttggcctggtctt

SEQ ID NO: 855 - RNA, 21 nt, synthetic construct
  source 1..21: mol_type = other RNA
  modified_base 1: mod_base = OTHER; note = 2'-O-methylguanosine-3'-phosphorothioate
  modified_base 2: mod_base = OTHER; note = 2'-O-methyladenosine-3'-phosphorothioate
  modified_base 3: mod_base = OTHER; note = 2'-O-methyluridine-3'-phosphate
  modified_base 4: mod_base = OTHER; note = 2'-O-methylguanosine-3'-phosphate
  modified_base 5: mod_base = OTHER; note = 2'-O-methyluridine-3'-phosphate
  modified_base 6: mod_base = OTHER; note = 2'-O-methylguanosine-3'-phosphate
  modified_base 7: mod_base = OTHER; note = 2'-deoxy-2'-fluorocytidine-3'-phosphate
  modified_base 8: mod_base = OTHER; note = 2'-O-methyluridine-3'-phosphate
  modified_base 9: mod_base = OTHER; note = 2'-deoxy-2'-fluorouridine-3'-phosphate
  modified_base 10: mod_base = OTHER; note = 2'-deoxy-2'-fluorocytidine-3'-phosphate
  modified_base 11: mod_base = OTHER; note = 2'-deoxy-2'-fluoroadenosine-3'-phosphate
  modified_base 12: mod_base = OTHER; note = 2'-O-methyladenosine-3'-phosphate
  modified_base 13: mod_base = OTHER; note = 2'-O-methylcytidine-3'-phosphate
  modified_base 14: mod_base = OTHER; note = 2'-O-methyluridine-3'-phosphate
  modified_base 15: mod_base = OTHER; note = 2'-O-methyladenosine-3'-phosphate
  modified_base 16: mod_base = OTHER; note = 2'-O-methyluridine-3'-phosphate
  modified_base 17: mod_base = OTHER; note = 2'-O-methylguanosine-3'-phosphate
  modified_base 18: mod_base = OTHER; note = 2'-O-methyladenosine-3'-phosphate
  modified_base 19: mod_base = OTHER; note = 2'-O-methyladenosine-3'-phosphate
  modified_base 20: mod_base = OTHER; note = 2'-O-methyladenosine-3'-phosphate
  modified_base 21: mod_base = OTHER; note = 2'-O-methyluridine-3'-phosphate ((2S,4R)-1-[29-[[2-(acetylamino)-2-deoxy-beta-D-galactopyra nosyl]oxy]-14,14-bis[[3-[[3-[[5-[[2-(acetylamino)-2-deoxy-b eta-D-galactopyranosyl]oxy]-1-oxopentyl]amino]propyl]amino] -3-oxopropoxy]methyl]-1,12,19,25-tetraoxo-16-oxa-13,20,24-t riazanonacos-1-yl]-4-hydroxy-2-pyrrolidinyl)methyl ester
gatgtgcttcaactatgaaat

SEQ ID NO: 856 - RNA, 21 nt, synthetic construct
  source 1..21: mol_type = other RNA
  modified_base 1: mod_base = OTHER; note = 2'-O-methyluridine-3'-phosphorothioate
  modified_base 2: mod_base = OTHER; note = 2'-O-methylguanosine-3'-phosphorothioate
  modified_base 3: mod_base = OTHER; note = 2'-O-methyluridine-3'-phosphate
  modified_base 4: mod_base = OTHER; note = 2'-O-methylguanosine-3'-phosphate
  modified_base 5: mod_base = OTHER; note = 2'-O-methyluridine-3'-phosphate
  modified_base 6: mod_base = OTHER; note = 2'-O-methyluridine-3'-phosphate
  modified_base 7: mod_base = OTHER; note = 2'-deoxy-2'-fluorocytidine-3'-phosphate
  modified_base 8: mod_base = OTHER; note = 2'-O-methyluridine-3'-phosphate
  modified_base 9: mod_base = OTHER; note = 2'-deoxy-2'-fluoroguanosine-3'-phosphate
  modified_base 10: mod_base = OTHER; note = 2'-deoxy-2'-fluorocytidine-3'-phosphate
  modified_base 11: mod_base = OTHER; note = 2'-deoxy-2'-fluorouridine-3'-phosphate
  modified_base 12: mod_base = OTHER; note = 2'-O-methylguanosine-3'-phosphate
  modified_base 13: mod_base = OTHER; note = 2'-O-methylcytidine-3'-phosphate
  modified_base 14: mod_base = OTHER; note = 2'-O-methyladenosine-3'-phosphate
  modified_base 15: mod_base = OTHER; note = 2'-O-methyladenosine-3'-phosphate
  modified_base 16: mod_base = OTHER; note = 2'-O-methylcytidine-3'-phosphate
  modified_base 17: mod_base = OTHER; note = 2'-O-methyluridine-3'-phosphate
  modified_base 18: mod_base = OTHER; note = 2'-O-methyladenosine-3'-phosphate
  modified_base 19: mod_base = OTHER; note = 2'-O-methylcytidine-3'-phosphate
  modified_base 20: mod_base = OTHER; note = 2'-O-methylguanosine-3'-phosphate
  modified_base 21: mod_base = OTHER; note = 2'-O-methyluridine-3'-phosphate ((2S,4R)-1-[29-[[2-(acetylamino)-2-deoxy-beta-D-galactopyra nosyl]oxy]-14,14-bis[[3-[[3-[[5-[[2-(acetylamino)-2-deoxy-b eta-D-galactopyranosyl]oxy]-1-oxopentyl]amino]propyl]amino] -3-oxopropoxy]methyl]-1,12,19,25-tetraoxo-16-oxa-13,20,24-t riazanonacos-1-yl]-4-hydroxy-2-pyrrolidinyl)methyl ester
tgtgttctgctgcaactacgt

SEQ ID NO: 857 - RNA, 21 nt, synthetic construct
  source 1..21: mol_type = other RNA
  modified_base 1: mod_base = OTHER; note = 2'-O-methylcytidine-3'-phosphorothioate
  modified_base 2: mod_base = OTHER; note = 2'-O-methyladenosine-3'-phosphorothioate
  modified_base 3: mod_base = OTHER; note = 2'-O-methylguanosine-3'-phosphate
  modified_base 4: mod_base = OTHER; note = 2'-O-methylcytidine-3'-phosphate
  modified_base 5: mod_base = OTHER; note = 2'-O-methyluridine-3'-phosphate
  modified_base 6: mod_base = OTHER; note = 2'-O-methylcytidine-3'-phosphate
  modified_base 7: mod_base = OTHER; note = 2'-deoxy-2'-fluorouridine-3'-phosphate
  modified_base 8: mod_base = OTHER; note = 2'-O-methyladenosine-3'-phosphate
  modified_base 9: mod_base = OTHER; note = 2'-deoxy-2'-fluorocytidine-3'-phosphate
  modified_base 10: mod_base = OTHER; note = 2'-deoxy-2'-fluoroguanosine-3'-phosphate
  modified_base 11: mod_base = OTHER; note = 2'-deoxy-2'-fluoroguanosine-3'-phosphate
  modified_base 12: mod_base = OTHER; note = 2'-O-methylcytidine-3'-phosphate
  modified_base 13: mod_base = OTHER; note = 2'-O-methylcytidine-3'-phosphate
  modified_base 14: mod_base = OTHER; note = 2'-O-methyladenosine-3'-phosphate
  modified_base 15: mod_base = OTHER; note = 2'-O-methyluridine-3'-phosphate
  modified_base 16: mod_base = OTHER; note = 2'-O-methylguanosine-3'-phosphate
  modified_base 17: mod_base = OTHER; note = 2'-O-methylcytidine-3'-phosphate
  modified_base 18: mod_base = OTHER; note = 2'-O-methylcytidine-3'-phosphate
  modified_base 19: mod_base = OTHER; note = 2'-O-methylcytidine-3'-phosphate
  modified_base 20: mod_base = OTHER; note = 2'-O-methyluridine-3'-phosphate
  modified_base 21: mod_base = OTHER; note = 2'-O-methyluridine-3'-phosphate ((2S,4R)-1-[29-[[2-(acetylamino)-2-deoxy-beta-D-galactopyra nosyl]oxy]-14,14-bis[[3-[[3-[[5-[[2-(acetylamino)-2-deoxy-b eta-D-galactopyranosyl]oxy]-1-oxopentyl]amino]propyl]amino] -3-oxopropoxy]methyl]-1,12,19,25-tetraoxo-16-oxa-13,20,24-t riazanonacos-1-yl]-4-hydroxy-2-pyrrolidinyl)methyl ester
cagctctacggccatgccctt

SEQ ID NO: 858 - RNA, 21 nt, synthetic construct
  source 1..21: mol_type = other RNA
  modified_base 1: mod_base = OTHER; note = 2'-O-methyladenosine-3'-phosphorothioate
  modified_base 2: mod_base = OTHER; note = 2'-O-methyluridine-3'-phosphorothioate
  modified_base 3: mod_base = OTHER; note = 2'-O-methylcytidine-3'-phosphate
  modified_base 4: mod_base = OTHER; note = 2'-O-methylcytidine-3'-phosphate
  modified_base 5: mod_base = OTHER; note = 2'-O-methyluridine-3'-phosphate
  modified_base 6: mod_base = OTHER; note = 2'-O-methylcytidine-3'-phosphate
  modified_base 7: mod_base = OTHER; note = 2'-deoxy-2'-fluoroadenosine-3'-phosphate
  modified_base 8: mod_base = OTHER; note = 2'-O-methylcytidine-3'-phosphate
  modified_base 9: mod_base = OTHER; note = 2'-deoxy-2'-fluoroadenosine-3'-phosphate
  modified_base 10: mod_base = OTHER; note = 2'-deoxy-2'-fluoroguanosine-3'-phosphate
  modified_base 11: mod_base = OTHER; note = 2'-deoxy-2'-fluoroadenosine-3'-phosphate
  modified_base 12: mod_base = OTHER; note = 2'-O-methylguanosine-3'-phosphate
  modified_base 13: mod_base = OTHER; note = 2'-O-methylcytidine-3'-phosphate
  modified_base 14: mod_base = OTHER; note = 2'-O-methyluridine-3'-phosphate
  modified_base 15: mod_base = OTHER; note = 2'-O-methylguanosine-3'-phosphate
  modified_base 16: mod_base = OTHER; note = 2'-O-methyladenosine-3'-phosphate
  modified_base 17: mod_base = OTHER; note = 2'-O-methylcytidine-3'-phosphate
  modified_base 18: mod_base = OTHER; note = 2'-O-methylcytidine-3'-phosphate
  modified_base 19: mod_base = OTHER; note = 2'-O-methyladenosine-3'-phosphate
  modified_base 20: mod_base = OTHER; note = 2'-O-methylcytidine-3'-phosphate
  modified_base 21: mod_base = OTHER; note = 2'-O-methyluridine-3'-phosphate ((2S,4R)-1-[29-[[2-(acetylamino)-2-deoxy-beta-D-galactopyra nosyl]oxy]-14,14-bis[[3-[[3-[[5-[[2-(acetylamino)-2-deoxy-b eta-D-galactopyranosyl]oxy]-1-oxopentyl]amino]propyl]amino] -3-oxopropoxy]methyl]-1,12,19,25-tetraoxo-16-oxa-13,20,24-t riazanonacos-1-yl]-4-hydroxy-2-pyrrolidinyl)methyl ester
atcctcacagagctgaccact

SEQ ID NO: 859 - RNA, 21 nt, synthetic construct
  source 1..21: mol_type = other RNA
  modified_base 1: mod_base = OTHER; note = 2'-O-methylcytidine-3'-phosphorothioate
  modified_base 2: mod_base = OTHER; note = 2'-O-methylcytidine-3'-phosphorothioate
  modified_base 3: mod_base = OTHER; note = 2'-O-methylguanosine-3'-phosphate
  modified_base 4: mod_base = OTHER; note = 2'-O-methyladenosine-3'-phosphate
  modified_base 5: mod_base = OTHER; note = 2'-O-methylguanosine-3'-phosphate
  modified_base 6: mod_base = OTHER; note = 2'-O-methylcytidine-3'-phosphate
  modified_base 7: mod_base = OTHER; note = 2'-deoxy-2'-fluoroadenosine-3'-phosphate
  modified_base 8: mod_base = OTHER; note = 2'-O-methylcytidine-3'-phosphate
  modified_base 9: mod_base = OTHER; note = 2'-deoxy-2'-fluorouridine-3'-phosphate
  modified_base 10: mod_base = OTHER; note = 2'-deoxy-2'-fluoroadenosine-3'-phosphate
  modified_base 11: mod_base = OTHER; note = 2'-deoxy-2'-fluorocytidine-3'-phosphate
  modified_base 12: mod_base = OTHER; note = 2'-O-methyladenosine-3'-phosphate
  modified_base 13: mod_base = OTHER; note = 2'-O-methylguanosine-3'-phosphate
  modified_base 14: mod_base = OTHER; note = 2'-O-methylcytidine-3'-phosphate
  modified_base 15: mod_base = OTHER; note = 2'-O-methylcytidine-3'-phosphate
  modified_base 16: mod_base = OTHER; note = 2'-O-methyladenosine-3'-phosphate
  modified_base 17: mod_base = OTHER; note = 2'-O-methylcytidine-3'-phosphate
  modified_base 18: mod_base = OTHER; note = 2'-O-methylcytidine-3'-phosphate
  modified_base 19: mod_base = OTHER; note = 2'-O-methylguanosine-3'-phosphate
  modified_base 20: mod_base = OTHER; note = 2'-O-methyluridine-3'-phosphate
  modified_base 21: mod_base = OTHER; note = 2'-O-methyluridine-3'-phosphate ((2S,4R)-1-[29-[[2-(acetylamino)-2-deoxy-beta-D-galactopyra nosyl]oxy]-14,14-bis[[3-[[3-[[5-[[2-(acetylamino)-2-deoxy-b eta-D-galactopyranosyl]oxy]-1-oxopentyl]amino]propyl]amino] -3-oxopropoxy]methyl]-1,12,19,25-tetraoxo-16-oxa-13,20,24-t riazanonacos-1-yl]-4-hydroxy-2-pyrrolidinyl)methyl ester
ccgagcactacagccaccgtt

SEQ ID NO: 860 - RNA, 21 nt, synthetic construct
  source 1..21: mol_type = other RNA
  modified_base 1: mod_base = OTHER; note = 2'-O-methylcytidine-3'-phosphorothioate
  modified_base 2: mod_base = OTHER; note = 2'-O-methylcytidine-3'-phosphorothioate
  modified_base 3: mod_base = OTHER; note = 2'-O-methyluridine-3'-phosphate
  modified_base 4: mod_base = OTHER; note = 2'-O-methylcytidine-3'-phosphate
  modified_base 5: mod_base = OTHER; note = 2'-O-methylcytidine-3'-phosphate
  modified_base 6: mod_base = OTHER; note = 2'-O-methyladenosine-3'-phosphate
  modified_base 7: mod_base = OTHER; note = 2'-deoxy-2'-fluorocytidine-3'-phosphate
  modified_base 8: mod_base = OTHER; note = 2'-O-methylcytidine-3'-phosphate
  modified_base 9: mod_base = OTHER; note = 2'-deoxy-2'-fluorocytidine-3'-phosphate
  modified_base 10: mod_base = OTHER; note = 2'-deoxy-2'-fluoroadenosine-3'-phosphate
  modified_base 11: mod_base = OTHER; note = 2'-deoxy-2'-fluoroguanosine-3'-phosphate
  modified_base 12: mod_base = OTHER; note = 2'-O-methylguanosine-3'-phosphate
  modified_base 13: mod_base = OTHER; note = 2'-O-methylcytidine-3'-phosphate
  modified_base 14: mod_base = OTHER; note = 2'-O-methyladenosine-3'-phosphate
  modified_base 15: mod_base = OTHER; note = 2'-O-methyladenosine-3'-phosphate
  modified_base 16: mod_base = OTHER; note = 2'-O-methylcytidine-3'-phosphate
  modified_base 17: mod_base = OTHER; note = 2'-O-methyluridine-3'-phosphate
  modified_base 18: mod_base = OTHER; note = 2'-O-methylguanosine-3'-phosphate
  modified_base 19: mod_base = OTHER; note = 2'-O-methylcytidine-3'-phosphate
  modified_base 20: mod_base = OTHER; note = 2'-O-methyluridine-3'-phosphate
  modified_base 21: mod_base = OTHER; note = 2'-O-methyluridine-3'-phosphate ((2S,4R)-1-[29-[[2-(acetylamino)-2-deoxy-beta-D-galactopyra nosyl]oxy]-14,14-bis[[3-[[3-[[5-[[2-(acetylamino)-2-deoxy-b eta-D-galactopyranosyl]oxy]-1-oxopentyl]amino]propyl]amino] -3-oxopropoxy]methyl]-1,12,19,25-tetraoxo-16-oxa-13,20,24-t riazanonacos-1-yl]-4-hydroxy-2-pyrrolidinyl)methyl ester
cctccacccaggcaactgctt

SEQ ID NO: 861 - RNA, 21 nt, synthetic construct
  source 1..21: mol_type = other RNA
  modified_base 1: mod_base = OTHER; note = 2'-O-methylguanosine-3'-phosphorothioate
  modified_base 2: mod_base = OTHER; note = 2'-O-methylguanosine-3'-phosphorothioate
  modified_base 3: mod_base = OTHER; note = 2'-O-methylcytidine-3'-phosphate
  modified_base 4: mod_base = OTHER; note = 2'-O-methylcytidine-3'-phosphate
  modified_base 5: mod_base = OTHER; note = 2'-O-methyladenosine-3'-phosphate
  modified_base 6: mod_base = OTHER; note = 2'-O-methylcytidine-3'-phosphate
  modified_base 7: mod_base = OTHER; note = 2'-deoxy-2'-fluoroguanosine-3'-phosphate
  modified_base 8: mod_base = OTHER; note = 2'-O-methyladenosine-3'-phosphate
  modified_base 9: mod_base = OTHER; note = 2'-deoxy-2'-fluorocytidine-3'-phosphate
  modified_base 10: mod_base = OTHER; note = 2'-deoxy-2'-fluoroadenosine-3'-phosphate
  modified_base 11: mod_base = OTHER; note = 2'-deoxy-2'-fluorocytidine-3'-phosphate
  modified_base 12: mod_base = OTHER; note = 2'-O-methylcytidine-3'-phosphate
  modified_base 13: mod_base = OTHER; note = 2'-O-methylcytidine-3'-phosphate
  modified_base 14: mod_base = OTHER; note = 2'-O-methyladenosine-3'-phosphate
  modified_base 15: mod_base = OTHER; note = 2'-O-methylcytidine-3'-phosphate
  modified_base 16: mod_base = OTHER; note = 2'-O-methyladenosine-3'-phosphate
  modified_base 17: mod_base = OTHER; note = 2'-O-methylguanosine-3'-phosphate
  modified_base 18: mod_base = OTHER; note = 2'-O-methyluridine-3'-phosphate
  modified_base 19: mod_base = OTHER; note = 2'-O-methylcytidine-3'-phosphate
  modified_base 20: mod_base = OTHER; note = 2'-O-methyladenosine-3'-phosphate
  modified_base 21: mod_base = OTHER; note = 2'-O-methyluridine-3'-phosphate ((2S,4R)-1-[29-[[2-(acetylamino)-2-deoxy-beta-D-galactopyra nosyl]oxy]-14,14-bis[[3-[[3-[[5-[[2-(acetylamino)-2-deoxy-b eta-D-galactopyranosyl]oxy]-1-oxopentyl]amino]propyl]amino] -3-oxopropoxy]methyl]-1,12,19,25-tetraoxo-16-oxa-13,20,24-t riazanonacos-1-yl]-4-hydroxy-2-pyrrolidinyl)methyl ester
ggccacgacacccacagtcat

SEQ ID NO: 862 - RNA, 21 nt, synthetic construct
  source 1..21: mol_type = other RNA
  modified_base 1: mod_base = OTHER; note = 2'-O-methylcytidine-3'-phosphorothioate
  modified_base 2: mod_base = OTHER; note = 2'-O-methyladenosine-3'-phosphorothioate
  modified_base 3: mod_base = OTHER; note = 2'-O-methylcytidine-3'-phosphate
  modified_base 4: mod_base = OTHER; note = 2'-O-methyladenosine-3'-phosphate
  modified_base 5: mod_base = OTHER; note = 2'-O-methylguanosine-3'-phosphate
  modified_base 6: mod_base = OTHER; note = 2'-O-methylcytidine-3'-phosphate
  modified_base 7: mod_base = OTHER; note = 2'-deoxy-2'-fluorouridine-3'-phosphate
  modified_base 8: mod_base = OTHER; note = 2'-O-methyladenosine-3'-phosphate
  modified_base 9: mod_base = OTHER; note = 2'-deoxy-2'-fluorocytidine-3'-phosphate
  modified_base 10: mod_base = OTHER; note = 2'-deoxy-2'-fluorocytidine-3'-phosphate
  modified_base 11: mod_base = OTHER; note = 2'-deoxy-2'-fluoroadenosine-3'-phosphate
  modified_base 12: mod_base = OTHER; note = 2'-O-methylguanosine-3'-phosphate
  modified_base 13: mod_base = OTHER; note = 2'-O-methylcytidine-3'-phosphate
  modified_base 14: mod_base = OTHER; note = 2'-O-methyluridine-3'-phosphate
  modified_base 15: mod_base = OTHER; note = 2'-O-methyluridine-3'-phosphate
  modified_base 16: mod_base = OTHER; note = 2'-O-methyluridine-3'-phosphate
  modified_base 17: mod_base = OTHER; note = 2'-O-methyladenosine-3'-phosphate
  modified_base 18: mod_base = OTHER; note = 2'-O-methylcytidine-3'-phosphate
  modified_base 19: mod_base = OTHER; note = 2'-O-methyladenosine-3'-phosphate
  modified_base 20: mod_base = OTHER; note = 2'-O-methylguanosine-3'-phosphate
  modified_base 21: mod_base = OTHER; note = 2'-O-methyluridine-3'-phosphate ((2S,4R)-1-[29-[[2-(acetylamino)-2-deoxy-beta-D-galactopyra nosyl]oxy]-14,14-bis[[3-[[3-[[5-[[2-(acetylamino)-2-deoxy-b eta-D-galactopyranosyl]oxy]-1-oxopentyl]amino]propyl]amino] -3-oxopropoxy]methyl]-1,12,19,25-tetraoxo-16-oxa-13,20,24-t riazanonacos-1-yl]-4-hydroxy-2-pyrrolidinyl)methyl ester
cacagctaccagctttacagt

SEQ ID NO: 863 - RNA, 21 nt, synthetic construct
  source 1..21: mol_type = other RNA
  modified_base 1: mod_base = OTHER; note = 2'-O-methyladenosine-3'-phosphorothioate
  modified_base 2: mod_base = OTHER; note = 2'-O-methylcytidine-3'-phosphorothioate
  modified_base 3: mod_base = OTHER; note = 2'-O-methylcytidine-3'-phosphate
  modified_base 4: mod_base = OTHER; note = 2'-O-methyladenosine-3'-phosphate
  modified_base 5: mod_base = OTHER; note = 2'-O-methylcytidine-3'-phosphate
  modified_base 6: mod_base = OTHER; note = 2'-O-methyladenosine-3'-phosphate
  modified_base 7: mod_base = OTHER; note = 2'-deoxy-2'-fluoroadenosine-3'-phosphate
  modified_base 8: mod_base = OTHER; note = 2'-O-methylcytidine-3'-phosphate
  modified_base 9: mod_base = OTHER; note = 2'-deoxy-2'-fluorocytidine-3'-phosphate
  modified_base 10: mod_base = OTHER; note = 2'-deoxy-2'-fluoroadenosine-3'-phosphate
  modified_base 11: mod_base = OTHER; note = 2'-deoxy-2'-fluorocytidine-3'-phosphate
  modified_base 12: mod_base = OTHER; note = 2'-O-methylguanosine-3'-phosphate
  modified_base 13: mod_base = OTHER; note = 2'-O-methylguanosine-3'-phosphate
  modified_base 14: mod_base = OTHER; note = 2'-O-methylguanosine-3'-phosphate
  modified_base 15: mod_base = OTHER; note = 2'-O-methylcytidine-3'-phosphate
  modified_base 16: mod_base = OTHER; note = 2'-O-methyluridine-3'-phosphate
  modified_base 17: mod_base = OTHER; note = 2'-O-methyluridine-3'-phosphate
  modified_base 18: mod_base = OTHER; note = 2'-O-methylcytidine-3'-phosphate
  modified_base 19: mod_base = OTHER; note = 2'-O-methyladenosine-3'-phosphate
  modified_base 20: mod_base = OTHER; note = 2'-O-methylcytidine-3'-phosphate
  modified_base 21: mod_base = OTHER; note = 2'-O-methyluridine-3'-phosphate ((2S,4R)-1-[29-[[2-(acetylamino)-2-deoxy-beta-D-galactopyra nosyl]oxy]-14,14-bis[[3-[[3-[[5-[[2-(acetylamino)-2-deoxy-b eta-D-galactopyranosyl]oxy]-1-oxopentyl]amino]propyl]amino] -3-oxopropoxy]methyl]-1,12,19,25-tetraoxo-16-oxa-13,20,24-t riazanonacos-1-yl]-4-hydroxy-2-pyrrolidinyl)methyl ester
accacaaccacgggcttcact

SEQ ID NO: 864 - RNA, 21 nt, synthetic construct
  source 1..21: mol_type = other RNA
  modified_base 1: mod_base = OTHER; note = 2'-O-methylguanosine-3'-phosphorothioate
  modified_base 2: mod_base = OTHER; note = 2'-O-methyladenosine-3'-phosphorothioate
  modified_base 3: mod_base = OTHER; note = 2'-O-methylcytidine-3'-phosphate
  modified_base 4: mod_base = OTHER; note = 2'-O-methylcytidine-3'-phosphate
  modified_base 5: mod_base = OTHER; note = 2'-O-methyladenosine-3'-phosphate
  modified_base 6: mod_base = OTHER; note = 2'-O-methylcytidine-3'-phosphate
  modified_base 7: mod_base = OTHER; note = 2'-deoxy-2'-fluorocytidine-3'-phosphate
  modified_base 8: mod_base = OTHER; note = 2'-O-methyladenosine-3'-phosphate
  modified_base 9: mod_base = OTHER; note = 2'-deoxy-2'-fluorocytidine-3'-phosphate
  modified_base 10: mod_base = OTHER; note = 2'-deoxy-2'-fluorocytidine-3'-phosphate
  modified_base 11: mod_base = OTHER; note = 2'-deoxy-2'-fluoroadenosine-3'-phosphate
  modified_base 12: mod_base = OTHER; note = 2'-O-methylcytidine-3'-phosphate
  modified_base 13: mod_base = OTHER; note = 2'-O-methylcytidine-3'-phosphate
  modified_base 14: mod_base = OTHER; note = 2'-O-methyladenosine-3'-phosphate
  modified_base 15: mod_base = OTHER; note = 2'-O-methylcytidine-3'-phosphate
  modified_base 16: mod_base = OTHER; note = 2'-O-methyladenosine-3'-phosphate
  modified_base 17: mod_base = OTHER; note = 2'-O-methyladenosine-3'-phosphate
  modified_base 18: mod_base = OTHER; note = 2'-O-methylcytidine-3'-phosphate
  modified_base 19: mod_base = OTHER; note = 2'-O-methyluridine-3'-phosphate
  modified_base 20: mod_base = OTHER; note = 2'-O-methylguanosine-3'-phosphate
  modified_base 21: mod_base = OTHER; note = 2'-O-methyluridine-3'-phosphate ((2S,4R)-1-[29-[[2-(acetylamino)-2-deoxy-beta-D-galactopyra nosyl]oxy]-14,14-bis[[3-[[3-[[5-[[2-(acetylamino)-2-deoxy-b eta-D-galactopyranosyl]oxy]-1-oxopentyl]amino]propyl]amino] -3-oxopropoxy]methyl]-1,12,19,25-tetraoxo-16-oxa-13,20,24-t riazanonacos-1-yl]-4-hydroxy-2-pyrrolidinyl)methyl ester
gaccaccaccaccacaactgt

SEQ ID NO: 865 - RNA, 21 nt, synthetic construct
  source 1..21: mol_type = other RNA
  modified_base 1: mod_base = OTHER; note = 2'-O-methylcytidine-3'-phosphorothioate
  modified_base 2: mod_base = OTHER; note = 2'-O-methyladenosine-3'-phosphorothioate
  modified_base 3: mod_base = OTHER; note = 2'-O-methylcytidine-3'-phosphate
  modified_base 4: mod_base = OTHER; note = 2'-O-methyluridine-3'-phosphate
  modified_base 5: mod_base = OTHER; note = 2'-O-methylguanosine-3'-phosphate
  modified_base 6: mod_base = OTHER; note = 2'-O-methylguanosine-3'-phosphate
  modified_base 7: mod_base = OTHER; note = 2'-deoxy-2'-fluorouridine-3'-phosphate
  modified_base 8: mod_base = OTHER; note = 2'-O-methyluridine-3'-phosphate
  modified_base 9: mod_base = OTHER; note = 2'-deoxy-2'-fluorocytidine-3'-phosphate
  modified_base 10: mod_base = OTHER; note = 2'-deoxy-2'-fluorouridine-3'-phosphate
  modified_base 11: mod_base = OTHER; note = 2'-deoxy-2'-fluoroadenosine-3'-phosphate
  modified_base 12: mod_base = OTHER; note = 2'-O-methyluridine-3'-phosphate
  modified_base 13: mod_base = OTHER; note = 2'-O-methylguanosine-3'-phosphate
  modified_base 14: mod_base = OTHER; note = 2'-O-methylguanosine-3'-phosphate
  modified_base 15: mod_base = OTHER; note = 2'-O-methylcytidine-3'-phosphate
  modified_base 16: mod_base = OTHER; note = 2'-O-methyladenosine-3'-phosphate
  modified_base 17: mod_base = OTHER; note = 2'-O-methyladenosine-3'-phosphate
  modified_base 18: mod_base = OTHER; note = 2'-O-methylcytidine-3'-phosphate
  modified_base 19: mod_base = OTHER; note = 2'-O-methyladenosine-3'-phosphate
  modified_base 20: mod_base = OTHER; note = 2'-O-methylcytidine-3'-phosphate
  modified_base 21: mod_base = OTHER; note = 2'-O-methyluridine-3'-phosphate ((2S,4R)-1-[29-[[2-(acetylamino)-2-deoxy-beta-D-galactopyra nosyl]oxy]-14,14-bis[[3-[[3-[[5-[[2-(acetylamino)-2-deoxy-b eta-D-galactopyranosyl]oxy]-1-oxopentyl]amino]propyl]amino] -3-oxopropoxy]methyl]-1,12,19,25-tetraoxo-16-oxa-13,20,24-t riazanonacos-1-yl]-4-hydroxy-2-pyrrolidinyl)methyl ester
cactggttctatggcaacact

SEQ ID NO: 866 - RNA, 21 nt, synthetic construct
  source 1..21: mol_type = other RNA
  modified_base 1: mod_base = OTHER; note = 2'-O-methylcytidine-3'-phosphorothioate
  modified_base 2: mod_base = OTHER; note = 2'-O-methylcytidine-3'-phosphorothioate
  modified_base 3: mod_base = OTHER; note = 2'-O-methyluridine-3'-phosphate
  modified_base 4: mod_base = OTHER; note = 2'-O-methylcytidine-3'-phosphate
  modified_base 5: mod_base = OTHER; note = 2'-O-methyluridine-3'-phosphate
  modified_base 6: mod_base = OTHER; note = 2'-O-methyladenosine-3'-phosphate
  modified_base 7: mod_base = OTHER; note = 2'-deoxy-2'-fluoroguanosine-3'-phosphate
  modified_base 8: mod_base = OTHER; note = 2'-O-methylcytidine-3'-phosphate
  modified_base 9: mod_base = OTHER; note = 2'-deoxy-2'-fluoroadenosine-3'-phosphate
  modified_base 10: mod_base = OTHER; note = 2'-deoxy-2'-fluorocytidine-3'-phosphate
  modified_base 11: mod_base = OTHER; note = 2'-deoxy-2'-fluoroadenosine-3'-phosphate
  modified_base 12: mod_base = OTHER; note = 2'-O-methylcytidine-3'-phosphate
  modified_base 13: mod_base = OTHER; note = 2'-O-methyladenosine-3'-phosphate
  modified_base 14: mod_base = OTHER; note = 2'-O-methylguanosine-3'-phosphate
  modified_base 15: mod_base = OTHER; note = 2'-O-methyladenosine-3'-phosphate
  modified_base 16: mod_base = OTHER; note = 2'-O-methylcytidine-3'-phosphate
  modified_base 17: mod_base = OTHER; note = 2'-O-methylcytidine-3'-phosphate
  modified_base 18: mod_base = OTHER; note = 2'-O-methyladenosine-3'-phosphate
  modified_base 19: mod_base = OTHER; note = 2'-O-methylguanosine-3'-phosphate
  modified_base 20: mod_base = OTHER; note = 2'-O-methyluridine-3'-phosphate
  modified_base 21: mod_base = OTHER; note = 2'-O-methyluridine-3'-phosphate ((2S,4R)-1-[29-[[2-(acetylamino)-2-deoxy-beta-D-galactopyra nosyl]oxy]-14,14-bis[[3-[[3-[[5-[[2-(acetylamino)-2-deoxy-b eta-D-galactopyranosyl]oxy]-1-oxopentyl]amino]propyl]amino] -3-oxopropoxy]methyl]-1,12,19,25-tetraoxo-16-oxa-13,20,24-t riazanonacos-1-yl]-4-hydroxy-2-pyrrolidinyl)methyl ester
cctctagcacacagaccagtt

SEQ ID NO: 867 - RNA, 21 nt, synthetic construct
  source 1..21: mol_type = other RNA
  modified_base 1: mod_base = OTHER; note = 2'-O-methylcytidine-3'-phosphorothioate
  modified_base 2: mod_base = OTHER; note = 2'-O-methylcytidine-3'-phosphorothioate
  modified_base 3: mod_base = OTHER; note = 2'-O-methyladenosine-3'-phosphate
  modified_base 4: mod_base = OTHER; note = 2'-O-methylcytidine-3'-phosphate
  modified_base 5: mod_base = OTHER; note = 2'-O-methylguanosine-3'-phosphate
  modified_base 6: mod_base = OTHER; note = 2'-O-methylguanosine-3'-phosphate
  modified_base 7: mod_base = OTHER; note = 2'-deoxy-2'-fluorocytidine-3'-phosphate
  modified_base 8: mod_base = OTHER; note = 2'-O-methylcytidine-3'-phosphate
  modified_base 9: mod_base = OTHER; note = 2'-deoxy-2'-fluoroadenosine-3'-phosphate
  modified_base 10: mod_base = OTHER; note = 2'-deoxy-2'-fluorocytidine-3'-phosphate
  modified_base 11: mod_base = OTHER; note = 2'-deoxy-2'-fluorouridine-3'-phosphate
  modified_base 12: mod_base = OTHER; note = 2'-O-methyladenosine-3'-phosphate
  modified_base 13: mod_base = OTHER; note = 2'-O-methylcytidine-3'-phosphate
  modified_base 14: mod_base = OTHER; note = 2'-O-methylguanosine-3'-phosphate
  modified_base 15: mod_base = OTHER; note = 2'-O-methyladenosine-3'-phosphate
  modified_base 16: mod_base = OTHER; note = 2'-O-methyluridine-3'-phosphate
  modified_base 17: mod_base = OTHER; note = 2'-O-methylcytidine-3'-phosphate
  modified_base 18: mod_base = OTHER; note = 2'-O-methyladenosine-3'-phosphate
  modified_base 19: mod_base = OTHER; note = 2'-O-methylcytidine-3'-phosphate
  modified_base 20: mod_base = OTHER; note = 2'-O-methylguanosine-3'-phosphate
  modified_base 21: mod_base = OTHER; note = 2'-O-methyluridine-3'-phosphate ((2S,4R)-1-[29-[[2-(acetylamino)-2-deoxy-beta-D-galactopyra nosyl]oxy]-14,14-bis[[3-[[3-[[5-[[2-(acetylamino)-2-deoxy-b eta-D-galactopyranosyl]oxy]-1-oxopentyl]amino]propyl]amino] -3-oxopropoxy]methyl]-1,12,19,25-tetraoxo-16-oxa-13,20,24-t riazanonacos-1-yl]-4-hydroxy-2-pyrrolidinyl)methyl ester
ccacggccactacgatcacgt

SEQ ID NO: 868 - RNA, 21 nt, synthetic construct
  source 1..21: mol_type = other RNA
  modified_base 1: mod_base = OTHER; note = 2'-O-methylguanosine-3'-phosphorothioate
  modified_base 2: mod_base = OTHER; note = 2'-O-methylguanosine-3'-phosphorothioate
  modified_base 3: mod_base = OTHER; note = 2'-O-methylguanosine-3'-phosphate
  modified_base 4: mod_base = OTHER; note = 2'-O-methyladenosine-3'-phosphate
  modified_base 5: mod_base = OTHER; note = 2'-O-methylcytidine-3'-phosphate
  modified_base 6: mod_base = OTHER; note = 2'-O-methylcytidine-3'-phosphate
  modified_base 7: mod_base = OTHER; note = 2'-deoxy-2'-fluoroadenosine-3'-phosphate
  modified_base 8: mod_base = OTHER; note = 2'-O-methylcytidine-3'-phosphate
  modified_base 9: mod_base = OTHER; note = 2'-deoxy-2'-fluorocytidine-3'-phosphate
  modified_base 10: mod_base = OTHER; note = 2'-deoxy-2'-fluorouridine-3'-phosphate
  modified_base 11: mod_base = OTHER; note = 2'-deoxy-2'-fluoroguanosine-3'-phosphate
  modified_base 12: mod_base = OTHER; note = 2'-O-methylguanosine-3'-phosphate
  modified_base 13: mod_base = OTHER; note = 2'-O-methyladenosine-3'-phosphate
  modified_base 14: mod_base = OTHER; note = 2'-O-methyluridine-3'-phosphate
  modified_base 15: mod_base = OTHER; note = 2'-O-methylcytidine-3'-phosphate
  modified_base 16: mod_base = OTHER; note = 2'-O-methylcytidine-3'-phosphate
  modified_base 17: mod_base = OTHER; note = 2'-O-methyluridine-3'-phosphate
  modified_base 18: mod_base = OTHER; note = 2'-O-methylcytidine-3'-phosphate
  modified_base 19: mod_base = OTHER; note = 2'-O-methyladenosine-3'-phosphate
  modified_base 20: mod_base = OTHER; note = 2'-O-methylcytidine-3'-phosphate
  modified_base 21: mod_base = OTHER; note = 2'-O-methyluridine-3'-phosphate ((2S,4R)-1-[29-[[2-(acetylamino)-2-deoxy-beta-D-galactopyra nosyl]oxy]-14,14-bis[[3-[[3-[[5-[[2-(acetylamino)-2-deoxy-b eta-D-galactopyranosyl]oxy]-1-oxopentyl]amino]propyl]amino] -3-oxopropoxy]methyl]-1,12,19,25-tetraoxo-16-oxa-13,20,24-t riazanonacos-1-yl]-4-hydroxy-2-pyrrolidinyl)methyl ester
gggaccacctggatcctcact

SEQ ID NO: 869 - RNA, 21 nt, synthetic construct
  source 1..21: mol_type = other RNA
  modified_base 1: mod_base = OTHER; note = 2'-O-methylcytidine-3'-phosphorothioate
  modified_base 2: mod_base = OTHER; note = 2'-O-methyladenosine-3'-phosphorothioate
  modified_base 3: mod_base = OTHER; note = 2'-O-methylguanosine-3'-phosphate
  modified_base 4: mod_base = OTHER; note = 2'-O-methylcytidine-3'-phosphate
  modified_base 5: mod_base = OTHER; note = 2'-O-methylcytidine-3'-phosphate
  modified_base 6: mod_base = OTHER; note = 2'-O-methyladenosine-3'-phosphate
  modified_base 7: mod_base = OTHER; note = 2'-deoxy-2'-fluorocytidine-3'-phosphate
  modified_base 8: mod_base = OTHER; note = 2'-O-methyluridine-3'-phosphate
  modified_base 9: mod_base = OTHER; note = 2'-deoxy-2'-fluoroadenosine-3'-phosphate
  modified_base 10: mod_base = OTHER; note = 2'-deoxy-2'-fluorocytidine-3'-phosphate
  modified_base 11: mod_base = OTHER; note = 2'-deoxy-2'-fluoroguanosine-3'-phosphate
  modified_base 12: mod_base = OTHER; note = 2'-O-methyladenosine-3'-phosphate
  modified_base 13: mod_base = OTHER; note = 2'-O-methylcytidine-3'-phosphate
  modified_base 14: mod_base = OTHER; note = 2'-O-methylcytidine-3'-phosphate
  modified_base 15: mod_base = OTHER; note = 2'-O-methylguanosine-3'-phosphate
  modified_base 16: mod_base = OTHER; note = 2'-O-methylcytidine-3'-phosphate
  modified_base 17: mod_base = OTHER; note = 2'-O-methyladenosine-3'-phosphate
  modified_base 18: mod_base = OTHER; note = 2'-O-methyladenosine-3'-phosphate
  modified_base 19: mod_base = OTHER; note = 2'-O-methylcytidine-3'-phosphate
  modified_base 20: mod_base = OTHER; note = 2'-O-methylcytidine-3'-phosphate
  modified_base 21: mod_base = OTHER; note = 2'-O-methyluridine-3'-phosphate ((2S,4R)-1-[29-[[2-(acetylamino)-2-deoxy-beta-D-galactopyra nosyl]oxy]-14,14-bis[[3-[[3-[[5-[[2-(acetylamino)-2-deoxy-b eta-D-galactopyranosyl]oxy]-1-oxopentyl]amino]propyl]amino] -3-oxopropoxy]methyl]-1,12,19,25-tetraoxo-16-oxa-13,20,24-t riazanonacos-1-yl]-4-hydroxy-2-pyrrolidinyl)methyl ester
cagccactacgaccgcaacct

SEQ ID NO: 870 - RNA, 21 nt, synthetic construct
  source 1..21: mol_type = other RNA
  modified_base 1: mod_base = OTHER; note = 2'-O-methyluridine-3'-phosphorothioate
  modified_base 2: mod_base = OTHER; note = 2'-O-methylcytidine-3'-phosphorothioate
  modified_base 3: mod_base = OTHER; note = 2'-O-methylcytidine-3'-phosphate
  modified_base 4: mod_base = OTHER; note = 2'-O-methylcytidine-3'-phosphate
  modified_base 5: mod_base = OTHER; note = 2'-O-methyladenosine-3'-phosphate
  modified_base 6: mod_base = OTHER; note = 2'-O-methyladenosine-3'-phosphate
  modified_base 7: mod_base = OTHER; note = 2'-deoxy-2'-fluoroadenosine-3'-phosphate
  modified_base 8: mod_base = OTHER; note = 2'-O-methylguanosine-3'-phosphate
  modified_base 9: mod_base = OTHER; note = 2'-deoxy-2'-fluorouridine-3'-phosphate
  modified_base 10: mod_base = OTHER; note = 2'-deoxy-2'-fluoroguanosine-3'-phosphate
  modified_base 11: mod_base = OTHER; note = 2'-deoxy-2'-fluorocytidine-3'-phosphate
  modified_base 12: mod_base = OTHER; note = 2'-O-methyluridine-3'-phosphate
  modified_base 13: mod_base = OTHER; note = 2'-O-methylguanosine-3'-phosphate
  modified_base 14: mod_base = OTHER; note = 2'-O-methyladenosine-3'-phosphate
  modified_base 15: mod_base = OTHER; note = 2'-O-methylcytidine-3'-phosphate
  modified_base 16: mod_base = OTHER; note = 2'-O-methylcytidine-3'-phosphate
  modified_base 17: mod_base = OTHER; note = 2'-O-methyladenosine-3'-phosphate
  modified_base 18: mod_base = OTHER; note = 2'-O-methylguanosine-3'-phosphate
  modified_base 19: mod_base = OTHER; note = 2'-O-methylcytidine-3'-phosphate
  modified_base 20: mod_base = OTHER; note = 2'-O-methyladenosine-3'-phosphate
  modified_base 21: mod_base = OTHER; note = 2'-O-methyluridine-3'-phosphate ((2S,4R)-1-[29-[[2-(acetylamino)-2-deoxy-beta-D-galactopyra nosyl]oxy]-14,14-bis[[3-[[3-[[5-[[2-(acetylamino)-2-deoxy-b eta-D-galactopyranosyl]oxy]-1-oxopentyl]amino]propyl]amino] -3-oxopropoxy]methyl]-1,12,19,25-tetraoxo-16-oxa-13,20,24-t riazanonacos-1-yl]-4-hydroxy-2-pyrrolidinyl)methyl ester
tcccaaagtgctgaccagcat

SEQ ID NO: 871 - RNA, 21 nt, synthetic construct
  source 1..21: mol_type = other RNA
  modified_base 1: mod_base = OTHER; note = 2'-O-methylcytidine-3'-phosphorothioate
  modified_base 2: mod_base = OTHER; note = 2'-O-methyluridine-3'-phosphorothioate
  modified_base 3: mod_base = OTHER; note = 2'-O-methylcytidine-3'-phosphate
  modified_base 4: mod_base = OTHER; note = 2'-O-methylcytidine-3'-phosphate
  modified_base 5: mod_base = OTHER; note = 2'-O-methyluridine-3'-phosphate
  modified_base 6: mod_base = OTHER; note = 2'-O-methyluridine-3'-phosphate
  modified_base 7: mod_base = OTHER; note = 2'-deoxy-2'-fluorocytidine-3'-phosphate
  modified_base 8: mod_base = OTHER; note = 2'-O-methyladenosine-3'-phosphate
  modified_base 9: mod_base = OTHER; note = 2'-deoxy-2'-fluorocytidine-3'-phosphate
  modified_base 10: mod_base = OTHER; note = 2'-deoxy-2'-fluorocytidine-3'-phosphate
  modified_base 11: mod_base = OTHER; note = 2'-deoxy-2'-fluorocytidine-3'-phosphate
  modified_base 12: mod_base = OTHER; note = 2'-O-methyluridine-3'-phosphate
  modified_base 13: mod_base = OTHER; note = 2'-O-methyluridine-3'-phosphate
  modified_base 14: mod_base = OTHER; note = 2'-O-methylguanosine-3'-phosphate
  modified_base 15: mod_base = OTHER; note = 2'-O-methylguanosine-3'-phosphate
  modified_base 16: mod_base = OTHER; note = 2'-O-methylguanosine-3'-phosphate
  modified_base 17: mod_base = OTHER; note = 2'-O-methyladenosine-3'-phosphate
  modified_base 18: mod_base = OTHER; note = 2'-O-methylcytidine-3'-phosphate
  modified_base 19: mod_base = OTHER; note = 2'-O-methylcytidine-3'-phosphate
  modified_base 20: mod_base = OTHER; note = 2'-O-methyladenosine-3'-phosphate
  modified_base 21: mod_base = OTHER; note = 2'-O-methyluridine-3'-phosphate ((2S,4R)-1-[29-[[2-(acetylamino)-2-deoxy-beta-D-galactopyra nosyl]oxy]-14,14-bis[[3-[[3-[[5-[[2-(acetylamino)-2-deoxy-b eta-D-galactopyranosyl]oxy]-1-oxopentyl]amino]propyl]amino] -3-oxopropoxy]methyl]-1,12,19,25-tetraoxo-16-oxa-13,20,24-t riazanonacos-1-yl]-4-hydroxy-2-pyrrolidinyl)methyl ester
ctccttcacccttgggaccat

SEQ ID NO: 872 - RNA, 21 nt, synthetic construct
  source 1..21: mol_type = other RNA
  modified_base 1: mod_base = OTHER; note = 2'-O-methylguanosine-3'-phosphorothioate
  modified_base 2: mod_base = OTHER; note = 2'-O-methylguanosine-3'-phosphorothioate
  modified_base 3: mod_base = OTHER; note = 2'-O-methylguanosine-3'-phosphate
  modified_base 4: mod_base = OTHER; note = 2'-O-methylcytidine-3'-phosphate
  modified_base 5: mod_base = OTHER; note = 2'-O-methylcytidine-3'-phosphate
  modified_base 6: mod_base = OTHER; note = 2'-O-methyladenosine-3'-phosphate
  modified_base 7: mod_base = OTHER; note = 2'-deoxy-2'-fluorocytidine-3'-phosphate
  modified_base 8: mod_base = OTHER; note = 2'-O-methylcytidine-3'-phosphate
  modified_base 9: mod_base = OTHER; note = 2'-deoxy-2'-fluoroadenosine-3'-phosphate
  modified_base 10: mod_base = OTHER; note = 2'-deoxy-2'-fluoroguanosine-3'-phosphate
  modified_base 11: mod_base = OTHER; note = 2'-deoxy-2'-fluorouridine-3'-phosphate
  modified_base 12: mod_base = OTHER; note = 2'-O-methyluridine-3'-phosphate
  modified_base 13: mod_base = OTHER; note = 2'-O-methylcytidine-3'-phosphate
  modified_base 14: mod_base = OTHER; note = 2'-O-methylcytidine-3'-phosphate
  modified_base 15: mod_base = OTHER; note = 2'-O-methyladenosine-3'-phosphate
  modified_base 16: mod_base = OTHER; note = 2'-O-methyluridine-3'-phosphate
  modified_base 17: mod_base = OTHER; note = 2'-O-methylguanosine-3'-phosphate
  modified_base 18: mod_base = OTHER; note = 2'-O-methyluridine-3'-phosphate
  modified_base 19: mod_base = OTHER; note = 2'-O-methylcytidine-3'-phosphate
  modified_base 20: mod_base = OTHER; note = 2'-O-methylcytidine-3'-phosphate
  modified_base 21: mod_base = OTHER; note = 2'-O-methyluridine-3'-phosphate ((2S,4R)-1-[29-[[2-(acetylamino)-2-deoxy-beta-D-galactopyra nosyl]oxy]-14,14-bis[[3-[[3-[[5-[[2-(acetylamino)-2-deoxy-b eta-D-galactopyranosyl]oxy]-1-oxopentyl]amino]propyl]amino] -3-oxopropoxy]methyl]-1,12,19,25-tetraoxo-16-oxa-13,20,24-t riazanonacos-1-yl]-4-hydroxy-2-pyrrolidinyl)methyl ester
gggccaccagttccatgtcct

SEQ ID NO: 873 - RNA, 21 nt, synthetic construct
  source 1..21: mol_type = other RNA
  modified_base 1: mod_base = OTHER; note = 2'-O-methylcytidine-3'-phosphorothioate
  modified_base 2: mod_base = OTHER; note = 2'-O-methyladenosine-3'-phosphorothioate
  modified_base 3: mod_base = OTHER; note = 2'-O-methylguanosine-3'-phosphate
  modified_base 4: mod_base = OTHER; note = 2'-O-methylcytidine-3'-phosphate
  modified_base 5: mod_base = OTHER; note = 2'-O-methyladenosine-3'-phosphate
  modified_base 6: mod_base = OTHER; note = 2'-O-methylcytidine-3'-phosphate
  modified_base 7: mod_base = OTHER; note = 2'-deoxy-2'-fluorouridine-3'-phosphate
  modified_base 8: mod_base = OTHER; note = 2'-O-methyladenosine-3'-phosphate
  modified_base 9: mod_base = OTHER; note = 2'-deoxy-2'-fluorocytidine-3'-phosphate
  modified_base 10: mod_base = OTHER; note = 2'-deoxy-2'-fluoroadenosine-3'-phosphate
  modified_base 11: mod_base = OTHER; note = 2'-deoxy-2'-fluoroguanosine-3'-phosphate
  modified_base 12: mod_base = OTHER; note = 2'-O-methylcytidine-3'-phosphate
  modified_base 13: mod_base = OTHER; note = 2'-O-methylcytidine-3'-phosphate
  modified_base 14: mod_base = OTHER; note = 2'-O-methyladenosine-3'-phosphate
  modified_base 15: mod_base = OTHER; note = 2'-O-methylcytidine-3'-phosphate
  modified_base 16: mod_base = OTHER; note = 2'-O-methylcytidine-3'-phosphate
  modified_base 17: mod_base = OTHER; note = 2'-O-methylguanosine-3'-phosphate
  modified_base 18: mod_base = OTHER; note = 2'-O-methyluridine-3'-phosphate
  modified_base 19: mod_base = OTHER; note = 2'-O-methylguanosine-3'-phosphate
  modified_base 20: mod_base = OTHER; note = 2'-O-methyladenosine-3'-phosphate
  modified_base 21: mod_base = OTHER; note = 2'-O-methyluridine-3'-phosphate ((2S,4R)-1-[29-[[2-(acetylamino)-2-deoxy-beta-D-galactopyra nosyl]oxy]-14,14-bis[[3-[[3-[[5-[[2-(acetylamino)-2-deoxy-b eta-D-galactopyranosyl]oxy]-1-oxopentyl]amino]propyl]amino] -3-oxopropoxy]methyl]-1,12,19,25-tetraoxo-16-oxa-13,20,24-t riazanonacos-1-yl]-4-hydroxy-2-pyrrolidinyl)methyl ester
cagcactacagccaccgtgat

SEQ ID NO: 874 - RNA, 21 nt, synthetic construct
  source 1..21: mol_type = other RNA
  modified_base 1: mod_base = OTHER; note = 2'-O-methyladenosine-3'-phosphorothioate
  modified_base 2: mod_base = OTHER; note = 2'-O-methylcytidine-3'-phosphorothioate
  modified_base 3: mod_base = OTHER; note = 2'-O-methylcytidine-3'-phosphate
  modified_base 4: mod_base = OTHER; note = 2'-O-methylcytidine-3'-phosphate
  modified_base 5: mod_base = OTHER; note = 2'-O-methyluridine-3'-phosphate
  modified_base 6: mod_base = OTHER; note = 2'-O-methylcytidine-3'-phosphate
  modified_base 7: mod_base = OTHER; note = 2'-deoxy-2'-fluoroadenosine-3'-phosphate
  modified_base 8: mod_base = OTHER; note = 2'-O-methyladenosine-3'-phosphate
  modified_base 9: mod_base = OTHER; note = 2'-deoxy-2'-fluoroadenosine-3'-phosphate
  modified_base 10: mod_base = OTHER; note = 2'-deoxy-2'-fluoroguanosine-3'-phosphate
  modified_base 11: mod_base = OTHER; note = 2'-deoxy-2'-fluorouridine-3'-phosphate
  modified_base 12: mod_base = OTHER; note = 2'-O-methylguanosine-3'-phosphate
  modified_base 13: mod_base = OTHER; note = 2'-O-methylcytidine-3'-phosphate
  modified_base 14: mod_base = OTHER; note = 2'-O-methyluridine-3'-phosphate
  modified_base 15: mod_base = OTHER; note = 2'-O-methylguanosine-3'-phosphate
  modified_base 16: mod_base = OTHER; note = 2'-O-methyladenosine-3'-phosphate
  modified_base 17: mod_base = OTHER; note = 2'-O-methylcytidine-3'-phosphate
  modified_base 18: mod_base = OTHER; note = 2'-O-methylcytidine-3'-phosphate
  modified_base 19: mod_base = OTHER; note = 2'-O-methyladenosine-3'-phosphate
  modified_base 20: mod_base = OTHER; note = 2'-O-methylguanosine-3'-phosphate
  modified_base 21: mod_base = OTHER; note = 2'-O-methyluridine-3'-phosphate ((2S,4R)-1-[29-[[2-(acetylamino)-2-deoxy-beta-D-galactopyra nosyl]oxy]-14,14-bis[[3-[[3-[[5-[[2-(acetylamino)-2-deoxy-b eta-D-galactopyranosyl]oxy]-1-oxopentyl]amino]propyl]amino] -3-oxopropoxy]methyl]-1,12,19,25-tetraoxo-16-oxa-13,20,24-t riazanonacos-1-yl]-4-hydroxy-2-pyrrolidinyl)methyl ester
accctcaaagtgctgaccagt

SEQ ID NO: 875 - RNA, 21 nt, synthetic construct
  source 1..21: mol_type = other RNA
  modified_base 1: mod_base = OTHER; note = 2'-O-methylcytidine-3'-phosphorothioate
  modified_base 2: mod_base = OTHER; note = 2'-O-methyladenosine-3'-phosphorothioate
  modified_base 3: mod_base = OTHER; note = 2'-O-methylcytidine-3'-phosphate
  modified_base 4: mod_base = OTHER; note = 2'-O-methyladenosine-3'-phosphate
  modified_base 5: mod_base = OTHER; note = 2'-O-methylcytidine-3'-phosphate
  modified_base 6: mod_base = OTHER; note = 2'-O-methylcytidine-3'-phosphate
  modified_base 7: mod_base = OTHER; note = 2'-deoxy-2'-fluorocytidine-3'-phosphate
  modified_base 8: mod_base = OTHER; note = 2'-O-methyladenosine-3'-phosphate
  modified_base 9: mod_base = OTHER; note = 2'-deoxy-2'-fluorocytidine-3'-phosphate
  modified_base 10: mod_base = OTHER; note = 2'-deoxy-2'-fluoroadenosine-3'-phosphate
  modified_base 11: mod_base = OTHER; note = 2'-deoxy-2'-fluoroguanosine-3'-phosphate
  modified_base 12: mod_base = OTHER; note = 2'-O-methyluridine-3'-phosphate
  modified_base 13: mod_base = OTHER; note = 2'-O-methylcytidine-3'-phosphate
  modified_base 14: mod_base = OTHER; note = 2'-O-methyladenosine-3'-phosphate
  modified_base 15: mod_base = OTHER; note = 2'-O-methyluridine-3'-phosphate
  modified_base 16: mod_base = OTHER; note = 2'-O-methylcytidine-3'-phosphate
  modified_base 17: mod_base = OTHER; note = 2'-O-methyladenosine-3'-phosphate
  modified_base 18: mod_base = OTHER; note = 2'-O-methylguanosine-3'-phosphate
  modified_base 19: mod_base = OTHER; note = 2'-O-methylcytidine-3'-phosphate
  modified_base 20: mod_base = OTHER; note = 2'-O-methyluridine-3'-phosphate
  modified_base 21: mod_base = OTHER; note = 2'-O-methyluridine-3'-phosphate ((2S,4R)-1-[29-[[2-(acetylamino)-2-deoxy-beta-D-galactopyra nosyl]oxy]-14,14-bis[[3-[[3-[[5-[[2-(acetylamino)-2-deoxy-b eta-D-galactopyranosyl]oxy]-1-oxopentyl]amino]propyl]amino] -3-oxopropoxy]methyl]-1,12,19,25-tetraoxo-16-oxa-13,20,24-t riazanonacos-1-yl]-4-hydroxy-2-pyrrolidinyl)methyl ester
cacacccacagtcatcagctt

SEQ ID NO: 876 - RNA, 21 nt, synthetic construct
  source 1..21: mol_type = other RNA
  modified_base 1: mod_base = OTHER; note = 2'-O-methylcytidine-3'-phosphorothioate
  modified_base 2: mod_base = OTHER; note = 2'-O-methyladenosine-3'-phosphorothioate
  modified_base 3: mod_base = OTHER; note = 2'-O-methylcytidine-3'-phosphate
  modified_base 4: mod_base = OTHER; note = 2'-O-methylcytidine-3'-phosphate
  modified_base 5: mod_base = OTHER; note = 2'-O-methylcytidine-3'-phosphate
  modified_base 6: mod_base = OTHER; note = 2'-O-methyladenosine-3'-phosphate
  modified_base 7: mod_base = OTHER; note = 2'-deoxy-2'-fluorocytidine-3'-phosphate
  modified_base 8: mod_base = OTHER; note = 2'-O-methyladenosine-3'-phosphate
  modified_base 9: mod_base = OTHER; note = 2'-deoxy-2'-fluoroguanosine-3'-phosphate
  modified_base 10: mod_base = OTHER; note = 2'-deoxy-2'-fluorocytidine-3'-phosphate
  modified_base 11: mod_base = OTHER; note = 2'-deoxy-2'-fluorouridine-3'-phosphate
  modified_base 12: mod_base = OTHER; note = 2'-O-methyladenosine-3'-phosphate
  modified_base 13: mod_base = OTHER; note = 2'-O-methylcytidine-3'-phosphate
  modified_base 14: mod_base = OTHER; note = 2'-O-methylcytidine-3'-phosphate
  modified_base 15: mod_base = OTHER; note = 2'-O-methyladenosine-3'-phosphate
  modified_base 16: mod_base = OTHER; note = 2'-O-methylguanosine-3'-phosphate
  modified_base 17: mod_base = OTHER; note = 2'-O-methylcytidine-3'-phosphate
  modified_base 18: mod_base = OTHER; note = 2'-O-methylguanosine-3'-phosphate
  modified_base 19: mod_base = OTHER; note = 2'-O-methyluridine-3'-phosphate
  modified_base 20: mod_base = OTHER; note = 2'-O-methyluridine-3'-phosphate
  modified_base 21: mod_base = OTHER; note = 2'-O-methyluridine-3'-phosphate ((2S,4R)-1-[29-[[2-(acetylamino)-2-deoxy-beta-D-galactopyra nosyl]oxy]-14,14-bis[[3-[[3-[[5-[[2-(acetylamino)-2-deoxy-b eta-D-galactopyranosyl]oxy]-1-oxopentyl]amino]propyl]amino] -3-oxopropoxy]methyl]-1,12,19,25-tetraoxo-16-oxa-13,20,24-t riazanonacos-1-yl]-4-hydroxy-2-pyrrolidinyl)methyl ester
cacccacagctaccagcgttt

SEQ ID NO: 877 - RNA, 21 nt, synthetic construct
  source 1..21: mol_type = other RNA
  modified_base 1: mod_base = OTHER; note = 2'-O-methyluridine-3'-phosphorothioate
  modified_base 2: mod_base = OTHER; note = 2'-O-methylcytidine-3'-phosphorothioate
  modified_base 3: mod_base = OTHER; note = 2'-O-methylcytidine-3'-phosphate
  modified_base 4: mod_base = OTHER; note = 2'-O-methyluridine-3'-phosphate
  modified_base 5: mod_base = OTHER; note = 2'-O-methylcytidine-3'-phosphate
  modified_base 6: mod_base = OTHER; note = 2'-O-methyluridine-3'-phosphate
  modified_base 7: mod_base = OTHER; note = 2'-deoxy-2'-fluoroadenosine-3'-phosphate
  modified_base 8: mod_base = OTHER; note = 2'-O-methylcytidine-3'-phosphate
  modified_base 9: mod_base = OTHER; note = 2'-deoxy-2'-fluorouridine-3'-phosphate
  modified_base 10: mod_base = OTHER; note = 2'-deoxy-2'-fluorocytidine-3'-phosphate
  modified_base 11: mod_base = OTHER; note = 2'-deoxy-2'-fluorocytidine-3'-phosphate
  modified_base 12: mod_base = OTHER; note = 2'-O-methyladenosine-3'-phosphate
  modified_base 13: mod_base = OTHER; note = 2'-O-methylguanosine-3'-phosphate
  modified_base 14: mod_base = OTHER; note = 2'-O-methyladenosine-3'-phosphate
  modified_base 15: mod_base = OTHER; note = 2'-O-methylguanosine-3'-phosphate
  modified_base 16: mod_base = OTHER; note = 2'-O-methyladenosine-3'-phosphate
  modified_base 17: mod_base = OTHER; note = 2'-O-methylcytidine-3'-phosphate
  modified_base 18: mod_base = OTHER; note = 2'-O-methyluridine-3'-phosphate
  modified_base 19: mod_base = OTHER; note = 2'-O-methylguanosine-3'-phosphate
  modified_base 20: mod_base = OTHER; note = 2'-O-methyluridine-3'-phosphate
  modified_base 21: mod_base = OTHER; note = 2'-O-methyluridine-3'-phosphate ((2S,4R)-1-[29-[[2-(acetylamino)-2-deoxy-beta-D-galactopyra nosyl]oxy]-14,14-bis[[3-[[3-[[5-[[2-(acetylamino)-2-deoxy-b eta-D-galactopyranosyl]oxy]-1-oxopentyl]amino]propyl]amino] -3-oxopropoxy]methyl]-1,12,19,25-tetraoxo-16-oxa-13,20,24-t riazanonacos-1-yl]-4-hydroxy-2-pyrrolidinyl)methyl ester
tcctctactccagagactgtt

SEQ ID NO: 878 - RNA, 21 nt, synthetic construct
  source 1..21: mol_type = other RNA
  modified_base 1: mod_base = OTHER; note = 2'-O-methyladenosine-3'-phosphorothioate
  modified_base 2: mod_base = OTHER; note = 2'-O-methylcytidine-3'-phosphorothioate
  modified_base 3: mod_base = OTHER; note = 2'-O-methyladenosine-3'-phosphate
  modified_base 4: mod_base = OTHER; note = 2'-O-methylguanosine-3'-phosphate
  modified_base 5: mod_base = OTHER; note = 2'-O-methyluridine-3'-phosphate
  modified_base 6: mod_base = OTHER; note = 2'-O-methylguanosine-3'-phosphate
  modified_base 7: mod_base = OTHER; note = 2'-deoxy-2'-fluorocytidine-3'-phosphate
  modified_base 8: mod_base = OTHER; note = 2'-O-methyluridine-3'-phosphate
  modified_base 9: mod_base = OTHER; note = 2'-deoxy-2'-fluorouridine-3'-phosphate
  modified_base 10: mod_base = OTHER; note = 2'-deoxy-2'-fluoroadenosine-3'-phosphate
  modified_base 11: mod_base = OTHER; note = 2'-deoxy-2'-fluorocytidine-3'-phosphate
  modified_base 12: mod_base = OTHER; note = 2'-O-methylcytidine-3'-phosphate
  modified_base 13: mod_base = OTHER; note = 2'-O-methyladenosine-3'-phosphate
  modified_base 14: mod_base = OTHER; note = 2'-O-methylcytidine-3'-phosphate
  modified_base 15: mod_base = OTHER; note = 2'-O-methylcytidine-3'-phosphate
  modified_base 16: mod_base = OTHER; note = 2'-O-methyladenosine-3'-phosphate
  modified_base 17: mod_base = OTHER; note = 2'-O-methylcytidine-3'-phosphate
  modified_base 18: mod_base = OTHER; note = 2'-O-methylguanosine-3'-phosphate
  modified_base 19: mod_base = OTHER; note = 2'-O-methyladenosine-3'-phosphate
  modified_base 20: mod_base = OTHER; note = 2'-O-methylcytidine-3'-phosphate
  modified_base 21: mod_base = OTHER; note = 2'-O-methyluridine-3'-phosphate ((2S,4R)-1-[29-[[2-(acetylamino)-2-deoxy-beta-D-galactopyra nosyl]oxy]-14,14-bis[[3-[[3-[[5-[[2-(acetylamino)-2-deoxy-b eta-D-galactopyranosyl]oxy]-1-oxopentyl]amino]propyl]amino] -3-oxopropoxy]methyl]-1,12,19,25-tetraoxo-16-oxa-13,20,24-t riazanonacos-1-yl]-4-hydroxy-2-pyrrolidinyl)methyl ester
acagtgcttaccaccacgact

SEQ ID NO: 879 - RNA, 21 nt, synthetic construct
  source 1..21: mol_type = other RNA
  modified_base 1: mod_base = OTHER; note = 2'-O-methylguanosine-3'-phosphorothioate
  modified_base 2: mod_base = OTHER; note = 2'-O-methylcytidine-3'-phosphorothioate
  modified_base 3: mod_base = OTHER; note = 2'-O-methylcytidine-3'-phosphate
  modified_base 4: mod_base = OTHER; note = 2'-O-methyladenosine-3'-phosphate
  modified_base 5: mod_base = OTHER; note = 2'-O-methylcytidine-3'-phosphate
  modified_base 6: mod_base = OTHER; note = 2'-O-methyluridine-3'-phosphate
  modified_base 7: mod_base = OTHER; note = 2'-deoxy-2'-fluoroadenosine-3'-phosphate
  modified_base 8: mod_base = OTHER; note = 2'-O-methylcytidine-3'-phosphate
  modified_base 9: mod_base = OTHER; note = 2'-deoxy-2'-fluoroguanosine-3'-phosphate
  modified_base 10: mod_base = OTHER; note = 2'-deoxy-2'-fluoroadenosine-3'-phosphate
  modified_base 11: mod_base = OTHER; note = 2'-deoxy-2'-fluorouridine-3'-phosphate
  modified_base 12: mod_base = OTHER; note = 2'-O-methylcytidine-3'-phosphate
  modified_base 13: mod_base = OTHER; note = 2'-O-methyladenosine-3'-phosphate
  modified_base 14: mod_base = OTHER; note = 2'-O-methylcytidine-3'-phosphate
  modified_base 15: mod_base = OTHER; note = 2'-O-methyladenosine-3'-phosphate
  modified_base 16: mod_base = OTHER; note = 2'-O-methylguanosine-3'-phosphate
  modified_base 17: mod_base = OTHER; note = 2'-O-methylcytidine-3'-phosphate
  modified_base 18: mod_base = OTHER; note = 2'-O-methylcytidine-3'-phosphate
  modified_base 19: mod_base = OTHER; note = 2'-O-methyladenosine-3'-phosphate
  modified_base 20: mod_base = OTHER; note = 2'-O-methylcytidine-3'-phosphate
  modified_base 21: mod_base = OTHER; note = 2'-O-methyluridine-3'-phosphate ((2S,4R)-1-[29-[[2-(acetylamino)-2-deoxy-beta-D-galactopyra nosyl]oxy]-14,14-bis[[3-[[3-[[5-[[2-(acetylamino)-2-deoxy-b eta-D-galactopyranosyl]oxy]-1-oxopentyl]amino]propyl]amino] -3-oxopropoxy]methyl]-1,12,19,25-tetraoxo-16-oxa-13,20,24-t riazanonacos-1-yl]-4-hydroxy-2-pyrrolidinyl)methyl ester
gccactacgatcacagccact

SEQ ID NO: 880 - RNA, 21 nt, synthetic construct
  source 1..21: mol_type = other RNA
  modified_base 1: mod_base = OTHER; note = 2'-O-methylcytidine-3'-phosphorothioate
  modified_base 2: mod_base = OTHER; note = 2'-O-methyluridine-3'-phosphorothioate
  modified_base 3: mod_base = OTHER; note = 2'-O-methylcytidine-3'-phosphate
  modified_base 4: mod_base = OTHER; note = 2'-O-methylcytidine-3'-phosphate
  modified_base 5: mod_base = OTHER; note = 2'-O-methyladenosine-3'-phosphate
  modified_base 6: mod_base = OTHER; note = 2'-O-methylguanosine-3'-phosphate
  modified_base 7: mod_base = OTHER; note = 2'-deoxy-2'-fluoroguanosine-3'-phosphate
  modified_base 8: mod_base = OTHER; note = 2'-O-methylguanosine-3'-phosphate
  modified_base 9: mod_base = OTHER; note = 2'-deoxy-2'-fluoroadenosine-3'-phosphate
  modified_base 10: mod_base = OTHER; note = 2'-deoxy-2'-fluorocytidine-3'-phosphate
  modified_base 11: mod_base = OTHER; note = 2'-deoxy-2'-fluoroadenosine-3'-phosphate
  modified_base 12: mod_base = OTHER; note = 2'-O-methyladenosine-3'-phosphate
  modified_base 13: mod_base = OTHER; note = 2'-O-methylcytidine-3'-phosphate
  modified_base 14: mod_base = OTHER; note = 2'-O-methyluridine-3'-phosphate
  modified_base 15: mod_base = OTHER; note = 2'-O-methylcytidine-3'-phosphate
  modified_base 16: mod_base = OTHER; note = 2'-O-methylcytidine-3'-phosphate
  modified_base 17: mod_base = OTHER; note = 2'-O-methylcytidine-3'-phosphate
  modified_base 18: mod_base = OTHER; note = 2'-O-methyladenosine-3'-phosphate
  modified_base 19: mod_base = OTHER; note = 2'-O-methyluridine-3'-phosphate
  modified_base 20: mod_base = OTHER; note = 2'-O-methylcytidine-3'-phosphate
  modified_base 21: mod_base = OTHER; note = 2'-O-methyluridine-3'-phosphate ((2S,4R)-1-[29-[[2-(acetylamino)-2-deoxy-beta-D-galactopyra nosyl]oxy]-14,14-bis[[3-[[3-[[5-[[2-(acetylamino)-2-deoxy-b eta-D-galactopyranosyl]oxy]-1-oxopentyl]amino]propyl]amino] -3-oxopropoxy]methyl]-1,12,19,25-tetraoxo-16-oxa-13,20,24-t riazanonacos-1-yl]-4-hydroxy-2-pyrrolidinyl)methyl ester
ctccagggacaactcccatct

SEQ ID NO: 881 - RNA, 21 nt, synthetic construct
  source 1..21: mol_type = other RNA
  modified_base 1: mod_base = OTHER; note = 2'-O-methylcytidine-3'-phosphorothioate
  modified_base 2: mod_base = OTHER; note = 2'-O-methyladenosine-3'-phosphorothioate
  modified_base 3: mod_base = OTHER; note = 2'-O-methylguanosine-3'-phosphate
  modified_base 4: mod_base = OTHER; note = 2'-O-methylcytidine-3'-phosphate
  modified_base 5: mod_base = OTHER; note = 2'-O-methyladenosine-3'-phosphate
  modified_base 6: mod_base = OTHER; note = 2'-O-methylguanosine-3'-phosphate
  modified_base 7: mod_base = OTHER; note = 2'-deoxy-2'-fluorocytidine-3'-phosphate
  modified_base 8: mod_base = OTHER; note = 2'-O-methyladenosine-3'-phosphate
  modified_base 9: mod_base = OTHER; note = 2'-deoxy-2'-fluoroadenosine-3'-phosphate
  modified_base 10: mod_base = OTHER; note = 2'-deoxy-2'-fluorocytidine-3'-phosphate
  modified_base 11: mod_base = OTHER; note = 2'-deoxy-2'-fluorocytidine-3'-phosphate
  modified_base 12: mod_base = OTHER; note = 2'-O-methyladenosine-3'-phosphate
  modified_base 13: mod_base = OTHER; note = 2'-O-methylcytidine-3'-phosphate
  modified_base 14: mod_base = OTHER; note = 2'-O-methylcytidine-3'-phosphate
  modified_base 15: mod_base = OTHER; note = 2'-O-methyladenosine-3'-phosphate
  modified_base 16: mod_base = OTHER; note = 2'-O-methylguanosine-3'-phosphate
  modified_base 17: mod_base = OTHER; note = 2'-O-methyluridine-3'-phosphate
  modified_base 18: mod_base = OTHER; note = 2'-O-methyladenosine-3'-phosphate
  modified_base 19: mod_base = OTHER; note = 2'-O-methylcytidine-3'-phosphate
  modified_base 20: mod_base = OTHER; note = 2'-O-methylcytidine-3'-phosphate
  modified_base 21: mod_base = OTHER; note = 2'-O-methyluridine-3'-phosphate ((2S,4R)-1-[29-[[2-(acetylamino)-2-deoxy-beta-D-galactopyra nosyl]oxy]-14,14-bis[[3-[[3-[[5-[[2-(acetylamino)-2-deoxy-b eta-D-galactopyranosyl]oxy]-1-oxopentyl]amino]propyl]amino] -3-oxopropoxy]methyl]-1,12,19,25-tetraoxo-16-oxa-13,20,24-t riazanonacos-1-yl]-4-hydroxy-2-pyrrolidinyl)methyl ester
cagcagcaaccaccagtacct

SEQ ID NO: 882 - RNA, 21 nt, synthetic construct
  source 1..21: mol_type = other RNA
  modified_base 1: mod_base = OTHER; note = 2'-O-methylcytidine-3'-phosphorothioate
  modified_base 2: mod_base = OTHER; note = 2'-O-methyluridine-3'-phosphorothioate
  modified_base 3: mod_base = OTHER; note = 2'-O-methylcytidine-3'-phosphate
  modified_base 4: mod_base = OTHER; note = 2'-O-methylcytidine-3'-phosphate
  modified_base 5: mod_base = OTHER; note = 2'-O-methyladenosine-3'-phosphate
  modified_base 6: mod_base = OTHER; note = 2'-O-methylguanosine-3'-phosphate
  modified_base 7: mod_base = OTHER; note = 2'-deoxy-2'-fluoroguanosine-3'-phosphate
  modified_base 8: mod_base = OTHER; note = 2'-O-methyladenosine-3'-phosphate
  modified_base 9: mod_base = OTHER; note = 2'-deoxy-2'-fluorocytidine-3'-phosphate
  modified_base 10: mod_base = OTHER; note = 2'-deoxy-2'-fluorocytidine-3'-phosphate
  modified_base 11: mod_base = OTHER; note = 2'-deoxy-2'-fluoroadenosine-3'-phosphate
  modified_base 12: mod_base = OTHER; note = 2'-O-methylcytidine-3'-phosphate
  modified_base 13: mod_base = OTHER; note = 2'-O-methyladenosine-3'-phosphate
  modified_base 14: mod_base = OTHER; note = 2'-O-methylguanosine-3'-phosphate
  modified_base 15: mod_base = OTHER; note = 2'-O-methylcytidine-3'-phosphate
  modified_base 16: mod_base = OTHER; note = 2'-O-methylcytidine-3'-phosphate
  modified_base 17: mod_base = OTHER; note = 2'-O-methyladenosine-3'-phosphate
  modified_base 18: mod_base = OTHER; note = 2'-O-methylcytidine-3'-phosphate
  modified_base 19: mod_base = OTHER; note = 2'-O-methyladenosine-3'-phosphate
  modified_base 20: mod_base = OTHER; note = 2'-O-methylguanosine-3'-phosphate
  modified_base 21: mod_base = OTHER; note = 2'-O-methyluridine-3'-phosphate ((2S,4R)-1-[29-[[2-(acetylamino)-2-deoxy-beta-D-galactopyra nosyl]oxy]-14,14-bis[[3-[[3-[[5-[[2-(acetylamino)-2-deoxy-b eta-D-galactopyranosyl]oxy]-1-oxopentyl]amino]propyl]amino] -3-oxopropoxy]methyl]-1,12,19,25-tetraoxo-16-oxa-13,20,24-t riazanonacos-1-yl]-4-hydroxy-2-pyrrolidinyl)methyl ester
ctccaggaccacagccacagt

SEQ ID NO: 883 - RNA, 21 nt, synthetic construct
  source 1..21: mol_type = other RNA
  modified_base 1: mod_base = OTHER; note = 2'-O-methylcytidine-3'-phosphorothioate
  modified_base 2: mod_base = OTHER; note = 2'-O-methylguanosine-3'-phosphorothioate
  modified_base 3: mod_base = OTHER; note = 2'-O-methylguanosine-3'-phosphate
  modified_base 4: mod_base = OTHER; note = 2'-O-methylcytidine-3'-phosphate
  modified_base 5: mod_base = OTHER; note = 2'-O-methylcytidine-3'-phosphate
  modified_base 6: mod_base = OTHER; note = 2'-O-methyladenosine-3'-phosphate
  modified_base 7: mod_base = OTHER; note = 2'-deoxy-2'-fluorocytidine-3'-phosphate
  modified_base 8: mod_base = OTHER; note = 2'-O-methylguanosine-3'-phosphate
  modified_base 9: mod_base = OTHER; note = 2'-deoxy-2'-fluorocytidine-3'-phosphate
  modified_base 10: mod_base = OTHER; note = 2'-deoxy-2'-fluorocytidine-3'-phosphate
  modified_base 11: mod_base = OTHER; note = 2'-deoxy-2'-fluorocytidine-3'-phosphate
  modified_base 12: mod_base = OTHER; note = 2'-O-methyluridine-3'-phosphate
  modified_base 13: mod_base = OTHER; note = 2'-O-methylcytidine-3'-phosphate
  modified_base 14: mod_base = OTHER; note = 2'-O-methylcytidine-3'-phosphate
  modified_base 15: mod_base = OTHER; note = 2'-O-methyluridine-3'-phosphate
  modified_base 16: mod_base = OTHER; note = 2'-O-methylcytidine-3'-phosphate
  modified_base 17: mod_base = OTHER; note = 2'-O-methyladenosine-3'-phosphate
  modified_base 18: mod_base = OTHER; note = 2'-O-methyladenosine-3'-phosphate
  modified_base 19: mod_base = OTHER; note = 2'-O-methylcytidine-3'-phosphate
  modified_base 20: mod_base = OTHER; note = 2'-O-methyluridine-3'-phosphate
  modified_base 21: mod_base = OTHER; note = 2'-O-methyluridine-3'-phosphate ((2S,4R)-1-[29-[[2-(acetylamino)-2-deoxy-beta-D-galactopyra nosyl]oxy]-14,14-bis[[3-[[3-[[5-[[2-(acetylamino)-2-deoxy-b eta-D-galactopyranosyl]oxy]-1-oxopentyl]amino]propyl]amino] -3-oxopropoxy]methyl]-1,12,19,25-tetraoxo-16-oxa-13,20,24-t riazanonacos-1-yl]-4-hydroxy-2-pyrrolidinyl)methyl ester
cggccacgccctcctcaactt

SEQ ID NO: 884 - RNA, 21 nt, synthetic construct
  source 1..21: mol_type = other RNA
  modified_base 1: mod_base = OTHER; note = 2'-O-methylcytidine-3'-phosphorothioate
  modified_base 2: mod_base = OTHER; note = 2'-O-methylcytidine-3'-phosphorothioate
  modified_base 3: mod_base = OTHER; note = 2'-O-methyluridine-3'-phosphate
  modified_base 4: mod_base = OTHER; note = 2'-O-methylcytidine-3'-phosphate
  modified_base 5: mod_base = OTHER; note = 2'-O-methyladenosine-3'-phosphate
  modified_base 6: mod_base = OTHER; note = 2'-O-methylcytidine-3'-phosphate
  modified_base 7: mod_base = OTHER; note = 2'-deoxy-2'-fluoroadenosine-3'-phosphate
  modified_base 8: mod_base = OTHER; note = 2'-O-methyladenosine-3'-phosphate
  modified_base 9: mod_base = OTHER; note = 2'-deoxy-2'-fluoroadenosine-3'-phosphate
  modified_base 10: mod_base = OTHER; note = 2'-deoxy-2'-fluoroguanosine-3'-phosphate
  modified_base 11: mod_base = OTHER; note = 2'-deoxy-2'-fluorocytidine-3'-phosphate
  modified_base 12: mod_base = OTHER; note = 2'-O-methyluridine-3'-phosphate
  modified_base 13: mod_base = OTHER; note = 2'-O-methylguanosine-3'-phosphate
  modified_base 14: mod_base = OTHER; note = 2'-O-methyladenosine-3'-phosphate
  modified_base 15: mod_base = OTHER; note = 2'-O-methylcytidine-3'-phosphate
  modified_base 16: mod_base = OTHER; note = 2'-O-methylcytidine-3'-phosphate
  modified_base 17: mod_base = OTHER; note = 2'-O-methyladenosine-3'-phosphate
  modified_base 18: mod_base = OTHER; note = 2'-O-methylcytidine-3'-phosphate
  modified_base 19: mod_base = OTHER; note = 2'-O-methyladenosine-3'-phosphate
  modified_base 20: mod_base = OTHER; note = 2'-O-methyladenosine-3'-phosphate
  modified_base 21: mod_base = OTHER; note = 2'-O-methyluridine-3'-phosphate ((2S,4R)-1-[29-[[2-(acetylamino)-2-deoxy-beta-D-galactopyra nosyl]oxy]-14,14-bis[[3-[[3-[[5-[[2-(acetylamino)-2-deoxy-b eta-D-galactopyranosyl]oxy]-1-oxopentyl]amino]propyl]amino] -3-oxopropoxy]methyl]-1,12,19,25-tetraoxo-16-oxa-13,20,24-t riazanonacos-1-yl]-4-hydroxy-2-pyrrolidinyl)methyl ester
cctcacaaagctgaccacaat

SEQ ID NO: 885 - RNA, 21 nt, synthetic construct
  source 1..21: mol_type = other RNA
  modified_base 1: mod_base = OTHER; note = 2'-O-methyluridine-3'-phosphorothioate
  modified_base 2: mod_base = OTHER; note = 2'-O-methylcytidine-3'-phosphorothioate
  modified_base 3: mod_base = OTHER; note = 2'-O-methylcytidine-3'-phosphate
  modified_base 4: mod_base = OTHER; note = 2'-O-methyluridine-3'-phosphate
  modified_base 5: mod_base = OTHER; note = 2'-O-methylcytidine-3'-phosphate
  modified_base 6: mod_base = OTHER; note = 2'-O-methylcytidine-3'-phosphate
  modified_base 7: mod_base = OTHER; note = 2'-deoxy-2'-fluoroadenosine-3'-phosphate
  modified_base 8: mod_base = OTHER; note = 2'-O-methylcytidine-3'-phosphate
  modified_base 9: mod_base = OTHER; note = 2'-deoxy-2'-fluorouridine-3'-phosphate
  modified_base 10: mod_base = OTHER; note = 2'-deoxy-2'-fluorocytidine-3'-phosphate
  modified_base 11: mod_base = OTHER; note = 2'-deoxy-2'-fluorocytidine-3'-phosphate
  modified_base 12: mod_base = OTHER; note = 2'-O-methyladenosine-3'-phosphate
  modified_base 13: mod_base = OTHER; note = 2'-O-methylguanosine-3'-phosphate
  modified_base 14: mod_base = OTHER; note = 2'-O-methyladenosine-3'-phosphate
  modified_base 15: mod_base = OTHER; note = 2'-O-methylguanosine-3'-phosphate
  modified_base 16: mod_base = OTHER; note = 2'-O-methyladenosine-3'-phosphate
  modified_base 17: mod_base = OTHER; note = 2'-O-methylcytidine-3'-phosphate
  modified_base 18: mod_base = OTHER; note = 2'-O-methyluridine-3'-phosphate
  modified_base 19: mod_base = OTHER; note = 2'-O-methylguanosine-3'-phosphate
  modified_base 20: mod_base = OTHER; note = 2'-O-methylcytidine-3'-phosphate
  modified_base 21: mod_base = OTHER; note = 2'-O-methyluridine-3'-phosphate ((2S,4R)-1-[29-[[2-(acetylamino)-2-deoxy-beta-D-galactopyra nosyl]oxy]-14,14-bis[[3-[[3-[[5-[[2-(acetylamino)-2-deoxy-b eta-D-galactopyranosyl]oxy]-1-oxopentyl]amino]propyl]amino] -3-oxopropoxy]methyl]-1,12,19,25-tetraoxo-16-oxa-13,20,24-t riazanonacos-1-yl]-4-hydroxy-2-pyrrolidinyl)methyl ester
tcctccactccagagactgct

SEQ ID NO: 886 - RNA, 21 nt, synthetic construct
  source 1..21: mol_type = other RNA
  modified_base 1: mod_base = OTHER; note = 2'-O-methylcytidine-3'-phosphorothioate
  modified_base 2: mod_base = OTHER; note = 2'-O-methylcytidine-3'-phosphorothioate
  modified_base 3: mod_base = OTHER; note = 2'-O-methyladenosine-3'-phosphate
  modified_base 4: mod_base = OTHER; note = 2'-O-methylcytidine-3'-phosphate
  modified_base 5: mod_base = OTHER; note = 2'-O-methyladenosine-3'-phosphate
  modified_base 6: mod_base = OTHER; note = 2'-O-methylguanosine-3'-phosphate
  modified_base 7: mod_base = OTHER; note = 2'-deoxy-2'-fluorouridine-3'-phosphate
  modified_base 8: mod_base = OTHER; note = 2'-O-methylguanosine-3'-phosphate
  modified_base 9: mod_base = OTHER; note = 2'-deoxy-2'-fluorocytidine-3'-phosphate
  modified_base 10: mod_base = OTHER; note = 2'-deoxy-2'-fluorouridine-3'-phosphate
  modified_base 11: mod_base = OTHER; note = 2'-deoxy-2'-fluorouridine-3'-phosphate
  modified_base 12: mod_base = OTHER; note = 2'-O-methyladenosine-3'-phosphate
  modified_base 13: mod_base = OTHER; note = 2'-O-methylcytidine-3'-phosphate
  modified_base 14: mod_base = OTHER; note = 2'-O-methylcytidine-3'-phosphate
  modified_base 15: mod_base = OTHER; note = 2'-O-methyladenosine-3'-phosphate
  modified_base 16: mod_base = OTHER; note = 2'-O-methylcytidine-3'-phosphate
  modified_base 17: mod_base = OTHER; note = 2'-O-methylcytidine-3'-phosphate
  modified_base 18: mod_base = OTHER; note = 2'-O-methyladenosine-3'-phosphate
  modified_base 19: mod_base = OTHER; note = 2'-O-methylcytidine-3'-phosphate
  modified_base 20: mod_base = OTHER; note = 2'-O-methylguanosine-3'-phosphate
  modified_base 21: mod_base = OTHER; note = 2'-O-methyluridine-3'-phosphate ((2S,4R)-1-[29-[[2-(acetylamino)-2-deoxy-beta-D-galactopyra nosyl]oxy]-14,14-bis[[3-[[3-[[5-[[2-(acetylamino)-2-deoxy-b eta-D-galactopyranosyl]oxy]-1-oxopentyl]amino]propyl]amino] -3-oxopropoxy]methyl]-1,12,19,25-tetraoxo-16-oxa-13,20,24-t riazanonacos-1-yl]-4-hydroxy-2-pyrrolidinyl)methyl ester
ccacagtgcttaccaccacgt

SEQ ID NO: 887 - RNA, 21 nt, synthetic construct
  source 1..21: mol_type = other RNA
  modified_base 1: mod_base = OTHER; note = 2'-O-methylcytidine-3'-phosphorothioate
  modified_base 2: mod_base = OTHER; note = 2'-O-methyladenosine-3'-phosphorothioate
  modified_base 3: mod_base = OTHER; note = 2'-O-methylcytidine-3'-phosphate
  modified_base 4: mod_base = OTHER; note = 2'-O-methylcytidine-3'-phosphate
  modified_base 5: mod_base = OTHER; note = 2'-O-methyladenosine-3'-phosphate
  modified_base 6: mod_base = OTHER; note = 2'-O-methylcytidine-3'-phosphate
  modified_base 7: mod_base = OTHER; note = 2'-deoxy-2'-fluoroguanosine-3'-phosphate
  modified_base 8: mod_base = OTHER; note = 2'-O-methylguanosine-3'-phosphate
  modified_base 9: mod_base = OTHER; note = 2'-deoxy-2'-fluorocytidine-3'-phosphate
  modified_base 10: mod_base = OTHER; note = 2'-deoxy-2'-fluorocytidine-3'-phosphate
  modified_base 11: mod_base = OTHER; note = 2'-deoxy-2'-fluoroadenosine-3'-phosphate
  modified_base 12: mod_base = OTHER; note = 2'-O-methylcytidine-3'-phosphate
  modified_base 13: mod_base = OTHER; note = 2'-O-methylcytidine-3'-phosphate
  modified_base 14: mod_base = OTHER; note = 2'-O-methyladenosine-3'-phosphate
  modified_base 15: mod_base = OTHER; note = 2'-O-methylcytidine-3'-phosphate
  modified_base 16: mod_base = OTHER; note = 2'-O-methyladenosine-3'-phosphate
  modified_base 17: mod_base = OTHER; note = 2'-O-methylcytidine-3'-phosphate
  modified_base 18: mod_base = OTHER; note = 2'-O-methyladenosine-3'-phosphate
  modified_base 19: mod_base = OTHER; note = 2'-O-methylcytidine-3'-phosphate
  modified_base 20: mod_base = OTHER; note = 2'-O-methylguanosine-3'-phosphate
  modified_base 21: mod_base = OTHER; note = 2'-O-methyluridine-3'-phosphate ((2S,4R)-1-[29-[[2-(acetylamino)-2-deoxy-beta-D-galactopyra nosyl]oxy]-14,14-bis[[3-[[3-[[5-[[2-(acetylamino)-2-deoxy-b eta-D-galactopyranosyl]oxy]-1-oxopentyl]amino]propyl]amino] -3-oxopropoxy]methyl]-1,12,19,25-tetraoxo-16-oxa-13,20,24-t riazanonacos-1-yl]-4-hydroxy-2-pyrrolidinyl)methyl ester
caccacggccaccacacacgt

SEQ ID NO: 888 - RNA, 21 nt, synthetic construct
  source 1..21: mol_type = other RNA
  modified_base 1: mod_base = OTHER; note = 2'-O-methyladenosine-3'-phosphorothioate
  modified_base 2: mod_base = OTHER; note = 2'-O-methylcytidine-3'-phosphorothioate
  modified_base 3: mod_base = OTHER; note = 2'-O-methylcytidine-3'-phosphate
  modified_base 4: mod_base = OTHER; note = 2'-O-methyladenosine-3'-phosphate
  modified_base 5: mod_base = OTHER; note = 2'-O-methylcytidine-3'-phosphate
  modified_base 6: mod_base = OTHER; note = 2'-O-methylcytidine-3'-phosphate
  modified_base 7: mod_base = OTHER; note = 2'-deoxy-2'-fluorocytidine-3'-phosphate
  modified_base 8: mod_base = OTHER; note = 2'-O-methyladenosine-3'-phosphate
  modified_base 9: mod_base = OTHER; note = 2'-deoxy-2'-fluoroguanosine-3'-phosphate
  modified_base 10: mod_base = OTHER; note = 2'-deoxy-2'-fluorocytidine-3'-phosphate
  modified_base 11: mod_base = OTHER; note = 2'-deoxy-2'-fluoroadenosine-3'-phosphate
  modified_base 12: mod_base = OTHER; note = 2'-O-methylcytidine-3'-phosphate
  modified_base 13: mod_base = OTHER; note = 2'-O-methyluridine-3'-phosphate
  modified_base 14: mod_base = OTHER; note = 2'-O-methylcytidine-3'-phosphate
  modified_base 15: mod_base = OTHER; note = 2'-O-methylguanosine-3'-phosphate
  modified_base 16: mod_base = OTHER; note = 2'-O-methyladenosine-3'-phosphate
  modified_base 17: mod_base = OTHER; note = 2'-O-methylcytidine-3'-phosphate
  modified_base 18: mod_base = OTHER; note = 2'-O-methyluridine-3'-phosphate
  modified_base 19: mod_base = OTHER; note = 2'-O-methylcytidine-3'-phosphate
  modified_base 20: mod_base = OTHER; note = 2'-O-methylcytidine-3'-phosphate
  modified_base 21: mod_base = OTHER; note = 2'-O-methyluridine-3'-phosphate ((2S,4R)-1-[29-[[2-(acetylamino)-2-deoxy-beta-D-galactopyra nosyl]oxy]-14,14-bis[[3-[[3-[[5-[[2-(acetylamino)-2-deoxy-b eta-D-galactopyranosyl]oxy]-1-oxopentyl]amino]propyl]amino] -3-oxopropoxy]methyl]-1,12,19,25-tetraoxo-16-oxa-13,20,24-t riazanonacos-1-yl]-4-hydroxy-2-pyrrolidinyl)methyl ester
accacccagcactcgactcct

SEQ ID NO: 889 - RNA, 21 nt, synthetic construct
  source 1..21: mol_type = other RNA
  modified_base 1: mod_base = OTHER; note = 2'-O-methylcytidine-3'-phosphorothioate
  modified_base 2: mod_base = OTHER; note = 2'-O-methyladenosine-3'-phosphorothioate
  modified_base 3: mod_base = OTHER; note = 2'-O-methylguanosine-3'-phosphate
  modified_base 4: mod_base = OTHER; note = 2'-O-methylcytidine-3'-phosphate
  modified_base 5: mod_base = OTHER; note = 2'-O-methylcytidine-3'-phosphate
  modified_base 6: mod_base = OTHER; note = 2'-O-methylcytidine-3'-phosphate
  modified_base 7: mod_base = OTHER; note = 2'-deoxy-2'-fluorouridine-3'-phosphate
  modified_base 8: mod_base = OTHER; note = 2'-O-methylcytidine-3'-phosphate
  modified_base 9: mod_base = OTHER; note = 2'-deoxy-2'-fluoroadenosine-3'-phosphate
  modified_base 10: mod_base = OTHER; note = 2'-deoxy-2'-fluorocytidine-3'-phosphate
  modified_base 11: mod_base = OTHER; note = 2'-deoxy-2'-fluorocytidine-3'-phosphate
  modified_base 12: mod_base = OTHER; note = 2'-O-methylcytidine-3'-phosphate
  modified_base 13: mod_base = OTHER; note = 2'-O-methyluridine-3'-phosphate
  modified_base 14: mod_base = OTHER; note = 2'-O-methyladenosine-3'-phosphate
  modified_base 15: mod_base = OTHER; note = 2'-O-methylguanosine-3'-phosphate
  modified_base 16: mod_base = OTHER; note = 2'-O-methylcytidine-3'-phosphate
  modified_base 17: mod_base = OTHER; note = 2'-O-methyladenosine-3'-phosphate
  modified_base 18: mod_base = OTHER; note = 2'-O-methylguanosine-3'-phosphate
  modified_base 19: mod_base = OTHER; note = 2'-O-methylcytidine-3'-phosphate
  modified_base 20: mod_base = OTHER; note = 2'-O-methyladenosine-3'-phosphate
  modified_base 21: mod_base = OTHER; note = 2'-O-methyluridine-3'-phosphate ((2S,4R)-1-[29-[[2-(acetylamino)-2-deoxy-beta-D-galactopyra nosyl]oxy]-14,14-bis[[3-[[3-[[5-[[2-(acetylamino)-2-deoxy-b eta-D-galactopyranosyl]oxy]-1-oxopentyl]amino]propyl]amino] -3-oxopropoxy]methyl]-1,12,19,25-tetraoxo-16-oxa-13,20,24-t riazanonacos-1-yl]-4-hydroxy-2-pyrrolidinyl)methyl ester
cagccctcaccctagcagcat

SEQ ID NO: 890 - RNA, 21 nt, synthetic construct
  source 1..21: mol_type = other RNA
  modified_base 1: mod_base = OTHER; note = 2'-O-methyladenosine-3'-phosphorothioate
  modified_base 2: mod_base = OTHER; note = 2'-O-methyluridine-3'-phosphorothioate
  modified_base 3: mod_base = OTHER; note = 2'-O-methyladenosine-3'-phosphate
  modified_base 4: mod_base = OTHER; note = 2'-O-methyladenosine-3'-phosphate
  modified_base 5: mod_base = OTHER; note = 2'-O-methylcytidine-3'-phosphate
  modified_base 6: mod_base = OTHER; note = 2'-O-methylcytidine-3'-phosphate
  modified_base 7: mod_base = OTHER; note = 2'-deoxy-2'-fluoroadenosine-3'-phosphate
  modified_base 8: mod_base = OTHER; note = 2'-O-methylcytidine-3'-phosphate
  modified_base 9: mod_base = OTHER; note = 2'-deoxy-2'-fluoroguanosine-3'-phosphate
  modified_base 10: mod_base = OTHER; note = 2'-deoxy-2'-fluoroguanosine-3'-phosphate
  modified_base 11: mod_base = OTHER; note = 2'-deoxy-2'-fluorouridine-3'-phosphate
  modified_base 12: mod_base = OTHER; note = 2'-O-methylguanosine-3'-phosphate
  modified_base 13: mod_base = OTHER; note = 2'-O-methylguanosine-3'-phosphate
  modified_base 14: mod_base = OTHER; note = 2'-O-methyluridine-3'-phosphate
  modified_base 15: mod_base = OTHER; note = 2'-O-methylguanosine-3'-phosphate
  modified_base 16: mod_base = OTHER; note = 2'-O-methyladenosine-3'-phosphate
  modified_base 17: mod_base = OTHER; note = 2'-O-methylcytidine-3'-phosphate
  modified_base 18: mod_base = OTHER; note = 2'-O-methylcytidine-3'-phosphate
  modified_base 19: mod_base = OTHER; note = 2'-O-methyladenosine-3'-phosphate
  modified_base 20: mod_base = OTHER; note = 2'-O-methylcytidine-3'-phosphate
  modified_base 21: mod_base = OTHER; note = 2'-O-methyluridine-3'-phosphate ((2S,4R)-1-[29-[[2-(acetylamino)-2-deoxy-beta-D-galactopyra nosyl]oxy]-14,14-bis[[3-[[3-[[5-[[2-(acetylamino)-2-deoxy-b eta-D-galactopyranosyl]oxy]-1-oxopentyl]amino]propyl]amino] -3-oxopropoxy]methyl]-1,12,19,25-tetraoxo-16-oxa-13,20,24-t riazanonacos-1-yl]-4-hydroxy-2-pyrrolidinyl)methyl ester
ataaccacggtggtgaccact

SEQ ID NO: 891 - RNA, 21 nt, synthetic construct
  source 1..21: mol_type = other RNA
  modified_base 1: mod_base = OTHER; note = 2'-O-methylcytidine-3'-phosphorothioate
  modified_base 2: mod_base = OTHER; note = 2'-O-methylcytidine-3'-phosphorothioate
  modified_base 3: mod_base = OTHER; note = 2'-O-methyladenosine-3'-phosphate
  modified_base 4: mod_base = OTHER; note = 2'-O-methylguanosine-3'-phosphate
  modified_base 5: mod_base = OTHER; note = 2'-O-methyluridine-3'-phosphate
  modified_base 6: mod_base = OTHER; note = 2'-O-methyluridine-3'-phosphate
  modified_base 7: mod_base = OTHER; note = 2'-deoxy-2'-fluorocytidine-3'-phosphate
  modified_base 8: mod_base = OTHER; note = 2'-O-methylcytidine-3'-phosphate
  modified_base 9: mod_base = OTHER; note = 2'-deoxy-2'-fluoroadenosine-3'-phosphate
  modified_base 10: mod_base = OTHER; note = 2'-deoxy-2'-fluoroadenosine-3'-phosphate
  modified_base 11: mod_base = OTHER; note = 2'-deoxy-2'-fluoroadenosine-3'-phosphate
  modified_base 12: mod_base = OTHER; note = 2'-O-methylguanosine-3'-phosphate
  modified_base 13: mod_base = OTHER; note = 2'-O-methylcytidine-3'-phosphate
  modified_base 14: mod_base = OTHER; note = 2'-O-methylcytidine-3'-phosphate
  modified_base 15: mod_base = OTHER; note = 2'-O-methyladenosine-3'-phosphate
  modified_base 16: mod_base = OTHER; note = 2'-O-methylcytidine-3'-phosphate
  modified_base 17: mod_base = OTHER; note = 2'-O-methyluridine-3'-phosphate
  modified_base 18: mod_base = OTHER; note = 2'-O-methyluridine-3'-phosphate
  modified_base 19: mod_base = OTHER; note = 2'-O-methylcytidine-3'-phosphate
  modified_base 20: mod_base = OTHER; note = 2'-O-methylcytidine-3'-phosphate
  modified_base 21: mod_base = OTHER; note = 2'-O-methyluridine-3'-phosphate ((2S,4R)-1-[29-[[2-(acetylamino)-2-deoxy-beta-D-galactopyra nosyl]oxy]-14,14-bis[[3-[[3-[[5-[[2-(acetylamino)-2-deoxy-b eta-D-galactopyranosyl]oxy]-1-oxopentyl]amino]propyl]amino] -3-oxopropoxy]methyl]-1,12,19,25-tetraoxo-16-oxa-13,20,24-t riazanonacos-1-yl]-4-hydroxy-2-pyrrolidinyl)methyl ester
ccagttccaaagccacttcct

SEQ ID NO: 892 - RNA, 21 nt, synthetic construct
  source 1..21: mol_type = other RNA
  modified_base 1: mod_base = OTHER; note = 2'-O-methylcytidine-3'-phosphorothioate
  modified_base 2: mod_base = OTHER; note = 2'-O-methylcytidine-3'-phosphorothioate
  modified_base 3: mod_base = OTHER; note = 2'-O-methylcytidine-3'-phosphate
  modified_base 4: mod_base = OTHER; note = 2'-O-methyladenosine-3'-phosphate
  modified_base 5: mod_base = OTHER; note = 2'-O-methylguanosine-3'-phosphate
  modified_base 6: mod_base = OTHER; note = 2'-O-methyladenosine-3'-phosphate
  modified_base 7: mod_base = OTHER; note = 2'-deoxy-2'-fluoroadenosine-3'-phosphate
  modified_base 8: mod_base = OTHER; note = 2'-O-methylcytidine-3'-phosphate
  modified_base 9: mod_base = OTHER; note = 2'-deoxy-2'-fluoroadenosine-3'-phosphate
  modified_base 10: mod_base = OTHER; note = 2'-deoxy-2'-fluoroguanosine-3'-phosphate
  modified_base 11: mod_base = OTHER; note = 2'-deoxy-2'-fluoroadenosine-3'-phosphate
  modified_base 12: mod_base = OTHER; note = 2'-O-methylcytidine-3'-phosphate
  modified_base 13: mod_base = OTHER; note = 2'-O-methylcytidine-3'-phosphate
  modified_base 14: mod_base = OTHER; note = 2'-O-methyladenosine-3'-phosphate
  modified_base 15: mod_base = OTHER; note = 2'-O-methylcytidine-3'-phosphate
  modified_base 16: mod_base = OTHER; note = 2'-O-methylcytidine-3'-phosphate
  modified_base 17: mod_base = OTHER; note = 2'-O-methyladenosine-3'-phosphate
  modified_base 18: mod_base = OTHER; note = 2'-O-methylcytidine-3'-phosphate
  modified_base 19: mod_base = OTHER; note = 2'-O-methyladenosine-3'-phosphate
  modified_base 20: mod_base = OTHER; note = 2'-O-methylcytidine-3'-phosphate
  modified_base 21: mod_base = OTHER; note = 2'-O-methyluridine-3'-phosphate ((2S,4R)-1-[29-[[2-(acetylamino)-2-deoxy-beta-D-galactopyra nosyl]oxy]-14,14-bis[[3-[[3-[[5-[[2-(acetylamino)-2-deoxy-b eta-D-galactopyranosyl]oxy]-1-oxopentyl]amino]propyl]amino] -3-oxopropoxy]methyl]-1,12,19,25-tetraoxo-16-oxa-13,20,24-t riazanonacos-1-yl]-4-hydroxy-2-pyrrolidinyl)methyl ester
cccagaacagaccaccacact

SEQ ID NO: 893 - RNA, 21 nt, synthetic construct
  source 1..21: mol_type = other RNA
  modified_base 1: mod_base = OTHER; note = 2'-O-methylcytidine-3'-phosphorothioate
  modified_base 2: mod_base = OTHER; note = 2'-O-methyluridine-3'-phosphorothioate
  modified_base 3: mod_base = OTHER; note = 2'-O-methylcytidine-3'-phosphate
  modified_base 4: mod_base = OTHER; note = 2'-O-methylcytidine-3'-phosphate
  modified_base 5: mod_base = OTHER; note = 2'-O-methyladenosine-3'-phosphate
  modified_base 6: mod_base = OTHER; note = 2'-O-methylcytidine-3'-phosphate
  modified_base 7: mod_base = OTHER; note = 2'-deoxy-2'-fluoroadenosine-3'-phosphate
  modified_base 8: mod_base = OTHER; note = 2'-O-methylguanosine-3'-phosphate
  modified_base 9: mod_base = OTHER; note = 2'-deoxy-2'-fluorouridine-3'-phosphate
  modified_base 10: mod_base = OTHER; note = 2'-deoxy-2'-fluoroguanosine-3'-phosphate
  modified_base 11: mod_base = OTHER; note = 2'-deoxy-2'-fluorocytidine-3'-phosphate
  modified_base 12: mod_base = OTHER; note = 2'-O-methyluridine-3'-phosphate
  modified_base 13: mod_base = OTHER; note = 2'-O-methylguanosine-3'-phosphate
  modified_base 14: mod_base = OTHER; note = 2'-O-methyladenosine-3'-phosphate
  modified_base 15: mod_base = OTHER; note = 2'-O-methylcytidine-3'-phosphate
  modified_base 16: mod_base = OTHER; note = 2'-O-methylcytidine-3'-phosphate
  modified_base 17: mod_base = OTHER; note = 2'-O-methyladenosine-3'-phosphate
  modified_base 18: mod_base = OTHER; note = 2'-O-methylcytidine-3'-phosphate
  modified_base 19: mod_base = OTHER; note = 2'-O-methylguanosine-3'-phosphate
  modified_base 20: mod_base = OTHER; note = 2'-O-methyladenosine-3'-phosphate
  modified_base 21: mod_base = OTHER; note = 2'-O-methyluridine-3'-phosphate ((2S,4R)-1-[29-[[2-(acetylamino)-2-deoxy-beta-D-galactopyra nosyl]oxy]-14,14-bis[[3-[[3-[[5-[[2-(acetylamino)-2-deoxy-b eta-D-galactopyranosyl]oxy]-1-oxopentyl]amino]propyl]amino] -3-oxopropoxy]methyl]-1,12,19,25-tetraoxo-16-oxa-13,20,24-t riazanonacos-1-yl]-4-hydroxy-2-pyrrolidinyl)methyl ester
ctccacagtgctgaccacgat

SEQ ID NO: 894 - RNA, 21 nt, synthetic construct
  source 1..21: mol_type = other RNA
  modified_base 1: mod_base = OTHER; note = 2'-O-methylguanosine-3'-phosphorothioate
  modified_base 2: mod_base = OTHER; note = 2'-O-methyladenosine-3'-phosphorothioate
  modified_base 3: mod_base = OTHER; note = 2'-O-methylcytidine-3'-phosphate
  modified_base 4: mod_base = OTHER; note = 2'-O-methylcytidine-3'-phosphate
  modified_base 5: mod_base = OTHER; note = 2'-O-methyluridine-3'-phosphate
  modified_base 6: mod_base = OTHER; note = 2'-O-methylguanosine-3'-phosphate
  modified_base 7: mod_base = OTHER; note = 2'-deoxy-2'-fluoroguanosine-3'-phosphate
  modified_base 8: mod_base = OTHER; note = 2'-O-methyladenosine-3'-phosphate
  modified_base 9: mod_base = OTHER; note = 2'-deoxy-2'-fluorouridine-3'-phosphate
  modified_base 10: mod_base = OTHER; note = 2'-deoxy-2'-fluorocytidine-3'-phosphate
  modified_base 11: mod_base = OTHER; note = 2'-deoxy-2'-fluorocytidine-3'-phosphate
  modified_base 12: mod_base = OTHER; note = 2'-O-methyluridine-3'-phosphate
  modified_base 13: mod_base = OTHER; note = 2'-O-methylcytidine-3'-phosphate
  modified_base 14: mod_base = OTHER; note = 2'-O-methyladenosine-3'-phosphate
  modified_base 15: mod_base = OTHER; note = 2'-O-methylcytidine-3'-phosphate
  modified_base 16: mod_base = OTHER; note = 2'-O-methyladenosine-3'-phosphate
  modified_base 17: mod_base = OTHER; note = 2'-O-methylguanosine-3'-phosphate
  modified_base 18: mod_base = OTHER; note = 2'-O-methyladenosine-3'-phosphate
  modified_base 19: mod_base = OTHER; note = 2'-O-methylguanosine-3'-phosphate
  modified_base 20: mod_base = OTHER; note = 2'-O-methylcytidine-3'-phosphate
  modified_base 21: mod_base = OTHER; note = 2'-O-methyluridine-3'-phosphate ((2S,4R)-1-[29-[[2-(acetylamino)-2-deoxy-beta-D-galactopyra nosyl]oxy]-14,14-bis[[3-[[3-[[5-[[2-(acetylamino)-2-deoxy-b eta-D-galactopyranosyl]oxy]-1-oxopentyl]amino]propyl]amino] -3-oxopropoxy]methyl]-1,12,19,25-tetraoxo-16-oxa-13,20,24-t riazanonacos-1-yl]-4-hydroxy-2-pyrrolidinyl)methyl ester
gacctggatcctcacagagct

SEQ ID NO: 895 - RNA, 21 nt, synthetic construct
  source 1..21: mol_type = other RNA
  modified_base 1: mod_base = OTHER; note = 2'-O-methylcytidine-3'-phosphorothioate
  modified_base 2: mod_base = OTHER; note = 2'-O-methylcytidine-3'-phosphorothioate
  modified_base 3: mod_base = OTHER; note = 2'-O-methyladenosine-3'-phosphate
  modified_base 4: mod_base = OTHER; note = 2'-O-methylcytidine-3'-phosphate
  modified_base 5: mod_base = OTHER; note = 2'-O-methyluridine-3'-phosphate
  modified_base 6: mod_base = OTHER; note = 2'-O-methylcytidine-3'-phosphate
  modified_base 7: mod_base = OTHER; note = 2'-deoxy-2'-fluorocytidine-3'-phosphate
  modified_base 8: mod_base = OTHER; note = 2'-O-methylcytidine-3'-phosphate
  modified_base 9: mod_base = OTHER; note = 2'-deoxy-2'-fluorouridine-3'-phosphate
  modified_base 10: mod_base = OTHER; note = 2'-deoxy-2'-fluorocytidine-3'-phosphate
  modified_base 11: mod_base = OTHER; note = 2'-deoxy-2'-fluorocytidine-3'-phosphate
  modified_base 12: mod_base = OTHER; note = 2'-O-methyluridine-3'-phosphate
  modified_base 13: mod_base = OTHER; note = 2'-O-methylcytidine-3'-phosphate
  modified_base 14: mod_base = OTHER; note = 2'-O-methylcytidine-3'-phosphate
  modified_base 15: mod_base = OTHER; note = 2'-O-methyladenosine-3'-phosphate
  modified_base 16: mod_base = OTHER; note = 2'-O-methylguanosine-3'-phosphate
  modified_base 17: mod_base = OTHER; note = 2'-O-methyluridine-3'-phosphate
  modified_base 18: mod_base = OTHER; note = 2'-O-methylcytidine-3'-phosphate
  modified_base 19: mod_base = OTHER; note = 2'-O-methylcytidine-3'-phosphate
  modified_base 20: mod_base = OTHER; note = 2'-O-methyladenosine-3'-phosphate
  modified_base 21: mod_base = OTHER; note = 2'-O-methyluridine-3'-phosphate ((2S,4R)-1-[29-[[2-(acetylamino)-2-deoxy-beta-D-galactopyra nosyl]oxy]-14,14-bis[[3-[[3-[[5-[[2-(acetylamino)-2-deoxy-b eta-D-galactopyranosyl]oxy]-1-oxopentyl]amino]propyl]amino] -3-oxopropoxy]methyl]-1,12,19,25-tetraoxo-16-oxa-13,20,24-t riazanonacos-1-yl]-4-hydroxy-2-pyrrolidinyl)methyl ester
ccactccctcctccagtccat

SEQ ID NO: 896 - RNA, 21 nt, synthetic construct
  source 1..21: mol_type = other RNA
  modified_base 1: mod_base = OTHER; note = 2'-O-methylcytidine-3'-phosphorothioate
  modified_base 2: mod_base = OTHER; note = 2'-O-methylcytidine-3'-phosphorothioate
  modified_base 3: mod_base = OTHER; note = 2'-O-methyladenosine-3'-phosphate
  modified_base 4: mod_base = OTHER; note = 2'-O-methylcytidine-3'-phosphate
  modified_base 5: mod_base = OTHER; note = 2'-O-methylcytidine-3'-phosphate
  modified_base 6: mod_base = OTHER; note = 2'-O-methyladenosine-3'-phosphate
  modified_base 7: mod_base = OTHER; note = 2'-deoxy-2'-fluorouridine-3'-phosphate
  modified_base 8: mod_base = OTHER; note = 2'-O-methylguanosine-3'-phosphate
  modified_base 9: mod_base = OTHER; note = 2'-deoxy-2'-fluorouridine-3'-phosphate
  modified_base 10: mod_base = OTHER; note = 2'-deoxy-2'-fluorocytidine-3'-phosphate
  modified_base 11: mod_base = OTHER; note = 2'-deoxy-2'-fluorocytidine-3'-phosphate
  modified_base 12: mod_base = OTHER; note = 2'-O-methyladenosine-3'-phosphate
  modified_base 13: mod_base = OTHER; note = 2'-O-methylcytidine-3'-phosphate
  modified_base 14: mod_base = OTHER; note = 2'-O-methyladenosine-3'-phosphate
  modified_base 15: mod_base = OTHER; note = 2'-O-methylguanosine-3'-phosphate
  modified_base 16: mod_base = OTHER; note = 2'-O-methylcytidine-3'-phosphate
  modified_base 17: mod_base = OTHER; note = 2'-O-methylcytidine-3'-phosphate
  modified_base 18: mod_base = OTHER; note = 2'-O-methyladenosine-3'-phosphate
  modified_base 19: mod_base = OTHER; note = 2'-O-methylcytidine-3'-phosphate
  modified_base 20: mod_base = OTHER; note = 2'-O-methyladenosine-3'-phosphate
  modified_base 21: mod_base = OTHER; note = 2'-O-methyluridine-3'-phosphate ((2S,4R)-1-[29-[[2-(acetylamino)-2-deoxy-beta-D-galactopyra nosyl]oxy]-14,14-bis[[3-[[3-[[5-[[2-(acetylamino)-2-deoxy-b eta-D-galactopyranosyl]oxy]-1-oxopentyl]amino]propyl]amino] -3-oxopropoxy]methyl]-1,12,19,25-tetraoxo-16-oxa-13,20,24-t riazanonacos-1-yl]-4-hydroxy-2-pyrrolidinyl)methyl ester
ccaccatgtccacagccacat

SEQ ID NO: 897 - RNA, 21 nt, synthetic construct
  source 1..21: mol_type = other RNA
  modified_base 1: mod_base = OTHER; note = 2'-O-methyluridine-3'-phosphorothioate
  modified_base 2: mod_base = OTHER; note = 2'-O-methylguanosine-3'-phosphorothioate
  modified_base 3: mod_base = OTHER; note = 2'-O-methylcytidine-3'-phosphate
  modified_base 4: mod_base = OTHER; note = 2'-O-methylcytidine-3'-phosphate
  modified_base 5: mod_base = OTHER; note = 2'-O-methylguanosine-3'-phosphate
  modified_base 6: mod_base = OTHER; note = 2'-O-methyladenosine-3'-phosphate
  modified_base 7: mod_base = OTHER; note = 2'-deoxy-2'-fluorocytidine-3'-phosphate
  modified_base 8: mod_base = OTHER; note = 2'-O-methyluridine-3'-phosphate
  modified_base 9: mod_base = OTHER; note = 2'-deoxy-2'-fluoroadenosine-3'-phosphate
  modified_base 10: mod_base = OTHER; note = 2'-deoxy-2'-fluorocytidine-3'-phosphate
  modified_base 11: mod_base = OTHER; note = 2'-deoxy-2'-fluorocytidine-3'-phosphate
  modified_base 12: mod_base = OTHER; note = 2'-O-methyladenosine-3'-phosphate
  modified_base 13: mod_base = OTHER; note = 2'-O-methylcytidine-3'-phosphate
  modified_base 14: mod_base = OTHER; note = 2'-O-methyladenosine-3'-phosphate
  modified_base 15: mod_base = OTHER; note = 2'-O-methyladenosine-3'-phosphate
  modified_base 16: mod_base = OTHER; note = 2'-O-methylcytidine-3'-phosphate
  modified_base 17: mod_base = OTHER; note = 2'-O-methylcytidine-3'-phosphate
  modified_base 18: mod_base = OTHER; note = 2'-O-methyladenosine-3'-phosphate
  modified_base 19: mod_base = OTHER; note = 2'-O-methylcytidine-3'-phosphate
  modified_base 20: mod_base = OTHER; note = 2'-O-methylguanosine-3'-phosphate
  modified_base 21: mod_base = OTHER; note = 2'-O-methyluridine-3'-phosphate ((2S,4R)-1-[29-[[2-(acetylamino)-2-deoxy-beta-D-galactopyra nosyl]oxy]-14,14-bis[[3-[[3-[[5-[[2-(acetylamino)-2-deoxy-b eta-D-galactopyranosyl]oxy]-1-oxopentyl]amino]propyl]amino] -3-oxopropoxy]methyl]-1,12,19,25-tetraoxo-16-oxa-13,20,24-t riazanonacos-1-yl]-4-hydroxy-2-pyrrolidinyl)methyl ester
tgccgactaccacaaccacgt

SEQ ID NO: 898 - RNA, 21 nt, synthetic construct
  source 1..21: mol_type = other RNA
  modified_base 1: mod_base = OTHER; note = 2'-O-methylcytidine-3'-phosphorothioate
  modified_base 2: mod_base = OTHER; note = 2'-O-methyladenosine-3'-phosphorothioate
  modified_base 3: mod_base = OTHER; note = 2'-O-methylcytidine-3'-phosphate
  modified_base 4: mod_base = OTHER; note = 2'-O-methyladenosine-3'-phosphate
  modified_base 5: mod_base = OTHER; note = 2'-O-methylcytidine-3'-phosphate
  modified_base 6: mod_base = OTHER; note = 2'-O-methylcytidine-3'-phosphate
  modified_base 7: mod_base = OTHER; note = 2'-deoxy-2'-fluorocytidine-3'-phosphate
  modified_base 8: mod_base = OTHER; note = 2'-O-methyladenosine-3'-phosphate
  modified_base 9: mod_base = OTHER; note = 2'-deoxy-2'-fluorocytidine-3'-phosphate
  modified_base 10: mod_base = OTHER; note = 2'-deoxy-2'-fluoroadenosine-3'-phosphate
  modified_base 11: mod_base = OTHER; note = 2'-deoxy-2'-fluoroadenosine-3'-phosphate
  modified_base 12: mod_base = OTHER; note = 2'-O-methylcytidine-3'-phosphate
  modified_base 13: mod_base = OTHER; note = 2'-O-methylcytidine-3'-phosphate
  modified_base 14: mod_base = OTHER; note = 2'-O-methyladenosine-3'-phosphate
  modified_base 15: mod_base = OTHER; note = 2'-O-methylguanosine-3'-phosphate
  modified_base 16: mod_base = OTHER; note = 2'-O-methyluridine-3'-phosphate
  modified_base 17: mod_base = OTHER; note = 2'-O-methylguanosine-3'-phosphate
  modified_base 18: mod_base = OTHER; note = 2'-O-methylguanosine-3'-phosphate
  modified_base 19: mod_base = OTHER; note = 2'-O-methylcytidine-3'-phosphate
  modified_base 20: mod_base = OTHER; note = 2'-O-methyluridine-3'-phosphate
  modified_base 21: mod_base = OTHER; note = 2'-O-methyluridine-3'-phosphate ((2S,4R)-1-[29-[[2-(acetylamino)-2-deoxy-beta-D-galactopyra nosyl]oxy]-14,14-bis[[3-[[3-[[5-[[2-(acetylamino)-2-deoxy-b eta-D-galactopyranosyl]oxy]-1-oxopentyl]amino]propyl]amino] -3-oxopropoxy]methyl]-1,12,19,25-tetraoxo-16-oxa-13,20,24-t riazanonacos-1-yl]-4-hydroxy-2-pyrrolidinyl)methyl ester
cacacccacaaccagtggctt

SEQ ID NO: 899 - RNA, 21 nt, synthetic construct
  source 1..21: mol_type = other RNA
  modified_base 1: mod_base = OTHER; note = 2'-O-methylcytidine-3'-phosphorothioate
  modified_base 2: mod_base = OTHER; note = 2'-O-methyladenosine-3'-phosphorothioate
  modified_base 3: mod_base = OTHER; note = 2'-O-methyladenosine-3'-phosphate
  modified_base 4: mod_base = OTHER; note = 2'-O-methylguanosine-3'-phosphate
  modified_base 5: mod_base = OTHER; note = 2'-O-methylguanosine-3'-phosphate
  modified_base 6: mod_base = OTHER; note = 2'-O-methyladenosine-3'-phosphate
  modified_base 7: mod_base = OTHER; note = 2'-deoxy-2'-fluorocytidine-3'-phosphate
  modified_base 8: mod_base = OTHER; note = 2'-O-methyluridine-3'-phosphate
  modified_base 9: mod_base = OTHER; note = 2'-deoxy-2'-fluoroguanosine-3'-phosphate
  modified_base 10: mod_base = OTHER; note = 2'-deoxy-2'-fluorocytidine-3'-phosphate
  modified_base 11: mod_base = OTHER; note = 2'-deoxy-2'-fluoroadenosine-3'-phosphate
  modified_base 12: mod_base = OTHER; note = 2'-O-methyladenosine-3'-phosphate
  modified_base 13: mod_base = OTHER; note = 2'-O-methylcytidine-3'-phosphate
  modified_base 14: mod_base = OTHER; note = 2'-O-methylcytidine-3'-phosphate
  modified_base 15: mod_base = OTHER; note = 2'-O-methyladenosine-3'-phosphate
  modified_base 16: mod_base = OTHER; note = 2'-O-methylcytidine-3'-phosphate
  modified_base 17: mod_base = OTHER; note = 2'-O-methylcytidine-3'-phosphate
  modified_base 18: mod_base = OTHER; note = 2'-O-methylcytidine-3'-phosphate
  modified_base 19: mod_base = OTHER; note = 2'-O-methyluridine-3'-phosphate
  modified_base 20: mod_base = OTHER; note = 2'-O-methyluridine-3'-phosphate
  modified_base 21: mod_base = OTHER; note = 2'-O-methyluridine-3'-phosphate ((2S,4R)-1-[29-[[2-(acetylamino)-2-deoxy-beta-D-galactopyra nosyl]oxy]-14,14-bis[[3-[[3-[[5-[[2-(acetylamino)-2-deoxy-b eta-D-galactopyranosyl]oxy]-1-oxopentyl]amino]propyl]amino] -3-oxopropoxy]methyl]-1,12,19,25-tetraoxo-16-oxa-13,20,24-t riazanonacos-1-yl]-4-hydroxy-2-pyrrolidinyl)methyl ester
caaggactgcaaccacccttt

SEQ ID NO: 900 - RNA, 21 nt, synthetic construct
  source 1..21: mol_type = other RNA
  modified_base 1: mod_base = OTHER; note = 2'-O-methylguanosine-3'-phosphorothioate
  modified_base 2: mod_base = OTHER; note = 2'-O-methyluridine-3'-phosphorothioate
  modified_base 3: mod_base = OTHER; note = 2'-O-methylguanosine-3'-phosphate
  modified_base 4: mod_base = OTHER; note = 2'-O-methylcytidine-3'-phosphate
  modified_base 5: mod_base = OTHER; note = 2'-O-methyluridine-3'-phosphate
  modified_base 6: mod_base = OTHER; note = 2'-O-methylguanosine-3'-phosphate
  modified_base 7: mod_base = OTHER; note = 2'-deoxy-2'-fluoroadenosine-3'-phosphate
  modified_base 8: mod_base = OTHER; note = 2'-O-methylcytidine-3'-phosphate
  modified_base 9: mod_base = OTHER; note = 2'-deoxy-2'-fluoroadenosine-3'-phosphate
  modified_base 10: mod_base = OTHER; note = 2'-deoxy-2'-fluoroadenosine-3'-phosphate
  modified_base 11: mod_base = OTHER; note = 2'-deoxy-2'-fluoroguanosine-3'-phosphate
  modified_base 12: mod_base = OTHER; note = 2'-O-methylcytidine-3'-phosphate
  modified_base 13: mod_base = OTHER; note = 2'-O-methyladenosine-3'-phosphate
  modified_base 14: mod_base = OTHER; note = 2'-O-methylcytidine-3'-phosphate
  modified_base 15: mod_base = OTHER; note = 2'-O-methyladenosine-3'-phosphate
  modified_base 16: mod_base = OTHER; note = 2'-O-methylguanosine-3'-phosphate
  modified_base 17: mod_base = OTHER; note = 2'-O-methylcytidine-3'-phosphate
  modified_base 18: mod_base = OTHER; note = 2'-O-methylcytidine-3'-phosphate
  modified_base 19: mod_base = OTHER; note = 2'-O-methyladenosine-3'-phosphate
  modified_base 20: mod_base = OTHER; note = 2'-O-methylcytidine-3'-phosphate
  modified_base 21: mod_base = OTHER; note = 2'-O-methyluridine-3'-phosphate ((2S,4R)-1-[29-[[2-(acetylamino)-2-deoxy-beta-D-galactopyra nosyl]oxy]-14,14-bis[[3-[[3-[[5-[[2-(acetylamino)-2-deoxy-b eta-D-galactopyranosyl]oxy]-1-oxopentyl]amino]propyl]amino] -3-oxopropoxy]methyl]-1,12,19,25-tetraoxo-16-oxa-13,20,24-t riazanonacos-1-yl]-4-hydroxy-2-pyrrolidinyl)methyl ester
gtgctgacaagcacagccact

SEQ ID NO: 901 - RNA, 21 nt, synthetic construct
  source 1..21: mol_type = other RNA
  modified_base 1: mod_base = OTHER; note = 2'-O-methylcytidine-3'-phosphorothioate
  modified_base 2: mod_base = OTHER; note = 2'-O-methyladenosine-3'-phosphorothioate
  modified_base 3: mod_base = OTHER; note = 2'-O-methylcytidine-3'-phosphate
  modified_base 4: mod_base = OTHER; note = 2'-O-methyladenosine-3'-phosphate
  modified_base 5: mod_base = OTHER; note = 2'-O-methylguanosine-3'-phosphate
  modified_base 6: mod_base = OTHER; note = 2'-O-methylcytidine-3'-phosphate
  modified_base 7: mod_base = OTHER; note = 2'-deoxy-2'-fluorouridine-3'-phosphate
  modified_base 8: mod_base = OTHER; note = 2'-O-methyladenosine-3'-phosphate
  modified_base 9: mod_base = OTHER; note = 2'-deoxy-2'-fluorocytidine-3'-phosphate
  modified_base 10: mod_base = OTHER; note = 2'-deoxy-2'-fluorocytidine-3'-phosphate
  modified_base 11: mod_base = OTHER; note = 2'-deoxy-2'-fluoroadenosine-3'-phosphate
  modified_base 12: mod_base = OTHER; note = 2'-O-methylguanosine-3'-phosphate
  modified_base 13: mod_base = OTHER; note = 2'-O-methylcytidine-3'-phosphate
  modified_base 14: mod_base = OTHER; note = 2'-O-methyluridine-3'-phosphate
  modified_base 15: mod_base = OTHER; note = 2'-O-methyluridine-3'-phosphate
  modified_base 16: mod_base = OTHER; note = 2'-O-methyluridine-3'-phosphate
  modified_base 17: mod_base = OTHER; note = 2'-O-methyladenosine-3'-phosphate
  modified_base 18: mod_base = OTHER; note = 2'-O-methylcytidine-3'-phosphate
  modified_base 19: mod_base = OTHER; note = 2'-O-methyladenosine-3'-phosphate
  modified_base 20: mod_base = OTHER; note = 2'-O-methylcytidine-3'-phosphate
  modified_base 21: mod_base = OTHER; note = 2'-O-methyluridine-3'-phosphate ((2S,4R)-1-[29-[[2-(acetylamino)-2-deoxy-beta-D-galactopyra nosyl]oxy]-14,14-bis[[3-[[3-[[5-[[2-(acetylamino)-2-deoxy-b eta-D-galactopyranosyl]oxy]-1-oxopentyl]amino]propyl]amino] -3-oxopropoxy]methyl]-1,12,19,25-tetraoxo-16-oxa-13,20,24-t riazanonacos-1-yl]-4-hydroxy-2-pyrrolidinyl)methyl ester
cacagctaccagctttacact

SEQ ID NO: 902 - RNA, 21 nt, synthetic construct
  source 1..21: mol_type = other RNA
  modified_base 1: mod_base = OTHER; note = 2'-O-methylcytidine-3'-phosphorothioate
  modified_base 2: mod_base = OTHER; note = 2'-O-methylcytidine-3'-phosphorothioate
  modified_base 3: mod_base = OTHER; note = 2'-O-methyladenosine-3'-phosphate
  modified_base 4: mod_base = OTHER; note = 2'-O-methylcytidine-3'-phosphate
  modified_base 5: mod_base = OTHER; note = 2'-O-methylcytidine-3'-phosphate
  modified_base 6: mod_base = OTHER; note = 2'-O-methyladenosine-3'-phosphate
  modified_base 7: mod_base = OTHER; note = 2'-deoxy-2'-fluorouridine-3'-phosphate
  modified_base 8: mod_base = OTHER; note = 2'-O-methylguanosine-3'-phosphate
  modified_base 9: mod_base = OTHER; note = 2'-deoxy-2'-fluorouridine-3'-phosphate
  modified_base 10: mod_base = OTHER; note = 2'-deoxy-2'-fluorocytidine-3'-phosphate
  modified_base 11: mod_base = OTHER; note = 2'-deoxy-2'-fluorocytidine-3'-phosphate
  modified_base 12: mod_base = OTHER; note = 2'-O-methyladenosine-3'-phosphate
  modified_base 13: mod_base = OTHER; note = 2'-O-methylcytidine-3'-phosphate
  modified_base 14: mod_base = OTHER; note = 2'-O-methyladenosine-3'-phosphate
  modified_base 15: mod_base = OTHER; note = 2'-O-methyladenosine-3'-phosphate
  modified_base 16: mod_base = OTHER; note = 2'-O-methyluridine-3'-phosphate
  modified_base 17: mod_base = OTHER; note = 2'-O-methylcytidine-3'-phosphate
  modified_base 18: mod_base = OTHER; note = 2'-O-methylcytidine-3'-phosphate
  modified_base 19: mod_base = OTHER; note = 2'-O-methyladenosine-3'-phosphate
  modified_base 20: mod_base = OTHER; note = 2'-O-methylcytidine-3'-phosphate
  modified_base 21: mod_base = OTHER; note = 2'-O-methyluridine-3'-phosphate ((2S,4R)-1-[29-[[2-(acetylamino)-2-deoxy-beta-D-galactopyra nosyl]oxy]-14,14-bis[[3-[[3-[[5-[[2-(acetylamino)-2-deoxy-b eta-D-galactopyranosyl]oxy]-1-oxopentyl]amino]propyl]amino] -3-oxopropoxy]methyl]-1,12,19,25-tetraoxo-16-oxa-13,20,24-t riazanonacos-1-yl]-4-hydroxy-2-pyrrolidinyl)methyl ester
ccaccatgtccacaatccact

SEQ ID NO: 903 - RNA, 21 nt, synthetic construct
  source 1..21: mol_type = other RNA
  modified_base 1: mod_base = OTHER; note = 2'-O-methylcytidine-3'-phosphorothioate
  modified_base 2: mod_base = OTHER; note = 2'-O-methylcytidine-3'-phosphorothioate
  modified_base 3: mod_base = OTHER; note = 2'-O-methyladenosine-3'-phosphate
  modified_base 4: mod_base = OTHER; note = 2'-O-methylcytidine-3'-phosphate
  modified_base 5: mod_base = OTHER; note = 2'-O-methyluridine-3'-phosphate
  modified_base 6: mod_base = OTHER; note = 2'-O-methyladenosine-3'-phosphate
  modified_base 7: mod_base = OTHER; note = 2'-deoxy-2'-fluorocytidine-3'-phosphate
  modified_base 8: mod_base = OTHER; note = 2'-O-methyladenosine-3'-phosphate
  modified_base 9: mod_base = OTHER; note = 2'-deoxy-2'-fluoroadenosine-3'-phosphate
  modified_base 10: mod_base = OTHER; note = 2'-deoxy-2'-fluorocytidine-3'-phosphate
  modified_base 11: mod_base = OTHER; note = 2'-deoxy-2'-fluorouridine-3'-phosphate
  modified_base 12: mod_base = OTHER; note = 2'-O-methylguanosine-3'-phosphate
  modified_base 13: mod_base = OTHER; note = 2'-O-methylcytidine-3'-phosphate
  modified_base 14: mod_base = OTHER; note = 2'-O-methyladenosine-3'-phosphate
  modified_base 15: mod_base = OTHER; note = 2'-O-methylguanosine-3'-phosphate
  modified_base 16: mod_base = OTHER; note = 2'-O-methylcytidine-3'-phosphate
  modified_base 17: mod_base = OTHER; note = 2'-O-methylcytidine-3'-phosphate
  modified_base 18: mod_base = OTHER; note = 2'-O-methyladenosine-3'-phosphate
  modified_base 19: mod_base = OTHER; note = 2'-O-methylcytidine-3'-phosphate
  modified_base 20: mod_base = OTHER; note = 2'-O-methyluridine-3'-phosphate
  modified_base 21: mod_base = OTHER; note = 2'-O-methyluridine-3'-phosphate ((2S,4R)-1-[29-[[2-(acetylamino)-2-deoxy-beta-D-galactopyra nosyl]oxy]-14,14-bis[[3-[[3-[[5-[[2-(acetylamino)-2-deoxy-b eta-D-galactopyranosyl]oxy]-1-oxopentyl]amino]propyl]amino] -3-oxopropoxy]methyl]-1,12,19,25-tetraoxo-16-oxa-13,20,24-t riazanonacos-1-yl]-4-hydroxy-2-pyrrolidinyl)methyl ester
ccactacaactgcagccactt

SEQ ID NO: 904 - RNA, 21 nt, synthetic construct
  source 1..21: mol_type = other RNA
  modified_base 1: mod_base = OTHER; note = 2'-O-methylguanosine-3'-phosphorothioate
  modified_base 2: mod_base = OTHER; note = 2'-O-methyladenosine-3'-phosphorothioate
  modified_base 3: mod_base = OTHER; note = 2'-O-methylcytidine-3'-phosphate
  modified_base 4: mod_base = OTHER; note = 2'-O-methylcytidine-3'-phosphate
  modified_base 5: mod_base = OTHER; note = 2'-O-methyladenosine-3'-phosphate
  modified_base 6: mod_base = OTHER; note = 2'-O-methylcytidine-3'-phosphate
  modified_base 7: mod_base = OTHER; note = 2'-deoxy-2'-fluorocytidine-3'-phosphate
  modified_base 8: mod_base = OTHER; note = 2'-O-methyluridine-3'-phosphate
  modified_base 9: mod_base = OTHER; note = 2'-deoxy-2'-fluoroguanosine-3'-phosphate
  modified_base 10: mod_base = OTHER; note = 2'-deoxy-2'-fluoroguanosine-3'-phosphate
  modified_base 11: mod_base = OTHER; note = 2'-deoxy-2'-fluoroadenosine-3'-phosphate
  modified_base 12: mod_base = OTHER; note = 2'-O-methyluridine-3'-phosphate
  modified_base 13: mod_base = OTHER; note = 2'-O-methylcytidine-3'-phosphate
  modified_base 14: mod_base = OTHER; note = 2'-O-methylcytidine-3'-phosphate
  modified_base 15: mod_base = OTHER; note = 2'-O-methyluridine-3'-phosphate
  modified_base 16: mod_base = OTHER; note = 2'-O-methylcytidine-3'-phosphate
  modified_base 17: mod_base = OTHER; note = 2'-O-methyladenosine-3'-phosphate
  modified_base 18: mod_base = OTHER; note = 2'-O-methylcytidine-3'-phosphate
  modified_base 19: mod_base = OTHER; note = 2'-O-methyladenosine-3'-phosphate
  modified_base 20: mod_base = OTHER; note = 2'-O-methylguanosine-3'-phosphate
  modified_base 21: mod_base = OTHER; note = 2'-O-methyluridine-3'-phosphate ((2S,4R)-1-[29-[[2-(acetylamino)-2-deoxy-beta-D-galactopyra nosyl]oxy]-14,14-bis[[3-[[3-[[5-[[2-(acetylamino)-2-deoxy-b eta-D-galactopyranosyl]oxy]-1-oxopentyl]amino]propyl]amino] -3-oxopropoxy]methyl]-1,12,19,25-tetraoxo-16-oxa-13,20,24-t riazanonacos-1-yl]-4-hydroxy-2-pyrrolidinyl)methyl ester
gaccacctggatcctcacagt

SEQ ID NO: 905 - RNA, 21 nt, synthetic construct
  source 1..21: mol_type = other RNA
  modified_base 1: mod_base = OTHER; note = 2'-O-methylcytidine-3'-phosphorothioate
  modified_base 2: mod_base = OTHER; note = 2'-O-methylcytidine-3'-phosphorothioate
  modified_base 3: mod_base = OTHER; note = 2'-O-methyladenosine-3'-phosphate
  modified_base 4: mod_base = OTHER; note = 2'-O-methylcytidine-3'-phosphate
  modified_base 5: mod_base = OTHER; note = 2'-O-methyluridine-3'-phosphate
  modified_base 6: mod_base = OTHER; note = 2'-O-methyladenosine-3'-phosphate
  modified_base 7: mod_base = OTHER; note = 2'-deoxy-2'-fluorocytidine-3'-phosphate
  modified_base 8: mod_base = OTHER; note = 2'-O-methylguanosine-3'-phosphate
  modified_base 9: mod_base = OTHER; note = 2'-deoxy-2'-fluoroadenosine-3'-phosphate
  modified_base 10: mod_base = OTHER; note = 2'-deoxy-2'-fluorocytidine-3'-phosphate
  modified_base 11: mod_base = OTHER; note = 2'-deoxy-2'-fluorouridine-3'-phosphate
  modified_base 12: mod_base = OTHER; note = 2'-O-methylguanosine-3'-phosphate
  modified_base 13: mod_base = OTHER; note = 2'-O-methylcytidine-3'-phosphate
  modified_base 14: mod_base = OTHER; note = 2'-O-methyladenosine-3'-phosphate
  modified_base 15: mod_base = OTHER; note = 2'-O-methyluridine-3'-phosphate
  modified_base 16: mod_base = OTHER; note = 2'-O-methylcytidine-3'-phosphate
  modified_base 17: mod_base = OTHER; note = 2'-O-methylcytidine-3'-phosphate
  modified_base 18: mod_base = OTHER; note = 2'-O-methyladenosine-3'-phosphate
  modified_base 19: mod_base = OTHER; note = 2'-O-methylcytidine-3'-phosphate
  modified_base 20: mod_base = OTHER; note = 2'-O-methyluridine-3'-phosphate
  modified_base 21: mod_base = OTHER; note = 2'-O-methyluridine-3'-phosphate ((2S,4R)-1-[29-[[2-(acetylamino)-2-deoxy-beta-D-galactopyra nosyl]oxy]-14,14-bis[[3-[[3-[[5-[[2-(acetylamino)-2-deoxy-b eta-D-galactopyranosyl]oxy]-1-oxopentyl]amino]propyl]amino] -3-oxopropoxy]methyl]-1,12,19,25-tetraoxo-16-oxa-13,20,24-t riazanonacos-1-yl]-4-hydroxy-2-pyrrolidinyl)methyl ester
ccactacgactgcatccactt

SEQ ID NO: 906 - RNA, 21 nt, synthetic construct
  source 1..21: mol_type = other RNA
  modified_base 1: mod_base = OTHER; note = 2'-O-methylcytidine-3'-phosphorothioate
  modified_base 2: mod_base = OTHER; note = 2'-O-methyluridine-3'-phosphorothioate
  modified_base 3: mod_base = OTHER; note = 2'-O-methylcytidine-3'-phosphate
  modified_base 4: mod_base = OTHER; note = 2'-O-methylcytidine-3'-phosphate
  modified_base 5: mod_base = OTHER; note = 2'-O-methylcytidine-3'-phosphate
  modified_base 6: mod_base = OTHER; note = 2'-O-methyladenosine-3'-phosphate
  modified_base 7: mod_base = OTHER; note = 2'-deoxy-2'-fluoroadenosine-3'-phosphate
  modified_base 8: mod_base = OTHER; note = 2'-O-methyladenosine-3'-phosphate
  modified_base 9: mod_base = OTHER; note = 2'-deoxy-2'-fluoroguanosine-3'-phosphate
  modified_base 10: mod_base = OTHER; note = 2'-deoxy-2'-fluorouridine-3'-phosphate
  modified_base 11: mod_base = OTHER; note = 2'-deoxy-2'-fluoroguanosine-3'-phosphate
  modified_base 12: mod_base = OTHER; note = 2'-O-methylcytidine-3'-phosphate
  modified_base 13: mod_base = OTHER; note = 2'-O-methyluridine-3'-phosphate
  modified_base 14: mod_base = OTHER; note = 2'-O-methylguanosine-3'-phosphate
  modified_base 15: mod_base = OTHER; note = 2'-O-methyladenosine-3'-phosphate
  modified_base 16: mod_base = OTHER; note = 2'-O-methylcytidine-3'-phosphate
  modified_base 17: mod_base = OTHER; note = 2'-O-methylcytidine-3'-phosphate
  modified_base 18: mod_base = OTHER; note = 2'-O-methyladenosine-3'-phosphate
  modified_base 19: mod_base = OTHER; note = 2'-O-methylguanosine-3'-phosphate
  modified_base 20: mod_base = OTHER; note = 2'-O-methylcytidine-3'-phosphate
  modified_base 21: mod_base = OTHER; note = 2'-O-methyluridine-3'-phosphate ((2S,4R)-1-[29-[[2-(acetylamino)-2-deoxy-beta-D-galactopyra nosyl]oxy]-14,14-bis[[3-[[3-[[5-[[2-(acetylamino)-2-deoxy-b eta-D-galactopyranosyl]oxy]-1-oxopentyl]amino]propyl]amino] -3-oxopropoxy]methyl]-1,12,19,25-tetraoxo-16-oxa-13,20,24-t riazanonacos-1-yl]-4-hydroxy-2-pyrrolidinyl)methyl ester
ctcccaaagtgctgaccagct

SEQ ID NO: 907 - RNA, 21 nt, synthetic construct
  source 1..21: mol_type = other RNA
  modified_base 1: mod_base = OTHER; note = 2'-O-methylcytidine-3'-phosphorothioate
  modified_base 2: mod_base = OTHER; note = 2'-O-methyladenosine-3'-phosphorothioate
  modified_base 3: mod_base = OTHER; note = 2'-O-methylcytidine-3'-phosphate
  modified_base 4: mod_base = OTHER; note = 2'-O-methyladenosine-3'-phosphate
  modified_base 5: mod_base = OTHER; note = 2'-O-methylguanosine-3'-phosphate
  modified_base 6: mod_base = OTHER; note = 2'-O-methylcytidine-3'-phosphate
  modified_base 7: mod_base = OTHER; note = 2'-deoxy-2'-fluorouridine-3'-phosphate
  modified_base 8: mod_base = OTHER; note = 2'-O-methyladenosine-3'-phosphate
  modified_base 9: mod_base = OTHER; note = 2'-deoxy-2'-fluorocytidine-3'-phosphate
  modified_base 10: mod_base = OTHER; note = 2'-deoxy-2'-fluorocytidine-3'-phosphate
  modified_base 11: mod_base = OTHER; note = 2'-deoxy-2'-fluoroadenosine-3'-phosphate
  modified_base 12: mod_base = OTHER; note = 2'-O-methylguanosine-3'-phosphate
  modified_base 13: mod_base = OTHER; note = 2'-O-methylcytidine-3'-phosphate
  modified_base 14: mod_base = OTHER; note = 2'-O-methylguanosine-3'-phosphate
  modified_base 15: mod_base = OTHER; note = 2'-O-methyluridine-3'-phosphate
  modified_base 16: mod_base = OTHER; note = 2'-O-methyluridine-3'-phosphate
  modified_base 17: mod_base = OTHER; note = 2'-O-methyladenosine-3'-phosphate
  modified_base 18: mod_base = OTHER; note = 2'-O-methylcytidine-3'-phosphate
  modified_base 19: mod_base = OTHER; note = 2'-O-methyladenosine-3'-phosphate
  modified_base 20: mod_base = OTHER; note = 2'-O-methylcytidine-3'-phosphate
  modified_base 21: mod_base = OTHER; note = 2'-O-methyluridine-3'-phosphate ((2S,4R)-1-[29-[[2-(acetylamino)-2-deoxy-beta-D-galactopyra nosyl]oxy]-14,14-bis[[3-[[3-[[5-[[2-(acetylamino)-2-deoxy-b eta-D-galactopyranosyl]oxy]-1-oxopentyl]amino]propyl]amino] -3-oxopropoxy]methyl]-1,12,19,25-tetraoxo-16-oxa-13,20,24-t riazanonacos-1-yl]-4-hydroxy-2-pyrrolidinyl)methyl ester
cacagctaccagcgttacact

SEQ ID NO: 908 - RNA, 21 nt, synthetic construct
  source 1..21: mol_type = other RNA
  modified_base 1: mod_base = OTHER; note = 2'-O-methylguanosine-3'-phosphorothioate
  modified_base 2: mod_base = OTHER; note = 2'-O-methylguanosine-3'-phosphorothioate
  modified_base 3: mod_base = OTHER; note = 2'-O-methylguanosine-3'-phosphate
  modified_base 4: mod_base = OTHER; note = 2'-O-methylcytidine-3'-phosphate
  modified_base 5: mod_base = OTHER; note = 2'-O-methylcytidine-3'-phosphate
  modified_base 6: mod_base = OTHER; note = 2'-O-methyladenosine-3'-phosphate
  modified_base 7: mod_base = OTHER; note = 2'-deoxy-2'-fluorocytidine-3'-phosphate
  modified_base 8: mod_base = OTHER; note = 2'-O-methylcytidine-3'-phosphate
  modified_base 9: mod_base = OTHER; note = 2'-deoxy-2'-fluoroadenosine-3'-phosphate
  modified_base 10: mod_base = OTHER; note = 2'-deoxy-2'-fluoroguanosine-3'-phosphate
  modified_base 11: mod_base = OTHER; note = 2'-deoxy-2'-fluorouridine-3'-phosphate
  modified_base 12: mod_base = OTHER; note = 2'-O-methyluridine-3'-phosphate
  modified_base 13: mod_base = OTHER; note = 2'-O-methylcytidine-3'-phosphate
  modified_base 14: mod_base = OTHER; note = 2'-O-methylcytidine-3'-phosphate
  modified_base 15: mod_base = OTHER; note = 2'-O-methyladenosine-3'-phosphate
  modified_base 16: mod_base = OTHER; note = 2'-O-methylcytidine-3'-phosphate
  modified_base 17: mod_base = OTHER; note = 2'-O-methylguanosine-3'-phosphate
  modified_base 18: mod_base = OTHER; note = 2'-O-methyluridine-3'-phosphate
  modified_base 19: mod_base = OTHER; note = 2'-O-methylcytidine-3'-phosphate
  modified_base 20: mod_base = OTHER; note = 2'-O-methylcytidine-3'-phosphate
  modified_base 21: mod_base = OTHER; note = 2'-O-methyluridine-3'-phosphate ((2S,4R)-1-[29-[[2-(acetylamino)-2-deoxy-beta-D-galactopyra nosyl]oxy]-14,14-bis[[3-[[3-[[5-[[2-(acetylamino)-2-deoxy-b eta-D-galactopyranosyl]oxy]-1-oxopentyl]amino]propyl]amino] -3-oxopropoxy]methyl]-1,12,19,25-tetraoxo-16-oxa-13,20,24-t riazanonacos-1-yl]-4-hydroxy-2-pyrrolidinyl)methyl ester
gggccaccagttccacgtcct

SEQ ID NO: 909 - RNA, 21 nt, synthetic construct
  source 1..21: mol_type = other RNA
  modified_base 1: mod_base = OTHER; note = 2'-O-methyluridine-3'-phosphorothioate
  modified_base 2: mod_base = OTHER; note = 2'-O-methylguanosine-3'-phosphorothioate
  modified_base 3: mod_base = OTHER; note = 2'-O-methyladenosine-3'-phosphate
  modified_base 4: mod_base = OTHER; note = 2'-O-methylcytidine-3'-phosphate
  modified_base 5: mod_base = OTHER; note = 2'-O-methylcytidine-3'-phosphate
  modified_base 6: mod_base = OTHER; note = 2'-O-methyladenosine-3'-phosphate
  modified_base 7: mod_base = OTHER; note = 2'-deoxy-2'-fluorocytidine-3'-phosphate
  modified_base 8: mod_base = OTHER; note = 2'-O-methyladenosine-3'-phosphate
  modified_base 9: mod_base = OTHER; note = 2'-deoxy-2'-fluoroadenosine-3'-phosphate
  modified_base 10: mod_base = OTHER; note = 2'-deoxy-2'-fluorocytidine-3'-phosphate
  modified_base 11: mod_base = OTHER; note = 2'-deoxy-2'-fluoroadenosine-3'-phosphate
  modified_base 12: mod_base = OTHER; note = 2'-O-methylguanosine-3'-phosphate
  modified_base 13: mod_base = OTHER; note = 2'-O-methylcytidine-3'-phosphate
  modified_base 14: mod_base = OTHER; note = 2'-O-methylcytidine-3'-phosphate
  modified_base 15: mod_base = OTHER; note = 2'-O-methyladenosine-3'-phosphate
  modified_base 16: mod_base = OTHER; note = 2'-O-methylcytidine-3'-phosphate
  modified_base 17: mod_base = OTHER; note = 2'-O-methyluridine-3'-phosphate
  modified_base 18: mod_base = OTHER; note = 2'-O-methyladenosine-3'-phosphate
  modified_base 19: mod_base = OTHER; note = 2'-O-methylcytidine-3'-phosphate
  modified_base 20: mod_base = OTHER; note = 2'-O-methylguanosine-3'-phosphate
  modified_base 21: mod_base = OTHER; note = 2'-O-methyluridine-3'-phosphate ((2S,4R)-1-[29-[[2-(acetylamino)-2-deoxy-beta-D-galactopyra nosyl]oxy]-14,14-bis[[3-[[3-[[5-[[2-(acetylamino)-2-deoxy-b eta-D-galactopyranosyl]oxy]-1-oxopentyl]amino]propyl]amino] -3-oxopropoxy]methyl]-1,12,19,25-tetraoxo-16-oxa-13,20,24-t riazanonacos-1-yl]-4-hydroxy-2-pyrrolidinyl)methyl ester
tgaccacaacagccactacgt

SEQ ID NO: 910 - RNA, 21 nt, synthetic construct
  source 1..21: mol_type = other RNA
  modified_base 1: mod_base = OTHER; note = 2'-O-methyluridine-3'-phosphorothioate
  modified_base 2: mod_base = OTHER; note = 2'-O-methylguanosine-3'-phosphorothioate
  modified_base 3: mod_base = OTHER; note = 2'-O-methyladenosine-3'-phosphate
  modified_base 4: mod_base = OTHER; note = 2'-O-methylguanosine-3'-phosphate
  modified_base 5: mod_base = OTHER; note = 2'-O-methylcytidine-3'-phosphate
  modified_base 6: mod_base = OTHER; note = 2'-O-methyladenosine-3'-phosphate
  modified_base 7: mod_base = OTHER; note = 2'-deoxy-2'-fluorocytidine-3'-phosphate
  modified_base 8: mod_base = OTHER; note = 2'-O-methylcytidine-3'-phosphate
  modified_base 9: mod_base = OTHER; note = 2'-deoxy-2'-fluoroadenosine-3'-phosphate
  modified_base 10: mod_base = OTHER; note = 2'-deoxy-2'-fluorocytidine-3'-phosphate
  modified_base 11: mod_base = OTHER; note = 2'-deoxy-2'-fluoroguanosine-3'-phosphate
  modified_base 12: mod_base = OTHER; note = 2'-O-methylguanosine-3'-phosphate
  modified_base 13: mod_base = OTHER; note = 2'-O-methylcytidine-3'-phosphate
  modified_base 14: mod_base = OTHER; note = 2'-O-methylcytidine-3'-phosphate
  modified_base 15: mod_base = OTHER; note = 2'-O-methyladenosine-3'-phosphate
  modified_base 16: mod_base = OTHER; note = 2'-O-methylcytidine-3'-phosphate
  modified_base 17: mod_base = OTHER; note = 2'-O-methylguanosine-3'-phosphate
  modified_base 18: mod_base = OTHER; note = 2'-O-methyladenosine-3'-phosphate
  modified_base 19: mod_base = OTHER; note = 2'-O-methylcytidine-3'-phosphate
  modified_base 20: mod_base = OTHER; note = 2'-O-methyladenosine-3'-phosphate
  modified_base 21: mod_base = OTHER; note = 2'-O-methyluridine-3'-phosphate ((2S,4R)-1-[29-[[2-(acetylamino)-2-deoxy-beta-D-galactopyra nosyl]oxy]-14,14-bis[[3-[[3-[[5-[[2-(acetylamino)-2-deoxy-b eta-D-galactopyranosyl]oxy]-1-oxopentyl]amino]propyl]amino] -3-oxopropoxy]methyl]-1,12,19,25-tetraoxo-16-oxa-13,20,24-t riazanonacos-1-yl]-4-hydroxy-2-pyrrolidinyl)methyl ester
tgagcaccacggccacgacat

SEQ ID NO: 911 - RNA, 21 nt, synthetic construct
  source 1..21: mol_type = other RNA
  modified_base 1: mod_base = OTHER; note = 2'-O-methylcytidine-3'-phosphorothioate
  modified_base 2: mod_base = OTHER; note = 2'-O-methylcytidine-3'-phosphorothioate
  modified_base 3: mod_base = OTHER; note = 2'-O-methyladenosine-3'-phosphate
  modified_base 4: mod_base = OTHER; note = 2'-O-methylguanosine-3'-phosphate
  modified_base 5: mod_base = OTHER; note = 2'-O-methyluridine-3'-phosphate
  modified_base 6: mod_base = OTHER; note = 2'-O-methylcytidine-3'-phosphate
  modified_base 7: mod_base = OTHER; note = 2'-deoxy-2'-fluorocytidine-3'-phosphate
  modified_base 8: mod_base = OTHER; note = 2'-O-methyladenosine-3'-phosphate
  modified_base 9: mod_base = OTHER; note = 2'-deoxy-2'-fluoroguanosine-3'-phosphate
  modified_base 10: mod_base = OTHER; note = 2'-deoxy-2'-fluoroguanosine-3'-phosphate
  modified_base 11: mod_base = OTHER; note = 2'-deoxy-2'-fluoroguanosine-3'-phosphate
  modified_base 12: mod_base = OTHER; note = 2'-O-methyladenosine-3'-phosphate
  modified_base 13: mod_base = OTHER; note = 2'-O-methylcytidine-3'-phosphate
  modified_base 14: mod_base = OTHER; note = 2'-O-methyluridine-3'-phosphate
  modified_base 15: mod_base = OTHER; note = 2'-O-methylguanosine-3'-phosphate
  modified_base 16: mod_base = OTHER; note = 2'-O-methylcytidine-3'-phosphate
  modified_base 17: mod_base = OTHER; note = 2'-O-methyladenosine-3'-phosphate
  modified_base 18: mod_base = OTHER; note = 2'-O-methyladenosine-3'-phosphate
  modified_base 19: mod_base = OTHER; note = 2'-O-methylcytidine-3'-phosphate
  modified_base 20: mod_base = OTHER; note = 2'-O-methyluridine-3'-phosphate
  modified_base 21: mod_base = OTHER; note = 2'-O-methyluridine-3'-phosphate ((2S,4R)-1-[29-[[2-(acetylamino)-2-deoxy-beta-D-galactopyra nosyl]oxy]-14,14-bis[[3-[[3-[[5-[[2-(acetylamino)-2-deoxy-b eta-D-galactopyranosyl]oxy]-1-oxopentyl]amino]propyl]amino] -3-oxopropoxy]methyl]-1,12,19,25-tetraoxo-16-oxa-13,20,24-t riazanonacos-1-yl]-4-hydroxy-2-pyrrolidinyl)methyl ester
ccagtccagggactgcaactt

SEQ ID NO: 912 - RNA, 21 nt, synthetic construct
  source 1..21: mol_type = other RNA
  modified_base 1: mod_base = OTHER; note = 2'-O-methylcytidine-3'-phosphorothioate
  modified_base 2: mod_base = OTHER; note = 2'-O-methyladenosine-3'-phosphorothioate
  modified_base 3: mod_base = OTHER; note = 2'-O-methylguanosine-3'-phosphate
  modified_base 4: mod_base = OTHER; note = 2'-O-methylcytidine-3'-phosphate
  modified_base 5: mod_base = OTHER; note = 2'-O-methyladenosine-3'-phosphate
  modified_base 6: mod_base = OTHER; note = 2'-O-methylcytidine-3'-phosphate
  modified_base 7: mod_base = OTHER; note = 2'-deoxy-2'-fluorouridine-3'-phosphate
  modified_base 8: mod_base = OTHER; note = 2'-O-methylguanosine-3'-phosphate
  modified_base 9: mod_base = OTHER; note = 2'-deoxy-2'-fluoroadenosine-3'-phosphate
  modified_base 10: mod_base = OTHER; note = 2'-deoxy-2'-fluoroguanosine-3'-phosphate
  modified_base 11: mod_base = OTHER; note = 2'-deoxy-2'-fluoroadenosine-3'-phosphate
  modified_base 12: mod_base = OTHER; note = 2'-O-methyladenosine-3'-phosphate
  modified_base 13: mod_base = OTHER; note = 2'-O-methylguanosine-3'-phosphate
  modified_base 14: mod_base = OTHER; note = 2'-O-methylcytidine-3'-phosphate
  modified_base 15: mod_base = OTHER; note = 2'-O-methyladenosine-3'-phosphate
  modified_base 16: mod_base = OTHER; note = 2'-O-methylcytidine-3'-phosphate
  modified_base 17: mod_base = OTHER; note = 2'-O-methyladenosine-3'-phosphate
  modified_base 18: mod_base = OTHER; note = 2'-O-methylguanosine-3'-phosphate
  modified_base 19: mod_base = OTHER; note = 2'-O-methylcytidine-3'-phosphate
  modified_base 20: mod_base = OTHER; note = 2'-O-methylcytidine-3'-phosphate
  modified_base 21: mod_base = OTHER; note = 2'-O-methyluridine-3'-phosphate ((2S,4R)-1-[29-[[2-(acetylamino)-2-deoxy-beta-D-galactopyra nosyl]oxy]-14,14-bis[[3-[[3-[[5-[[2-(acetylamino)-2-deoxy-b eta-D-galactopyranosyl]oxy]-1-oxopentyl]amino]propyl]amino] -3-oxopropoxy]methyl]-1,12,19,25-tetraoxo-16-oxa-13,20,24-t riazanonacos-1-yl]-4-hydroxy-2-pyrrolidinyl)methyl ester
cagcactgagaagcacagcct

SEQ ID NO: 913 - RNA, 21 nt, synthetic construct
  source 1..21: mol_type = other RNA
  modified_base 1: mod_base = OTHER; note = 2'-O-methylcytidine-3'-phosphorothioate
  modified_base 2: mod_base = OTHER; note = 2'-O-methyladenosine-3'-phosphorothioate
  modified_base 3: mod_base = OTHER; note = 2'-O-methylcytidine-3'-phosphate
  modified_base 4: mod_base = OTHER; note = 2'-O-methylcytidine-3'-phosphate
  modified_base 5: mod_base = OTHER; note = 2'-O-methyladenosine-3'-phosphate
  modified_base 6: mod_base = OTHER; note = 2'-O-methylcytidine-3'-phosphate
  modified_base 7: mod_base = OTHER; note = 2'-deoxy-2'-fluoroadenosine-3'-phosphate
  modified_base 8: mod_base = OTHER; note = 2'-O-methylcytidine-3'-phosphate
  modified_base 9: mod_base = OTHER; note = 2'-deoxy-2'-fluorocytidine-3'-phosphate
  modified_base 10: mod_base = OTHER; note = 2'-deoxy-2'-fluorocytidine-3'-phosphate
  modified_base 11: mod_base = OTHER; note = 2'-deoxy-2'-fluoroadenosine-3'-phosphate
  modified_base 12: mod_base = OTHER; note = 2'-O-methylcytidine-3'-phosphate
  modified_base 13: mod_base = OTHER; note = 2'-O-methyladenosine-3'-phosphate
  modified_base 14: mod_base = OTHER; note = 2'-O-methyladenosine-3'-phosphate
  modified_base 15: mod_base = OTHER; note = 2'-O-methylcytidine-3'-phosphate
  modified_base 16: mod_base = OTHER; note = 2'-O-methylcytidine-3'-phosphate
  modified_base 17: mod_base = OTHER; note = 2'-O-methyladenosine-3'-phosphate
  modified_base 18: mod_base = OTHER; note = 2'-O-methylguanosine-3'-phosphate
  modified_base 19: mod_base = OTHER; note = 2'-O-methyluridine-3'-phosphate
  modified_base 20: mod_base = OTHER; note = 2'-O-methylguanosine-3'-phosphate
  modified_base 21: mod_base = OTHER; note = 2'-O-methyluridine-3'-phosphate ((2S,4R)-1-[29-[[2-(acetylamino)-2-deoxy-beta-D-galactopyra nosyl]oxy]-14,14-bis[[3-[[3-[[5-[[2-(acetylamino)-2-deoxy-b eta-D-galactopyranosyl]oxy]-1-oxopentyl]amino]propyl]amino] -3-oxopropoxy]methyl]-1,12,19,25-tetraoxo-16-oxa-13,20,24-t riazanonacos-1-yl]-4-hydroxy-2-pyrrolidinyl)methyl ester
caccacacccacaaccagtgt

SEQ ID NO: 914 - RNA, 21 nt, synthetic construct
  source 1..21: mol_type = other RNA
  modified_base 1: mod_base = OTHER; note = 2'-O-methylcytidine-3'-phosphorothioate
  modified_base 2: mod_base = OTHER; note = 2'-O-methylguanosine-3'-phosphorothioate
  modified_base 3: mod_base = OTHER; note = 2'-O-methylcytidine-3'-phosphate
  modified_base 4: mod_base = OTHER; note = 2'-O-methylcytidine-3'-phosphate
  modified_base 5: mod_base = OTHER; note = 2'-O-methyladenosine-3'-phosphate
  modified_base 6: mod_base = OTHER; note = 2'-O-methylguanosine-3'-phosphate
  modified_base 7: mod_base = OTHER; note = 2'-deoxy-2'-fluoroadenosine-3'-phosphate
  modified_base 8: mod_base = OTHER; note = 2'-O-methylguanosine-3'-phosphate
  modified_base 9: mod_base = OTHER; note = 2'-deoxy-2'-fluorouridine-3'-phosphate
  modified_base 10: mod_base = OTHER; note = 2'-deoxy-2'-fluoroguanosine-3'-phosphate
  modified_base 11: mod_base = OTHER; note = 2'-deoxy-2'-fluorocytidine-3'-phosphate
  modified_base 12: mod_base = OTHER; note = 2'-O-methyluridine-3'-phosphate
  modified_base 13: mod_base = OTHER; note = 2'-O-methylguanosine-3'-phosphate
  modified_base 14: mod_base = OTHER; note = 2'-O-methyladenosine-3'-phosphate
  modified_base 15: mod_base = OTHER; note = 2'-O-methylcytidine-3'-phosphate
  modified_base 16: mod_base = OTHER; note = 2'-O-methylcytidine-3'-phosphate
  modified_base 17: mod_base = OTHER; note = 2'-O-methyladenosine-3'-phosphate
  modified_base 18: mod_base = OTHER; note = 2'-O-methylcytidine-3'-phosphate
  modified_base 19: mod_base = OTHER; note = 2'-O-methylcytidine-3'-phosphate
  modified_base 20: mod_base = OTHER; note = 2'-O-methyladenosine-3'-phosphate
  modified_base 21: mod_base = OTHER; note = 2'-O-methyluridine-3'-phosphate ((2S,4R)-1-[29-[[2-(acetylamino)-2-deoxy-beta-D-galactopyra nosyl]oxy]-14,14-bis[[3-[[3-[[5-[[2-(acetylamino)-2-deoxy-b eta-D-galactopyranosyl]oxy]-1-oxopentyl]amino]propyl]amino] -3-oxopropoxy]methyl]-1,12,19,25-tetraoxo-16-oxa-13,20,24-t riazanonacos-1-yl]-4-hydroxy-2-pyrrolidinyl)methyl ester
cgccagagtgctgaccaccat

SEQ ID NO: 915 - RNA, 21 nt, synthetic construct
  source 1..21: mol_type = other RNA
  modified_base 1: mod_base = OTHER; note = 2'-O-methylcytidine-3'-phosphorothioate
  modified_base 2: mod_base = OTHER; note = 2'-O-methyladenosine-3'-phosphorothioate
  modified_base 3: mod_base = OTHER; note = 2'-O-methylguanosine-3'-phosphate
  modified_base 4: mod_base = OTHER; note = 2'-O-methylguanosine-3'-phosphate
  modified_base 5: mod_base = OTHER; note = 2'-O-methylguanosine-3'-phosphate
  modified_base 6: mod_base = OTHER; note = 2'-O-methyladenosine-3'-phosphate
  modified_base 7: mod_base = OTHER; note = 2'-deoxy-2'-fluorocytidine-3'-phosphate
  modified_base 8: mod_base = OTHER; note = 2'-O-methyladenosine-3'-phosphate
  modified_base 9: mod_base = OTHER; note = 2'-deoxy-2'-fluoroadenosine-3'-phosphate
  modified_base 10: mod_base = OTHER; note = 2'-deoxy-2'-fluorocytidine-3'-phosphate
  modified_base 11: mod_base = OTHER; note = 2'-deoxy-2'-fluoroadenosine-3'-phosphate
  modified_base 12: mod_base = OTHER; note = 2'-O-methylcytidine-3'-phosphate
  modified_base 13: mod_base = OTHER; note = 2'-O-methylcytidine-3'-phosphate
  modified_base 14: mod_base = OTHER; note = 2'-O-methylcytidine-3'-phosphate
  modified_base 15: mod_base = OTHER; note = 2'-O-methyladenosine-3'-phosphate
  modified_base 16: mod_base = OTHER; note = 2'-O-methyluridine-3'-phosphate
  modified_base 17: mod_base = OTHER; note = 2'-O-methylcytidine-3'-phosphate
  modified_base 18: mod_base = OTHER; note = 2'-O-methyladenosine-3'-phosphate
  modified_base 19: mod_base = OTHER; note = 2'-O-methylcytidine-3'-phosphate
  modified_base 20: mod_base = OTHER; note = 2'-O-methylcytidine-3'-phosphate
  modified_base 21: mod_base = OTHER; note = 2'-O-methyluridine-3'-phosphate ((2S,4R)-1-[29-[[2-(acetylamino)-2-deoxy-beta-D-galactopyra nosyl]oxy]-14,14-bis[[3-[[3-[[5-[[2-(acetylamino)-2-deoxy-b eta-D-galactopyranosyl]oxy]-1-oxopentyl]amino]propyl]amino] -3-oxopropoxy]methyl]-1,12,19,25-tetraoxo-16-oxa-13,20,24-t riazanonacos-1-yl]-4-hydroxy-2-pyrrolidinyl)methyl ester
cagggacaacacccatcacct

SEQ ID NO: 916 - RNA, 21 nt, synthetic construct
  source 1..21: mol_type = other RNA
  modified_base 1: mod_base = OTHER; note = 2'-O-methylcytidine-3'-phosphorothioate
  modified_base 2: mod_base = OTHER; note = 2'-O-methyluridine-3'-phosphorothioate
  modified_base 3: mod_base = OTHER; note = 2'-O-methylcytidine-3'-phosphate
  modified_base 4: mod_base = OTHER; note = 2'-O-methylcytidine-3'-phosphate
  modified_base 5: mod_base = OTHER; note = 2'-O-methyladenosine-3'-phosphate
  modified_base 6: mod_base = OTHER; note = 2'-O-methyladenosine-3'-phosphate
  modified_base 7: mod_base = OTHER; note = 2'-deoxy-2'-fluoroadenosine-3'-phosphate
  modified_base 8: mod_base = OTHER; note = 2'-O-methylguanosine-3'-phosphate
  modified_base 9: mod_base = OTHER; note = 2'-deoxy-2'-fluorocytidine-3'-phosphate
  modified_base 10: mod_base = OTHER; note = 2'-deoxy-2'-fluorocytidine-3'-phosphate
  modified_base 11: mod_base = OTHER; note = 2'-deoxy-2'-fluoroadenosine-3'-phosphate
  modified_base 12: mod_base = OTHER; note = 2'-O-methylcytidine-3'-phosphate
  modified_base 13: mod_base = OTHER; note = 2'-O-methyluridine-3'-phosphate
  modified_base 14: mod_base = OTHER; note = 2'-O-methyluridine-3'-phosphate
  modified_base 15: mod_base = OTHER; note = 2'-O-methylcytidine-3'-phosphate
  modified_base 16: mod_base = OTHER; note = 2'-O-methylcytidine-3'-phosphate
  modified_base 17: mod_base = OTHER; note = 2'-O-methyluridine-3'-phosphate
  modified_base 18: mod_base = OTHER; note = 2'-O-methylcytidine-3'-phosphate
  modified_base 19: mod_base = OTHER; note = 2'-O-methylcytidine-3'-phosphate
  modified_base 20: mod_base = OTHER; note = 2'-O-methyluridine-3'-phosphate
  modified_base 21: mod_base = OTHER; note = 2'-O-methyluridine-3'-phosphate ((2S,4R)-1-[29-[[2-(acetylamino)-2-deoxy-beta-D-galactopyra nosyl]oxy]-14,14-bis[[3-[[3-[[5-[[2-(acetylamino)-2-deoxy-b eta-D-galactopyranosyl]oxy]-1-oxopentyl]amino]propyl]amino] -3-oxopropoxy]methyl]-1,12,19,25-tetraoxo-16-oxa-13,20,24-t riazanonacos-1-yl]-4-hydroxy-2-pyrrolidinyl)methyl ester
ctccaaagccacttcctcctt

SEQ ID NO: 917 - RNA, 21 nt, synthetic construct
  source 1..21: mol_type = other RNA
  modified_base 1: mod_base = OTHER; note = 2'-O-methyluridine-3'-phosphorothioate
  modified_base 2: mod_base = OTHER; note = 2'-O-methylguanosine-3'-phosphorothioate
  modified_base 3: mod_base = OTHER; note = 2'-O-methylcytidine-3'-phosphate
  modified_base 4: mod_base = OTHER; note = 2'-O-methyluridine-3'-phosphate
  modified_base 5: mod_base = OTHER; note = 2'-O-methylguanosine-3'-phosphate
  modified_base 6: mod_base = OTHER; note = 2'-O-methyladenosine-3'-phosphate
  modified_base 7: mod_base = OTHER; note = 2'-deoxy-2'-fluorocytidine-3'-phosphate
  modified_base 8: mod_base = OTHER; note = 2'-O-methyladenosine-3'-phosphate
  modified_base 9: mod_base = OTHER; note = 2'-deoxy-2'-fluoroadenosine-3'-phosphate
  modified_base 10: mod_base = OTHER; note = 2'-deoxy-2'-fluoroguanosine-3'-phosphate
  modified_base 11: mod_base = OTHER; note = 2'-deoxy-2'-fluorocytidine-3'-phosphate
  modified_base 12: mod_base = OTHER; note = 2'-O-methyladenosine-3'-phosphate
  modified_base 13: mod_base = OTHER; note = 2'-O-methylcytidine-3'-phosphate
  modified_base 14: mod_base = OTHER; note = 2'-O-methyladenosine-3'-phosphate
  modified_base 15: mod_base = OTHER; note = 2'-O-methylguanosine-3'-phosphate
  modified_base 16: mod_base = OTHER; note = 2'-O-methylcytidine-3'-phosphate
  modified_base 17: mod_base = OTHER; note = 2'-O-methylcytidine-3'-phosphate
  modified_base 18: mod_base = OTHER; note = 2'-O-methyladenosine-3'-phosphate
  modified_base 19: mod_base = OTHER; note = 2'-O-methylcytidine-3'-phosphate
  modified_base 20: mod_base = OTHER; note = 2'-O-methyladenosine-3'-phosphate
  modified_base 21: mod_base = OTHER; note = 2'-O-methyluridine-3'-phosphate ((2S,4R)-1-[29-[[2-(acetylamino)-2-deoxy-beta-D-galactopyra nosyl]oxy]-14,14-bis[[3-[[3-[[5-[[2-(acetylamino)-2-deoxy-b eta-D-galactopyranosyl]oxy]-1-oxopentyl]amino]propyl]amino] -3-oxopropoxy]methyl]-1,12,19,25-tetraoxo-16-oxa-13,20,24-t riazanonacos-1-yl]-4-hydroxy-2-pyrrolidinyl)methyl ester
tgctgacaagcacagccacat

SEQ ID NO: 918 - RNA, 21 nt, synthetic construct
  source 1..21: mol_type = other RNA
  modified_base 1: mod_base = OTHER; note = 2'-O-methylcytidine-3'-phosphorothioate
  modified_base 2: mod_base = OTHER; note = 2'-O-methyluridine-3'-phosphorothioate
  modified_base 3: mod_base = OTHER; note = 2'-O-methylcytidine-3'-phosphate
  modified_base 4: mod_base = OTHER; note = 2'-O-methylcytidine-3'-phosphate
  modified_base 5: mod_base = OTHER; note = 2'-O-methyladenosine-3'-phosphate
  modified_base 6: mod_base = OTHER; note = 2'-O-methylcytidine-3'-phosphate
  modified_base 7: mod_base = OTHER; note = 2'-deoxy-2'-fluorocytidine-3'-phosphate
  modified_base 8: mod_base = OTHER; note = 2'-O-methylcytidine-3'-phosphate
  modified_base 9: mod_base = OTHER; note = 2'-deoxy-2'-fluorouridine-3'-phosphate
  modified_base 10: mod_base = OTHER; note = 2'-deoxy-2'-fluoroguanosine-3'-phosphate
  modified_base 11: mod_base = OTHER; note = 2'-deoxy-2'-fluorouridine-3'-phosphate
  modified_base 12: mod_base = OTHER; note = 2'-O-methylguanosine-3'-phosphate
  modified_base 13: mod_base = OTHER; note = 2'-O-methylguanosine-3'-phosphate
  modified_base 14: mod_base = OTHER; note = 2'-O-methyladenosine-3'-phosphate
  modified_base 15: mod_base = OTHER; note = 2'-O-methylcytidine-3'-phosphate
  modified_base 16: mod_base = OTHER; note = 2'-O-methylcytidine-3'-phosphate
  modified_base 17: mod_base = OTHER; note = 2'-O-methyladenosine-3'-phosphate
  modified_base 18: mod_base = OTHER; note = 2'-O-methylcytidine-3'-phosphate
  modified_base 19: mod_base = OTHER; note = 2'-O-methylguanosine-3'-phosphate
  modified_base 20: mod_base = OTHER; note = 2'-O-methyluridine-3'-phosphate
  modified_base 21: mod_base = OTHER; note = 2'-O-methyluridine-3'-phosphate ((2S,4R)-1-[29-[[2-(acetylamino)-2-deoxy-beta-D-galactopyra nosyl]oxy]-14,14-bis[[3-[[3-[[5-[[2-(acetylamino)-2-deoxy-b eta-D-galactopyranosyl]oxy]-1-oxopentyl]amino]propyl]amino] -3-oxopropoxy]methyl]-1,12,19,25-tetraoxo-16-oxa-13,20,24-t riazanonacos-1-yl]-4-hydroxy-2-pyrrolidinyl)methyl ester
ctccaccctgtggaccacgtt

SEQ ID NO: 919 - RNA, 21 nt, synthetic construct
  source 1..21: mol_type = other RNA
  modified_base 1: mod_base = OTHER; note = 2'-O-methylcytidine-3'-phosphorothioate
  modified_base 2: mod_base = OTHER; note = 2'-O-methylcytidine-3'-phosphorothioate
  modified_base 3: mod_base = OTHER; note = 2'-O-methylcytidine-3'-phosphate
  modified_base 4: mod_base = OTHER; note = 2'-O-methyladenosine-3'-phosphate
  modified_base 5: mod_base = OTHER; note = 2'-O-methylguanosine-3'-phosphate
  modified_base 6: mod_base = OTHER; note = 2'-O-methylcytidine-3'-phosphate
  modified_base 7: mod_base = OTHER; note = 2'-deoxy-2'-fluoroadenosine-3'-phosphate
  modified_base 8: mod_base = OTHER; note = 2'-O-methylcytidine-3'-phosphate
  modified_base 9: mod_base = OTHER; note = 2'-deoxy-2'-fluoroadenosine-3'-phosphate
  modified_base 10: mod_base = OTHER; note = 2'-deoxy-2'-fluoroguanosine-3'-phosphate
  modified_base 11: mod_base = OTHER; note = 2'-deoxy-2'-fluoroadenosine-3'-phosphate
  modified_base 12: mod_base = OTHER; note = 2'-O-methylcytidine-3'-phosphate
  modified_base 13: mod_base = OTHER; note = 2'-O-methylcytidine-3'-phosphate
  modified_base 14: mod_base = OTHER; note = 2'-O-methyladenosine-3'-phosphate
  modified_base 15: mod_base = OTHER; note = 2'-O-methylcytidine-3'-phosphate
  modified_base 16: mod_base = OTHER; note = 2'-O-methylcytidine-3'-phosphate
  modified_base 17: mod_base = OTHER; note = 2'-O-methyladenosine-3'-phosphate
  modified_base 18: mod_base = OTHER; note = 2'-O-methylcytidine-3'-phosphate
  modified_base 19: mod_base = OTHER; note = 2'-O-methyladenosine-3'-phosphate
  modified_base 20: mod_base = OTHER; note = 2'-O-methylcytidine-3'-phosphate
  modified_base 21: mod_base = OTHER; note = 2'-O-methyluridine-3'-phosphate ((2S,4R)-1-[29-[[2-(acetylamino)-2-deoxy-beta-D-galactopyra nosyl]oxy]-14,14-bis[[3-[[3-[[5-[[2-(acetylamino)-2-deoxy-b eta-D-galactopyranosyl]oxy]-1-oxopentyl]amino]propyl]amino] -3-oxopropoxy]methyl]-1,12,19,25-tetraoxo-16-oxa-13,20,24-t riazanonacos-1-yl]-4-hydroxy-2-pyrrolidinyl)methyl ester
cccagcacagaccaccacact

SEQ ID NO: 920 - RNA, 21 nt, synthetic construct
  source 1..21: mol_type = other RNA
  modified_base 1: mod_base = OTHER; note = 2'-O-methylguanosine-3'-phosphorothioate
  modified_base 2: mod_base = OTHER; note = 2'-O-methyluridine-3'-phosphorothioate
  modified_base 3: mod_base = OTHER; note = 2'-O-methylcytidine-3'-phosphate
  modified_base 4: mod_base = OTHER; note = 2'-O-methylcytidine-3'-phosphate
  modified_base 5: mod_base = OTHER; note = 2'-O-methyladenosine-3'-phosphate
  modified_base 6: mod_base = OTHER; note = 2'-O-methylcytidine-3'-phosphate
  modified_base 7: mod_base = OTHER; note = 2'-deoxy-2'-fluorocytidine-3'-phosphate
  modified_base 8: mod_base = OTHER; note = 2'-O-methyladenosine-3'-phosphate
  modified_base 9: mod_base = OTHER; note = 2'-deoxy-2'-fluorouridine-3'-phosphate
  modified_base 10: mod_base = OTHER; note = 2'-deoxy-2'-fluoroguanosine-3'-phosphate
  modified_base 11: mod_base = OTHER; note = 2'-deoxy-2'-fluorouridine-3'-phosphate
  modified_base 12: mod_base = OTHER; note = 2'-O-methylcytidine-3'-phosphate
  modified_base 13: mod_base = OTHER; note = 2'-O-methylcytidine-3'-phosphate
  modified_base 14: mod_base = OTHER; note = 2'-O-methyladenosine-3'-phosphate
  modified_base 15: mod_base = OTHER; note = 2'-O-methylcytidine-3'-phosphate
  modified_base 16: mod_base = OTHER; note = 2'-O-methyladenosine-3'-phosphate
  modified_base 17: mod_base = OTHER; note = 2'-O-methyladenosine-3'-phosphate
  modified_base 18: mod_base = OTHER; note = 2'-O-methyluridine-3'-phosphate
  modified_base 19: mod_base = OTHER; note = 2'-O-methylcytidine-3'-phosphate
  modified_base 20: mod_base = OTHER; note = 2'-O-methylcytidine-3'-phosphate
  modified_base 21: mod_base = OTHER; note = 2'-O-methyluridine-3'-phosphate ((2S,4R)-1-[29-[[2-(acetylamino)-2-deoxy-beta-D-galactopyra nosyl]oxy]-14,14-bis[[3-[[3-[[5-[[2-(acetylamino)-2-deoxy-b eta-D-galactopyranosyl]oxy]-1-oxopentyl]amino]propyl]amino] -3-oxopropoxy]methyl]-1,12,19,25-tetraoxo-16-oxa-13,20,24-t riazanonacos-1-yl]-4-hydroxy-2-pyrrolidinyl)methyl ester
gtccaccatgtccacaatcct

SEQ ID NO: 921 - RNA, 21 nt, synthetic construct
  source 1..21: mol_type = other RNA
  modified_base 1: mod_base = OTHER; note = 2'-O-methylcytidine-3'-phosphorothioate
  modified_base 2: mod_base = OTHER; note = 2'-O-methylcytidine-3'-phosphorothioate
  modified_base 3: mod_base = OTHER; note = 2'-O-methyluridine-3'-phosphate
  modified_base 4: mod_base = OTHER; note = 2'-O-methylcytidine-3'-phosphate
  modified_base 5: mod_base = OTHER; note = 2'-O-methylcytidine-3'-phosphate
  modified_base 6: mod_base = OTHER; note = 2'-O-methyluridine-3'-phosphate
  modified_base 7: mod_base = OTHER; note = 2'-deoxy-2'-fluorocytidine-3'-phosphate
  modified_base 8: mod_base = OTHER; note = 2'-O-methyluridine-3'-phosphate
  modified_base 9: mod_base = OTHER; note = 2'-deoxy-2'-fluoroadenosine-3'-phosphate
  modified_base 10: mod_base = OTHER; note = 2'-deoxy-2'-fluorocytidine-3'-phosphate
  modified_base 11: mod_base = OTHER; note = 2'-deoxy-2'-fluorouridine-3'-phosphate
  modified_base 12: mod_base = OTHER; note = 2'-O-methylcytidine-3'-phosphate
  modified_base 13: mod_base = OTHER; note = 2'-O-methylcytidine-3'-phosphate
  modified_base 14: mod_base = OTHER; note = 2'-O-methyladenosine-3'-phosphate
  modified_base 15: mod_base = OTHER; note = 2'-O-methylguanosine-3'-phosphate
  modified_base 16: mod_base = OTHER; note = 2'-O-methyladenosine-3'-phosphate
  modified_base 17: mod_base = OTHER; note = 2'-O-methylguanosine-3'-phosphate
  modified_base 18: mod_base = OTHER; note = 2'-O-methyladenosine-3'-phosphate
  modified_base 19: mod_base = OTHER; note = 2'-O-methylcytidine-3'-phosphate
  modified_base 20: mod_base = OTHER; note = 2'-O-methylcytidine-3'-phosphate
  modified_base 21: mod_base = OTHER; note = 2'-O-methyluridine-3'-phosphate ((2S,4R)-1-[29-[[2-(acetylamino)-2-deoxy-beta-D-galactopyra nosyl]oxy]-14,14-bis[[3-[[3-[[5-[[2-(acetylamino)-2-deoxy-b eta-D-galactopyranosyl]oxy]-1-oxopentyl]amino]propyl]amino] -3-oxopropoxy]methyl]-1,12,19,25-tetraoxo-16-oxa-13,20,24-t riazanonacos-1-yl]-4-hydroxy-2-pyrrolidinyl)methyl ester
cctcctctactccagagacct

SEQ ID NO: 922 - RNA, 21 nt, synthetic construct
  source 1..21: mol_type = other RNA
  modified_base 1: mod_base = OTHER; note = 2'-O-methylcytidine-3'-phosphorothioate
  modified_base 2: mod_base = OTHER; note = 2'-O-methyladenosine-3'-phosphorothioate
  modified_base 3: mod_base = OTHER; note = 2'-O-methylcytidine-3'-phosphate
  modified_base 4: mod_base = OTHER; note = 2'-O-methyladenosine-3'-phosphate
  modified_base 5: mod_base = OTHER; note = 2'-O-methylcytidine-3'-phosphate
  modified_base 6: mod_base = OTHER; note = 2'-O-methylcytidine-3'-phosphate
  modified_base 7: mod_base = OTHER; note = 2'-deoxy-2'-fluorouridine-3'-phosphate
  modified_base 8: mod_base = OTHER; note = 2'-O-methylcytidine-3'-phosphate
  modified_base 9: mod_base = OTHER; note = 2'-deoxy-2'-fluorocytidine-3'-phosphate
  modified_base 10: mod_base = OTHER; note = 2'-deoxy-2'-fluoroadenosine-3'-phosphate
  modified_base 11: mod_base = OTHER; note = 2'-deoxy-2'-fluorocytidine-3'-phosphate
  modified_base 12: mod_base = OTHER; note = 2'-O-methyladenosine-3'-phosphate
  modified_base 13: mod_base = OTHER; note = 2'-O-methylguanosine-3'-phosphate
  modified_base 14: mod_base = OTHER; note = 2'-O-methyluridine-3'-phosphate
  modified_base 15: mod_base = OTHER; note = 2'-O-methylguanosine-3'-phosphate
  modified_base 16: mod_base = OTHER; note = 2'-O-methylcytidine-3'-phosphate
  modified_base 17: mod_base = OTHER; note = 2'-O-methyluridine-3'-phosphate
  modified_base 18: mod_base = OTHER; note = 2'-O-methylguanosine-3'-phosphate
  modified_base 19: mod_base = OTHER; note = 2'-O-methyladenosine-3'-phosphate
  modified_base 20: mod_base = OTHER; note = 2'-O-methylcytidine-3'-phosphate
  modified_base 21: mod_base = OTHER; note = 2'-O-methyluridine-3'-phosphate ((2S,4R)-1-[29-[[2-(acetylamino)-2-deoxy-beta-D-galactopyra nosyl]oxy]-14,14-bis[[3-[[3-[[5-[[2-(acetylamino)-2-deoxy-b eta-D-galactopyranosyl]oxy]-1-oxopentyl]amino]propyl]amino] -3-oxopropoxy]methyl]-1,12,19,25-tetraoxo-16-oxa-13,20,24-t riazanonacos-1-yl]-4-hydroxy-2-pyrrolidinyl)methyl ester
cacacctccacagtgctgact

SEQ ID NO: 923 - RNA, 21 nt, synthetic construct
  source 1..21: mol_type = other RNA
  modified_base 1: mod_base = OTHER; note = 2'-O-methylcytidine-3'-phosphorothioate
  modified_base 2: mod_base = OTHER; note = 2'-O-methyladenosine-3'-phosphorothioate
  modified_base 3: mod_base = OTHER; note = 2'-O-methylcytidine-3'-phosphate
  modified_base 4: mod_base = OTHER; note = 2'-O-methyladenosine-3'-phosphate
  modified_base 5: mod_base = OTHER; note = 2'-O-methylguanosine-3'-phosphate
  modified_base 6: mod_base = OTHER; note = 2'-O-methylcytidine-3'-phosphate
  modified_base 7: mod_base = OTHER; note = 2'-deoxy-2'-fluorocytidine-3'-phosphate
  modified_base 8: mod_base = OTHER; note = 2'-O-methyladenosine-3'-phosphate
  modified_base 9: mod_base = OTHER; note = 2'-deoxy-2'-fluorocytidine-3'-phosphate
  modified_base 10: mod_base = OTHER; note = 2'-deoxy-2'-fluorocytidine-3'-phosphate
  modified_base 11: mod_base = OTHER; note = 2'-deoxy-2'-fluoroadenosine-3'-phosphate
  modified_base 12: mod_base = OTHER; note = 2'-O-methyluridine-3'-phosphate
  modified_base 13: mod_base = OTHER; note = 2'-O-methylguanosine-3'-phosphate
  modified_base 14: mod_base = OTHER; note = 2'-O-methyladenosine-3'-phosphate
  modified_base 15: mod_base = OTHER; note = 2'-O-methylcytidine-3'-phosphate
  modified_base 16: mod_base = OTHER; note = 2'-O-methyladenosine-3'-phosphate
  modified_base 17: mod_base = OTHER; note = 2'-O-methyladenosine-3'-phosphate
  modified_base 18: mod_base = OTHER; note = 2'-O-methylguanosine-3'-phosphate
  modified_base 19: mod_base = OTHER; note = 2'-O-methylguanosine-3'-phosphate
  modified_base 20: mod_base = OTHER; note = 2'-O-methylguanosine-3'-phosphate
  modified_base 21: mod_base = OTHER; note = 2'-O-methyluridine-3'-phosphate ((2S,4R)-1-[29-[[2-(acetylamino)-2-deoxy-beta-D-galactopyra nosyl]oxy]-14,14-bis[[3-[[3-[[5-[[2-(acetylamino)-2-deoxy-b eta-D-galactopyranosyl]oxy]-1-oxopentyl]amino]propyl]amino] -3-oxopropoxy]methyl]-1,12,19,25-tetraoxo-16-oxa-13,20,24-t riazanonacos-1-yl]-4-hydroxy-2-pyrrolidinyl)methyl ester
cacagccaccatgacaagggt

SEQ ID NO: 924 - RNA, 21 nt, synthetic construct
  source 1..21: mol_type = other RNA
  modified_base 1: mod_base = OTHER; note = 2'-O-methyluridine-3'-phosphorothioate
  modified_base 2: mod_base = OTHER; note = 2'-O-methylcytidine-3'-phosphorothioate
  modified_base 3: mod_base = OTHER; note = 2'-O-methylcytidine-3'-phosphate
  modified_base 4: mod_base = OTHER; note = 2'-O-methyladenosine-3'-phosphate
  modified_base 5: mod_base = OTHER; note = 2'-O-methylcytidine-3'-phosphate
  modified_base 6: mod_base = OTHER; note = 2'-O-methylguanosine-3'-phosphate
  modified_base 7: mod_base = OTHER; note = 2'-deoxy-2'-fluoroguanosine-3'-phosphate
  modified_base 8: mod_base = OTHER; note = 2'-O-methylcytidine-3'-phosphate
  modified_base 9: mod_base = OTHER; note = 2'-deoxy-2'-fluorocytidine-3'-phosphate
  modified_base 10: mod_base = OTHER; note = 2'-deoxy-2'-fluoroadenosine-3'-phosphate
  modified_base 11: mod_base = OTHER; note = 2'-deoxy-2'-fluorocytidine-3'-phosphate
  modified_base 12: mod_base = OTHER; note = 2'-O-methyladenosine-3'-phosphate
  modified_base 13: mod_base = OTHER; note = 2'-O-methylcytidine-3'-phosphate
  modified_base 14: mod_base = OTHER; note = 2'-O-methylcytidine-3'-phosphate
  modified_base 15: mod_base = OTHER; note = 2'-O-methylcytidine-3'-phosphate
  modified_base 16: mod_base = OTHER; note = 2'-O-methyluridine-3'-phosphate
  modified_base 17: mod_base = OTHER; note = 2'-O-methylcytidine-3'-phosphate
  modified_base 18: mod_base = OTHER; note = 2'-O-methylcytidine-3'-phosphate
  modified_base 19: mod_base = OTHER; note = 2'-O-methyluridine-3'-phosphate
  modified_base 20: mod_base = OTHER; note = 2'-O-methylcytidine-3'-phosphate
  modified_base 21: mod_base = OTHER; note = 2'-O-methyluridine-3'-phosphate ((2S,4R)-1-[29-[[2-(acetylamino)-2-deoxy-beta-D-galactopyra nosyl]oxy]-14,14-bis[[3-[[3-[[5-[[2-(acetylamino)-2-deoxy-b eta-D-galactopyranosyl]oxy]-1-oxopentyl]amino]propyl]amino] -3-oxopropoxy]methyl]-1,12,19,25-tetraoxo-16-oxa-13,20,24-t riazanonacos-1-yl]-4-hydroxy-2-pyrrolidinyl)methyl ester
tccacggccacaccctcctct

SEQ ID NO: 925 - RNA, 21 nt, synthetic construct
  source 1..21: mol_type = other RNA
  modified_base 1: mod_base = OTHER; note = 2'-O-methylguanosine-3'-phosphorothioate
  modified_base 2: mod_base = OTHER; note = 2'-O-methyladenosine-3'-phosphorothioate
  modified_base 3: mod_base = OTHER; note = 2'-O-methylcytidine-3'-phosphate
  modified_base 4: mod_base = OTHER; note = 2'-O-methylcytidine-3'-phosphate
  modified_base 5: mod_base = OTHER; note = 2'-O-methylcytidine-3'-phosphate
  modified_base 6: mod_base = OTHER; note = 2'-O-methylguanosine-3'-phosphate
  modified_base 7: mod_base = OTHER; note = 2'-deoxy-2'-fluoroguanosine-3'-phosphate
  modified_base 8: mod_base = OTHER; note = 2'-O-methyladenosine-3'-phosphate
  modified_base 9: mod_base = OTHER; note = 2'-deoxy-2'-fluorouridine-3'-phosphate
  modified_base 10: mod_base = OTHER; note = 2'-deoxy-2'-fluorocytidine-3'-phosphate
  modified_base 11: mod_base = OTHER; note = 2'-deoxy-2'-fluorocytidine-3'-phosphate
  modified_base 12: mod_base = OTHER; note = 2'-O-methyluridine-3'-phosphate
  modified_base 13: mod_base = OTHER; note = 2'-O-methylcytidine-3'-phosphate
  modified_base 14: mod_base = OTHER; note = 2'-O-methyladenosine-3'-phosphate
  modified_base 15: mod_base = OTHER; note = 2'-O-methylcytidine-3'-phosphate
  modified_base 16: mod_base = OTHER; note = 2'-O-methyluridine-3'-phosphate
  modified_base 17: mod_base = OTHER; note = 2'-O-methylguanosine-3'-phosphate
  modified_base 18: mod_base = OTHER; note = 2'-O-methyladenosine-3'-phosphate
  modified_base 19: mod_base = OTHER; note = 2'-O-methylguanosine-3'-phosphate
  modified_base 20: mod_base = OTHER; note = 2'-O-methylcytidine-3'-phosphate
  modified_base 21: mod_base = OTHER; note = 2'-O-methyluridine-3'-phosphate ((2S,4R)-1-[29-[[2-(acetylamino)-2-deoxy-beta-D-galactopyra nosyl]oxy]-14,14-bis[[3-[[3-[[5-[[2-(acetylamino)-2-deoxy-b eta-D-galactopyranosyl]oxy]-1-oxopentyl]amino]propyl]amino] -3-oxopropoxy]methyl]-1,12,19,25-tetraoxo-16-oxa-13,20,24-t riazanonacos-1-yl]-4-hydroxy-2-pyrrolidinyl)methyl ester
gacccggatcctcactgagct

SEQ ID NO: 926 - RNA, 21 nt, synthetic construct
  source 1..21: mol_type = other RNA
  modified_base 1: mod_base = OTHER; note = 2'-O-methylcytidine-3'-phosphorothioate
  modified_base 2: mod_base = OTHER; note = 2'-O-methylcytidine-3'-phosphorothioate
  modified_base 3: mod_base = OTHER; note = 2'-O-methyladenosine-3'-phosphate
  modified_base 4: mod_base = OTHER; note = 2'-O-methylcytidine-3'-phosphate
  modified_base 5: mod_base = OTHER; note = 2'-O-methyladenosine-3'-phosphate
  modified_base 6: mod_base = OTHER; note = 2'-O-methyladenosine-3'-phosphate
  modified_base 7: mod_base = OTHER; note = 2'-deoxy-2'-fluorocytidine-3'-phosphate
  modified_base 8: mod_base = OTHER; note = 2'-O-methyladenosine-3'-phosphate
  modified_base 9: mod_base = OTHER; note = 2'-deoxy-2'-fluoroguanosine-3'-phosphate
  modified_base 10: mod_base = OTHER; note = 2'-deoxy-2'-fluorocytidine-3'-phosphate
  modified_base 11: mod_base = OTHER; note = 2'-deoxy-2'-fluorocytidine-3'-phosphate
  modified_base 12: mod_base = OTHER; note = 2'-O-methyladenosine-3'-phosphate
  modified_base 13: mod_base = OTHER; note = 2'-O-methylcytidine-3'-phosphate
  modified_base 14: mod_base = OTHER; note = 2'-O-methyluridine-3'-phosphate
  modified_base 15: mod_base = OTHER; note = 2'-O-methyladenosine-3'-phosphate
  modified_base 16: mod_base = OTHER; note = 2'-O-methylcytidine-3'-phosphate
  modified_base 17: mod_base = OTHER; note = 2'-O-methyladenosine-3'-phosphate
  modified_base 18: mod_base = OTHER; note = 2'-O-methyladenosine-3'-phosphate
  modified_base 19: mod_base = OTHER; note = 2'-O-methylcytidine-3'-phosphate
  modified_base 20: mod_base = OTHER; note = 2'-O-methyluridine-3'-phosphate
  modified_base 21: mod_base = OTHER; note = 2'-O-methyluridine-3'-phosphate ((2S,4R)-1-[29-[[2-(acetylamino)-2-deoxy-beta-D-galactopyra nosyl]oxy]-14,14-bis[[3-[[3-[[5-[[2-(acetylamino)-2-deoxy-b eta-D-galactopyranosyl]oxy]-1-oxopentyl]amino]propyl]amino] -3-oxopropoxy]methyl]-1,12,19,25-tetraoxo-16-oxa-13,20,24-t riazanonacos-1-yl]-4-hydroxy-2-pyrrolidinyl)methyl ester
ccacaacagccactacaactt

SEQ ID NO: 927 - RNA, 21 nt, synthetic construct
  source 1..21: mol_type = other RNA
  modified_base 1: mod_base = OTHER; note = 2'-O-methyluridine-3'-phosphorothioate
  modified_base 2: mod_base = OTHER; note = 2'-O-methylguanosine-3'-phosphorothioate
  modified_base 3: mod_base = OTHER; note = 2'-O-methylguanosine-3'-phosphate
  modified_base 4: mod_base = OTHER; note = 2'-O-methyladenosine-3'-phosphate
  modified_base 5: mod_base = OTHER; note = 2'-O-methyluridine-3'-phosphate
  modified_base 6: mod_base = OTHER; note = 2'-O-methylcytidine-3'-phosphate
  modified_base 7: mod_base = OTHER; note = 2'-deoxy-2'-fluorocytidine-3'-phosphate
  modified_base 8: mod_base = OTHER; note = 2'-O-methyladenosine-3'-phosphate
  modified_base 9: mod_base = OTHER; note = 2'-deoxy-2'-fluorocytidine-3'-phosphate
  modified_base 10: mod_base = OTHER; note = 2'-deoxy-2'-fluoroguanosine-3'-phosphate
  modified_base 11: mod_base = OTHER; note = 2'-deoxy-2'-fluoroguanosine-3'-phosphate
  modified_base 12: mod_base = OTHER; note = 2'-O-methylcytidine-3'-phosphate
  modified_base 13: mod_base = OTHER; note = 2'-O-methylcytidine-3'-phosphate
  modified_base 14: mod_base = OTHER; note = 2'-O-methyladenosine-3'-phosphate
  modified_base 15: mod_base = OTHER; note = 2'-O-methylcytidine-3'-phosphate
  modified_base 16: mod_base = OTHER; note = 2'-O-methylcytidine-3'-phosphate
  modified_base 17: mod_base = OTHER; note = 2'-O-methylcytidine-3'-phosphate
  modified_base 18: mod_base = OTHER; note = 2'-O-methyluridine-3'-phosphate
  modified_base 19: mod_base = OTHER; note = 2'-O-methylguanosine-3'-phosphate
  modified_base 20: mod_base = OTHER; note = 2'-O-methyluridine-3'-phosphate
  modified_base 21: mod_base = OTHER; note = 2'-O-methyluridine-3'-phosphate ((2S,4R)-1-[29-[[2-(acetylamino)-2-deoxy-beta-D-galactopyra nosyl]oxy]-14,14-bis[[3-[[3-[[5-[[2-(acetylamino)-2-deoxy-b eta-D-galactopyranosyl]oxy]-1-oxopentyl]amino]propyl]amino] -3-oxopropoxy]methyl]-1,12,19,25-tetraoxo-16-oxa-13,20,24-t riazanonacos-1-yl]-4-hydroxy-2-pyrrolidinyl)methyl ester
tggatccacggccaccctgtt

SEQ ID NO: 928 - RNA, 21 nt, synthetic construct
  source 1..21: mol_type = other RNA
  modified_base 1: mod_base = OTHER; note = 2'-O-methylcytidine-3'-phosphorothioate
  modified_base 2: mod_base = OTHER; note = 2'-O-methyladenosine-3'-phosphorothioate
  modified_base 3: mod_base = OTHER; note = 2'-O-methylcytidine-3'-phosphate
  modified_base 4: mod_base = OTHER; note = 2'-O-methylcytidine-3'-phosphate
  modified_base 5: mod_base = OTHER; note = 2'-O-methyluridine-3'-phosphate
  modified_base 6: mod_base = OTHER; note = 2'-O-methylguanosine-3'-phosphate
  modified_base 7: mod_base = OTHER; note = 2'-deoxy-2'-fluoroguanosine-3'-phosphate
  modified_base 8: mod_base = OTHER; note = 2'-O-methyladenosine-3'-phosphate
  modified_base 9: mod_base = OTHER; note = 2'-deoxy-2'-fluorouridine-3'-phosphate
  modified_base 10: mod_base = OTHER; note = 2'-deoxy-2'-fluorocytidine-3'-phosphate
  modified_base 11: mod_base = OTHER; note = 2'-deoxy-2'-fluorocytidine-3'-phosphate
  modified_base 12: mod_base = OTHER; note = 2'-O-methyluridine-3'-phosphate
  modified_base 13: mod_base = OTHER; note = 2'-O-methylcytidine-3'-phosphate
  modified_base 14: mod_base = OTHER; note = 2'-O-methyladenosine-3'-phosphate
  modified_base 15: mod_base = OTHER; note = 2'-O-methylcytidine-3'-phosphate
  modified_base 16: mod_base = OTHER; note = 2'-O-methyladenosine-3'-phosphate
  modified_base 17: mod_base = OTHER; note = 2'-O-methylguanosine-3'-phosphate
  modified_base 18: mod_base = OTHER; note = 2'-O-methyladenosine-3'-phosphate
  modified_base 19: mod_base = OTHER; note = 2'-O-methylguanosine-3'-phosphate
  modified_base 20: mod_base = OTHER; note = 2'-O-methylcytidine-3'-phosphate
  modified_base 21: mod_base = OTHER; note = 2'-O-methyluridine-3'-phosphate ((2S,4R)-1-[29-[[2-(acetylamino)-2-deoxy-beta-D-galactopyra nosyl]oxy]-14,14-bis[[3-[[3-[[5-[[2-(acetylamino)-2-deoxy-b eta-D-galactopyranosyl]oxy]-1-oxopentyl]amino]propyl]amino] -3-oxopropoxy]methyl]-1,12,19,25-tetraoxo-16-oxa-13,20,24-t riazanonacos-1-yl]-4-hydroxy-2-pyrrolidinyl)methyl ester
cacctggatcctcacagagct

SEQ ID NO: 929 - RNA, 21 nt, synthetic construct
  source 1..21: mol_type = other RNA
  modified_base 1: mod_base = OTHER; note = 2'-O-methyluridine-3'-phosphorothioate
  modified_base 2: mod_base = OTHER; note = 2'-O-methyladenosine-3'-phosphorothioate
  modified_base 3: mod_base = OTHER; note = 2'-O-methyluridine-3'-phosphate
  modified_base 4: mod_base = OTHER; note = 2'-O-methyladenosine-3'-phosphate
  modified_base 5: mod_base = OTHER; note = 2'-O-methylguanosine-3'-phosphate
  modified_base 6: mod_base = OTHER; note = 2'-O-methylcytidine-3'-phosphate
  modified_base 7: mod_base = OTHER; note = 2'-deoxy-2'-fluorocytidine-3'-phosphate
  modified_base 8: mod_base = OTHER; note = 2'-O-methyladenosine-3'-phosphate
  modified_base 9: mod_base = OTHER; note = 2'-deoxy-2'-fluorocytidine-3'-phosphate
  modified_base 10: mod_base = OTHER; note = 2'-deoxy-2'-fluorocytidine-3'-phosphate
  modified_base 11: mod_base = OTHER; note = 2'-deoxy-2'-fluoroguanosine-3'-phosphate
  modified_base 12: mod_base = OTHER; note = 2'-O-methyluridine-3'-phosphate
  modified_base 13: mod_base = OTHER; note = 2'-O-methylguanosine-3'-phosphate
  modified_base 14: mod_base = OTHER; note = 2'-O-methyladenosine-3'-phosphate
  modified_base 15: mod_base = OTHER; note = 2'-O-methyluridine-3'-phosphate
  modified_base 16: mod_base = OTHER; note = 2'-O-methylguanosine-3'-phosphate
  modified_base 17: mod_base = OTHER; note = 2'-O-methylguanosine-3'-phosphate
  modified_base 18: mod_base = OTHER; note = 2'-O-methyluridine-3'-phosphate
  modified_base 19: mod_base = OTHER; note = 2'-O-methylguanosine-3'-phosphate
  modified_base 20: mod_base = OTHER; note = 2'-O-methylcytidine-3'-phosphate
  modified_base 21: mod_base = OTHER; note = 2'-O-methyluridine-3'-phosphate ((2S,4R)-1-[29-[[2-(acetylamino)-2-deoxy-beta-D-galactopyra nosyl]oxy]-14,14-bis[[3-[[3-[[5-[[2-(acetylamino)-2-deoxy-b eta-D-galactopyranosyl]oxy]-1-oxopentyl]amino]propyl]amino] -3-oxopropoxy]methyl]-1,12,19,25-tetraoxo-16-oxa-13,20,24-t riazanonacos-1-yl]-4-hydroxy-2-pyrrolidinyl)methyl ester
tatagccaccgtgatggtgct

SEQ ID NO: 930 - RNA, 21 nt, synthetic construct
  source 1..21: mol_type = other RNA
  modified_base 1: mod_base = OTHER; note = 2'-O-methylcytidine-3'-phosphorothioate
  modified_base 2: mod_base = OTHER; note = 2'-O-methylcytidine-3'-phosphorothioate
  modified_base 3: mod_base = OTHER; note = 2'-O-methyladenosine-3'-phosphate
  modified_base 4: mod_base = OTHER; note = 2'-O-methylcytidine-3'-phosphate
  modified_base 5: mod_base = OTHER; note = 2'-O-methyluridine-3'-phosphate
  modified_base 6: mod_base = OTHER; note = 2'-O-methylcytidine-3'-phosphate
  modified_base 7: mod_base = OTHER; note = 2'-deoxy-2'-fluorouridine-3'-phosphate
  modified_base 8: mod_base = OTHER; note = 2'-O-methylguanosine-3'-phosphate
  modified_base 9: mod_base = OTHER; note = 2'-deoxy-2'-fluoroguanosine-3'-phosphate
  modified_base 10: mod_base = OTHER; note = 2'-deoxy-2'-fluoroguanosine-3'-phosphate
  modified_base 11: mod_base = OTHER; note = 2'-deoxy-2'-fluoroadenosine-3'-phosphate
  modified_base 12: mod_base = OTHER; note = 2'-O-methyladenosine-3'-phosphate
  modified_base 13: mod_base = OTHER; note = 2'-O-methylcytidine-3'-phosphate
  modified_base 14: mod_base = OTHER; note = 2'-O-methyladenosine-3'-phosphate
  modified_base 15: mod_base = OTHER; note = 2'-O-methylguanosine-3'-phosphate
  modified_base 16: mod_base = OTHER; note = 2'-O-methylcytidine-3'-phosphate
  modified_base 17: mod_base = OTHER; note = 2'-O-methyluridine-3'-phosphate
  modified_base 18: mod_base = OTHER; note = 2'-O-methylcytidine-3'-phosphate
  modified_base 19: mod_base = OTHER; note = 2'-O-methyladenosine-3'-phosphate
  modified_base 20: mod_base = OTHER; note = 2'-O-methylcytidine-3'-phosphate
  modified_base 21: mod_base = OTHER; note = 2'-O-methyluridine-3'-phosphate ((2S,4R)-1-[29-[[2-(acetylamino)-2-deoxy-beta-D-galactopyra nosyl]oxy]-14,14-bis[[3-[[3-[[5-[[2-(acetylamino)-2-deoxy-b eta-D-galactopyranosyl]oxy]-1-oxopentyl]amino]propyl]amino] -3-oxopropoxy]methyl]-1,12,19,25-tetraoxo-16-oxa-13,20,24-t riazanonacos-1-yl]-4-hydroxy-2-pyrrolidinyl)methyl ester
ccactctgggaacagctcact

SEQ ID NO: 931 - RNA, 21 nt, synthetic construct
  source 1..21: mol_type = other RNA
  modified_base 1: mod_base = OTHER; note = 2'-O-methylcytidine-3'-phosphorothioate
  modified_base 2: mod_base = OTHER; note = 2'-O-methyladenosine-3'-phosphorothioate
  modified_base 3: mod_base = OTHER; note = 2'-O-methyluridine-3'-phosphate
  modified_base 4: mod_base = OTHER; note = 2'-O-methylguanosine-3'-phosphate
  modified_base 5: mod_base = OTHER; note = 2'-O-methylguanosine-3'-phosphate
  modified_base 6: mod_base = OTHER; note = 2'-O-methylcytidine-3'-phosphate
  modified_base 7: mod_base = OTHER; note = 2'-deoxy-2'-fluorocytidine-3'-phosphate
  modified_base 8: mod_base = OTHER; note = 2'-O-methyladenosine-3'-phosphate
  modified_base 9: mod_base = OTHER; note = 2'-deoxy-2'-fluorocytidine-3'-phosphate
  modified_base 10: mod_base = OTHER; note = 2'-deoxy-2'-fluorouridine-3'-phosphate
  modified_base 11: mod_base = OTHER; note = 2'-deoxy-2'-fluoroadenosine-3'-phosphate
  modified_base 12: mod_base = OTHER; note = 2'-O-methyluridine-3'-phosphate
  modified_base 13: mod_base = OTHER; note = 2'-O-methylguanosine-3'-phosphate
  modified_base 14: mod_base = OTHER; note = 2'-O-methylcytidine-3'-phosphate
  modified_base 15: mod_base = OTHER; note = 2'-O-methylcytidine-3'-phosphate
  modified_base 16: mod_base = OTHER; note = 2'-O-methylcytidine-3'-phosphate
  modified_base 17: mod_base = OTHER; note = 2'-O-methyladenosine-3'-phosphate
  modified_base 18: mod_base = OTHER; note = 2'-O-methylcytidine-3'-phosphate
  modified_base 19: mod_base = OTHER; note = 2'-O-methyladenosine-3'-phosphate
  modified_base 20: mod_base = OTHER; note = 2'-O-methylguanosine-3'-phosphate
  modified_base 21: mod_base = OTHER; note = 2'-O-methyluridine-3'-phosphate ((2S,4R)-1-[29-[[2-(acetylamino)-2-deoxy-beta-D-galactopyra nosyl]oxy]-14,14-bis[[3-[[3-[[5-[[2-(acetylamino)-2-deoxy-b eta-D-galactopyranosyl]oxy]-1-oxopentyl]amino]propyl]amino] -3-oxopropoxy]methyl]-1,12,19,25-tetraoxo-16-oxa-13,20,24-t riazanonacos-1-yl]-4-hydroxy-2-pyrrolidinyl)methyl ester
catggccactatgcccacagt

SEQ ID NO: 932 - RNA, 21 nt, synthetic construct
  source 1..21: mol_type = other RNA
  modified_base 1: mod_base = OTHER; note = 2'-O-methyluridine-3'-phosphorothioate
  modified_base 2: mod_base = OTHER; note = 2'-O-methylguanosine-3'-phosphorothioate
  modified_base 3: mod_base = OTHER; note = 2'-O-methylcytidine-3'-phosphate
  modified_base 4: mod_base = OTHER; note = 2'-O-methylcytidine-3'-phosphate
  modified_base 5: mod_base = OTHER; note = 2'-O-methyluridine-3'-phosphate
  modified_base 6: mod_base = OTHER; note = 2'-O-methylcytidine-3'-phosphate
  modified_base 7: mod_base = OTHER; note = 2'-deoxy-2'-fluorocytidine-3'-phosphate
  modified_base 8: mod_base = OTHER; note = 2'-O-methyladenosine-3'-phosphate
  modified_base 9: mod_base = OTHER; note = 2'-deoxy-2'-fluorocytidine-3'-phosphate
  modified_base 10: mod_base = OTHER; note = 2'-deoxy-2'-fluoroguanosine-3'-phosphate
  modified_base 11: mod_base = OTHER; note = 2'-deoxy-2'-fluoroguanosine-3'-phosphate
  modified_base 12: mod_base = OTHER; note = 2'-O-methyluridine-3'-phosphate
  modified_base 13: mod_base = OTHER; note = 2'-O-methyluridine-3'-phosphate
  modified_base 14: mod_base = OTHER; note = 2'-O-methylcytidine-3'-phosphate
  modified_base 15: mod_base = OTHER; note = 2'-O-methylcytidine-3'-phosphate
  modified_base 16: mod_base = OTHER; note = 2'-O-methylcytidine-3'-phosphate
  modified_base 17: mod_base = OTHER; note = 2'-O-methyladenosine-3'-phosphate
  modified_base 18: mod_base = OTHER; note = 2'-O-methylguanosine-3'-phosphate
  modified_base 19: mod_base = OTHER; note = 2'-O-methylcytidine-3'-phosphate
  modified_base 20: mod_base = OTHER; note = 2'-O-methyluridine-3'-phosphate
  modified_base 21: mod_base = OTHER; note = 2'-O-methyluridine-3'-phosphate ((2S,4R)-1-[29-[[2-(acetylamino)-2-deoxy-beta-D-galactopyra nosyl]oxy]-14,14-bis[[3-[[3-[[5-[[2-(acetylamino)-2-deoxy-b eta-D-galactopyranosyl]oxy]-1-oxopentyl]amino]propyl]amino] -3-oxopropoxy]methyl]-1,12,19,25-tetraoxo-16-oxa-13,20,24-t riazanonacos-1-yl]-4-hydroxy-2-pyrrolidinyl)methyl ester
tgcctccacggttcccagctt

SEQ ID NO: 933 - RNA, 21 nt, synthetic construct
  source 1..21: mol_type = other RNA
  modified_base 1: mod_base = OTHER; note = 2'-O-methylcytidine-3'-phosphorothioate
  modified_base 2: mod_base = OTHER; note = 2'-O-methylcytidine-3'-phosphorothioate
  modified_base 3: mod_base = OTHER; note = 2'-O-methyluridine-3'-phosphate
  modified_base 4: mod_base = OTHER; note = 2'-O-methylguanosine-3'-phosphate
  modified_base 5: mod_base = OTHER; note = 2'-O-methylcytidine-3'-phosphate
  modified_base 6: mod_base = OTHER; note = 2'-O-methylcytidine-3'-phosphate
  modified_base 7: mod_base = OTHER; note = 2'-deoxy-2'-fluoroadenosine-3'-phosphate
  modified_base 8: mod_base = OTHER; note = 2'-O-methyladenosine-3'-phosphate
  modified_base 9: mod_base = OTHER; note = 2'-deoxy-2'-fluorocytidine-3'-phosphate
  modified_base 10: mod_base = OTHER; note = 2'-deoxy-2'-fluorocytidine-3'-phosphate
  modified_base 11: mod_base = OTHER; note = 2'-deoxy-2'-fluorouridine-3'-phosphate
  modified_base 12: mod_base = OTHER; note = 2'-O-methyluridine-3'-phosphate
  modified_base 13: mod_base = OTHER; note = 2'-O-methylcytidine-3'-phosphate
  modified_base 14: mod_base = OTHER; note = 2'-O-methyladenosine-3'-phosphate
  modified_base 15: mod_base = OTHER; note = 2'-O-methylguanosine-3'-phosphate
  modified_base 16: mod_base = OTHER; note = 2'-O-methylcytidine-3'-phosphate
  modified_base 17: mod_base = OTHER; note = 2'-O-methylguanosine-3'-phosphate
  modified_base 18: mod_base = OTHER; note = 2'-O-methyluridine-3'-phosphate
  modified_base 19: mod_base = OTHER; note = 2'-O-methylguanosine-3'-phosphate
  modified_base 20: mod_base = OTHER; note = 2'-O-methyluridine-3'-phosphate
  modified_base 21: mod_base = OTHER; note = 2'-O-methyluridine-3'-phosphate ((2S,4R)-1-[29-[[2-(acetylamino)-2-deoxy-beta-D-galactopyra nosyl]oxy]-14,14-bis[[3-[[3-[[5-[[2-(acetylamino)-2-deoxy-b eta-D-galactopyranosyl]oxy]-1-oxopentyl]amino]propyl]amino] -3-oxopropoxy]methyl]-1,12,19,25-tetraoxo-16-oxa-13,20,24-t riazanonacos-1-yl]-4-hydroxy-2-pyrrolidinyl)methyl ester
cctgccaaccttcagcgtgtt

SEQ ID NO: 934 - RNA, 21 nt, synthetic construct
  source 1..21: mol_type = other RNA
  modified_base 1: mod_base = OTHER; note = 2'-O-methylguanosine-3'-phosphorothioate
  modified_base 2: mod_base = OTHER; note = 2'-O-methyluridine-3'-phosphorothioate
  modified_base 3: mod_base = OTHER; note = 2'-O-methylguanosine-3'-phosphate
  modified_base 4: mod_base = OTHER; note = 2'-O-methyluridine-3'-phosphate
  modified_base 5: mod_base = OTHER; note = 2'-O-methylcytidine-3'-phosphate
  modified_base 6: mod_base = OTHER; note = 2'-O-methylcytidine-3'-phosphate
  modified_base 7: mod_base = OTHER; note = 2'-deoxy-2'-fluorouridine-3'-phosphate
  modified_base 8: mod_base = OTHER; note = 2'-O-methylcytidine-3'-phosphate
  modified_base 9: mod_base = OTHER; note = 2'-deoxy-2'-fluorocytidine-3'-phosphate
  modified_base 10: mod_base = OTHER; note = 2'-deoxy-2'-fluorouridine-3'-phosphate
  modified_base 11: mod_base = OTHER; note = 2'-deoxy-2'-fluorocytidine-3'-phosphate
  modified_base 12: mod_base = OTHER; note = 2'-O-methyladenosine-3'-phosphate
  modified_base 13: mod_base = OTHER; note = 2'-O-methylguanosine-3'-phosphate
  modified_base 14: mod_base = OTHER; note = 2'-O-methyluridine-3'-phosphate
  modified_base 15: mod_base = OTHER; note = 2'-O-methylcytidine-3'-phosphate
  modified_base 16: mod_base = OTHER; note = 2'-O-methylcytidine-3'-phosphate
  modified_base 17: mod_base = OTHER; note = 2'-O-methyluridine-3'-phosphate
  modified_base 18: mod_base = OTHER; note = 2'-O-methylcytidine-3'-phosphate
  modified_base 19: mod_base = OTHER; note = 2'-O-methyladenosine-3'-phosphate
  modified_base 20: mod_base = OTHER; note = 2'-O-methylcytidine-3'-phosphate
  modified_base 21: mod_base = OTHER; note = 2'-O-methyluridine-3'-phosphate ((2S,4R)-1-[29-[[2-(acetylamino)-2-deoxy-beta-D-galactopyra nosyl]oxy]-14,14-bis[[3-[[3-[[5-[[2-(acetylamino)-2-deoxy-b eta-D-galactopyranosyl]oxy]-1-oxopentyl]amino]propyl]amino] -3-oxopropoxy]methyl]-1,12,19,25-tetraoxo-16-oxa-13,20,24-t riazanonacos-1-yl]-4-hydroxy-2-pyrrolidinyl)methyl ester
gtgtcctcctcagtcctcact

SEQ ID NO: 935 - RNA, 21 nt, synthetic construct
  source 1..21: mol_type = other RNA
  modified_base 1: mod_base = OTHER; note = 2'-O-methylcytidine-3'-phosphorothioate
  modified_base 2: mod_base = OTHER; note = 2'-O-methyladenosine-3'-phosphorothioate
  modified_base 3: mod_base = OTHER; note = 2'-O-methylguanosine-3'-phosphate
  modified_base 4: mod_base = OTHER; note = 2'-O-methylcytidine-3'-phosphate
  modified_base 5: mod_base = OTHER; note = 2'-O-methyluridine-3'-phosphate
  modified_base 6: mod_base = OTHER; note = 2'-O-methylcytidine-3'-phosphate
  modified_base 7: mod_base = OTHER; note = 2'-deoxy-2'-fluorocytidine-3'-phosphate
  modified_base 8: mod_base = OTHER; note = 2'-O-methylcytidine-3'-phosphate
  modified_base 9: mod_base = OTHER; note = 2'-deoxy-2'-fluoroadenosine-3'-phosphate
  modified_base 10: mod_base = OTHER; note = 2'-deoxy-2'-fluorocytidine-3'-phosphate
  modified_base 11: mod_base = OTHER; note = 2'-deoxy-2'-fluorouridine-3'-phosphate
  modified_base 12: mod_base = OTHER; note = 2'-O-methyluridine-3'-phosphate
  modified_base 13: mod_base = OTHER; note = 2'-O-methylcytidine-3'-phosphate
  modified_base 14: mod_base = OTHER; note = 2'-O-methyluridine-3'-phosphate
  modified_base 15: mod_base = OTHER; note = 2'-O-methylcytidine-3'-phosphate
  modified_base 16: mod_base = OTHER; note = 2'-O-methyluridine-3'-phosphate
  modified_base 17: mod_base = OTHER; note = 2'-O-methyladenosine-3'-phosphate
  modified_base 18: mod_base = OTHER; note = 2'-O-methylcytidine-3'-phosphate
  modified_base 19: mod_base = OTHER; note = 2'-O-methyluridine-3'-phosphate
  modified_base 20: mod_base = OTHER; note = 2'-O-methylcytidine-3'-phosphate
  modified_base 21: mod_base = OTHER; note = 2'-O-methyluridine-3'-phosphate ((2S,4R)-1-[29-[[2-(acetylamino)-2-deoxy-beta-D-galactopyra nosyl]oxy]-14,14-bis[[3-[[3-[[5-[[2-(acetylamino)-2-deoxy-b eta-D-galactopyranosyl]oxy]-1-oxopentyl]amino]propyl]amino] -3-oxopropoxy]methyl]-1,12,19,25-tetraoxo-16-oxa-13,20,24-t riazanonacos-1-yl]-4-hydroxy-2-pyrrolidinyl)methyl ester
cagctcccacttctctactct

SEQ ID NO: 936 - RNA, 21 nt, synthetic construct
  source 1..21: mol_type = other RNA
  modified_base 1: mod_base = OTHER; note = 2'-O-methylguanosine-3'-phosphorothioate
  modified_base 2: mod_base = OTHER; note = 2'-O-methylcytidine-3'-phosphorothioate
  modified_base 3: mod_base = OTHER; note = 2'-O-methyladenosine-3'-phosphate
  modified_base 4: mod_base = OTHER; note = 2'-O-methyluridine-3'-phosphate
  modified_base 5: mod_base = OTHER; note = 2'-O-methyluridine-3'-phosphate
  modified_base 6: mod_base = OTHER; note = 2'-O-methyluridine-3'-phosphate
  modified_base 7: mod_base = OTHER; note = 2'-deoxy-2'-fluoroguanosine-3'-phosphate
  modified_base 8: mod_base = OTHER; note = 2'-O-methylguanosine-3'-phosphate
  modified_base 9: mod_base = OTHER; note = 2'-deoxy-2'-fluoroadenosine-3'-phosphate
  modified_base 10: mod_base = OTHER; note = 2'-deoxy-2'-fluorocytidine-3'-phosphate
  modified_base 11: mod_base = OTHER; note = 2'-deoxy-2'-fluoroadenosine-3'-phosphate
  modified_base 12: mod_base = OTHER; note = 2'-O-methylguanosine-3'-phosphate
  modified_base 13: mod_base = OTHER; note = 2'-O-methyluridine-3'-phosphate
  modified_base 14: mod_base = OTHER; note = 2'-O-methyluridine-3'-phosphate
  modified_base 15: mod_base = OTHER; note = 2'-O-methyluridine-3'-phosphate
  modified_base 16: mod_base = OTHER; note = 2'-O-methyluridine-3'-phosphate
  modified_base 17: mod_base = OTHER; note = 2'-O-methyluridine-3'-phosphate
  modified_base 18: mod_base = OTHER; note = 2'-O-methylcytidine-3'-phosphate
  modified_base 19: mod_base = OTHER; note = 2'-O-methyluridine-3'-phosphate
  modified_base 20: mod_base = OTHER; note = 2'-O-methylcytidine-3'-phosphate
  modified_base 21: mod_base = OTHER; note = 2'-O-methyluridine-3'-phosphate ((2S,4R)-1-[29-[[2-(acetylamino)-2-deoxy-beta-D-galactopyra nosyl]oxy]-14,14-bis[[3-[[3-[[5-[[2-(acetylamino)-2-deoxy-b eta-D-galactopyranosyl]oxy]-1-oxopentyl]amino]propyl]amino] -3-oxopropoxy]methyl]-1,12,19,25-tetraoxo-16-oxa-13,20,24-t riazanonacos-1-yl]-4-hydroxy-2-pyrrolidinyl)methyl ester
gcatttggacagtttttctct

SEQ ID NO: 937 - RNA, 21 nt, synthetic construct
  source 1..21: mol_type = other RNA
  modified_base 1: mod_base = OTHER; note = 2'-O-methylguanosine-3'-phosphorothioate
  modified_base 2: mod_base = OTHER; note = 2'-O-methyladenosine-3'-phosphorothioate
  modified_base 3: mod_base = OTHER; note = 2'-O-methyladenosine-3'-phosphate
  modified_base 4: mod_base = OTHER; note = 2'-O-methylguanosine-3'-phosphate
  modified_base 5: mod_base = OTHER; note = 2'-O-methyluridine-3'-phosphate
  modified_base 6: mod_base = OTHER; note = 2'-O-methylcytidine-3'-phosphate
  modified_base 7: mod_base = OTHER; note = 2'-deoxy-2'-fluoroadenosine-3'-phosphate
  modified_base 8: mod_base = OTHER; note = 2'-O-methyluridine-3'-phosphate
  modified_base 9: mod_base = OTHER; note = 2'-deoxy-2'-fluorocytidine-3'-phosphate
  modified_base 10: mod_base = OTHER; note = 2'-deoxy-2'-fluorouridine-3'-phosphate
  modified_base 11: mod_base = OTHER; note = 2'-deoxy-2'-fluoroadenosine-3'-phosphate
  modified_base 12: mod_base = OTHER; note = 2'-O-methylcytidine-3'-phosphate
  modified_base 13: mod_base = OTHER; note = 2'-O-methyladenosine-3'-phosphate
  modified_base 14: mod_base = OTHER; note = 2'-O-methyladenosine-3'-phosphate
  modified_base 15: mod_base = OTHER; note = 2'-O-methyluridine-3'-phosphate
  modified_base 16: mod_base = OTHER; note = 2'-O-methyladenosine-3'-phosphate
  modified_base 17: mod_base = OTHER; note = 2'-O-methyladenosine-3'-phosphate
  modified_base 18: mod_base = OTHER; note = 2'-O-methylguanosine-3'-phosphate
  modified_base 19: mod_base = OTHER; note = 2'-O-methyladenosine-3'-phosphate
  modified_base 20: mod_base = OTHER; note = 2'-O-methylcytidine-3'-phosphate
  modified_base 21: mod_base = OTHER; note = 2'-O-methyluridine-3'-phosphate ((2S,4R)-1-[29-[[2-(acetylamino)-2-deoxy-beta-D-galactopyra nosyl]oxy]-14,14-bis[[3-[[3-[[5-[[2-(acetylamino)-2-deoxy-b eta-D-galactopyranosyl]oxy]-1-oxopentyl]amino]propyl]amino] -3-oxopropoxy]methyl]-1,12,19,25-tetraoxo-16-oxa-13,20,24-t riazanonacos-1-yl]-4-hydroxy-2-pyrrolidinyl)methyl ester
gaagtcatctacaataagact

SEQ ID NO: 938 - RNA, 21 nt, synthetic construct
  source 1..21: mol_type = other RNA
  modified_base 1: mod_base = OTHER; note = 2'-O-methylcytidine-3'-phosphorothioate
  modified_base 2: mod_base = OTHER; note = 2'-O-methyluridine-3'-phosphorothioate
  modified_base 3: mod_base = OTHER; note = 2'-O-methylguanosine-3'-phosphate
  modified_base 4: mod_base = OTHER; note = 2'-O-methylcytidine-3'-phosphate
  modified_base 5: mod_base = OTHER; note = 2'-O-methylcytidine-3'-phosphate
  modified_base 6: mod_base = OTHER; note = 2'-O-methyladenosine-3'-phosphate
  modified_base 7: mod_base = OTHER; note = 2'-deoxy-2'-fluorouridine-3'-phosphate
  modified_base 8: mod_base = OTHER; note = 2'-O-methyluridine-3'-phosphate
  modified_base 9: mod_base = OTHER; note = 2'-deoxy-2'-fluorouridine-3'-phosphate
  modified_base 10: mod_base = OTHER; note = 2'-deoxy-2'-fluorocytidine-3'-phosphate
  modified_base 11: mod_base = OTHER; note = 2'-deoxy-2'-fluorouridine-3'-phosphate
  modified_base 12: mod_base = OTHER; note = 2'-O-methyladenosine-3'-phosphate
  modified_base 13: mod_base = OTHER; note = 2'-O-methylcytidine-3'-phosphate
  modified_base 14: mod_base = OTHER; note = 2'-O-methylguanosine-3'-phosphate
  modified_base 15: mod_base = OTHER; note = 2'-O-methylcytidine-3'-phosphate
  modified_base 16: mod_base = OTHER; note = 2'-O-methyladenosine-3'-phosphate
  modified_base 17: mod_base = OTHER; note = 2'-O-methylguanosine-3'-phosphate
  modified_base 18: mod_base = OTHER; note = 2'-O-methyluridine-3'-phosphate
  modified_base 19: mod_base = OTHER; note = 2'-O-methylguanosine-3'-phosphate
  modified_base 20: mod_base = OTHER; note = 2'-O-methyluridine-3'-phosphate
  modified_base 21: mod_base = OTHER; note = 2'-O-methyluridine-3'-phosphate ((2S,4R)-1-[29-[[2-(acetylamino)-2-deoxy-beta-D-galactopyra nosyl]oxy]-14,14-bis[[3-[[3-[[5-[[2-(acetylamino)-2-deoxy-b eta-D-galactopyranosyl]oxy]-1-oxopentyl]amino]propyl]amino] -3-oxopropoxy]methyl]-1,12,19,25-tetraoxo-16-oxa-13,20,24-t riazanonacos-1-yl]-4-hydroxy-2-pyrrolidinyl)methyl ester
ctgccatttctacgcagtgtt

SEQ ID NO: 939 - RNA, 21 nt, synthetic construct
  source 1..21: mol_type = other RNA
  modified_base 1: mod_base = OTHER; note = 2'-O-methylcytidine-3'-phosphorothioate
  modified_base 2: mod_base = OTHER; note = 2'-O-methyladenosine-3'-phosphorothioate
  modified_base 3: mod_base = OTHER; note = 2'-O-methylcytidine-3'-phosphate
  modified_base 4: mod_base = OTHER; note = 2'-O-methyluridine-3'-phosphate
  modified_base 5: mod_base = OTHER; note = 2'-O-methylguanosine-3'-phosphate
  modified_base 6: mod_base = OTHER; note = 2'-O-methyluridine-3'-phosphate
  modified_base 7: mod_base = OTHER; note = 2'-deoxy-2'-fluoroguanosine-3'-phosphate
  modified_base 8: mod_base = OTHER; note = 2'-O-methyladenosine-3'-phosphate
  modified_base 9: mod_base = OTHER; note = 2'-deoxy-2'-fluorocytidine-3'-phosphate
  modified_base 10: mod_base = OTHER; note = 2'-deoxy-2'-fluoroadenosine-3'-phosphate
  modified_base 11: mod_base = OTHER; note = 2'-deoxy-2'-fluorouridine-3'-phosphate
  modified_base 12: mod_base = OTHER; note = 2'-O-methyluridine-3'-phosphate
  modified_base 13: mod_base = OTHER; note = 2'-O-methylguanosine-3'-phosphate
  modified_base 14: mod_base = OTHER; note = 2'-O-methyladenosine-3'-phosphate
  modified_base 15: mod_base = OTHER; note = 2'-O-methylcytidine-3'-phosphate
  modified_base 16: mod_base = OTHER; note = 2'-O-methylcytidine-3'-phosphate
  modified_base 17: mod_base = OTHER; note = 2'-O-methylguanosine-3'-phosphate
  modified_base 18: mod_base = OTHER; note = 2'-O-methylcytidine-3'-phosphate
  modified_base 19: mod_base = OTHER; note = 2'-O-methyluridine-3'-phosphate
  modified_base 20: mod_base = OTHER; note = 2'-O-methyluridine-3'-phosphate
  modified_base 21: mod_base = OTHER; note = 2'-O-methyluridine-3'-phosphate ((2S,4R)-1-[29-[[2-(acetylamino)-2-deoxy-beta-D-galactopyra nosyl]oxy]-14,14-bis[[3-[[3-[[5-[[2-(acetylamino)-2-deoxy-b eta-D-galactopyranosyl]oxy]-1-oxopentyl]amino]propyl]amino] -3-oxopropoxy]methyl]-1,12,19,25-tetraoxo-16-oxa-13,20,24-t riazanonacos-1-yl]-4-hydroxy-2-pyrrolidinyl)methyl ester
cactgtgacattgaccgcttt

SEQ ID NO: 940 - RNA, 21 nt, synthetic construct
  source 1..21: mol_type = other RNA
  modified_base 1: mod_base = OTHER; note = 2'-O-methyluridine-3'-phosphorothioate
  modified_base 2: mod_base = OTHER; note = 2'-O-methylguanosine-3'-phosphorothioate
  modified_base 3: mod_base = OTHER; note = 2'-O-methyluridine-3'-phosphate
  modified_base 4: mod_base = OTHER; note = 2'-O-methylguanosine-3'-phosphate
  modified_base 5: mod_base = OTHER; note = 2'-O-methyladenosine-3'-phosphate
  modified_base 6: mod_base = OTHER; note = 2'-O-methylcytidine-3'-phosphate
  modified_base 7: mod_base = OTHER; note = 2'-deoxy-2'-fluoroadenosine-3'-phosphate
  modified_base 8: mod_base = OTHER; note = 2'-O-methyladenosine-3'-phosphate
  modified_base 9: mod_base = OTHER; note = 2'-deoxy-2'-fluorouridine-3'-phosphate
  modified_base 10: mod_base = OTHER; note = 2'-deoxy-2'-fluoroguanosine-3'-phosphate
  modified_base 11: mod_base = OTHER; note = 2'-deoxy-2'-fluorocytidine-3'-phosphate
  modified_base 12: mod_base = OTHER; note = 2'-O-methylcytidine-3'-phosphate
  modified_base 13: mod_base = OTHER; note = 2'-O-methyladenosine-3'-phosphate
  modified_base 14: mod_base = OTHER; note = 2'-O-methyluridine-3'-phosphate
  modified_base 15: mod_base = OTHER; note = 2'-O-methylcytidine-3'-phosphate
  modified_base 16: mod_base = OTHER; note = 2'-O-methylcytidine-3'-phosphate
  modified_base 17: mod_base = OTHER; note = 2'-O-methylcytidine-3'-phosphate
  modified_base 18: mod_base = OTHER; note = 2'-O-methyluridine-3'-phosphate
  modified_base 19: mod_base = OTHER; note = 2'-O-methylcytidine-3'-phosphate
  modified_base 20: mod_base = OTHER; note = 2'-O-methyluridine-3'-phosphate
  modified_base 21: mod_base = OTHER; note = 2'-O-methyluridine-3'-phosphate ((2S,4R)-1-[29-[[2-(acetylamino)-2-deoxy-beta-D-galactopyra nosyl]oxy]-14,14-bis[[3-[[3-[[5-[[2-(acetylamino)-2-deoxy-b eta-D-galactopyranosyl]oxy]-1-oxopentyl]amino]propyl]amino] -3-oxopropoxy]methyl]-1,12,19,25-tetraoxo-16-oxa-13,20,24-t riazanonacos-1-yl]-4-hydroxy-2-pyrrolidinyl)methyl ester
tgtgacaatgccatccctctt

SEQ ID NO: 941 - RNA, 21 nt, synthetic construct
  source 1..21: mol_type = other RNA
  modified_base 1: mod_base = OTHER; note = 2'-O-methyladenosine-3'-phosphorothioate
  modified_base 2: mod_base = OTHER; note = 2'-O-methylcytidine-3'-phosphorothioate
  modified_base 3: mod_base = OTHER; note = 2'-O-methylcytidine-3'-phosphate
  modified_base 4: mod_base = OTHER; note = 2'-O-methylcytidine-3'-phosphate
  modified_base 5: mod_base = OTHER; note = 2'-O-methyluridine-3'-phosphate
  modified_base 6: mod_base = OTHER; note = 2'-O-methylguanosine-3'-phosphate
  modified_base 7: mod_base = OTHER; note = 2'-deoxy-2'-fluoroguanosine-3'-phosphate
  modified_base 8: mod_base = OTHER; note = 2'-O-methyladenosine-3'-phosphate
  modified_base 9: mod_base = OTHER; note = 2'-deoxy-2'-fluoroguanosine-3'-phosphate
  modified_base 10: mod_base = OTHER; note = 2'-deoxy-2'-fluoroadenosine-3'-phosphate
  modified_base 11: mod_base = OTHER; note = 2'-deoxy-2'-fluoroadenosine-3'-phosphate
  modified_base 12: mod_base = OTHER; note = 2'-O-methylcytidine-3'-phosphate
  modified_base 13: mod_base = OTHER; note = 2'-O-methyluridine-3'-phosphate
  modified_base 14: mod_base = OTHER; note = 2'-O-methylguanosine-3'-phosphate
  modified_base 15: mod_base = OTHER; note = 2'-O-methylcytidine-3'-phosphate
  modified_base 16: mod_base = OTHER; note = 2'-O-methyladenosine-3'-phosphate
  modified_base 17: mod_base = OTHER; note = 2'-O-methylcytidine-3'-phosphate
  modified_base 18: mod_base = OTHER; note = 2'-O-methylguanosine-3'-phosphate
  modified_base 19: mod_base = OTHER; note = 2'-O-methylguanosine-3'-phosphate
  modified_base 20: mod_base = OTHER; note = 2'-O-methyluridine-3'-phosphate
  modified_base 21: mod_base = OTHER; note = 2'-O-methyluridine-3'-phosphate ((2S,4R)-1-[29-[[2-(acetylamino)-2-deoxy-beta-D-galactopyra nosyl]oxy]-14,14-bis[[3-[[3-[[5-[[2-(acetylamino)-2-deoxy-b eta-D-galactopyranosyl]oxy]-1-oxopentyl]amino]propyl]amino] -3-oxopropoxy]methyl]-1,12,19,25-tetraoxo-16-oxa-13,20,24-t riazanonacos-1-yl]-4-hydroxy-2-pyrrolidinyl)methyl ester
accctggagaactgcacggtt

SEQ ID NO: 942 - RNA, 21 nt, synthetic construct
  source 1..21: mol_type = other RNA
  modified_base 1: mod_base = OTHER; note = 2'-O-methylguanosine-3'-phosphorothioate
  modified_base 2: mod_base = OTHER; note = 2'-O-methyluridine-3'-phosphorothioate
  modified_base 3: mod_base = OTHER; note = 2'-O-methylguanosine-3'-phosphate
  modified_base 4: mod_base = OTHER; note = 2'-O-methylguanosine-3'-phosphate
  modified_base 5: mod_base = OTHER; note = 2'-O-methylguanosine-3'-phosphate
  modified_base 6: mod_base = OTHER; note = 2'-O-methyluridine-3'-phosphate
  modified_base 7: mod_base = OTHER; note = 2'-deoxy-2'-fluoroguanosine-3'-phosphate
  modified_base 8: mod_base = OTHER; note = 2'-O-methyladenosine-3'-phosphate
  modified_base 9: mod_base = OTHER; note = 2'-deoxy-2'-fluorocytidine-3'-phosphate
  modified_base 10: mod_base = OTHER; note = 2'-deoxy-2'-fluoroadenosine-3'-phosphate
  modified_base 11: mod_base = OTHER; note = 2'-deoxy-2'-fluoroadenosine-3'-phosphate
  modified_base 12: mod_base = OTHER; note = 2'-O-methylcytidine-3'-phosphate
  modified_base 13: mod_base = OTHER; note = 2'-O-methylcytidine-3'-phosphate
  modified_base 14: mod_base = OTHER; note = 2'-O-methylguanosine-3'-phosphate
  modified_base 15: mod_base = OTHER; note = 2'-O-methyluridine-3'-phosphate
  modified_base 16: mod_base = OTHER; note = 2'-O-methylguanosine-3'-phosphate
  modified_base 17: mod_base = OTHER; note = 2'-O-methyluridine-3'-phosphate
  modified_base 18: mod_base = OTHER; note = 2'-O-methylcytidine-3'-phosphate
  modified_base 19: mod_base = OTHER; note = 2'-O-methylguanosine-3'-phosphate
  modified_base 20: mod_base = OTHER; note = 2'-O-methyluridine-3'-phosphate
  modified_base 21: mod_base = OTHER; note = 2'-O-methyluridine-3'-phosphate ((2S,4R)-1-[29-[[2-(acetylamino)-2-deoxy-beta-D-galactopyra nosyl]oxy]-14,14-bis[[3-[[3-[[5-[[2-(acetylamino)-2-deoxy-b eta-D-galactopyranosyl]oxy]-1-oxopentyl]amino]propyl]amino] -3-oxopropoxy]methyl]-1,12,19,25-tetraoxo-16-oxa-13,20,24-t riazanonacos-1-yl]-4-hydroxy-2-pyrrolidinyl)methyl ester
gtgggtgacaaccgtgtcgtt

SEQ ID NO: 943 - RNA, 21 nt, synthetic construct
  source 1..21: mol_type = other RNA
  modified_base 1: mod_base = OTHER; note = 2'-O-methylguanosine-3'-phosphorothioate
  modified_base 2: mod_base = OTHER; note = 2'-O-methyladenosine-3'-phosphorothioate
  modified_base 3: mod_base = OTHER; note = 2'-O-methylcytidine-3'-phosphate
  modified_base 4: mod_base = OTHER; note = 2'-O-methylcytidine-3'-phosphate
  modified_base 5: mod_base = OTHER; note = 2'-O-methylcytidine-3'-phosphate
  modified_base 6: mod_base = OTHER; note = 2'-O-methyladenosine-3'-phosphate
  modified_base 7: mod_base = OTHER; note = 2'-deoxy-2'-fluoroadenosine-3'-phosphate
  modified_base 8: mod_base = OTHER; note = 2'-O-methyladenosine-3'-phosphate
  modified_base 9: mod_base = OTHER; note = 2'-deoxy-2'-fluoroguanosine-3'-phosphate
  modified_base 10: mod_base = OTHER; note = 2'-deoxy-2'-fluorocytidine-3'-phosphate
  modified_base 11: mod_base = OTHER; note = 2'-deoxy-2'-fluorocytidine-3'-phosphate
  modified_base 12: mod_base = OTHER; note = 2'-O-methyluridine-3'-phosphate
  modified_base 13: mod_base = OTHER; note = 2'-O-methylguanosine-3'-phosphate
  modified_base 14: mod_base = OTHER; note = 2'-O-methyluridine-3'-phosphate
  modified_base 15: mod_base = OTHER; note = 2'-O-methylguanosine-3'-phosphate
  modified_base 16: mod_base = OTHER; note = 2'-O-methylguanosine-3'-phosphate
  modified_base 17: mod_base = OTHER; note = 2'-O-methylcytidine-3'-phosphate
  modified_base 18: mod_base = OTHER; note = 2'-O-methylcytidine-3'-phosphate
  modified_base 19: mod_base = OTHER; note = 2'-O-methyladenosine-3'-phosphate
  modified_base 20: mod_base = OTHER; note = 2'-O-methyladenosine-3'-phosphate
  modified_base 21: mod_base = OTHER; note = 2'-O-methyluridine-3'-phosphate ((2S,4R)-1-[29-[[2-(acetylamino)-2-deoxy-beta-D-galactopyra nosyl]oxy]-14,14-bis[[3-[[3-[[5-[[2-(acetylamino)-2-deoxy-b eta-D-galactopyranosyl]oxy]-1-oxopentyl]amino]propyl]amino] -3-oxopropoxy]methyl]-1,12,19,25-tetraoxo-16-oxa-13,20,24-t riazanonacos-1-yl]-4-hydroxy-2-pyrrolidinyl)methyl ester
gacccaaagcctgtggccaat

SEQ ID NO: 944 - RNA, 21 nt, synthetic construct
  source 1..21: mol_type = other RNA
  modified_base 1: mod_base = OTHER; note = 2'-O-methylcytidine-3'-phosphorothioate
  modified_base 2: mod_base = OTHER; note = 2'-O-methyluridine-3'-phosphorothioate
  modified_base 3: mod_base = OTHER; note = 2'-O-methylguanosine-3'-phosphate
  modified_base 4: mod_base = OTHER; note = 2'-O-methylcytidine-3'-phosphate
  modified_base 5: mod_base = OTHER; note = 2'-O-methylguanosine-3'-phosphate
  modified_base 6: mod_base = OTHER; note = 2'-O-methyluridine-3'-phosphate
  modified_base 7: mod_base = OTHER; note = 2'-deoxy-2'-fluoroguanosine-3'-phosphate
  modified_base 8: mod_base = OTHER; note = 2'-O-methyladenosine-3'-phosphate
  modified_base 9: mod_base = OTHER; note = 2'-deoxy-2'-fluoroadenosine-3'-phosphate
  modified_base 10: mod_base = OTHER; note = 2'-deoxy-2'-fluorocytidine-3'-phosphate
  modified_base 11: mod_base = OTHER; note = 2'-deoxy-2'-fluoroadenosine-3'-phosphate
  modified_base 12: mod_base = OTHER; note = 2'-O-methyladenosine-3'-phosphate
  modified_base 13: mod_base = OTHER; note = 2'-O-methylguanosine-3'-phosphate
  modified_base 14: mod_base = OTHER; note = 2'-O-methylcytidine-3'-phosphate
  modified_base 15: mod_base = OTHER; note = 2'-O-methyladenosine-3'-phosphate
  modified_base 16: mod_base = OTHER; note = 2'-O-methylcytidine-3'-phosphate
  modified_base 17: mod_base = OTHER; note = 2'-O-methylcytidine-3'-phosphate
  modified_base 18: mod_base = OTHER; note = 2'-O-methyluridine-3'-phosphate
  modified_base 19: mod_base = OTHER; note = 2'-O-methylguanosine-3'-phosphate
  modified_base 20: mod_base = OTHER; note = 2'-O-methylcytidine-3'-phosphate
  modified_base 21: mod_base = OTHER; note = 2'-O-methyluridine-3'-phosphate ((2S,4R)-1-[29-[[2-(acetylamino)-2-deoxy-beta-D-galactopyra nosyl]oxy]-14,14-bis[[3-[[3-[[5-[[2-(acetylamino)-2-deoxy-b eta-D-galactopyranosyl]oxy]-1-oxopentyl]amino]propyl]amino] -3-oxopropoxy]methyl]-1,12,19,25-tetraoxo-16-oxa-13,20,24-t riazanonacos-1-yl]-4-hydroxy-2-pyrrolidinyl)methyl ester
ctgcgtgaacaagcacctgct

SEQ ID NO: 945 - RNA, 21 nt, synthetic construct
  source 1..21: mol_type = other RNA
  modified_base 1: mod_base = OTHER; note = 2'-O-methyluridine-3'-phosphorothioate
  modified_base 2: mod_base = OTHER; note = 2'-O-methylcytidine-3'-phosphorothioate
  modified_base 3: mod_base = OTHER; note = 2'-O-methyladenosine-3'-phosphate
  modified_base 4: mod_base = OTHER; note = 2'-O-methyladenosine-3'-phosphate
  modified_base 5: mod_base = OTHER; note = 2'-O-methyladenosine-3'-phosphate
  modified_base 6: mod_base = OTHER; note = 2'-O-methylguanosine-3'-phosphate
  modified_base 7: mod_base = OTHER; note = 2'-deoxy-2'-fluorouridine-3'-phosphate
  modified_base 8: mod_base = OTHER; note = 2'-O-methylguanosine-3'-phosphate
  modified_base 9: mod_base = OTHER; note = 2'-deoxy-2'-fluorouridine-3'-phosphate
  modified_base 10: mod_base = OTHER; note = 2'-deoxy-2'-fluorocytidine-3'-phosphate
  modified_base 11: mod_base = OTHER; note = 2'-deoxy-2'-fluoroguanosine-3'-phosphate
  modified_base 12: mod_base = OTHER; note = 2'-O-methylguanosine-3'-phosphate
  modified_base 13: mod_base = OTHER; note = 2'-O-methyladenosine-3'-phosphate
  modified_base 14: mod_base = OTHER; note = 2'-O-methylcytidine-3'-phosphate
  modified_base 15: mod_base = OTHER; note = 2'-O-methylcytidine-3'-phosphate
  modified_base 16: mod_base = OTHER; note = 2'-O-methylcytidine-3'-phosphate
  modified_base 17: mod_base = OTHER; note = 2'-O-methylguanosine-3'-phosphate
  modified_base 18: mod_base = OTHER; note = 2'-O-methyladenosine-3'-phosphate
  modified_base 19: mod_base = OTHER; note = 2'-O-methylguanosine-3'-phosphate
  modified_base 20: mod_base = OTHER; note = 2'-O-methylcytidine-3'-phosphate
  modified_base 21: mod_base = OTHER; note = 2'-O-methyluridine-3'-phosphate ((2S,4R)-1-[29-[[2-(acetylamino)-2-deoxy-beta-D-galactopyra nosyl]oxy]-14,14-bis[[3-[[3-[[5-[[2-(acetylamino)-2-deoxy-b eta-D-galactopyranosyl]oxy]-1-oxopentyl]amino]propyl]amino] -3-oxopropoxy]methyl]-1,12,19,25-tetraoxo-16-oxa-13,20,24-t riazanonacos-1-yl]-4-hydroxy-2-pyrrolidinyl)methyl ester
tcaaagtgtcggacccgagct

SEQ ID NO: 946 - RNA, 21 nt, synthetic construct
  source 1..21: mol_type = other RNA
  modified_base 1: mod_base = OTHER; note = 2'-O-methylcytidine-3'-phosphorothioate
  modified_base 2: mod_base = OTHER; note = 2'-O-methyluridine-3'-phosphorothioate
  modified_base 3: mod_base = OTHER; note = 2'-O-methylguanosine-3'-phosphate
  modified_base 4: mod_base = OTHER; note = 2'-O-methyluridine-3'-phosphate
  modified_base 5: mod_base = OTHER; note = 2'-O-methylguanosine-3'-phosphate
  modified_base 6: mod_base = OTHER; note = 2'-O-methyladenosine-3'-phosphate
  modified_base 7: mod_base = OTHER; note = 2'-deoxy-2'-fluorocytidine-3'-phosphate
  modified_base 8: mod_base = OTHER; note = 2'-O-methyluridine-3'-phosphate
  modified_base 9: mod_base = OTHER; note = 2'-deoxy-2'-fluorouridine-3'-phosphate
  modified_base 10: mod_base = OTHER; note = 2'-deoxy-2'-fluorocytidine-3'-phosphate
  modified_base 11: mod_base = OTHER; note = 2'-deoxy-2'-fluorocytidine-3'-phosphate
  modified_base 12: mod_base = OTHER; note = 2'-O-methyladenosine-3'-phosphate
  modified_base 13: mod_base = OTHER; note = 2'-O-methylcytidine-3'-phosphate
  modified_base 14: mod_base = OTHER; note = 2'-O-methyluridine-3'-phosphate
  modified_base 15: mod_base = OTHER; note = 2'-O-methyladenosine-3'-phosphate
  modified_base 16: mod_base = OTHER; note = 2'-O-methyluridine-3'-phosphate
  modified_base 17: mod_base = OTHER; note = 2'-O-methylguanosine-3'-phosphate
  modified_base 18: mod_base = OTHER; note = 2'-O-methyladenosine-3'-phosphate
  modified_base 19: mod_base = OTHER; note = 2'-O-methylguanosine-3'-phosphate
  modified_base 20: mod_base = OTHER; note = 2'-O-methyluridine-3'-phosphate
  modified_base 21: mod_base = OTHER; note = 2'-O-methyluridine-3'-phosphate ((2S,4R)-1-[29-[[2-(acetylamino)-2-deoxy-beta-D-galactopyra nosyl]oxy]-14,14-bis[[3-[[3-[[5-[[2-(acetylamino)-2-deoxy-b eta-D-galactopyranosyl]oxy]-1-oxopentyl]amino]propyl]amino] -3-oxopropoxy]methyl]-1,12,19,25-tetraoxo-16-oxa-13,20,24-t riazanonacos-1-yl]-4-hydroxy-2-pyrrolidinyl)methyl ester
ctgtgacttccactatgagtt

SEQ ID NO: 947 - RNA, 21 nt, synthetic construct
  source 1..21: mol_type = other RNA
  modified_base 1: mod_base = OTHER; note = 2'-O-methyladenosine-3'-phosphorothioate
  modified_base 2: mod_base = OTHER; note = 2'-O-methylguanosine-3'-phosphorothioate
  modified_base 3: mod_base = OTHER; note = 2'-O-methyluridine-3'-phosphate
  modified_base 4: mod_base = OTHER; note = 2'-O-methylguanosine-3'-phosphate
  modified_base 5: mod_base = OTHER; note = 2'-O-methylcytidine-3'-phosphate
  modified_base 6: mod_base = OTHER; note = 2'-O-methyladenosine-3'-phosphate
  modified_base 7: mod_base = OTHER; note = 2'-deoxy-2'-fluorouridine-3'-phosphate
  modified_base 8: mod_base = OTHER; note = 2'-O-methylcytidine-3'-phosphate
  modified_base 9: mod_base = OTHER; note = 2'-deoxy-2'-fluorouridine-3'-phosphate
  modified_base 10: mod_base = OTHER; note = 2'-deoxy-2'-fluoroguanosine-3'-phosphate
  modified_base 11: mod_base = OTHER; note = 2'-deoxy-2'-fluorocytidine-3'-phosphate
  modified_base 12: mod_base = OTHER; note = 2'-O-methyladenosine-3'-phosphate
  modified_base 13: mod_base = OTHER; note = 2'-O-methylguanosine-3'-phosphate
  modified_base 14: mod_base = OTHER; note = 2'-O-methylcytidine-3'-phosphate
  modified_base 15: mod_base = OTHER; note = 2'-O-methyladenosine-3'-phosphate
  modified_base 16: mod_base = OTHER; note = 2'-O-methyluridine-3'-phosphate
  modified_base 17: mod_base = OTHER; note = 2'-O-methylguanosine-3'-phosphate
  modified_base 18: mod_base = OTHER; note = 2'-O-methyluridine-3'-phosphate
  modified_base 19: mod_base = OTHER; note = 2'-O-methylguanosine-3'-phosphate
  modified_base 20: mod_base = OTHER; note = 2'-O-methylguanosine-3'-phosphate
  modified_base 21: mod_base = OTHER; note = 2'-O-methyluridine-3'-phosphate ((2S,4R)-1-[29-[[2-(acetylamino)-2-deoxy-beta-D-galactopyra nosyl]oxy]-14,14-bis[[3-[[3-[[5-[[2-(acetylamino)-2-deoxy-b eta-D-galactopyranosyl]oxy]-1-oxopentyl]amino]propyl]amino] -3-oxopropoxy]methyl]-1,12,19,25-tetraoxo-16-oxa-13,20,24-t riazanonacos-1-yl]-4-hydroxy-2-pyrrolidinyl)methyl ester
agtgcatctgcagcatgtggt

SEQ ID NO: 948 - RNA, 21 nt, synthetic construct
  source 1..21: mol_type = other RNA
  modified_base 1: mod_base = OTHER; note = 2'-O-methylcytidine-3'-phosphorothioate
  modified_base 2: mod_base = OTHER; note = 2'-O-methylcytidine-3'-phosphorothioate
  modified_base 3: mod_base = OTHER; note = 2'-O-methylcytidine-3'-phosphate
  modified_base 4: mod_base = OTHER; note = 2'-O-methyladenosine-3'-phosphate
  modified_base 5: mod_base = OTHER; note = 2'-O-methylcytidine-3'-phosphate
  modified_base 6: mod_base = OTHER; note = 2'-O-methyluridine-3'-phosphate
  modified_base 7: mod_base = OTHER; note = 2'-deoxy-2'-fluoroadenosine-3'-phosphate
  modified_base 8: mod_base = OTHER; note = 2'-O-methyluridine-3'-phosphate
  modified_base 9: mod_base = OTHER; note = 2'-deoxy-2'-fluorouridine-3'-phosphate
  modified_base 10: mod_base = OTHER; note = 2'-deoxy-2'-fluorocytidine-3'-phosphate
  modified_base 11: mod_base = OTHER; note = 2'-deoxy-2'-fluorocytidine-3'-phosphate
  modified_base 12: mod_base = OTHER; note = 2'-O-methyladenosine-3'-phosphate
  modified_base 13: mod_base = OTHER; note = 2'-O-methylcytidine-3'-phosphate
  modified_base 14: mod_base = OTHER; note = 2'-O-methylcytidine-3'-phosphate
  modified_base 15: mod_base = OTHER; note = 2'-O-methyluridine-3'-phosphate
  modified_base 16: mod_base = OTHER; note = 2'-O-methyluridine-3'-phosphate
  modified_base 17: mod_base = OTHER; note = 2'-O-methyluridine-3'-phosphate
  modified_base 18: mod_base = OTHER; note = 2'-O-methylguanosine-3'-phosphate
  modified_base 19: mod_base = OTHER; note = 2'-O-methyladenosine-3'-phosphate
  modified_base 20: mod_base = OTHER; note = 2'-O-methylcytidine-3'-phosphate
  modified_base 21: mod_base = OTHER; note = 2'-O-methyluridine-3'-phosphate ((2S,4R)-1-[29-[[2-(acetylamino)-2-deoxy-beta-D-galactopyra nosyl]oxy]-14,14-bis[[3-[[3-[[5-[[2-(acetylamino)-2-deoxy-b eta-D-galactopyranosyl]oxy]-1-oxopentyl]amino]propyl]amino] -3-oxopropoxy]methyl]-1,12,19,25-tetraoxo-16-oxa-13,20,24-t riazanonacos-1-yl]-4-hydroxy-2-pyrrolidinyl)methyl ester
cccactattccacctttgact

SEQ ID NO: 949 - RNA, 21 nt, synthetic construct
  source 1..21: mol_type = other RNA
  modified_base 1: mod_base = OTHER; note = 2'-O-methyladenosine-3'-phosphorothioate
  modified_base 2: mod_base = OTHER; note = 2'-O-methylcytidine-3'-phosphorothioate
  modified_base 3: mod_base = OTHER; note = 2'-O-methylcytidine-3'-phosphate
  modified_base 4: mod_base = OTHER; note = 2'-O-methyluridine-3'-phosphate
  modified_base 5: mod_base = OTHER; note = 2'-O-methyladenosine-3'-phosphate
  modified_base 6: mod_base = OTHER; note = 2'-O-methyluridine-3'-phosphate
  modified_base 7: mod_base = OTHER; note = 2'-deoxy-2'-fluoroguanosine-3'-phosphate
  modified_base 8: mod_base = OTHER; note = 2'-O-methyluridine-3'-phosphate
  modified_base 9: mod_base = OTHER; note = 2'-deoxy-2'-fluorocytidine-3'-phosphate
  modified_base 10: mod_base = OTHER; note = 2'-deoxy-2'-fluorocytidine-3'-phosphate
  modified_base 11: mod_base = OTHER; note = 2'-deoxy-2'-fluorouridine-3'-phosphate
  modified_base 12: mod_base = OTHER; note = 2'-O-methylcytidine-3'-phosphate
  modified_base 13: mod_base = OTHER; note = 2'-O-methyladenosine-3'-phosphate
  modified_base 14: mod_base = OTHER; note = 2'-O-methyluridine-3'-phosphate
  modified_base 15: mod_base = OTHER; note = 2'-O-methylguanosine-3'-phosphate
  modified_base 16: mod_base = OTHER; note = 2'-O-methyladenosine-3'-phosphate
  modified_base 17: mod_base = OTHER; note = 2'-O-methylguanosine-3'-phosphate
  modified_base 18: mod_base = OTHER; note = 2'-O-methyladenosine-3'-phosphate
  modified_base 19: mod_base = OTHER; note = 2'-O-methylguanosine-3'-phosphate
  modified_base 20: mod_base = OTHER; note = 2'-O-methyladenosine-3'-phosphate
  modified_base 21: mod_base = OTHER; note = 2'-O-methyluridine-3'-phosphate ((2S,4R)-1-[29-[[2-(acetylamino)-2-deoxy-beta-D-galactopyra nosyl]oxy]-14,14-bis[[3-[[3-[[5-[[2-(acetylamino)-2-deoxy-b eta-D-galactopyranosyl]oxy]-1-oxopentyl]amino]propyl]amino] -3-oxopropoxy]methyl]-1,12,19,25-tetraoxo-16-oxa-13,20,24-t riazanonacos-1-yl]-4-hydroxy-2-pyrrolidinyl)methyl ester
acctatgtcctcatgagagat

SEQ ID NO: 950 - RNA, 21 nt, synthetic construct
  source 1..21: mol_type = other RNA
  modified_base 1: mod_base = OTHER; note = 2'-O-methylcytidine-3'-phosphorothioate
  modified_base 2: mod_base = OTHER; note = 2'-O-methyladenosine-3'-phosphorothioate
  modified_base 3: mod_base = OTHER; note = 2'-O-methylcytidine-3'-phosphate
  modified_base 4: mod_base = OTHER; note = 2'-O-methylguanosine-3'-phosphate
  modified_base 5: mod_base = OTHER; note = 2'-O-methylcytidine-3'-phosphate
  modified_base 6: mod_base = OTHER; note = 2'-O-methyluridine-3'-phosphate
  modified_base 7: mod_base = OTHER; note = 2'-deoxy-2'-fluorouridine-3'-phosphate
  modified_base 8: mod_base = OTHER; note = 2'-O-methyluridine-3'-phosphate
  modified_base 9: mod_base = OTHER; note = 2'-deoxy-2'-fluoroguanosine-3'-phosphate
  modified_base 10: mod_base = OTHER; note = 2'-deoxy-2'-fluoroguanosine-3'-phosphate
  modified_base 11: mod_base = OTHER; note = 2'-deoxy-2'-fluoroguanosine-3'-phosphate
  modified_base 12: mod_base = OTHER; note = 2'-O-methyladenosine-3'-phosphate
  modified_base 13: mod_base = OTHER; note = 2'-O-methyladenosine-3'-phosphate
  modified_base 14: mod_base = OTHER; note = 2'-O-methyluridine-3'-phosphate
  modified_base 15: mod_base = OTHER; note = 2'-O-methylcytidine-3'-phosphate
  modified_base 16: mod_base = OTHER; note = 2'-O-methyluridine-3'-phosphate
  modified_base 17: mod_base = OTHER; note = 2'-O-methylcytidine-3'-phosphate
  modified_base 18: mod_base = OTHER; note = 2'-O-methyladenosine-3'-phosphate
  modified_base 19: mod_base = OTHER; note = 2'-O-methylguanosine-3'-phosphate
  modified_base 20: mod_base = OTHER; note = 2'-O-methylcytidine-3'-phosphate
  modified_base 21: mod_base = OTHER; note = 2'-O-methyluridine-3'-phosphate ((2S,4R)-1-[29-[[2-(acetylamino)-2-deoxy-beta-D-galactopyra nosyl]oxy]-14,14-bis[[3-[[3-[[5-[[2-(acetylamino)-2-deoxy-b eta-D-galactopyranosyl]oxy]-1-oxopentyl]amino]propyl]amino] -3-oxopropoxy]methyl]-1,12,19,25-tetraoxo-16-oxa-13,20,24-t riazanonacos-1-yl]-4-hydroxy-2-pyrrolidinyl)methyl ester
cacgctttgggaatctcagct

SEQ ID NO: 951 - RNA, 21 nt, synthetic construct
  source 1..21: mol_type = other RNA
  modified_base 1: mod_base = OTHER; note = 2'-O-methylcytidine-3'-phosphorothioate
  modified_base 2: mod_base = OTHER; note = 2'-O-methyluridine-3'-phosphorothioate
  modified_base 3: mod_base = OTHER; note = 2'-O-methylguanosine-3'-phosphate
  modified_base 4: mod_base = OTHER; note = 2'-O-methylguanosine-3'-phosphate
  modified_base 5: mod_base = OTHER; note = 2'-O-methyladenosine-3'-phosphate
  modified_base 6: mod_base = OTHER; note = 2'-O-methylcytidine-3'-phosphate
  modified_base 7: mod_base = OTHER; note = 2'-deoxy-2'-fluoroadenosine-3'-phosphate
  modified_base 8: mod_base = OTHER; note = 2'-O-methyladenosine-3'-phosphate
  modified_base 9: mod_base = OTHER; note = 2'-deoxy-2'-fluorocytidine-3'-phosphate
  modified_base 10: mod_base = OTHER; note = 2'-deoxy-2'-fluorocytidine-3'-phosphate
  modified_base 11: mod_base = OTHER; note = 2'-deoxy-2'-fluoroadenosine-3'-phosphate
  modified_base 12: mod_base = OTHER; note = 2'-O-methylcytidine-3'-phosphate
  modified_base 13: mod_base = OTHER; note = 2'-O-methyluridine-3'-phosphate
  modified_base 14: mod_base = OTHER; note = 2'-O-methyladenosine-3'-phosphate
  modified_base 15: mod_base = OTHER; note = 2'-O-methylcytidine-3'-phosphate
  modified_base 16: mod_base = OTHER; note = 2'-O-methyluridine-3'-phosphate
  modified_base 17: mod_base = OTHER; note = 2'-O-methylguanosine-3'-phosphate
  modified_base 18: mod_base = OTHER; note = 2'-O-methylcytidine-3'-phosphate
  modified_base 19: mod_base = OTHER; note = 2'-O-methyladenosine-3'-phosphate
  modified_base 20: mod_base = OTHER; note = 2'-O-methylcytidine-3'-phosphate
  modified_base 21: mod_base = OTHER; note = 2'-O-methyluridine-3'-phosphate ((2S,4R)-1-[29-[[2-(acetylamino)-2-deoxy-beta-D-galactopyra nosyl]oxy]-14,14-bis[[3-[[3-[[5-[[2-(acetylamino)-2-deoxy-b eta-D-galactopyranosyl]oxy]-1-oxopentyl]amino]propyl]amino] -3-oxopropoxy]methyl]-1,12,19,25-tetraoxo-16-oxa-13,20,24-t riazanonacos-1-yl]-4-hydroxy-2-pyrrolidinyl)methyl ester
ctggacaaccactactgcact

SEQ ID NO: 952 - RNA, 21 nt, synthetic construct
  source 1..21: mol_type = other RNA
  modified_base 1: mod_base = OTHER; note = 2'-O-methylcytidine-3'-phosphorothioate
  modified_base 2: mod_base = OTHER; note = 2'-O-methylcytidine-3'-phosphorothioate
  modified_base 3: mod_base = OTHER; note = 2'-O-methyluridine-3'-phosphate
  modified_base 4: mod_base = OTHER; note = 2'-O-methylcytidine-3'-phosphate
  modified_base 5: mod_base = OTHER; note = 2'-O-methyladenosine-3'-phosphate
  modified_base 6: mod_base = OTHER; note = 2'-O-methylguanosine-3'-phosphate
  modified_base 7: mod_base = OTHER; note = 2'-deoxy-2'-fluorocytidine-3'-phosphate
  modified_base 8: mod_base = OTHER; note = 2'-O-methyladenosine-3'-phosphate
  modified_base 9: mod_base = OTHER; note = 2'-deoxy-2'-fluorouridine-3'-phosphate
  modified_base 10: mod_base = OTHER; note = 2'-deoxy-2'-fluorocytidine-3'-phosphate
  modified_base 11: mod_base = OTHER; note = 2'-deoxy-2'-fluorocytidine-3'-phosphate
  modified_base 12: mod_base = OTHER; note = 2'-O-methyladenosine-3'-phosphate
  modified_base 13: mod_base = OTHER; note = 2'-O-methylcytidine-3'-phosphate
  modified_base 14: mod_base = OTHER; note = 2'-O-methyluridine-3'-phosphate
  modified_base 15: mod_base = OTHER; note = 2'-O-methyladenosine-3'-phosphate
  modified_base 16: mod_base = OTHER; note = 2'-O-methylcytidine-3'-phosphate
  modified_base 17: mod_base = OTHER; note = 2'-O-methyladenosine-3'-phosphate
  modified_base 18: mod_base = OTHER; note = 2'-O-methyladenosine-3'-phosphate
  modified_base 19: mod_base = OTHER; note = 2'-O-methylguanosine-3'-phosphate
  modified_base 20: mod_base = OTHER; note = 2'-O-methyluridine-3'-phosphate
  modified_base 21: mod_base = OTHER; note = 2'-O-methyluridine-3'-phosphate ((2S,4R)-1-[29-[[2-(acetylamino)-2-deoxy-beta-D-galactopyra nosyl]oxy]-14,14-bis[[3-[[3-[[5-[[2-(acetylamino)-2-deoxy-b eta-D-galactopyranosyl]oxy]-1-oxopentyl]amino]propyl]amino] -3-oxopropoxy]methyl]-1,12,19,25-tetraoxo-16-oxa-13,20,24-t riazanonacos-1-yl]-4-hydroxy-2-pyrrolidinyl)methyl ester
cctcagcatccactacaagtt

SEQ ID NO: 953 - RNA, 21 nt, synthetic construct
  source 1..21: mol_type = other RNA
  modified_base 1: mod_base = OTHER; note = 2'-O-methylguanosine-3'-phosphorothioate
  modified_base 2: mod_base = OTHER; note = 2'-O-methyluridine-3'-phosphorothioate
  modified_base 3: mod_base = OTHER; note = 2'-O-methylcytidine-3'-phosphate
  modified_base 4: mod_base = OTHER; note = 2'-O-methylcytidine-3'-phosphate
  modified_base 5: mod_base = OTHER; note = 2'-O-methyluridine-3'-phosphate
  modified_base 6: mod_base = OTHER; note = 2'-O-methylcytidine-3'-phosphate
  modified_base 7: mod_base = OTHER; note = 2'-deoxy-2'-fluoroadenosine-3'-phosphate
  modified_base 8: mod_base = OTHER; note = 2'-O-methylcytidine-3'-phosphate
  modified_base 9: mod_base = OTHER; note = 2'-deoxy-2'-fluorouridine-3'-phosphate
  modified_base 10: mod_base = OTHER; note = 2'-deoxy-2'-fluoroguanosine-3'-phosphate
  modified_base 11: mod_base = OTHER; note = 2'-deoxy-2'-fluorouridine-3'-phosphate
  modified_base 12: mod_base = OTHER; note = 2'-O-methylcytidine-3'-phosphate
  modified_base 13: mod_base = OTHER; note = 2'-O-methyladenosine-3'-phosphate
  modified_base 14: mod_base = OTHER; note = 2'-O-methylcytidine-3'-phosphate
  modified_base 15: mod_base = OTHER; note = 2'-O-methylcytidine-3'-phosphate
  modified_base 16: mod_base = OTHER; note = 2'-O-methyladenosine-3'-phosphate
  modified_base 17: mod_base = OTHER; note = 2'-O-methyluridine-3'-phosphate
  modified_base 18: mod_base = OTHER; note = 2'-O-methylguanosine-3'-phosphate
  modified_base 19: mod_base = OTHER; note = 2'-O-methylguanosine-3'-phosphate
  modified_base 20: mod_base = OTHER; note = 2'-O-methyluridine-3'-phosphate
  modified_base 21: mod_base = OTHER; note = 2'-O-methyluridine-3'-phosphate ((2S,4R)-1-[29-[[2-(acetylamino)-2-deoxy-beta-D-galactopyra nosyl]oxy]-14,14-bis[[3-[[3-[[5-[[2-(acetylamino)-2-deoxy-b eta-D-galactopyranosyl]oxy]-1-oxopentyl]amino]propyl]amino] -3-oxopropoxy]methyl]-1,12,19,25-tetraoxo-16-oxa-13,20,24-t riazanonacos-1-yl]-4-hydroxy-2-pyrrolidinyl)methyl ester
gtcctcactgtcaccatggtt

SEQ ID NO: 954 - RNA, 21 nt, synthetic construct
  source 1..21: mol_type = other RNA
  modified_base 1: mod_base = OTHER; note = 2'-O-methyladenosine-3'-phosphorothioate
  modified_base 2: mod_base = OTHER; note = 2'-O-methyluridine-3'-phosphorothioate
  modified_base 3: mod_base = OTHER; note = 2'-O-methylcytidine-3'-phosphate
  modified_base 4: mod_base = OTHER; note = 2'-O-methylcytidine-3'-phosphate
  modified_base 5: mod_base = OTHER; note = 2'-O-methyluridine-3'-phosphate
  modified_base 6: mod_base = OTHER; note = 2'-O-methylguanosine-3'-phosphate
  modified_base 7: mod_base = OTHER; note = 2'-deoxy-2'-fluorouridine-3'-phosphate
  modified_base 8: mod_base = OTHER; note = 2'-O-methyluridine-3'-phosphate
  modified_base 9: mod_base = OTHER; note = 2'-deoxy-2'-fluorouridine-3'-phosphate
  modified_base 10: mod_base = OTHER; note = 2'-deoxy-2'-fluoroguanosine-3'-phosphate
  modified_base 11: mod_base = OTHER; note = 2'-deoxy-2'-fluoroadenosine-3'-phosphate
  modified_base 12: mod_base = OTHER; note = 2'-O-methylcytidine-3'-phosphate
  modified_base 13: mod_base = OTHER; note = 2'-O-methylcytidine-3'-phosphate
  modified_base 14: mod_base = OTHER; note = 2'-O-methyladenosine-3'-phosphate
  modified_base 15: mod_base = OTHER; note = 2'-O-methyladenosine-3'-phosphate
  modified_base 16: mod_base = OTHER; note = 2'-O-methyladenosine-3'-phosphate
  modified_base 17: mod_base = OTHER; note = 2'-O-methyluridine-3'-phosphate
  modified_base 18: mod_base = OTHER; note = 2'-O-methyluridine-3'-phosphate
  modified_base 19: mod_base = OTHER; note = 2'-O-methylcytidine-3'-phosphate
  modified_base 20: mod_base = OTHER; note = 2'-O-methylcytidine-3'-phosphate
  modified_base 21: mod_base = OTHER; note = 2'-O-methyluridine-3'-phosphate ((2S,4R)-1-[29-[[2-(acetylamino)-2-deoxy-beta-D-galactopyra nosyl]oxy]-14,14-bis[[3-[[3-[[5-[[2-(acetylamino)-2-deoxy-b eta-D-galactopyranosyl]oxy]-1-oxopentyl]amino]propyl]amino] -3-oxopropoxy]methyl]-1,12,19,25-tetraoxo-16-oxa-13,20,24-t riazanonacos-1-yl]-4-hydroxy-2-pyrrolidinyl)methyl ester
atcctgtttgaccaaattcct

SEQ ID NO: 955 - RNA, 21 nt, synthetic construct
  source 1..21: mol_type = other RNA
  modified_base 1: mod_base = OTHER; note = 2'-O-methyladenosine-3'-phosphorothioate
  modified_base 2: mod_base = OTHER; note = 2'-O-methylguanosine-3'-phosphorothioate
  modified_base 3: mod_base = OTHER; note = 2'-O-methylcytidine-3'-phosphate
  modified_base 4: mod_base = OTHER; note = 2'-O-methylguanosine-3'-phosphate
  modified_base 5: mod_base = OTHER; note = 2'-O-methylguanosine-3'-phosphate
  modified_base 6: mod_base = OTHER; note = 2'-O-methyluridine-3'-phosphate
  modified_base 7: mod_base = OTHER; note = 2'-deoxy-2'-fluorouridine-3'-phosphate
  modified_base 8: mod_base = OTHER; note = 2'-O-methyluridine-3'-phosphate
  modified_base 9: mod_base = OTHER; note = 2'-deoxy-2'-fluorocytidine-3'-phosphate
  modified_base 10: mod_base = OTHER; note = 2'-deoxy-2'-fluoroadenosine-3'-phosphate
  modified_base 11: mod_base = OTHER; note = 2'-deoxy-2'-fluoroguanosine-3'-phosphate
  modified_base 12: mod_base = OTHER; note = 2'-O-methylcytidine-3'-phosphate
  modified_base 13: mod_base = OTHER; note = 2'-O-methyladenosine-3'-phosphate
  modified_base 14: mod_base = OTHER; note = 2'-O-methyladenosine-3'-phosphate
  modified_base 15: mod_base = OTHER; note = 2'-O-methylguanosine-3'-phosphate
  modified_base 16: mod_base = OTHER; note = 2'-O-methyladenosine-3'-phosphate
  modified_base 17: mod_base = OTHER; note = 2'-O-methyladenosine-3'-phosphate
  modified_base 18: mod_base = OTHER; note = 2'-O-methylcytidine-3'-phosphate
  modified_base 19: mod_base = OTHER; note = 2'-O-methylguanosine-3'-phosphate
  modified_base 20: mod_base = OTHER; note = 2'-O-methylguanosine-3'-phosphate
  modified_base 21: mod_base = OTHER; note = 2'-O-methyluridine-3'-phosphate ((2S,4R)-1-[29-[[2-(acetylamino)-2-deoxy-beta-D-galactopyra nosyl]oxy]-14,14-bis[[3-[[3-[[5-[[2-(acetylamino)-2-deoxy-b eta-D-galactopyranosyl]oxy]-1-oxopentyl]amino]propyl]amino] -3-oxopropoxy]methyl]-1,12,19,25-tetraoxo-16-oxa-13,20,24-t riazanonacos-1-yl]-4-hydroxy-2-pyrrolidinyl)methyl ester
agcggtttcagcaagaacggt

SEQ ID NO: 956 - RNA, 21 nt, synthetic construct
  source 1..21: mol_type = other RNA
  modified_base 1: mod_base = OTHER; note = 2'-O-methyladenosine-3'-phosphorothioate
  modified_base 2: mod_base = OTHER; note = 2'-O-methyluridine-3'-phosphorothioate
  modified_base 3: mod_base = OTHER; note = 2'-O-methylguanosine-3'-phosphate
  modified_base 4: mod_base = OTHER; note = 2'-O-methylcytidine-3'-phosphate
  modified_base 5: mod_base = OTHER; note = 2'-O-methylguanosine-3'-phosphate
  modified_base 6: mod_base = OTHER; note = 2'-O-methyluridine-3'-phosphate
  modified_base 7: mod_base = OTHER; note = 2'-deoxy-2'-fluoroguanosine-3'-phosphate
  modified_base 8: mod_base = OTHER; note = 2'-O-methyluridine-3'-phosphate
  modified_base 9: mod_base = OTHER; note = 2'-deoxy-2'-fluoroguanosine-3'-phosphate
  modified_base 10: mod_base = OTHER; note = 2'-deoxy-2'-fluoroguanosine-3'-phosphate
  modified_base 11: mod_base = OTHER; note = 2'-deoxy-2'-fluoroadenosine-3'-phosphate
  modified_base 12: mod_base = OTHER; note = 2'-O-methylcytidine-3'-phosphate
  modified_base 13: mod_base = OTHER; note = 2'-O-methyladenosine-3'-phosphate
  modified_base 14: mod_base = OTHER; note = 2'-O-methyluridine-3'-phosphate
  modified_base 15: mod_base = OTHER; note = 2'-O-methyluridine-3'-phosphate
  modified_base 16: mod_base = OTHER; note = 2'-O-methylcytidine-3'-phosphate
  modified_base 17: mod_base = OTHER; note = 2'-O-methylcytidine-3'-phosphate
  modified_base 18: mod_base = OTHER; note = 2'-O-methyluridine-3'-phosphate
  modified_base 19: mod_base = OTHER; note = 2'-O-methylguanosine-3'-phosphate
  modified_base 20: mod_base = OTHER; note = 2'-O-methylcytidine-3'-phosphate
  modified_base 21: mod_base = OTHER; note = 2'-O-methyluridine-3'-phosphate ((2S,4R)-1-[29-[[2-(acetylamino)-2-deoxy-beta-D-galactopyra nosyl]oxy]-14,14-bis[[3-[[3-[[5-[[2-(acetylamino)-2-deoxy-b eta-D-galactopyranosyl]oxy]-1-oxopentyl]amino]propyl]amino] -3-oxopropoxy]methyl]-1,12,19,25-tetraoxo-16-oxa-13,20,24-t riazanonacos-1-yl]-4-hydroxy-2-pyrrolidinyl)methyl ester
atgcgtgtggacattcctgct

SEQ ID NO: 957 - RNA, 21 nt, synthetic construct
  source 1..21: mol_type = other RNA
  modified_base 1: mod_base = OTHER; note = 2'-O-methylguanosine-3'-phosphorothioate
  modified_base 2: mod_base = OTHER; note = 2'-O-methyluridine-3'-phosphorothioate
  modified_base 3: mod_base = OTHER; note = 2'-O-methylguanosine-3'-phosphate
  modified_base 4: mod_base = OTHER; note = 2'-O-methyladenosine-3'-phosphate
  modified_base 5: mod_base = OTHER; note = 2'-O-methylguanosine-3'-phosphate
  modified_base 6: mod_base = OTHER; note = 2'-O-methylcytidine-3'-phosphate
  modified_base 7: mod_base = OTHER; note = 2'-deoxy-2'-fluoroguanosine-3'-phosphate
  modified_base 8: mod_base = OTHER; note = 2'-O-methyluridine-3'-phosphate
  modified_base 9: mod_base = OTHER; note = 2'-deoxy-2'-fluorocytidine-3'-phosphate
  modified_base 10: mod_base = OTHER; note = 2'-deoxy-2'-fluoroadenosine-3'-phosphate
  modified_base 11: mod_base = OTHER; note = 2'-deoxy-2'-fluorocytidine-3'-phosphate
  modified_base 12: mod_base = OTHER; note = 2'-O-methylcytidine-3'-phosphate
  modified_base 13: mod_base = OTHER; note = 2'-O-methyluridine-3'-phosphate
  modified_base 14: mod_base = OTHER; note = 2'-O-methyluridine-3'-phosphate
  modified_base 15: mod_base = OTHER; note = 2'-O-methylcytidine-3'-phosphate
  modified_base 16: mod_base = OTHER; note = 2'-O-methyladenosine-3'-phosphate
  modified_base 17: mod_base = OTHER; note = 2'-O-methyladenosine-3'-phosphate
  modified_base 18: mod_base = OTHER; note = 2'-O-methyluridine-3'-phosphate
  modified_base 19: mod_base = OTHER; note = 2'-O-methylguanosine-3'-phosphate
  modified_base 20: mod_base = OTHER; note = 2'-O-methylguanosine-3'-phosphate
  modified_base 21: mod_base = OTHER; note = 2'-O-methyluridine-3'-phosphate ((2S,4R)-1-[29-[[2-(acetylamino)-2-deoxy-beta-D-galactopyra nosyl]oxy]-14,14-bis[[3-[[3-[[5-[[2-(acetylamino)-2-deoxy-b eta-D-galactopyranosyl]oxy]-1-oxopentyl]amino]propyl]amino] -3-oxopropoxy]methyl]-1,12,19,25-tetraoxo-16-oxa-13,20,24-t riazanonacos-1-yl]-4-hydroxy-2-pyrrolidinyl)methyl ester
gtgagcgtcaccttcaatggt

SEQ ID NO: 958 - RNA, 21 nt, synthetic construct
  source 1..21: mol_type = other RNA
  modified_base 1: mod_base = OTHER; note = 2'-O-methyladenosine-3'-phosphorothioate
  modified_base 2: mod_base = OTHER; note = 2'-O-methylguanosine-3'-phosphorothioate
  modified_base 3: mod_base = OTHER; note = 2'-O-methylcytidine-3'-phosphate
  modified_base 4: mod_base = OTHER; note = 2'-O-methylcytidine-3'-phosphate
  modified_base 5: mod_base = OTHER; note = 2'-O-methyluridine-3'-phosphate
  modified_base 6: mod_base = OTHER; note = 2'-O-methylcytidine-3'-phosphate
  modified_base 7: mod_base = OTHER; note = 2'-deoxy-2'-fluorouridine-3'-phosphate
  modified_base 8: mod_base = OTHER; note = 2'-O-methyluridine-3'-phosphate
  modified_base 9: mod_base = OTHER; note = 2'-deoxy-2'-fluorocytidine-3'-phosphate
  modified_base 10: mod_base = OTHER; note = 2'-deoxy-2'-fluorocytidine-3'-phosphate
  modified_base 11: mod_base = OTHER; note = 2'-deoxy-2'-fluoroadenosine-3'-phosphate
  modified_base 12: mod_base = OTHER; note = 2'-O-methylcytidine-3'-phosphate
  modified_base 13: mod_base = OTHER; note = 2'-O-methyladenosine-3'-phosphate
  modified_base 14: mod_base = OTHER; note = 2'-O-methyladenosine-3'-phosphate
  modified_base 15: mod_base = OTHER; note = 2'-O-methylcytidine-3'-phosphate
  modified_base 16: mod_base = OTHER; note = 2'-O-methyladenosine-3'-phosphate
  modified_base 17: mod_base = OTHER; note = 2'-O-methyladenosine-3'-phosphate
  modified_base 18: mod_base = OTHER; note = 2'-O-methylcytidine-3'-phosphate
  modified_base 19: mod_base = OTHER; note = 2'-O-methyladenosine-3'-phosphate
  modified_base 20: mod_base = OTHER; note = 2'-O-methylcytidine-3'-phosphate
  modified_base 21: mod_base = OTHER; note = 2'-O-methyluridine-3'-phosphate ((2S,4R)-1-[29-[[2-(acetylamino)-2-deoxy-beta-D-galactopyra nosyl]oxy]-14,14-bis[[3-[[3-[[5-[[2-(acetylamino)-2-deoxy-b eta-D-galactopyranosyl]oxy]-1-oxopentyl]amino]propyl]amino] -3-oxopropoxy]methyl]-1,12,19,25-tetraoxo-16-oxa-13,20,24-t riazanonacos-1-yl]-4-hydroxy-2-pyrrolidinyl)methyl ester
agcctcttccacaacaacact

SEQ ID NO: 959 - RNA, 21 nt, synthetic construct
  source 1..21: mol_type = other RNA
  modified_base 1: mod_base = OTHER; note = 2'-O-methylcytidine-3'-phosphorothioate
  modified_base 2: mod_base = OTHER; note = 2'-O-methyladenosine-3'-phosphorothioate
  modified_base 3: mod_base = OTHER; note = 2'-O-methylcytidine-3'-phosphate
  modified_base 4: mod_base = OTHER; note = 2'-O-methylcytidine-3'-phosphate
  modified_base 5: mod_base = OTHER; note = 2'-O-methyluridine-3'-phosphate
  modified_base 6: mod_base = OTHER; note = 2'-O-methylguanosine-3'-phosphate
  modified_base 7: mod_base = OTHER; note = 2'-deoxy-2'-fluorocytidine-3'-phosphate
  modified_base 8: mod_base = OTHER; note = 2'-O-methyladenosine-3'-phosphate
  modified_base 9: mod_base = OTHER; note = 2'-deoxy-2'-fluorocytidine-3'-phosphate
  modified_base 10: mod_base = OTHER; note = 2'-deoxy-2'-fluorocytidine-3'-phosphate
  modified_base 11: mod_base = OTHER; note = 2'-deoxy-2'-fluoroadenosine-3'-phosphate
  modified_base 12: mod_base = OTHER; note = 2'-O-methyladenosine-3'-phosphate
  modified_base 13: mod_base = OTHER; note = 2'-O-methylcytidine-3'-phosphate
  modified_base 14: mod_base = OTHER; note = 2'-O-methyladenosine-3'-phosphate
  modified_base 15: mod_base = OTHER; note = 2'-O-methyladenosine-3'-phosphate
  modified_base 16: mod_base = OTHER; note = 2'-O-methylcytidine-3'-phosphate
  modified_base 17: mod_base = OTHER; note = 2'-O-methylcytidine-3'-phosphate
  modified_base 18: mod_base = OTHER; note = 2'-O-methyladenosine-3'-phosphate
  modified_base 19: mod_base = OTHER; note = 2'-O-methylguanosine-3'-phosphate
  modified_base 20: mod_base = OTHER; note = 2'-O-methyladenosine-3'-phosphate
  modified_base 21: mod_base = OTHER; note = 2'-O-methyluridine-3'-phosphate ((2S,4R)-1-[29-[[2-(acetylamino)-2-deoxy-beta-D-galactopyra nosyl]oxy]-14,14-bis[[3-[[3-[[5-[[2-(acetylamino)-2-deoxy-b eta-D-galactopyranosyl]oxy]-1-oxopentyl]amino]propyl]amino] -3-oxopropoxy]methyl]-1,12,19,25-tetraoxo-16-oxa-13,20,24-t riazanonacos-1-yl]-4-hydroxy-2-pyrrolidinyl)methyl ester
cacctgcaccaacaaccagat

SEQ ID NO: 960 - RNA, 21 nt, synthetic construct
  source 1..21: mol_type = other RNA
  modified_base 1: mod_base = OTHER; note = 2'-O-methyluridine-3'-phosphorothioate
  modified_base 2: mod_base = OTHER; note = 2'-O-methylguanosine-3'-phosphorothioate
  modified_base 3: mod_base = OTHER; note = 2'-O-methyluridine-3'-phosphate
  modified_base 4: mod_base = OTHER; note = 2'-O-methylcytidine-3'-phosphate
  modified_base 5: mod_base = OTHER; note = 2'-O-methyluridine-3'-phosphate
  modified_base 6: mod_base = OTHER; note = 2'-O-methylcytidine-3'-phosphate
  modified_base 7: mod_base = OTHER; note = 2'-deoxy-2'-fluorocytidine-3'-phosphate
  modified_base 8: mod_base = OTHER; note = 2'-O-methyladenosine-3'-phosphate
  modified_base 9: mod_base = OTHER; note = 2'-deoxy-2'-fluoroguanosine-3'-phosphate
  modified_base 10: mod_base = OTHER; note = 2'-deoxy-2'-fluorocytidine-3'-phosphate
  modified_base 11: mod_base = OTHER; note = 2'-deoxy-2'-fluoroguanosine-3'-phosphate
  modified_base 12: mod_base = OTHER; note = 2'-O-methylguanosine-3'-phosphate
  modified_base 13: mod_base = OTHER; note = 2'-O-methylguanosine-3'-phosphate
  modified_base 14: mod_base = OTHER; note = 2'-O-methyladenosine-3'-phosphate
  modified_base 15: mod_base = OTHER; note = 2'-O-methylcytidine-3'-phosphate
  modified_base 16: mod_base = OTHER; note = 2'-O-methylguanosine-3'-phosphate
  modified_base 17: mod_base = OTHER; note = 2'-O-methylguanosine-3'-phosphate
  modified_base 18: mod_base = OTHER; note = 2'-O-methyladenosine-3'-phosphate
  modified_base 19: mod_base = OTHER; note = 2'-O-methyladenosine-3'-phosphate
  modified_base 20: mod_base = OTHER; note = 2'-O-methylcytidine-3'-phosphate
  modified_base 21: mod_base = OTHER; note = 2'-O-methyluridine-3'-phosphate ((2S,4R)-1-[29-[[2-(acetylamino)-2-deoxy-beta-D-galactopyra nosyl]oxy]-14,14-bis[[3-[[3-[[5-[[2-(acetylamino)-2-deoxy-b eta-D-galactopyranosyl]oxy]-1-oxopentyl]amino]propyl]amino] -3-oxopropoxy]methyl]-1,12,19,25-tetraoxo-16-oxa-13,20,24-t riazanonacos-1-yl]-4-hydroxy-2-pyrrolidinyl)methyl ester
tgtctccagcgggacggaact

SEQ ID NO: 961 - RNA, 21 nt, synthetic construct
  source 1..21: mol_type = other RNA
  modified_base 1: mod_base = OTHER; note = 2'-O-methylcytidine-3'-phosphorothioate
  modified_base 2: mod_base = OTHER; note = 2'-O-methylguanosine-3'-phosphorothioate
  modified_base 3: mod_base = OTHER; note = 2'-O-methylcytidine-3'-phosphate
  modified_base 4: mod_base = OTHER; note = 2'-O-methylcytidine-3'-phosphate
  modified_base 5: mod_base = OTHER; note = 2'-O-methyladenosine-3'-phosphate
  modified_base 6: mod_base = OTHER; note = 2'-O-methylguanosine-3'-phosphate
  modified_base 7: mod_base = OTHER; note = 2'-deoxy-2'-fluorouridine-3'-phosphate
  modified_base 8: mod_base = OTHER; note = 2'-O-methyluridine-3'-phosphate
  modified_base 9: mod_base = OTHER; note = 2'-deoxy-2'-fluoroguanosine-3'-phosphate
  modified_base 10: mod_base = OTHER; note = 2'-deoxy-2'-fluorocytidine-3'-phosphate
  modified_base 11: mod_base = OTHER; note = 2'-deoxy-2'-fluoroadenosine-3'-phosphate
  modified_base 12: mod_base = OTHER; note = 2'-O-methyladenosine-3'-phosphate
  modified_base 13: mod_base = OTHER; note = 2'-O-methylguanosine-3'-phosphate
  modified_base 14: mod_base = OTHER; note = 2'-O-methylguanosine-3'-phosphate
  modified_base 15: mod_base = OTHER; note = 2'-O-methyladenosine-3'-phosphate
  modified_base 16: mod_base = OTHER; note = 2'-O-methylcytidine-3'-phosphate
  modified_base 17: mod_base = OTHER; note = 2'-O-methyladenosine-3'-phosphate
  modified_base 18: mod_base = OTHER; note = 2'-O-methyluridine-3'-phosphate
  modified_base 19: mod_base = OTHER; note = 2'-O-methylguanosine-3'-phosphate
  modified_base 20: mod_base = OTHER; note = 2'-O-methylguanosine-3'-phosphate
  modified_base 21: mod_base = OTHER; note = 2'-O-methyluridine-3'-phosphate ((2S,4R)-1-[29-[[2-(acetylamino)-2-deoxy-beta-D-galactopyra nosyl]oxy]-14,14-bis[[3-[[3-[[5-[[2-(acetylamino)-2-deoxy-b eta-D-galactopyranosyl]oxy]-1-oxopentyl]amino]propyl]amino] -3-oxopropoxy]methyl]-1,12,19,25-tetraoxo-16-oxa-13,20,24-t riazanonacos-1-yl]-4-hydroxy-2-pyrrolidinyl)methyl ester
cgccagttgcaaggacatggt

SEQ ID NO: 962 - RNA, 21 nt, synthetic construct
  source 1..21: mol_type = other RNA
  modified_base 1: mod_base = OTHER; note = 2'-O-methylcytidine-3'-phosphorothioate
  modified_base 2: mod_base = OTHER; note = 2'-O-methylguanosine-3'-phosphorothioate
  modified_base 3: mod_base = OTHER; note = 2'-O-methyladenosine-3'-phosphate
  modified_base 4: mod_base = OTHER; note = 2'-O-methylcytidine-3'-phosphate
  modified_base 5: mod_base = OTHER; note = 2'-O-methyladenosine-3'-phosphate
  modified_base 6: mod_base = OTHER; note = 2'-O-methylguanosine-3'-phosphate
  modified_base 7: mod_base = OTHER; note = 2'-deoxy-2'-fluorocytidine-3'-phosphate
  modified_base 8: mod_base = OTHER; note = 2'-O-methyladenosine-3'-phosphate
  modified_base 9: mod_base = OTHER; note = 2'-deoxy-2'-fluoroguanosine-3'-phosphate
  modified_base 10: mod_base = OTHER; note = 2'-deoxy-2'-fluoroadenosine-3'-phosphate
  modified_base 11: mod_base = OTHER; note = 2'-deoxy-2'-fluoroadenosine-3'-phosphate
  modified_base 12: mod_base = OTHER; note = 2'-O-methyladenosine-3'-phosphate
  modified_base 13: mod_base = OTHER; note = 2'-O-methylguanosine-3'-phosphate
  modified_base 14: mod_base = OTHER; note = 2'-O-methylguanosine-3'-phosphate
  modified_base 15: mod_base = OTHER; note = 2'-O-methyladenosine-3'-phosphate
  modified_base 16: mod_base = OTHER; note = 2'-O-methyluridine-3'-phosphate
  modified_base 17: mod_base = OTHER; note = 2'-O-methylguanosine-3'-phosphate
  modified_base 18: mod_base = OTHER; note = 2'-O-methylguanosine-3'-phosphate
  modified_base 19: mod_base = OTHER; note = 2'-O-methylcytidine-3'-phosphate
  modified_base 20: mod_base = OTHER; note = 2'-O-methyluridine-3'-phosphate
  modified_base 21: mod_base = OTHER; note = 2'-O-methyluridine-3'-phosphate ((2S,4R)-1-[29-[[2-(acetylamino)-2-deoxy-beta-D-galactopyra nosyl]oxy]-14,14-bis[[3-[[3-[[5-[[2-(acetylamino)-2-deoxy-b eta-D-galactopyranosyl]oxy]-1-oxopentyl]amino]propyl]amino] -3-oxopropoxy]methyl]-1,12,19,25-tetraoxo-16-oxa-13,20,24-t riazanonacos-1-yl]-4-hydroxy-2-pyrrolidinyl)methyl ester
cgacagcagaaaggatggctt

SEQ ID NO: 963 - RNA, 21 nt, synthetic construct
  source 1..21: mol_type = other RNA
  modified_base 1: mod_base = OTHER; note = 2'-O-methylcytidine-3'-phosphorothioate
  modified_base 2: mod_base = OTHER; note = 2'-O-methylcytidine-3'-phosphorothioate
  modified_base 3: mod_base = OTHER; note = 2'-O-methylguanosine-3'-phosphate
  modified_base 4: mod_base = OTHER; note = 2'-O-methylcytidine-3'-phosphate
  modified_base 5: mod_base = OTHER; note = 2'-O-methyluridine-3'-phosphate
  modified_base 6: mod_base = OTHER; note = 2'-O-methylcytidine-3'-phosphate
  modified_base 7: mod_base = OTHER; note = 2'-deoxy-2'-fluorouridine-3'-phosphate
  modified_base 8: mod_base = OTHER; note = 2'-O-methylguanosine-3'-phosphate
  modified_base 9: mod_base = OTHER; note = 2'-deoxy-2'-fluorouridine-3'-phosphate
  modified_base 10: mod_base = OTHER; note = 2'-deoxy-2'-fluoroguanosine-3'-phosphate
  modified_base 11: mod_base = OTHER; note = 2'-deoxy-2'-fluoroadenosine-3'-phosphate
  modified_base 12: mod_base = OTHER; note = 2'-O-methyluridine-3'-phosphate
  modified_base 13: mod_base = OTHER; note = 2'-O-methylcytidine-3'-phosphate
  modified_base 14: mod_base = OTHER; note = 2'-O-methyluridine-3'-phosphate
  modified_base 15: mod_base = OTHER; note = 2'-O-methylguanosine-3'-phosphate
  modified_base 16: mod_base = OTHER; note = 2'-O-methyladenosine-3'-phosphate
  modified_base 17: mod_base = OTHER; note = 2'-O-methyluridine-3'-phosphate
  modified_base 18: mod_base = OTHER; note = 2'-O-methylguanosine-3'-phosphate
  modified_base 19: mod_base = OTHER; note = 2'-O-methylcytidine-3'-phosphate
  modified_base 20: mod_base = OTHER; note = 2'-O-methyluridine-3'-phosphate
  modified_base 21: mod_base = OTHER; note = 2'-O-methyluridine-3'-phosphate ((2S,4R)-1-[29-[[2-(acetylamino)-2-deoxy-beta-D-galactopyra nosyl]oxy]-14,14-bis[[3-[[3-[[5-[[2-(acetylamino)-2-deoxy-b eta-D-galactopyranosyl]oxy]-1-oxopentyl]amino]propyl]amino] -3-oxopropoxy]methyl]-1,12,19,25-tetraoxo-16-oxa-13,20,24-t riazanonacos-1-yl]-4-hydroxy-2-pyrrolidinyl)methyl ester
ccgctctgtgatctgatgctt

SEQ ID NO: 964 - RNA, 21 nt, synthetic construct
  source 1..21: mol_type = other RNA
  modified_base 1: mod_base = OTHER; note = 2'-O-methylcytidine-3'-phosphorothioate
  modified_base 2: mod_base = OTHER; note = 2'-O-methyladenosine-3'-phosphorothioate
  modified_base 3: mod_base = OTHER; note = 2'-O-methylguanosine-3'-phosphate
  modified_base 4: mod_base = OTHER; note = 2'-O-methylguanosine-3'-phosphate
  modified_base 5: mod_base = OTHER; note = 2'-O-methyluridine-3'-phosphate
  modified_base 6: mod_base = OTHER; note = 2'-O-methylcytidine-3'-phosphate
  modified_base 7: mod_base = OTHER; note = 2'-deoxy-2'-fluorouridine-3'-phosphate
  modified_base 8: mod_base = OTHER; note = 2'-O-methyluridine-3'-phosphate
  modified_base 9: mod_base = OTHER; note = 2'-deoxy-2'-fluorouridine-3'-phosphate
  modified_base 10: mod_base = OTHER; note = 2'-deoxy-2'-fluoroguanosine-3'-phosphate
  modified_base 11: mod_base = OTHER; note = 2'-deoxy-2'-fluorocytidine-3'-phosphate
  modified_base 12: mod_base = OTHER; note = 2'-O-methyluridine-3'-phosphate
  modified_base 13: mod_base = OTHER; note = 2'-O-methylguanosine-3'-phosphate
  modified_base 14: mod_base = OTHER; note = 2'-O-methyladenosine-3'-phosphate
  modified_base 15: mod_base = OTHER; note = 2'-O-methylguanosine-3'-phosphate
  modified_base 16: mod_base = OTHER; note = 2'-O-methyluridine-3'-phosphate
  modified_base 17: mod_base = OTHER; note = 2'-O-methylguanosine-3'-phosphate
  modified_base 18: mod_base = OTHER; note = 2'-O-methylcytidine-3'-phosphate
  modified_base 19: mod_base = OTHER; note = 2'-O-methylcytidine-3'-phosphate
  modified_base 20: mod_base = OTHER; note = 2'-O-methyladenosine-3'-phosphate
  modified_base 21: mod_base = OTHER; note = 2'-O-methyluridine-3'-phosphate ((2S,4R)-1-[29-[[2-(acetylamino)-2-deoxy-beta-D-galactopyra nosyl]oxy]-14,14-bis[[3-[[3-[[5-[[2-(acetylamino)-2-deoxy-b eta-D-galactopyranosyl]oxy]-1-oxopentyl]amino]propyl]amino] -3-oxopropoxy]methyl]-1,12,19,25-tetraoxo-16-oxa-13,20,24-t riazanonacos-1-yl]-4-hydroxy-2-pyrrolidinyl)methyl ester
caggtctttgctgagtgccat

SEQ ID NO: 965 - RNA, 21 nt, synthetic construct
  source 1..21: mol_type = other RNA
  modified_base 1: mod_base = OTHER; note = 2'-O-methylcytidine-3'-phosphorothioate
  modified_base 2: mod_base = OTHER; note = 2'-O-methylguanosine-3'-phosphorothioate
  modified_base 3: mod_base = OTHER; note = 2'-O-methylcytidine-3'-phosphate
  modified_base 4: mod_base = OTHER; note = 2'-O-methylcytidine-3'-phosphate
  modified_base 5: mod_base = OTHER; note = 2'-O-methyluridine-3'-phosphate
  modified_base 6: mod_base = OTHER; note = 2'-O-methylguanosine-3'-phosphate
  modified_base 7: mod_base = OTHER; note = 2'-deoxy-2'-fluorocytidine-3'-phosphate
  modified_base 8: mod_base = OTHER; note = 2'-O-methyladenosine-3'-phosphate
  modified_base 9: mod_base = OTHER; note = 2'-deoxy-2'-fluorouridine-3'-phosphate
  modified_base 10: mod_base = OTHER; note = 2'-deoxy-2'-fluorocytidine-3'-phosphate
  modified_base 11: mod_base = OTHER; note = 2'-deoxy-2'-fluoroadenosine-3'-phosphate
  modified_base 12: mod_base = OTHER; note = 2'-O-methylguanosine-3'-phosphate
  modified_base 13: mod_base = OTHER; note = 2'-O-methylcytidine-3'-phosphate
  modified_base 14: mod_base = OTHER; note = 2'-O-methylguanosine-3'-phosphate
  modified_base 15: mod_base = OTHER; note = 2'-O-methyladenosine-3'-phosphate
  modified_base 16: mod_base = OTHER; note = 2'-O-methylcytidine-3'-phosphate
  modified_base 17: mod_base = OTHER; note = 2'-O-methylcytidine-3'-phosphate
  modified_base 18: mod_base = OTHER; note = 2'-O-methyladenosine-3'-phosphate
  modified_base 19: mod_base = OTHER; note = 2'-O-methylcytidine-3'-phosphate
  modified_base 20: mod_base = OTHER; note = 2'-O-methyluridine-3'-phosphate
  modified_base 21: mod_base = OTHER; note = 2'-O-methyluridine-3'-phosphate ((2S,4R)-1-[29-[[2-(acetylamino)-2-deoxy-beta-D-galactopyra nosyl]oxy]-14,14-bis[[3-[[3-[[5-[[2-(acetylamino)-2-deoxy-b eta-D-galactopyranosyl]oxy]-1-oxopentyl]amino]propyl]amino] -3-oxopropoxy]methyl]-1,12,19,25-tetraoxo-16-oxa-13,20,24-t riazanonacos-1-yl]-4-hydroxy-2-pyrrolidinyl)methyl ester
cgcctgcatcagcgaccactt

SEQ ID NO: 966 - RNA, 21 nt, synthetic construct
  source 1..21: mol_type = other RNA
  modified_base 1: mod_base = OTHER; note = 2'-O-methylguanosine-3'-phosphorothioate
  modified_base 2: mod_base = OTHER; note = 2'-O-methyladenosine-3'-phosphorothioate
  modified_base 3: mod_base = OTHER; note = 2'-O-methylguanosine-3'-phosphate
  modified_base 4: mod_base = OTHER; note = 2'-O-methylguanosine-3'-phosphate
  modified_base 5: mod_base = OTHER; note = 2'-O-methylcytidine-3'-phosphate
  modified_base 6: mod_base = OTHER; note = 2'-O-methyluridine-3'-phosphate
  modified_base 7: mod_base = OTHER; note = 2'-deoxy-2'-fluorouridine-3'-phosphate
  modified_base 8: mod_base = OTHER; note = 2'-O-methyladenosine-3'-phosphate
  modified_base 9: mod_base = OTHER; note = 2'-deoxy-2'-fluorocytidine-3'-phosphate
  modified_base 10: mod_base = OTHER; note = 2'-deoxy-2'-fluoroguanosine-3'-phosphate
  modified_base 11: mod_base = OTHER; note = 2'-deoxy-2'-fluorocytidine-3'-phosphate
  modified_base 12: mod_base = OTHER; note = 2'-O-methyladenosine-3'-phosphate
  modified_base 13: mod_base = OTHER; note = 2'-O-methylguanosine-3'-phosphate
  modified_base 14: mod_base = OTHER; note = 2'-O-methyladenosine-3'-phosphate
  modified_base 15: mod_base = OTHER; note = 2'-O-methylguanosine-3'-phosphate
  modified_base 16: mod_base = OTHER; note = 2'-O-methylcytidine-3'-phosphate
  modified_base 17: mod_base = OTHER; note = 2'-O-methyluridine-3'-phosphate
  modified_base 18: mod_base = OTHER; note = 2'-O-methylcytidine-3'-phosphate
  modified_base 19: mod_base = OTHER; note = 2'-O-methyluridine-3'-phosphate
  modified_base 20: mod_base = OTHER; note = 2'-O-methylguanosine-3'-phosphate
  modified_base 21: mod_base = OTHER; note = 2'-O-methyluridine-3'-phosphate ((2S,4R)-1-[29-[[2-(acetylamino)-2-deoxy-beta-D-galactopyra nosyl]oxy]-14,14-bis[[3-[[3-[[5-[[2-(acetylamino)-2-deoxy-b eta-D-galactopyranosyl]oxy]-1-oxopentyl]amino]propyl]amino] -3-oxopropoxy]methyl]-1,12,19,25-tetraoxo-16-oxa-13,20,24-t riazanonacos-1-yl]-4-hydroxy-2-pyrrolidinyl)methyl ester
gaggcttacgcagagctctgt

SEQ ID NO: 967 - RNA, 21 nt, synthetic construct
  source 1..21: mol_type = other RNA
  modified_base 1: mod_base = OTHER; note = 2'-O-methyladenosine-3'-phosphorothioate
  modified_base 2: mod_base = OTHER; note = 2'-O-methylguanosine-3'-phosphorothioate
  modified_base 3: mod_base = OTHER; note = 2'-O-methyluridine-3'-phosphate
  modified_base 4: mod_base = OTHER; note = 2'-O-methylguanosine-3'-phosphate
  modified_base 5: mod_base = OTHER; note = 2'-O-methyluridine-3'-phosphate
  modified_base 6: mod_base = OTHER; note = 2'-O-methylguanosine-3'-phosphate
  modified_base 7: mod_base = OTHER; note = 2'-deoxy-2'-fluorocytidine-3'-phosphate
  modified_base 8: mod_base = OTHER; note = 2'-O-methyladenosine-3'-phosphate
  modified_base 9: mod_base = OTHER; note = 2'-deoxy-2'-fluoroguanosine-3'-phosphate
  modified_base 10: mod_base = OTHER; note = 2'-deoxy-2'-fluorouridine-3'-phosphate
  modified_base 11: mod_base = OTHER; note = 2'-deoxy-2'-fluoroguanosine-3'-phosphate
  modified_base 12: mod_base = OTHER; note = 2'-O-methyladenosine-3'-phosphate
  modified_base 13: mod_base = OTHER; note = 2'-O-methylcytidine-3'-phosphate
  modified_base 14: mod_base = OTHER; note = 2'-O-methyluridine-3'-phosphate
  modified_base 15: mod_base = OTHER; note = 2'-O-methylguanosine-3'-phosphate
  modified_base 16: mod_base = OTHER; note = 2'-O-methylguanosine-3'-phosphate
  modified_base 17: mod_base = OTHER; note = 2'-O-methylcytidine-3'-phosphate
  modified_base 18: mod_base = OTHER; note = 2'-O-methylguanosine-3'-phosphate
  modified_base 19: mod_base = OTHER; note = 2'-O-methyladenosine-3'-phosphate
  modified_base 20: mod_base = OTHER; note = 2'-O-methylguanosine-3'-phosphate
  modified_base 21: mod_base = OTHER; note = 2'-O-methyluridine-3'-phosphate ((2S,4R)-1-[29-[[2-(acetylamino)-2-deoxy-beta-D-galactopyra nosyl]oxy]-14,14-bis[[3-[[3-[[5-[[2-(acetylamino)-2-deoxy-b eta-D-galactopyranosyl]oxy]-1-oxopentyl]amino]propyl]amino] -3-oxopropoxy]methyl]-1,12,19,25-tetraoxo-16-oxa-13,20,24-t riazanonacos-1-yl]-4-hydroxy-2-pyrrolidinyl)methyl ester
agtgtgcagtgactggcgagt

SEQ ID NO: 968 - RNA, 21 nt, synthetic construct
  source 1..21: mol_type = other RNA
  modified_base 1: mod_base = OTHER; note = 2'-O-methylcytidine-3'-phosphorothioate
  modified_base 2: mod_base = OTHER; note = 2'-O-methyladenosine-3'-phosphorothioate
  modified_base 3: mod_base = OTHER; note = 2'-O-methylcytidine-3'-phosphate
  modified_base 4: mod_base = OTHER; note = 2'-O-methylcytidine-3'-phosphate
  modified_base 5: mod_base = OTHER; note = 2'-O-methyladenosine-3'-phosphate
  modified_base 6: mod_base = OTHER; note = 2'-O-methyladenosine-3'-phosphate
  modified_base 7: mod_base = OTHER; note = 2'-deoxy-2'-fluoroadenosine-3'-phosphate
  modified_base 8: mod_base = OTHER; note = 2'-O-methylguanosine-3'-phosphate
  modified_base 9: mod_base = OTHER; note = 2'-deoxy-2'-fluorouridine-3'-phosphate
  modified_base 10: mod_base = OTHER; note = 2'-deoxy-2'-fluoroguanosine-3'-phosphate
  modified_base 11: mod_base = OTHER; note = 2'-deoxy-2'-fluorouridine-3'-phosphate
  modified_base 12: mod_base = OTHER; note = 2'-O-methyladenosine-3'-phosphate
  modified_base 13: mod_base = OTHER; note = 2'-O-methylcytidine-3'-phosphate
  modified_base 14: mod_base = OTHER; note = 2'-O-methyladenosine-3'-phosphate
  modified_base 15: mod_base = OTHER; note = 2'-O-methyladenosine-3'-phosphate
  modified_base 16: mod_base = OTHER; note = 2'-O-methylguanosine-3'-phosphate
  modified_base 17: mod_base = OTHER; note = 2'-O-methylcytidine-3'-phosphate
  modified_base 18: mod_base = OTHER; note = 2'-O-methylcytidine-3'-phosphate
  modified_base 19: mod_base = OTHER; note = 2'-O-methyladenosine-3'-phosphate
  modified_base 20: mod_base = OTHER; note = 2'-O-methyluridine-3'-phosphate
  modified_base 21: mod_base = OTHER; note = 2'-O-methyluridine-3'-phosphate ((2S,4R)-1-[29-[[2-(acetylamino)-2-deoxy-beta-D-galactopyra nosyl]oxy]-14,14-bis[[3-[[3-[[5-[[2-(acetylamino)-2-deoxy-b eta-D-galactopyranosyl]oxy]-1-oxopentyl]amino]propyl]amino] -3-oxopropoxy]methyl]-1,12,19,25-tetraoxo-16-oxa-13,20,24-t riazanonacos-1-yl]-4-hydroxy-2-pyrrolidinyl)methyl ester
caccaaagtgtacaagccatt

SEQ ID NO: 969 - RNA, 21 nt, synthetic construct
  source 1..21: mol_type = other RNA
  modified_base 1: mod_base = OTHER; note = 2'-O-methylcytidine-3'-phosphorothioate
  modified_base 2: mod_base = OTHER; note = 2'-O-methyluridine-3'-phosphorothioate
  modified_base 3: mod_base = OTHER; note = 2'-O-methylguanosine-3'-phosphate
  modified_base 4: mod_base = OTHER; note = 2'-O-methylcytidine-3'-phosphate
  modified_base 5: mod_base = OTHER; note = 2'-O-methyladenosine-3'-phosphate
  modified_base 6: mod_base = OTHER; note = 2'-O-methyladenosine-3'-phosphate
  modified_base 7: mod_base = OTHER; note = 2'-deoxy-2'-fluorocytidine-3'-phosphate
  modified_base 8: mod_base = OTHER; note = 2'-O-methyluridine-3'-phosphate
  modified_base 9: mod_base = OTHER; note = 2'-deoxy-2'-fluorocytidine-3'-phosphate
  modified_base 10: mod_base = OTHER; note = 2'-deoxy-2'-fluorouridine-3'-phosphate
  modified_base 11: mod_base = OTHER; note = 2'-deoxy-2'-fluoroadenosine-3'-phosphate
  modified_base 12: mod_base = OTHER; note = 2'-O-methylguanosine-3'-phosphate
  modified_base 13: mod_base = OTHER; note = 2'-O-methylguanosine-3'-phosphate
  modified_base 14: mod_base = OTHER; note = 2'-O-methyladenosine-3'-phosphate
  modified_base 15: mod_base = OTHER; note = 2'-O-methyladenosine-3'-phosphate
  modified_base 16: mod_base = OTHER; note = 2'-O-methylcytidine-3'-phosphate
  modified_base 17: mod_base = OTHER; note = 2'-O-methylcytidine-3'-phosphate
  modified_base 18: mod_base = OTHER; note = 2'-O-methyladenosine-3'-phosphate
  modified_base 19: mod_base = OTHER; note = 2'-O-methylguanosine-3'-phosphate
  modified_base 20: mod_base = OTHER; note = 2'-O-methyladenosine-3'-phosphate
  modified_base 21: mod_base = OTHER; note = 2'-O-methyluridine-3'-phosphate ((2S,4R)-1-[29-[[2-(acetylamino)-2-deoxy-beta-D-galactopyra nosyl]oxy]-14,14-bis[[3-[[3-[[5-[[2-(acetylamino)-2-deoxy-b eta-D-galactopyranosyl]oxy]-1-oxopentyl]amino]propyl]amino] -3-oxopropoxy]methyl]-1,12,19,25-tetraoxo-16-oxa-13,20,24-t riazanonacos-1-yl]-4-hydroxy-2-pyrrolidinyl)methyl ester
ctgcaactctaggaaccagat

SEQ ID NO: 970 - RNA, 21 nt, synthetic construct
  source 1..21: mol_type = other RNA
  modified_base 1: mod_base = OTHER; note = 2'-O-methylguanosine-3'-phosphorothioate
  modified_base 2: mod_base = OTHER; note = 2'-O-methyladenosine-3'-phosphorothioate
  modified_base 3: mod_base = OTHER; note = 2'-O-methylcytidine-3'-phosphate
  modified_base 4: mod_base = OTHER; note = 2'-O-methylcytidine-3'-phosphate
  modified_base 5: mod_base = OTHER; note = 2'-O-methyladenosine-3'-phosphate
  modified_base 6: mod_base = OTHER; note = 2'-O-methylguanosine-3'-phosphate
  modified_base 7: mod_base = OTHER; note = 2'-deoxy-2'-fluoroadenosine-3'-phosphate
  modified_base 8: mod_base = OTHER; note = 2'-O-methyluridine-3'-phosphate
  modified_base 9: mod_base = OTHER; note = 2'-deoxy-2'-fluorocytidine-3'-phosphate
  modified_base 10: mod_base = OTHER; note = 2'-deoxy-2'-fluorocytidine-3'-phosphate
  modified_base 11: mod_base = OTHER; note = 2'-deoxy-2'-fluorouridine-3'-phosphate
  modified_base 12: mod_base = OTHER; note = 2'-O-methylcytidine-3'-phosphate
  modified_base 13: mod_base = OTHER; note = 2'-O-methyluridine-3'-phosphate
  modified_base 14: mod_base = OTHER; note = 2'-O-methyluridine-3'-phosphate
  modified_base 15: mod_base = OTHER; note = 2'-O-methylcytidine-3'-phosphate
  modified_base 16: mod_base = OTHER; note = 2'-O-methyladenosine-3'-phosphate
  modified_base 17: mod_base = OTHER; note = 2'-O-methyladenosine-3'-phosphate
  modified_base 18: mod_base = OTHER; note = 2'-O-methylcytidine-3'-phosphate
  modified_base 19: mod_base = OTHER; note = 2'-O-methylguanosine-3'-phosphate
  modified_base 20: mod_base = OTHER; note = 2'-O-methylcytidine-3'-phosphate
  modified_base 21: mod_base = OTHER; note = 2'-O-methyluridine-3'-phosphate ((2S,4R)-1-[29-[[2-(acetylamino)-2-deoxy-beta-D-galactopyra nosyl]oxy]-14,14-bis[[3-[[3-[[5-[[2-(acetylamino)-2-deoxy-b eta-D-galactopyranosyl]oxy]-1-oxopentyl]amino]propyl]amino] -3-oxopropoxy]methyl]-1,12,19,25-tetraoxo-16-oxa-13,20,24-t riazanonacos-1-yl]-4-hydroxy-2-pyrrolidinyl)methyl ester
gaccagatcctcttcaacgct

SEQ ID NO: 971 - RNA, 21 nt, synthetic construct
  source 1..21: mol_type = other RNA
  modified_base 1: mod_base = OTHER; note = 2'-O-methylcytidine-3'-phosphorothioate
  modified_base 2: mod_base = OTHER; note = 2'-O-methyladenosine-3'-phosphorothioate
  modified_base 3: mod_base = OTHER; note = 2'-O-methyluridine-3'-phosphate
  modified_base 4: mod_base = OTHER; note = 2'-O-methylguanosine-3'-phosphate
  modified_base 5: mod_base = OTHER; note = 2'-O-methylguanosine-3'-phosphate
  modified_base 6: mod_base = OTHER; note = 2'-O-methylguanosine-3'-phosphate
  modified_base 7: mod_base = OTHER; note = 2'-deoxy-2'-fluorocytidine-3'-phosphate
  modified_base 8: mod_base = OTHER; note = 2'-O-methyladenosine-3'-phosphate
  modified_base 9: mod_base = OTHER; note = 2'-deoxy-2'-fluorouridine-3'-phosphate
  modified_base 10: mod_base = OTHER; note = 2'-deoxy-2'-fluorocytidine-3'-phosphate
  modified_base 11: mod_base = OTHER; note = 2'-deoxy-2'-fluorouridine-3'-phosphate
  modified_base 12: mod_base = OTHER; note = 2'-O-methylguanosine-3'-phosphate
  modified_base 13: mod_base = OTHER; note = 2'-O-methylcytidine-3'-phosphate
  modified_base 14: mod_base = OTHER; note = 2'-O-methylguanosine-3'-phosphate
  modified_base 15: mod_base = OTHER; note = 2'-O-methyluridine-3'-phosphate
  modified_base 16: mod_base = OTHER; note = 2'-O-methylguanosine-3'-phosphate
  modified_base 17: mod_base = OTHER; note = 2'-O-methylcytidine-3'-phosphate
  modified_base 18: mod_base = OTHER; note = 2'-O-methyladenosine-3'-phosphate
  modified_base 19: mod_base = OTHER; note = 2'-O-methylguanosine-3'-phosphate
  modified_base 20: mod_base = OTHER; note = 2'-O-methylguanosine-3'-phosphate
  modified_base 21: mod_base = OTHER; note = 2'-O-methyluridine-3'-phosphate ((2S,4R)-1-[29-[[2-(acetylamino)-2-deoxy-beta-D-galactopyra nosyl]oxy]-14,14-bis[[3-[[3-[[5-[[2-(acetylamino)-2-deoxy-b eta-D-galactopyranosyl]oxy]-1-oxopentyl]amino]propyl]amino] -3-oxopropoxy]methyl]-1,12,19,25-tetraoxo-16-oxa-13,20,24-t riazanonacos-1-yl]-4-hydroxy-2-pyrrolidinyl)methyl ester
catgggcatctgcgtgcaggt

SEQ ID NO: 972 - RNA, 21 nt, synthetic construct
  source 1..21: mol_type = other RNA
  modified_base 1: mod_base = OTHER; note = 2'-O-methylcytidine-3'-phosphorothioate
  modified_base 2: mod_base = OTHER; note = 2'-O-methylguanosine-3'-phosphorothioate
  modified_base 3: mod_base = OTHER; note = 2'-O-methyladenosine-3'-phosphate
  modified_base 4: mod_base = OTHER; note = 2'-O-methyluridine-3'-phosphate
  modified_base 5: mod_base = OTHER; note = 2'-O-methylguanosine-3'-phosphate
  modified_base 6: mod_base = OTHER; note = 2'-O-methylguanosine-3'-phosphate
  modified_base 7: mod_base = OTHER; note = 2'-deoxy-2'-fluoroguanosine-3'-phosphate
  modified_base 8: mod_base = OTHER; note = 2'-O-methyluridine-3'-phosphate
  modified_base 9: mod_base = OTHER; note = 2'-deoxy-2'-fluorouridine-3'-phosphate
  modified_base 10: mod_base = OTHER; note = 2'-deoxy-2'-fluorouridine-3'-phosphate
  modified_base 11: mod_base = OTHER; note = 2'-deoxy-2'-fluorocytidine-3'-phosphate
  modified_base 12: mod_base = OTHER; note = 2'-O-methylcytidine-3'-phosphate
  modified_base 13: mod_base = OTHER; note = 2'-O-methyluridine-3'-phosphate
  modified_base 14: mod_base = OTHER; note = 2'-O-methyladenosine-3'-phosphate
  modified_base 15: mod_base = OTHER; note = 2'-O-methyladenosine-3'-phosphate
  modified_base 16: mod_base = OTHER; note = 2'-O-methyladenosine-3'-phosphate
  modified_base 17: mod_base = OTHER; note = 2'-O-methyluridine-3'-phosphate
  modified_base 18: mod_base = OTHER; note = 2'-O-methyluridine-3'-phosphate
  modified_base 19: mod_base = OTHER; note = 2'-O-methyluridine-3'-phosphate
  modified_base 20: mod_base = OTHER; note = 2'-O-methylcytidine-3'-phosphate
  modified_base 21: mod_base = OTHER; note = 2'-O-methyluridine-3'-phosphate ((2S,4R)-1-[29-[[2-(acetylamino)-2-deoxy-beta-D-galactopyra nosyl]oxy]-14,14-bis[[3-[[3-[[5-[[2-(acetylamino)-2-deoxy-b eta-D-galactopyranosyl]oxy]-1-oxopentyl]amino]propyl]amino] -3-oxopropoxy]methyl]-1,12,19,25-tetraoxo-16-oxa-13,20,24-t riazanonacos-1-yl]-4-hydroxy-2-pyrrolidinyl)methyl ester
cgatgggtttcctaaatttct

SEQ ID NO: 973 - RNA, 21 nt, synthetic construct
  source 1..21: mol_type = other RNA
  modified_base 1: mod_base = OTHER; note = 2'-O-methylguanosine-3'-phosphorothioate
  modified_base 2: mod_base = OTHER; note = 2'-O-methylguanosine-3'-phosphorothioate
  modified_base 3: mod_base = OTHER; note = 2'-O-methyluridine-3'-phosphate
  modified_base 4: mod_base = OTHER; note = 2'-O-methylcytidine-3'-phosphate
  modified_base 5: mod_base = OTHER; note = 2'-O-methyladenosine-3'-phosphate
  modified_base 6: mod_base = OTHER; note = 2'-O-methylguanosine-3'-phosphate
  modified_base 7: mod_base = OTHER; note = 2'-deoxy-2'-fluorocytidine-3'-phosphate
  modified_base 8: mod_base = OTHER; note = 2'-O-methyladenosine-3'-phosphate
  modified_base 9: mod_base = OTHER; note = 2'-deoxy-2'-fluoroadenosine-3'-phosphate
  modified_base 10: mod_base = OTHER; note = 2'-deoxy-2'-fluorocytidine-3'-phosphate
  modified_base 11: mod_base = OTHER; note = 2'-deoxy-2'-fluorouridine-3'-phosphate
  modified_base 12: mod_base = OTHER; note = 2'-O-methylguanosine-3'-phosphate
  modified_base 13: mod_base = OTHER; note = 2'-O-methylcytidine-3'-phosphate
  modified_base 14: mod_base = OTHER; note = 2'-O-methylcytidine-3'-phosphate
  modified_base 15: mod_base = OTHER; note = 2'-O-methyladenosine-3'-phosphate
  modified_base 16: mod_base = OTHER; note = 2'-O-methylguanosine-3'-phosphate
  modified_base 17: mod_base = OTHER; note = 2'-O-methyluridine-3'-phosphate
  modified_base 18: mod_base = OTHER; note = 2'-O-methylcytidine-3'-phosphate
  modified_base 19: mod_base = OTHER; note = 2'-O-methylcytidine-3'-phosphate
  modified_base 20: mod_base = OTHER; note = 2'-O-methyluridine-3'-phosphate
  modified_base 21: mod_base = OTHER; note = 2'-O-methyluridine-3'-phosphate ((2S,4R)-1-[29-[[2-(acetylamino)-2-deoxy-beta-D-galactopyra nosyl]oxy]-14,14-bis[[3-[[3-[[5-[[2-(acetylamino)-2-deoxy-b eta-D-galactopyranosyl]oxy]-1-oxopentyl]amino]propyl]amino] -3-oxopropoxy]methyl]-1,12,19,25-tetraoxo-16-oxa-13,20,24-t riazanonacos-1-yl]-4-hydroxy-2-pyrrolidinyl)methyl ester
ggtcagcaactgccagtcctt

SEQ ID NO: 974 - RNA, 21 nt, synthetic construct
  source 1..21: mol_type = other RNA
  modified_base 1: mod_base = OTHER; note = 2'-O-methylguanosine-3'-phosphorothioate
  modified_base 2: mod_base = OTHER; note = 2'-O-methyladenosine-3'-phosphorothioate
  modified_base 3: mod_base = OTHER; note = 2'-O-methylguanosine-3'-phosphate
  modified_base 4: mod_base = OTHER; note = 2'-O-methylguanosine-3'-phosphate
  modified_base 5: mod_base = OTHER; note = 2'-O-methylguanosine-3'-phosphate
  modified_base 6: mod_base = OTHER; note = 2'-O-methyluridine-3'-phosphate
  modified_base 7: mod_base = OTHER; note = 2'-deoxy-2'-fluorouridine-3'-phosphate
  modified_base 8: mod_base = OTHER; note = 2'-O-methylcytidine-3'-phosphate
  modified_base 9: mod_base = OTHER; note = 2'-deoxy-2'-fluoroadenosine-3'-phosphate
  modified_base 10: mod_base = OTHER; note = 2'-deoxy-2'-fluoroguanosine-3'-phosphate
  modified_base 11: mod_base = OTHER; note = 2'-deoxy-2'-fluorouridine-3'-phosphate
  modified_base 12: mod_base = OTHER; note = 2'-O-methylguanosine-3'-phosphate
  modified_base 13: mod_base = OTHER; note = 2'-O-methyluridine-3'-phosphate
  modified_base 14: mod_base = OTHER; note = 2'-O-methylcytidine-3'-phosphate
  modified_base 15: mod_base = OTHER; note = 2'-O-methylguanosine-3'-phosphate
  modified_base 16: mod_base = OTHER; note = 2'-O-methylguanosine-3'-phosphate
  modified_base 17: mod_base = OTHER; note = 2'-O-methyluridine-3'-phosphate
  modified_base 18: mod_base = OTHER; note = 2'-O-methylguanosine-3'-phosphate
  modified_base 19: mod_base = OTHER; note = 2'-O-methylcytidine-3'-phosphate
  modified_base 20: mod_base = OTHER; note = 2'-O-methyladenosine-3'-phosphate
  modified_base 21: mod_base = OTHER; note = 2'-O-methyluridine-3'-phosphate ((2S,4R)-1-[29-[[2-(acetylamino)-2-deoxy-beta-D-galactopyra nosyl]oxy]-14,14-bis[[3-[[3-[[5-[[2-(acetylamino)-2-deoxy-b eta-D-galactopyranosyl]oxy]-1-oxopentyl]amino]propyl]amino] -3-oxopropoxy]methyl]-1,12,19,25-tetraoxo-16-oxa-13,20,24-t riazanonacos-1-yl]-4-hydroxy-2-pyrrolidinyl)methyl ester
gagggttcagtgtcggtgcat

SEQ ID NO: 975 - RNA, 21 nt, synthetic construct
  source 1..21: mol_type = other RNA
  modified_base 1: mod_base = OTHER; note = 2'-O-methylcytidine-3'-phosphorothioate
  modified_base 2: mod_base = OTHER; note = 2'-O-methylcytidine-3'-phosphorothioate
  modified_base 3: mod_base = OTHER; note = 2'-O-methylguanosine-3'-phosphate
  modified_base 4: mod_base = OTHER; note = 2'-O-methylguanosine-3'-phosphate
  modified_base 5: mod_base = OTHER; note = 2'-O-methylcytidine-3'-phosphate
  modified_base 6: mod_base = OTHER; note = 2'-O-methyluridine-3'-phosphate
  modified_base 7: mod_base = OTHER; note = 2'-deoxy-2'-fluorouridine-3'-phosphate
  modified_base 8: mod_base = OTHER; note = 2'-O-methylcytidine-3'-phosphate
  modified_base 9: mod_base = OTHER; note = 2'-deoxy-2'-fluoroguanosine-3'-phosphate
  modified_base 10: mod_base = OTHER; note = 2'-deoxy-2'-fluorouridine-3'-phosphate
  modified_base 11: mod_base = OTHER; note = 2'-deoxy-2'-fluoroadenosine-3'-phosphate
  modified_base 12: mod_base = OTHER; note = 2'-O-methyladenosine-3'-phosphate
  modified_base 13: mod_base = OTHER; note = 2'-O-methylcytidine-3'-phosphate
  modified_base 14: mod_base = OTHER; note = 2'-O-methylcytidine-3'-phosphate
  modified_base 15: mod_base = OTHER; note = 2'-O-methylguanosine-3'-phosphate
  modified_base 16: mod_base = OTHER; note = 2'-O-methyluridine-3'-phosphate
  modified_base 17: mod_base = OTHER; note = 2'-O-methylguanosine-3'-phosphate
  modified_base 18: mod_base = OTHER; note = 2'-O-methyladenosine-3'-phosphate
  modified_base 19: mod_base = OTHER; note = 2'-O-methylcytidine-3'-phosphate
  modified_base 20: mod_base = OTHER; note = 2'-O-methylcytidine-3'-phosphate
  modified_base 21: mod_base = OTHER; note = 2'-O-methyluridine-3'-phosphate ((2S,4R)-1-[29-[[2-(acetylamino)-2-deoxy-beta-D-galactopyra nosyl]oxy]-14,14-bis[[3-[[3-[[5-[[2-(acetylamino)-2-deoxy-b eta-D-galactopyranosyl]oxy]-1-oxopentyl]amino]propyl]amino] -3-oxopropoxy]methyl]-1,12,19,25-tetraoxo-16-oxa-13,20,24-t riazanonacos-1-yl]-4-hydroxy-2-pyrrolidinyl)methyl ester
ccggcttcgtaaccgtgacct

SEQ ID NO: 976 - RNA, 21 nt, synthetic construct
  source 1..21: mol_type = other RNA
  modified_base 1: mod_base = OTHER; note = 2'-O-methylcytidine-3'-phosphorothioate
  modified_base 2: mod_base = OTHER; note = 2'-O-methylguanosine-3'-phosphorothioate
  modified_base 3: mod_base = OTHER; note = 2'-O-methyluridine-3'-phosphate
  modified_base 4: mod_base = OTHER; note = 2'-O-methylguanosine-3'-phosphate
  modified_base 5: mod_base = OTHER; note = 2'-O-methyluridine-3'-phosphate
  modified_base 6: mod_base = OTHER; note = 2'-O-methylguanosine-3'-phosphate
  modified_base 7: mod_base = OTHER; note = 2'-deoxy-2'-fluorocytidine-3'-phosphate
  modified_base 8: mod_base = OTHER; note = 2'-O-methyladenosine-3'-phosphate
  modified_base 9: mod_base = OTHER; note = 2'-deoxy-2'-fluoroadenosine-3'-phosphate
  modified_base 10: mod_base = OTHER; note = 2'-deoxy-2'-fluorocytidine-3'-phosphate
  modified_base 11: mod_base = OTHER; note = 2'-deoxy-2'-fluoroadenosine-3'-phosphate
  modified_base 12: mod_base = OTHER; note = 2'-O-methylcytidine-3'-phosphate
  modified_base 13: mod_base = OTHER; note = 2'-O-methyladenosine-3'-phosphate
  modified_base 14: mod_base = OTHER; note = 2'-O-methyladenosine-3'-phosphate
  modified_base 15: mod_base = OTHER; note = 2'-O-methylcytidine-3'-phosphate
  modified_base 16: mod_base = OTHER; note = 2'-O-methylcytidine-3'-phosphate
  modified_base 17: mod_base = OTHER; note = 2'-O-methyladenosine-3'-phosphate
  modified_base 18: mod_base = OTHER; note = 2'-O-methylcytidine-3'-phosphate
  modified_base 19: mod_base = OTHER; note = 2'-O-methylcytidine-3'-phosphate
  modified_base 20: mod_base = OTHER; note = 2'-O-methyluridine-3'-phosphate
  modified_base 21: mod_base = OTHER; note = 2'-O-methyluridine-3'-phosphate ((2S,4R)-1-[29-[[2-(acetylamino)-2-deoxy-beta-D-galactopyra nosyl]oxy]-14,14-bis[[3-[[3-[[5-[[2-(acetylamino)-2-deoxy-b eta-D-galactopyranosyl]oxy]-1-oxopentyl]amino]propyl]amino] -3-oxopropoxy]methyl]-1,12,19,25-tetraoxo-16-oxa-13,20,24-t riazanonacos-1-yl]-4-hydroxy-2-pyrrolidinyl)methyl ester
cgtgtgcaacacaaccacctt

SEQ ID NO: 977 - RNA, 21 nt, synthetic construct
  source 1..21: mol_type = other RNA
  modified_base 1: mod_base = OTHER; note = 2'-O-methylguanosine-3'-phosphorothioate
  modified_base 2: mod_base = OTHER; note = 2'-O-methylguanosine-3'-phosphorothioate
  modified_base 3: mod_base = OTHER; note = 2'-O-methylcytidine-3'-phosphate
  modified_base 4: mod_base = OTHER; note = 2'-O-methyladenosine-3'-phosphate
  modified_base 5: mod_base = OTHER; note = 2'-O-methylguanosine-3'-phosphate
  modified_base 6: mod_base = OTHER; note = 2'-O-methylguanosine-3'-phosphate
  modified_base 7: mod_base = OTHER; note = 2'-deoxy-2'-fluoroadenosine-3'-phosphate
  modified_base 8: mod_base = OTHER; note = 2'-O-methylguanosine-3'-phosphate
  modified_base 9: mod_base = OTHER; note = 2'-deoxy-2'-fluorouridine-3'-phosphate
  modified_base 10: mod_base = OTHER; note = 2'-deoxy-2'-fluorocytidine-3'-phosphate
  modified_base 11: mod_base = OTHER; note = 2'-deoxy-2'-fluorocytidine-3'-phosphate
  modified_base 12: mod_base = OTHER; note = 2'-O-methyladenosine-3'-phosphate
  modified_base 13: mod_base = OTHER; note = 2'-O-methyluridine-3'-phosphate
  modified_base 14: mod_base = OTHER; note = 2'-O-methylcytidine-3'-phosphate
  modified_base 15: mod_base = OTHER; note = 2'-O-methyluridine-3'-phosphate
  modified_base 16: mod_base = OTHER; note = 2'-O-methylguanosine-3'-phosphate
  modified_base 17: mod_base = OTHER; note = 2'-O-methylcytidine-3'-phosphate
  modified_base 18: mod_base = OTHER; note = 2'-O-methyladenosine-3'-phosphate
  modified_base 19: mod_base = OTHER; note = 2'-O-methylcytidine-3'-phosphate
  modified_base 20: mod_base = OTHER; note = 2'-O-methylcytidine-3'-phosphate
  modified_base 21: mod_base = OTHER; note = 2'-O-methyluridine-3'-phosphate ((2S,4R)-1-[29-[[2-(acetylamino)-2-deoxy-beta-D-galactopyra nosyl]oxy]-14,14-bis[[3-[[3-[[5-[[2-(acetylamino)-2-deoxy-b eta-D-galactopyranosyl]oxy]-1-oxopentyl]amino]propyl]amino] -3-oxopropoxy]methyl]-1,12,19,25-tetraoxo-16-oxa-13,20,24-t riazanonacos-1-yl]-4-hydroxy-2-pyrrolidinyl)methyl ester
ggcaggagtccatctgcacct

SEQ ID NO: 978 - RNA, 21 nt, synthetic construct
  source 1..21: mol_type = other RNA
  modified_base 1: mod_base = OTHER; note = 2'-O-methylcytidine-3'-phosphorothioate
  modified_base 2: mod_base = OTHER; note = 2'-O-methyluridine-3'-phosphorothioate
  modified_base 3: mod_base = OTHER; note = 2'-O-methylguanosine-3'-phosphate
  modified_base 4: mod_base = OTHER; note = 2'-O-methylcytidine-3'-phosphate
  modified_base 5: mod_base = OTHER; note = 2'-O-methyluridine-3'-phosphate
  modified_base 6: mod_base = OTHER; note = 2'-O-methylguanosine-3'-phosphate
  modified_base 7: mod_base = OTHER; note = 2'-deoxy-2'-fluorouridine-3'-phosphate
  modified_base 8: mod_base = OTHER; note = 2'-O-methylcytidine-3'-phosphate
  modified_base 9: mod_base = OTHER; note = 2'-deoxy-2'-fluorocytidine-3'-phosphate
  modified_base 10: mod_base = OTHER; note = 2'-deoxy-2'-fluorocytidine-3'-phosphate
  modified_base 11: mod_base = OTHER; note = 2'-deoxy-2'-fluoroadenosine-3'-phosphate
  modified_base 12: mod_base = OTHER; note = 2'-O-methylcytidine-3'-phosphate
  modified_base 13: mod_base = OTHER; note = 2'-O-methylcytidine-3'-phosphate
  modified_base 14: mod_base = OTHER; note = 2'-O-methyluridine-3'-phosphate
  modified_base 15: mod_base = OTHER; note = 2'-O-methyluridine-3'-phosphate
  modified_base 16: mod_base = OTHER; note = 2'-O-methylcytidine-3'-phosphate
  modified_base 17: mod_base = OTHER; note = 2'-O-methylcytidine-3'-phosphate
  modified_base 18: mod_base = OTHER; note = 2'-O-methylguanosine-3'-phosphate
  modified_base 19: mod_base = OTHER; note = 2'-O-methylcytidine-3'-phosphate
  modified_base 20: mod_base = OTHER; note = 2'-O-methyluridine-3'-phosphate
  modified_base 21: mod_base = OTHER; note = 2'-O-methyluridine-3'-phosphate ((2S,4R)-1-[29-[[2-(acetylamino)-2-deoxy-beta-D-galactopyra nosyl]oxy]-14,14-bis[[3-[[3-[[5-[[2-(acetylamino)-2-deoxy-b eta-D-galactopyranosyl]oxy]-1-oxopentyl]amino]propyl]amino] -3-oxopropoxy]methyl]-1,12,19,25-tetraoxo-16-oxa-13,20,24-t riazanonacos-1-yl]-4-hydroxy-2-pyrrolidinyl)methyl ester
ctgctgtcccaccttccgctt

SEQ ID NO: 979 - RNA, 21 nt, synthetic construct
  source 1..21: mol_type = other RNA
  modified_base 1: mod_base = OTHER; note = 2'-O-methyluridine-3'-phosphorothioate
  modified_base 2: mod_base = OTHER; note = 2'-O-methylcytidine-3'-phosphorothioate
  modified_base 3: mod_base = OTHER; note = 2'-O-methyladenosine-3'-phosphate
  modified_base 4: mod_base = OTHER; note = 2'-O-methylguanosine-3'-phosphate
  modified_base 5: mod_base = OTHER; note = 2'-O-methylcytidine-3'-phosphate
  modified_base 6: mod_base = OTHER; note = 2'-O-methyluridine-3'-phosphate
  modified_base 7: mod_base = OTHER; note = 2'-deoxy-2'-fluoroguanosine-3'-phosphate
  modified_base 8: mod_base = OTHER; note = 2'-O-methyluridine-3'-phosphate
  modified_base 9: mod_base = OTHER; note = 2'-deoxy-2'-fluoroguanosine-3'-phosphate
  modified_base 10: mod_base = OTHER; note = 2'-deoxy-2'-fluorouridine-3'-phosphate
  modified_base 11: mod_base = OTHER; note = 2'-deoxy-2'-fluorouridine-3'-phosphate
  modified_base 12: mod_base = OTHER; note = 2'-O-methylcytidine-3'-phosphate
  modified_base 13: mod_base = OTHER; note = 2'-O-methylguanosine-3'-phosphate
  modified_base 14: mod_base = OTHER; note = 2'-O-methyluridine-3'-phosphate
  modified_base 15: mod_base = OTHER; note = 2'-O-methyladenosine-3'-phosphate
  modified_base 16: mod_base = OTHER; note = 2'-O-methylcytidine-3'-phosphate
  modified_base 17: mod_base = OTHER; note = 2'-O-methyladenosine-3'-phosphate
  modified_base 18: mod_base = OTHER; note = 2'-O-methyladenosine-3'-phosphate
  modified_base 19: mod_base = OTHER; note = 2'-O-methyluridine-3'-phosphate
  modified_base 20: mod_base = OTHER; note = 2'-O-methylguanosine-3'-phosphate
  modified_base 21: mod_base = OTHER; note = 2'-O-methyluridine-3'-phosphate ((2S,4R)-1-[29-[[2-(acetylamino)-2-deoxy-beta-D-galactopyra nosyl]oxy]-14,14-bis[[3-[[3-[[5-[[2-(acetylamino)-2-deoxy-b eta-D-galactopyranosyl]oxy]-1-oxopentyl]amino]propyl]amino] -3-oxopropoxy]methyl]-1,12,19,25-tetraoxo-16-oxa-13,20,24-t riazanonacos-1-yl]-4-hydroxy-2-pyrrolidinyl)methyl ester
tcagctgtgttcgtacaatgt

SEQ ID NO: 980 - RNA, 21 nt, synthetic construct
  source 1..21: mol_type = other RNA
  modified_base 1: mod_base = OTHER; note = 2'-O-methyluridine-3'-phosphorothioate
  modified_base 2: mod_base = OTHER; note = 2'-O-methyluridine-3'-phosphorothioate
  modified_base 3: mod_base = OTHER; note = 2'-O-methylguanosine-3'-phosphate
  modified_base 4: mod_base = OTHER; note = 2'-O-methylguanosine-3'-phosphate
  modified_base 5: mod_base = OTHER; note = 2'-O-methyluridine-3'-phosphate
  modified_base 6: mod_base = OTHER; note = 2'-O-methylguanosine-3'-phosphate
  modified_base 7: mod_base = OTHER; note = 2'-deoxy-2'-fluorocytidine-3'-phosphate
  modified_base 8: mod_base = OTHER; note = 2'-O-methyladenosine-3'-phosphate
  modified_base 9: mod_base = OTHER; note = 2'-deoxy-2'-fluoroadenosine-3'-phosphate
  modified_base 10: mod_base = OTHER; note = 2'-deoxy-2'-fluorocytidine-3'-phosphate
  modified_base 11: mod_base = OTHER; note = 2'-deoxy-2'-fluorocytidine-3'-phosphate
  modified_base 12: mod_base = OTHER; note = 2'-O-methyluridine-3'-phosphate
  modified_base 13: mod_base = OTHER; note = 2'-O-methyluridine-3'-phosphate
  modified_base 14: mod_base = OTHER; note = 2'-O-methylcytidine-3'-phosphate
  modified_base 15: mod_base = OTHER; note = 2'-O-methylcytidine-3'-phosphate
  modified_base 16: mod_base = OTHER; note = 2'-O-methylcytidine-3'-phosphate
  modified_base 17: mod_base = OTHER; note = 2'-O-methyladenosine-3'-phosphate
  modified_base 18: mod_base = OTHER; note = 2'-O-methylguanosine-3'-phosphate
  modified_base 19: mod_base = OTHER; note = 2'-O-methylguanosine-3'-phosphate
  modified_base 20: mod_base = OTHER; note = 2'-O-methylcytidine-3'-phosphate
  modified_base 21: mod_base = OTHER; note = 2'-O-methyluridine-3'-phosphate ((2S,4R)-1-[29-[[2-(acetylamino)-2-deoxy-beta-D-galactopyra nosyl]oxy]-14,14-bis[[3-[[3-[[5-[[2-(acetylamino)-2-deoxy-b eta-D-galactopyranosyl]oxy]-1-oxopentyl]amino]propyl]amino] -3-oxopropoxy]methyl]-1,12,19,25-tetraoxo-16-oxa-13,20,24-t riazanonacos-1-yl]-4-hydroxy-2-pyrrolidinyl)methyl ester
ttggtgcaaccttcccaggct

SEQ ID NO: 981 - RNA, 21 nt, synthetic construct
  source 1..21: mol_type = other RNA
  modified_base 1: mod_base = OTHER; note = 2'-O-methyluridine-3'-phosphorothioate
  modified_base 2: mod_base = OTHER; note = 2'-O-methylcytidine-3'-phosphorothioate
  modified_base 3: mod_base = OTHER; note = 2'-O-methylcytidine-3'-phosphate
  modified_base 4: mod_base = OTHER; note = 2'-O-methylcytidine-3'-phosphate
  modified_base 5: mod_base = OTHER; note = 2'-O-methyluridine-3'-phosphate
  modified_base 6: mod_base = OTHER; note = 2'-O-methylguanosine-3'-phosphate
  modified_base 7: mod_base = OTHER; note = 2'-deoxy-2'-fluorocytidine-3'-phosphate
  modified_base 8: mod_base = OTHER; note = 2'-O-methylcytidine-3'-phosphate
  modified_base 9: mod_base = OTHER; note = 2'-deoxy-2'-fluoroadenosine-3'-phosphate
  modified_base 10: mod_base = OTHER; note = 2'-deoxy-2'-fluorocytidine-3'-phosphate
  modified_base 11: mod_base = OTHER; note = 2'-deoxy-2'-fluoroadenosine-3'-phosphate
  modified_base 12: mod_base = OTHER; note = 2'-O-methyluridine-3'-phosphate
  modified_base 13: mod_base = OTHER; note = 2'-O-methylguanosine-3'-phosphate
  modified_base 14: mod_base = OTHER; note = 2'-O-methyluridine-3'-phosphate
  modified_base 15: mod_base = OTHER; note = 2'-O-methylguanosine-3'-phosphate
  modified_base 16: mod_base = OTHER; note = 2'-O-methyluridine-3'-phosphate
  modified_base 17: mod_base = OTHER; note = 2'-O-methyladenosine-3'-phosphate
  modified_base 18: mod_base = OTHER; note = 2'-O-methylcytidine-3'-phosphate
  modified_base 19: mod_base = OTHER; note = 2'-O-methylcytidine-3'-phosphate
  modified_base 20: mod_base = OTHER; note = 2'-O-methyluridine-3'-phosphate
  modified_base 21: mod_base = OTHER; note = 2'-O-methyluridine-3'-phosphate ((2S,4R)-1-[29-[[2-(acetylamino)-2-deoxy-beta-D-galactopyra nosyl]oxy]-14,14-bis[[3-[[3-[[5-[[2-(acetylamino)-2-deoxy-b eta-D-galactopyranosyl]oxy]-1-oxopentyl]amino]propyl]amino] -3-oxopropoxy]methyl]-1,12,19,25-tetraoxo-16-oxa-13,20,24-t riazanonacos-1-yl]-4-hydroxy-2-pyrrolidinyl)methyl ester
tccctgccacatgtgtacctt

SEQ ID NO: 982 - RNA, 21 nt, synthetic construct
  source 1..21: mol_type = other RNA
  modified_base 1: mod_base = OTHER; note = 2'-O-methyladenosine-3'-phosphorothioate
  modified_base 2: mod_base = OTHER; note = 2'-O-methylcytidine-3'-phosphorothioate
  modified_base 3: mod_base = OTHER; note = 2'-O-methylcytidine-3'-phosphate
  modified_base 4: mod_base = OTHER; note = 2'-O-methylcytidine-3'-phosphate
  modified_base 5: mod_base = OTHER; note = 2'-O-methyladenosine-3'-phosphate
  modified_base 6: mod_base = OTHER; note = 2'-O-methyladenosine-3'-phosphate
  modified_base 7: mod_base = OTHER; note = 2'-deoxy-2'-fluorocytidine-3'-phosphate
  modified_base 8: mod_base = OTHER; note = 2'-O-methylguanosine-3'-phosphate
  modified_base 9: mod_base = OTHER; note = 2'-deoxy-2'-fluoroguanosine-3'-phosphate
  modified_base 10: mod_base = OTHER; note = 2'-deoxy-2'-fluorouridine-3'-phosphate
  modified_base 11: mod_base = OTHER; note = 2'-deoxy-2'-fluoroguanosine-3'-phosphate
  modified_base 12: mod_base = OTHER; note = 2'-O-methylcytidine-3'-phosphate
  modified_base 13: mod_base = OTHER; note = 2'-O-methyladenosine-3'-phosphate
  modified_base 14: mod_base = OTHER; note = 2'-O-methyladenosine-3'-phosphate
  modified_base 15: mod_base = OTHER; note = 2'-O-methyluridine-3'-phosphate
  modified_base 16: mod_base = OTHER; note = 2'-O-methylguanosine-3'-phosphate
  modified_base 17: mod_base = OTHER; note = 2'-O-methyluridine-3'-phosphate
  modified_base 18: mod_base = OTHER; note = 2'-O-methylcytidine-3'-phosphate
  modified_base 19: mod_base = OTHER; note = 2'-O-methyladenosine-3'-phosphate
  modified_base 20: mod_base = OTHER; note = 2'-O-methylguanosine-3'-phosphate
  modified_base 21: mod_base = OTHER; note = 2'-O-methyluridine-3'-phosphate ((2S,4R)-1-[29-[[2-(acetylamino)-2-deoxy-beta-D-galactopyra nosyl]oxy]-14,14-bis[[3-[[3-[[5-[[2-(acetylamino)-2-deoxy-b eta-D-galactopyranosyl]oxy]-1-oxopentyl]amino]propyl]amino] -3-oxopropoxy]methyl]-1,12,19,25-tetraoxo-16-oxa-13,20,24-t riazanonacos-1-yl]-4-hydroxy-2-pyrrolidinyl)methyl ester
acccaacggtgcaatgtcagt

SEQ ID NO: 983 - RNA, 21 nt, synthetic construct
  source 1..21: mol_type = other RNA
  modified_base 1: mod_base = OTHER; note = 2'-O-methylcytidine-3'-phosphorothioate
  modified_base 2: mod_base = OTHER; note = 2'-O-methylcytidine-3'-phosphorothioate
  modified_base 3: mod_base = OTHER; note = 2'-O-methyluridine-3'-phosphate
  modified_base 4: mod_base = OTHER; note = 2'-O-methylguanosine-3'-phosphate
  modified_base 5: mod_base = OTHER; note = 2'-O-methylcytidine-3'-phosphate
  modified_base 6: mod_base = OTHER; note = 2'-O-methyladenosine-3'-phosphate
  modified_base 7: mod_base = OTHER; note = 2'-deoxy-2'-fluoroadenosine-3'-phosphate
  modified_base 8: mod_base = OTHER; note = 2'-O-methylcytidine-3'-phosphate
  modified_base 9: mod_base = OTHER; note = 2'-deoxy-2'-fluoroadenosine-3'-phosphate
  modified_base 10: mod_base = OTHER; note = 2'-deoxy-2'-fluoroadenosine-3'-phosphate
  modified_base 11: mod_base = OTHER; note = 2'-deoxy-2'-fluorouridine-3'-phosphate
  modified_base 12: mod_base = OTHER; note = 2'-O-methyladenosine-3'-phosphate
  modified_base 13: mod_base = OTHER; note = 2'-O-methylcytidine-3'-phosphate
  modified_base 14: mod_base = OTHER; note = 2'-O-methyluridine-3'-phosphate
  modified_base 15: mod_base = OTHER; note = 2'-O-methyladenosine-3'-phosphate
  modified_base 16: mod_base = OTHER; note = 2'-O-methylcytidine-3'-phosphate
  modified_base 17: mod_base = OTHER; note = 2'-O-methylcytidine-3'-phosphate
  modified_base 18: mod_base = OTHER; note = 2'-O-methyluridine-3'-phosphate
  modified_base 19: mod_base = OTHER; note = 2'-O-methylguanosine-3'-phosphate
  modified_base 20: mod_base = OTHER; note = 2'-O-methyluridine-3'-phosphate
  modified_base 21: mod_base = OTHER; note = 2'-O-methyluridine-3'-phosphate ((2S,4R)-1-[29-[[2-(acetylamino)-2-deoxy-beta-D-galactopyra nosyl]oxy]-14,14-bis[[3-[[3-[[5-[[2-(acetylamino)-2-deoxy-b eta-D-galactopyranosyl]oxy]-1-oxopentyl]amino]propyl]amino] -3-oxopropoxy]methyl]-1,12,19,25-tetraoxo-16-oxa-13,20,24-t riazanonacos-1-yl]-4-hydroxy-2-pyrrolidinyl)methyl ester
cctgcaacaatactacctgtt

SEQ ID NO: 984 - RNA, 21 nt, synthetic construct
  source 1..21: mol_type = other RNA
  modified_base 1: mod_base = OTHER; note = 2'-O-methyladenosine-3'-phosphorothioate
  modified_base 2: mod_base = OTHER; note = 2'-O-methylguanosine-3'-phosphorothioate
  modified_base 3: mod_base = OTHER; note = 2'-O-methylguanosine-3'-phosphate
  modified_base 4: mod_base = OTHER; note = 2'-O-methylguanosine-3'-phosphate
  modified_base 5: mod_base = OTHER; note = 2'-O-methylcytidine-3'-phosphate
  modified_base 6: mod_base = OTHER; note = 2'-O-methyluridine-3'-phosphate
  modified_base 7: mod_base = OTHER; note = 2'-deoxy-2'-fluorouridine-3'-phosphate
  modified_base 8: mod_base = OTHER; note = 2'-O-methyluridine-3'-phosphate
  modified_base 9: mod_base = OTHER; note = 2'-deoxy-2'-fluoroguanosine-3'-phosphate
  modified_base 10: mod_base = OTHER; note = 2'-deoxy-2'-fluoroadenosine-3'-phosphate
  modified_base 11: mod_base = OTHER; note = 2'-deoxy-2'-fluoroguanosine-3'-phosphate
  modified_base 12: mod_base = OTHER; note = 2'-O-methyluridine-3'-phosphate
  modified_base 13: mod_base = OTHER; note = 2'-O-methyladenosine-3'-phosphate
  modified_base 14: mod_base = OTHER; note = 2'-O-methylcytidine-3'-phosphate
  modified_base 15: mod_base = OTHER; note = 2'-O-methyladenosine-3'-phosphate
  modified_base 16: mod_base = OTHER; note = 2'-O-methyladenosine-3'-phosphate
  modified_base 17: mod_base = OTHER; note = 2'-O-methylguanosine-3'-phosphate
  modified_base 18: mod_base = OTHER; note = 2'-O-methyladenosine-3'-phosphate
  modified_base 19: mod_base = OTHER; note = 2'-O-methylguanosine-3'-phosphate
  modified_base 20: mod_base = OTHER; note = 2'-O-methyladenosine-3'-phosphate
  modified_base 21: mod_base = OTHER; note = 2'-O-methyluridine-3'-phosphate ((2S,4R)-1-[29-[[2-(acetylamino)-2-deoxy-beta-D-galactopyra nosyl]oxy]-14,14-bis[[3-[[3-[[5-[[2-(acetylamino)-2-deoxy-b eta-D-galactopyranosyl]oxy]-1-oxopentyl]amino]propyl]amino] -3-oxopropoxy]methyl]-1,12,19,25-tetraoxo-16-oxa-13,20,24-t riazanonacos-1-yl]-4-hydroxy-2-pyrrolidinyl)methyl ester
agggctttgagtacaagagat

SEQ ID NO: 985 - RNA, 21 nt, synthetic construct
  source 1..21: mol_type = other RNA
  modified_base 1: mod_base = OTHER; note = 2'-O-methyladenosine-3'-phosphorothioate
  modified_base 2: mod_base = OTHER; note = 2'-O-methylguanosine-3'-phosphorothioate
  modified_base 3: mod_base = OTHER; note = 2'-O-methyluridine-3'-phosphate
  modified_base 4: mod_base = OTHER; note = 2'-O-methylcytidine-3'-phosphate
  modified_base 5: mod_base = OTHER; note = 2'-O-methylcytidine-3'-phosphate
  modified_base 6: mod_base = OTHER; note = 2'-O-methyladenosine-3'-phosphate
  modified_base 7: mod_base = OTHER; note = 2'-deoxy-2'-fluoroguanosine-3'-phosphate
  modified_base 8: mod_base = OTHER; note = 2'-O-methylcytidine-3'-phosphate
  modified_base 9: mod_base = OTHER; note = 2'-deoxy-2'-fluorouridine-3'-phosphate
  modified_base 10: mod_base = OTHER; note = 2'-deoxy-2'-fluoroguanosine-3'-phosphate
  modified_base 11: mod_base = OTHER; note = 2'-deoxy-2'-fluoroadenosine-3'-phosphate
  modified_base 12: mod_base = OTHER; note = 2'-O-methyladenosine-3'-phosphate
  modified_base 13: mod_base = OTHER; note = 2'-O-methyluridine-3'-phosphate
  modified_base 14: mod_base = OTHER; note = 2'-O-methylguanosine-3'-phosphate
  modified_base 15: mod_base = OTHER; note = 2'-O-methyladenosine-3'-phosphate
  modified_base 16: mod_base = OTHER; note = 2'-O-methyladenosine-3'-phosphate
  modified_base 17: mod_base = OTHER; note = 2'-O-methyladenosine-3'-phosphate
  modified_base 18: mod_base = OTHER; note = 2'-O-methylcytidine-3'-phosphate
  modified_base 19: mod_base = OTHER; note = 2'-O-methylcytidine-3'-phosphate
  modified_base 20: mod_base = OTHER; note = 2'-O-methyluridine-3'-phosphate
  modified_base 21: mod_base = OTHER; note = 2'-O-methyluridine-3'-phosphate ((2S,4R)-1-[29-[[2-(acetylamino)-2-deoxy-beta-D-galactopyra nosyl]oxy]-14,14-bis[[3-[[3-[[5-[[2-(acetylamino)-2-deoxy-b eta-D-galactopyranosyl]oxy]-1-oxopentyl]amino]propyl]amino] -3-oxopropoxy]methyl]-1,12,19,25-tetraoxo-16-oxa-13,20,24-t riazanonacos-1-yl]-4-hydroxy-2-pyrrolidinyl)methyl ester
agtccagctgaatgaaacctt

SEQ ID NO: 986 - RNA, 21 nt, synthetic construct
  source 1..21: mol_type = other RNA
  modified_base 1: mod_base = OTHER; note = 2'-O-methylcytidine-3'-phosphorothioate
  modified_base 2: mod_base = OTHER; note = 2'-O-methyladenosine-3'-phosphorothioate
  modified_base 3: mod_base = OTHER; note = 2'-O-methyladenosine-3'-phosphate
  modified_base 4: mod_base = OTHER; note = 2'-O-methylcytidine-3'-phosphate
  modified_base 5: mod_base = OTHER; note = 2'-O-methyladenosine-3'-phosphate
  modified_base 6: mod_base = OTHER; note = 2'-O-methylguanosine-3'-phosphate
  modified_base 7: mod_base = OTHER; note = 2'-deoxy-2'-fluorocytidine-3'-phosphate
  modified_base 8: mod_base = OTHER; note = 2'-O-methylcytidine-3'-phosphate
  modified_base 9: mod_base = OTHER; note = 2'-deoxy-2'-fluoroadenosine-3'-phosphate
  modified_base 10: mod_base = OTHER; note = 2'-deoxy-2'-fluorouridine-3'-phosphate
  modified_base 11: mod_base = OTHER; note = 2'-deoxy-2'-fluoroguanosine-3'-phosphate
  modified_base 12: mod_base = OTHER; note = 2'-O-methyluridine-3'-phosphate
  modified_base 13: mod_base = OTHER; note = 2'-O-methylguanosine-3'-phosphate
  modified_base 14: mod_base = OTHER; note = 2'-O-methylguanosine-3'-phosphate
  modified_base 15: mod_base = OTHER; note = 2'-O-methyladenosine-3'-phosphate
  modified_base 16: mod_base = OTHER; note = 2'-O-methylcytidine-3'-phosphate
  modified_base 17: mod_base = OTHER; note = 2'-O-methyladenosine-3'-phosphate
  modified_base 18: mod_base = OTHER; note = 2'-O-methyladenosine-3'-phosphate
  modified_base 19: mod_base = OTHER; note = 2'-O-methylcytidine-3'-phosphate
  modified_base 20: mod_base = OTHER; note = 2'-O-methyluridine-3'-phosphate
  modified_base 21: mod_base = OTHER; note = 2'-O-methyluridine-3'-phosphate ((2S,4R)-1-[29-[[2-(acetylamino)-2-deoxy-beta-D-galactopyra nosyl]oxy]-14,14-bis[[3-[[3-[[5-[[2-(acetylamino)-2-deoxy-b eta-D-galactopyranosyl]oxy]-1-oxopentyl]amino]propyl]amino] -3-oxopropoxy]methyl]-1,12,19,25-tetraoxo-16-oxa-13,20,24-t riazanonacos-1-yl]-4-hydroxy-2-pyrrolidinyl)methyl ester
caacagccatgtggacaactt

SEQ ID NO: 987 - RNA, 21 nt, synthetic construct
  source 1..21: mol_type = other RNA
  modified_base 1: mod_base = OTHER; note = 2'-O-methylcytidine-3'-phosphorothioate
  modified_base 2: mod_base = OTHER; note = 2'-O-methylcytidine-3'-phosphorothioate
  modified_base 3: mod_base = OTHER; note = 2'-O-methylguanosine-3'-phosphate
  modified_base 4: mod_base = OTHER; note = 2'-O-methyluridine-3'-phosphate
  modified_base 5: mod_base = OTHER; note = 2'-O-methylguanosine-3'-phosphate
  modified_base 6: mod_base = OTHER; note = 2'-O-methyluridine-3'-phosphate
  modified_base 7: mod_base = OTHER; note = 2'-deoxy-2'-fluoroadenosine-3'-phosphate
  modified_base 8: mod_base = OTHER; note = 2'-O-methylcytidine-3'-phosphate
  modified_base 9: mod_base = OTHER; note = 2'-deoxy-2'-fluorocytidine-3'-phosphate
  modified_base 10: mod_base = OTHER; note = 2'-deoxy-2'-fluorouridine-3'-phosphate
  modified_base 11: mod_base = OTHER; note = 2'-deoxy-2'-fluorocytidine-3'-phosphate
  modified_base 12: mod_base = OTHER; note = 2'-O-methyluridine-3'-phosphate
  modified_base 13: mod_base = OTHER; note = 2'-O-methylguanosine-3'-phosphate
  modified_base 14: mod_base = OTHER; note = 2'-O-methyluridine-3'-phosphate
  modified_base 15: mod_base = OTHER; note = 2'-O-methylguanosine-3'-phosphate
  modified_base 16: mod_base = OTHER; note = 2'-O-methyladenosine-3'-phosphate
  modified_base 17: mod_base = OTHER; note = 2'-O-methylguanosine-3'-phosphate
  modified_base 18: mod_base = OTHER; note = 2'-O-methylguanosine-3'-phosphate
  modified_base 19: mod_base = OTHER; note = 2'-O-methylcytidine-3'-phosphate
  modified_base 20: mod_base = OTHER; note = 2'-O-methyluridine-3'-phosphate
  modified_base 21: mod_base = OTHER; note = 2'-O-methyluridine-3'-phosphate ((2S,4R)-1-[29-[[2-(acetylamino)-2-deoxy-beta-D-galactopyra nosyl]oxy]-14,14-bis[[3-[[3-[[5-[[2-(acetylamino)-2-deoxy-b eta-D-galactopyranosyl]oxy]-1-oxopentyl]amino]propyl]amino] -3-oxopropoxy]methyl]-1,12,19,25-tetraoxo-16-oxa-13,20,24-t riazanonacos-1-yl]-4-hydroxy-2-pyrrolidinyl)methyl ester
ccgtgtacctctgtgaggctt

SEQ ID NO: 988 - RNA, 21 nt, synthetic construct
  source 1..21: mol_type = other RNA
  modified_base 1: mod_base = OTHER; note = 2'-O-methylguanosine-3'-phosphorothioate
  modified_base 2: mod_base = OTHER; note = 2'-O-methylguanosine-3'-phosphorothioate
  modified_base 3: mod_base = OTHER; note = 2'-O-methyluridine-3'-phosphate
  modified_base 4: mod_base = OTHER; note = 2'-O-methylguanosine-3'-phosphate
  modified_base 5: mod_base = OTHER; note = 2'-O-methylguanosine-3'-phosphate
  modified_base 6: mod_base = OTHER; note = 2'-O-methyladenosine-3'-phosphate
  modified_base 7: mod_base = OTHER; note = 2'-deoxy-2'-fluoroguanosine-3'-phosphate
  modified_base 8: mod_base = OTHER; note = 2'-O-methyluridine-3'-phosphate
  modified_base 9: mod_base = OTHER; note = 2'-deoxy-2'-fluorocytidine-3'-phosphate
  modified_base 10: mod_base = OTHER; note = 2'-deoxy-2'-fluorocytidine-3'-phosphate
  modified_base 11: mod_base = OTHER; note = 2'-deoxy-2'-fluoroadenosine-3'-phosphate
  modified_base 12: mod_base = OTHER; note = 2'-O-methyluridine-3'-phosphate
  modified_base 13: mod_base = OTHER; note = 2'-O-methyluridine-3'-phosphate
  modified_base 14: mod_base = OTHER; note = 2'-O-methyluridine-3'-phosphate
  modified_base 15: mod_base = OTHER; note = 2'-O-methylguanosine-3'-phosphate
  modified_base 16: mod_base = OTHER; note = 2'-O-methylcytidine-3'-phosphate
  modified_base 17: mod_base = OTHER; note = 2'-O-methyluridine-3'-phosphate
  modified_base 18: mod_base = OTHER; note = 2'-O-methylguanosine-3'-phosphate
  modified_base 19: mod_base = OTHER; note = 2'-O-methyladenosine-3'-phosphate
  modified_base 20: mod_base = OTHER; note = 2'-O-methylcytidine-3'-phosphate
  modified_base 21: mod_base = OTHER; note = 2'-O-methyluridine-3'-phosphate ((2S,4R)-1-[29-[[2-(acetylamino)-2-deoxy-beta-D-galactopyra nosyl]oxy]-14,14-bis[[3-[[3-[[5-[[2-(acetylamino)-2-deoxy-b eta-D-galactopyranosyl]oxy]-1-oxopentyl]amino]propyl]amino] -3-oxopropoxy]methyl]-1,12,19,25-tetraoxo-16-oxa-13,20,24-t riazanonacos-1-yl]-4-hydroxy-2-pyrrolidinyl)methyl ester
ggtggagtccatttgctgact

SEQ ID NO: 989 - RNA, 21 nt, synthetic construct
  source 1..21: mol_type = other RNA
  modified_base 1: mod_base = OTHER; note = 2'-O-methylcytidine-3'-phosphorothioate
  modified_base 2: mod_base = OTHER; note = 2'-O-methyluridine-3'-phosphorothioate
  modified_base 3: mod_base = OTHER; note = 2'-O-methylguanosine-3'-phosphate
  modified_base 4: mod_base = OTHER; note = 2'-O-methylcytidine-3'-phosphate
  modified_base 5: mod_base = OTHER; note = 2'-O-methylcytidine-3'-phosphate
  modified_base 6: mod_base = OTHER; note = 2'-O-methylcytidine-3'-phosphate
  modified_base 7: mod_base = OTHER; note = 2'-deoxy-2'-fluoroadenosine-3'-phosphate
  modified_base 8: mod_base = OTHER; note = 2'-O-methylguanosine-3'-phosphate
  modified_base 9: mod_base = OTHER; note = 2'-deoxy-2'-fluoroadenosine-3'-phosphate
  modified_base 10: mod_base = OTHER; note = 2'-deoxy-2'-fluorouridine-3'-phosphate
  modified_base 11: mod_base = OTHER; note = 2'-deoxy-2'-fluoroguanosine-3'-phosphate
  modified_base 12: mod_base = OTHER; note = 2'-O-methyluridine-3'-phosphate
  modified_base 13: mod_base = OTHER; note = 2'-O-methylguanosine-3'-phosphate
  modified_base 14: mod_base = OTHER; note = 2'-O-methyluridine-3'-phosphate
  modified_base 15: mod_base = OTHER; note = 2'-O-methylcytidine-3'-phosphate
  modified_base 16: mod_base = OTHER; note = 2'-O-methylcytidine-3'-phosphate
  modified_base 17: mod_base = OTHER; note = 2'-O-methyladenosine-3'-phosphate
  modified_base 18: mod_base = OTHER; note = 2'-O-methylguanosine-3'-phosphate
  modified_base 19: mod_base = OTHER; note = 2'-O-methylcytidine-3'-phosphate
  modified_base 20: mod_base = OTHER; note = 2'-O-methyluridine-3'-phosphate
  modified_base 21: mod_base = OTHER; note = 2'-O-methyluridine-3'-phosphate ((2S,4R)-1-[29-[[2-(acetylamino)-2-deoxy-beta-D-galactopyra nosyl]oxy]-14,14-bis[[3-[[3-[[5-[[2-(acetylamino)-2-deoxy-b eta-D-galactopyranosyl]oxy]-1-oxopentyl]amino]propyl]amino] -3-oxopropoxy]methyl]-1,12,19,25-tetraoxo-16-oxa-13,20,24-t riazanonacos-1-yl]-4-hydroxy-2-pyrrolidinyl)methyl ester
ctgcccagatgtgtccagctt

SEQ ID NO: 990 - RNA, 21 nt, synthetic construct
  source 1..21: mol_type = other RNA
  modified_base 1: mod_base = OTHER; note = 2'-O-methylguanosine-3'-phosphorothioate
  modified_base 2: mod_base = OTHER; note = 2'-O-methylcytidine-3'-phosphorothioate
  modified_base 3: mod_base = OTHER; note = 2'-O-methyluridine-3'-phosphate
  modified_base 4: mod_base = OTHER; note = 2'-O-methylguanosine-3'-phosphate
  modified_base 5: mod_base = OTHER; note = 2'-O-methylcytidine-3'-phosphate
  modified_base 6: mod_base = OTHER; note = 2'-O-methyluridine-3'-phosphate
  modified_base 7: mod_base = OTHER; note = 2'-deoxy-2'-fluoroadenosine-3'-phosphate
  modified_base 8: mod_base = OTHER; note = 2'-O-methylcytidine-3'-phosphate
  modified_base 9: mod_base = OTHER; note = 2'-deoxy-2'-fluorouridine-3'-phosphate
  modified_base 10: mod_base = OTHER; note = 2'-deoxy-2'-fluorocytidine-3'-phosphate
  modified_base 11: mod_base = OTHER; note = 2'-deoxy-2'-fluorocytidine-3'-phosphate
  modified_base 12: mod_base = OTHER; note = 2'-O-methyluridine-3'-phosphate
  modified_base 13: mod_base = OTHER; note = 2'-O-methylguanosine-3'-phosphate
  modified_base 14: mod_base = OTHER; note = 2'-O-methyluridine-3'-phosphate
  modified_base 15: mod_base = OTHER; note = 2'-O-methylguanosine-3'-phosphate
  modified_base 16: mod_base = OTHER; note = 2'-O-methyladenosine-3'-phosphate
  modified_base 17: mod_base = OTHER; note = 2'-O-methylguanosine-3'-phosphate
  modified_base 18: mod_base = OTHER; note = 2'-O-methylguanosine-3'-phosphate
  modified_base 19: mod_base = OTHER; note = 2'-O-methyladenosine-3'-phosphate
  modified_base 20: mod_base = OTHER; note = 2'-O-methylguanosine-3'-phosphate
  modified_base 21: mod_base = OTHER; note = 2'-O-methyluridine-3'-phosphate ((2S,4R)-1-[29-[[2-(acetylamino)-2-deoxy-beta-D-galactopyra nosyl]oxy]-14,14-bis[[3-[[3-[[5-[[2-(acetylamino)-2-deoxy-b eta-D-galactopyranosyl]oxy]-1-oxopentyl]amino]propyl]amino] -3-oxopropoxy]methyl]-1,12,19,25-tetraoxo-16-oxa-13,20,24-t riazanonacos-1-yl]-4-hydroxy-2-pyrrolidinyl)methyl ester
gctgctactcctgtgaggagt

SEQ ID NO: 991 - RNA, 21 nt, synthetic construct
  source 1..21: mol_type = other RNA
  modified_base 1: mod_base = OTHER; note = 2'-O-methylcytidine-3'-phosphorothioate
  modified_base 2: mod_base = OTHER; note = 2'-O-methylcytidine-3'-phosphorothioate
  modified_base 3: mod_base = OTHER; note = 2'-O-methyluridine-3'-phosphate
  modified_base 4: mod_base = OTHER; note = 2'-O-methylguanosine-3'-phosphate
  modified_base 5: mod_base = OTHER; note = 2'-O-methyluridine-3'-phosphate
  modified_base 6: mod_base = OTHER; note = 2'-O-methylcytidine-3'-phosphate
  modified_base 7: mod_base = OTHER; note = 2'-deoxy-2'-fluoroadenosine-3'-phosphate
  modified_base 8: mod_base = OTHER; note = 2'-O-methyladenosine-3'-phosphate
  modified_base 9: mod_base = OTHER; note = 2'-deoxy-2'-fluoroguanosine-3'-phosphate
  modified_base 10: mod_base = OTHER; note = 2'-deoxy-2'-fluorouridine-3'-phosphate
  modified_base 11: mod_base = OTHER; note = 2'-deoxy-2'-fluorocytidine-3'-phosphate
  modified_base 12: mod_base = OTHER; note = 2'-O-methylcytidine-3'-phosphate
  modified_base 13: mod_base = OTHER; note = 2'-O-methylguanosine-3'-phosphate
  modified_base 14: mod_base = OTHER; note = 2'-O-methylcytidine-3'-phosphate
  modified_base 15: mod_base = OTHER; note = 2'-O-methyladenosine-3'-phosphate
  modified_base 16: mod_base = OTHER; note = 2'-O-methyluridine-3'-phosphate
  modified_base 17: mod_base = OTHER; note = 2'-O-methylcytidine-3'-phosphate
  modified_base 18: mod_base = OTHER; note = 2'-O-methyladenosine-3'-phosphate
  modified_base 19: mod_base = OTHER; note = 2'-O-methyladenosine-3'-phosphate
  modified_base 20: mod_base = OTHER; note = 2'-O-methylcytidine-3'-phosphate
  modified_base 21: mod_base = OTHER; note = 2'-O-methyluridine-3'-phosphate ((2S,4R)-1-[29-[[2-(acetylamino)-2-deoxy-beta-D-galactopyra nosyl]oxy]-14,14-bis[[3-[[3-[[5-[[2-(acetylamino)-2-deoxy-b eta-D-galactopyranosyl]oxy]-1-oxopentyl]amino]propyl]amino] -3-oxopropoxy]methyl]-1,12,19,25-tetraoxo-16-oxa-13,20,24-t riazanonacos-1-yl]-4-hydroxy-2-pyrrolidinyl)methyl ester
cctgtcaagtccgcatcaact

SEQ ID NO: 992 - RNA, 21 nt, synthetic construct
  source 1..21: mol_type = other RNA
  modified_base 1: mod_base = OTHER; note = 2'-O-methylcytidine-3'-phosphorothioate
  modified_base 2: mod_base = OTHER; note = 2'-O-methyladenosine-3'-phosphorothioate
  modified_base 3: mod_base = OTHER; note = 2'-O-methyluridine-3'-phosphate
  modified_base 4: mod_base = OTHER; note = 2'-O-methylcytidine-3'-phosphate
  modified_base 5: mod_base = OTHER; note = 2'-O-methylcytidine-3'-phosphate
  modified_base 6: mod_base = OTHER; note = 2'-O-methyluridine-3'-phosphate
  modified_base 7: mod_base = OTHER; note = 2'-deoxy-2'-fluoroguanosine-3'-phosphate
  modified_base 8: mod_base = OTHER; note = 2'-O-methyluridine-3'-phosphate
  modified_base 9: mod_base = OTHER; note = 2'-deoxy-2'-fluoroguanosine-3'-phosphate
  modified_base 10: mod_base = OTHER; note = 2'-deoxy-2'-fluoroguanosine-3'-phosphate
  modified_base 11: mod_base = OTHER; note = 2'-deoxy-2'-fluorocytidine-3'-phosphate
  modified_base 12: mod_base = OTHER; note = 2'-O-methyladenosine-3'-phosphate
  modified_base 13: mod_base = OTHER; note = 2'-O-methylcytidine-3'-phosphate
  modified_base 14: mod_base = OTHER; note = 2'-O-methylcytidine-3'-phosphate
  modified_base 15: mod_base = OTHER; note = 2'-O-methyladenosine-3'-phosphate
  modified_base 16: mod_base = OTHER; note = 2'-O-methylguanosine-3'-phosphate
  modified_base 17: mod_base = OTHER; note = 2'-O-methylguanosine-3'-phosphate
  modified_base 18: mod_base = OTHER; note = 2'-O-methylguanosine-3'-phosphate
  modified_base 19: mod_base = OTHER; note = 2'-O-methylcytidine-3'-phosphate
  modified_base 20: mod_base = OTHER; note = 2'-O-methyluridine-3'-phosphate
  modified_base 21: mod_base = OTHER; note = 2'-O-methyluridine-3'-phosphate ((2S,4R)-1-[29-[[2-(acetylamino)-2-deoxy-beta-D-galactopyra nosyl]oxy]-14,14-bis[[3-[[3-[[5-[[2-(acetylamino)-2-deoxy-b eta-D-galactopyranosyl]oxy]-1-oxopentyl]amino]propyl]amino] -3-oxopropoxy]methyl]-1,12,19,25-tetraoxo-16-oxa-13,20,24-t riazanonacos-1-yl]-4-hydroxy-2-pyrrolidinyl)methyl ester
catcctgtggcaccagggctt

SEQ ID NO: 993 - RNA, 21 nt, synthetic construct
  source 1..21: mol_type = other RNA
  modified_base 1: mod_base = OTHER; note = 2'-O-methylcytidine-3'-phosphorothioate
  modified_base 2: mod_base = OTHER; note = 2'-O-methylguanosine-3'-phosphorothioate
  modified_base 3: mod_base = OTHER; note = 2'-O-methyladenosine-3'-phosphate
  modified_base 4: mod_base = OTHER; note = 2'-O-methylguanosine-3'-phosphate
  modified_base 5: mod_base = OTHER; note = 2'-O-methylguanosine-3'-phosphate
  modified_base 6: mod_base = OTHER; note = 2'-O-methyluridine-3'-phosphate
  modified_base 7: mod_base = OTHER; note = 2'-deoxy-2'-fluorocytidine-3'-phosphate
  modified_base 8: mod_base = OTHER; note = 2'-O-methyladenosine-3'-phosphate
  modified_base 9: mod_base = OTHER; note = 2'-deoxy-2'-fluoroadenosine-3'-phosphate
  modified_base 10: mod_base = OTHER; note = 2'-deoxy-2'-fluorocytidine-3'-phosphate
  modified_base 11: mod_base = OTHER; note = 2'-deoxy-2'-fluoroadenosine-3'-phosphate
  modified_base 12: mod_base = OTHER; note = 2'-O-methyluridine-3'-phosphate
  modified_base 13: mod_base = OTHER; note = 2'-O-methylcytidine-3'-phosphate
  modified_base 14: mod_base = OTHER; note = 2'-O-methyladenosine-3'-phosphate
  modified_base 15: mod_base = OTHER; note = 2'-O-methylcytidine-3'-phosphate
  modified_base 16: mod_base = OTHER; note = 2'-O-methylcytidine-3'-phosphate
  modified_base 17: mod_base = OTHER; note = 2'-O-methyluridine-3'-phosphate
  modified_base 18: mod_base = OTHER; note = 2'-O-methyluridine-3'-phosphate
  modified_base 19: mod_base = OTHER; note = 2'-O-methylcytidine-3'-phosphate
  modified_base 20: mod_base = OTHER; note = 2'-O-methyluridine-3'-phosphate
  modified_base 21: mod_base = OTHER; note = 2'-O-methyluridine-3'-phosphate ((2S,4R)-1-[29-[[2-(acetylamino)-2-deoxy-beta-D-galactopyra nosyl]oxy]-14,14-bis[[3-[[3-[[5-[[2-(acetylamino)-2-deoxy-b eta-D-galactopyranosyl]oxy]-1-oxopentyl]amino]propyl]amino] -3-oxopropoxy]methyl]-1,12,19,25-tetraoxo-16-oxa-13,20,24-t riazanonacos-1-yl]-4-hydroxy-2-pyrrolidinyl)methyl ester
cgaggtcaacatcaccttctt

SEQ ID NO: 994 - RNA, 21 nt, synthetic construct
  source 1..21: mol_type = other RNA
  modified_base 1: mod_base = OTHER; note = 2'-O-methylcytidine-3'-phosphorothioate
  modified_base 2: mod_base = OTHER; note = 2'-O-methylguanosine-3'-phosphorothioate
  modified_base 3: mod_base = OTHER; note = 2'-O-methyluridine-3'-phosphate
  modified_base 4: mod_base = OTHER; note = 2'-O-methylcytidine-3'-phosphate
  modified_base 5: mod_base = OTHER; note = 2'-O-methylcytidine-3'-phosphate
  modified_base 6: mod_base = OTHER; note = 2'-O-methyladenosine-3'-phosphate
  modified_base 7: mod_base = OTHER; note = 2'-deoxy-2'-fluoroadenosine-3'-phosphate
  modified_base 8: mod_base = OTHER; note = 2'-O-methylguanosine-3'-phosphate
  modified_base 9: mod_base = OTHER; note = 2'-deoxy-2'-fluorouridine-3'-phosphate
  modified_base 10: mod_base = OTHER; note = 2'-deoxy-2'-fluoroadenosine-3'-phosphate
  modified_base 11: mod_base = OTHER; note = 2'-deoxy-2'-fluorocytidine-3'-phosphate
  modified_base 12: mod_base = OTHER; note = 2'-O-methyluridine-3'-phosphate
  modified_base 13: mod_base = OTHER; note = 2'-O-methylcytidine-3'-phosphate
  modified_base 14: mod_base = OTHER; note = 2'-O-methyladenosine-3'-phosphate
  modified_base 15: mod_base = OTHER; note = 2'-O-methylguanosine-3'-phosphate
  modified_base 16: mod_base = OTHER; note = 2'-O-methylcytidine-3'-phosphate
  modified_base 17: mod_base = OTHER; note = 2'-O-methyladenosine-3'-phosphate
  modified_base 18: mod_base = OTHER; note = 2'-O-methylguanosine-3'-phosphate
  modified_base 19: mod_base = OTHER; note = 2'-O-methyladenosine-3'-phosphate
  modified_base 20: mod_base = OTHER; note = 2'-O-methylguanosine-3'-phosphate
  modified_base 21: mod_base = OTHER; note = 2'-O-methyluridine-3'-phosphate ((2S,4R)-1-[29-[[2-(acetylamino)-2-deoxy-beta-D-galactopyra nosyl]oxy]-14,14-bis[[3-[[3-[[5-[[2-(acetylamino)-2-deoxy-b eta-D-galactopyranosyl]oxy]-1-oxopentyl]amino]propyl]amino] -3-oxopropoxy]methyl]-1,12,19,25-tetraoxo-16-oxa-13,20,24-t riazanonacos-1-yl]-4-hydroxy-2-pyrrolidinyl)methyl ester
cgtccaagtactcagcagagt

SEQ ID NO: 995 - RNA, 21 nt, synthetic construct
  source 1..21: mol_type = other RNA
  modified_base 1: mod_base = OTHER; note = 2'-O-methylcytidine-3'-phosphorothioate
  modified_base 2: mod_base = OTHER; note = 2'-O-methyladenosine-3'-phosphorothioate
  modified_base 3: mod_base = OTHER; note = 2'-O-methyluridine-3'-phosphate
  modified_base 4: mod_base = OTHER; note = 2'-O-methylguanosine-3'-phosphate
  modified_base 5: mod_base = OTHER; note = 2'-O-methylcytidine-3'-phosphate
  modified_base 6: mod_base = OTHER; note = 2'-O-methyladenosine-3'-phosphate
  modified_base 7: mod_base = OTHER; note = 2'-deoxy-2'-fluoroguanosine-3'-phosphate
  modified_base 8: mod_base = OTHER; note = 2'-O-methylcytidine-3'-phosphate
  modified_base 9: mod_base = OTHER; note = 2'-deoxy-2'-fluoroadenosine-3'-phosphate
  modified_base 10: mod_base = OTHER; note = 2'-deoxy-2'-fluorocytidine-3'-phosphate
  modified_base 11: mod_base = OTHER; note = 2'-deoxy-2'-fluorocytidine-3'-phosphate
  modified_base 12: mod_base = OTHER; note = 2'-O-methyladenosine-3'-phosphate
  modified_base 13: mod_base = OTHER; note = 2'-O-methylguanosine-3'-phosphate
  modified_base 14: mod_base = OTHER; note = 2'-O-methyluridine-3'-phosphate
  modified_base 15: mod_base = OTHER; note = 2'-O-methylguanosine-3'-phosphate
  modified_base 16: mod_base = OTHER; note = 2'-O-methylcytidine-3'-phosphate
  modified_base 17: mod_base = OTHER; note = 2'-O-methyladenosine-3'-phosphate
  modified_base 18: mod_base = OTHER; note = 2'-O-methylcytidine-3'-phosphate
  modified_base 19: mod_base = OTHER; note = 2'-O-methylcytidine-3'-phosphate
  modified_base 20: mod_base = OTHER; note = 2'-O-methyluridine-3'-phosphate
  modified_base 21: mod_base = OTHER; note = 2'-O-methyluridine-3'-phosphate ((2S,4R)-1-[29-[[2-(acetylamino)-2-deoxy-beta-D-galactopyra nosyl]oxy]-14,14-bis[[3-[[3-[[5-[[2-(acetylamino)-2-deoxy-b eta-D-galactopyranosyl]oxy]-1-oxopentyl]amino]propyl]amino] -3-oxopropoxy]methyl]-1,12,19,25-tetraoxo-16-oxa-13,20,24-t riazanonacos-1-yl]-4-hydroxy-2-pyrrolidinyl)methyl ester
catgcagcaccagtgcacctt

SEQ ID NO: 996 - RNA, 21 nt, synthetic construct
  source 1..21: mol_type = other RNA
  modified_base 1: mod_base = OTHER; note = 2'-O-methylcytidine-3'-phosphorothioate
  modified_base 2: mod_base = OTHER; note = 2'-O-methyluridine-3'-phosphorothioate
  modified_base 3: mod_base = OTHER; note = 2'-O-methyluridine-3'-phosphate
  modified_base 4: mod_base = OTHER; note = 2'-O-methylguanosine-3'-phosphate
  modified_base 5: mod_base = OTHER; note = 2'-O-methylcytidine-3'-phosphate
  modified_base 6: mod_base = OTHER; note = 2'-O-methyladenosine-3'-phosphate
  modified_base 7: mod_base = OTHER; note = 2'-deoxy-2'-fluorocytidine-3'-phosphate
  modified_base 8: mod_base = OTHER; note = 2'-O-methyluridine-3'-phosphate
  modified_base 9: mod_base = OTHER; note = 2'-deoxy-2'-fluoroguanosine-3'-phosphate
  modified_base 10: mod_base = OTHER; note = 2'-deoxy-2'-fluorouridine-3'-phosphate
  modified_base 11: mod_base = OTHER; note = 2'-deoxy-2'-fluorocytidine-3'-phosphate
  modified_base 12: mod_base = OTHER; note = 2'-O-methylcytidine-3'-phosphate
  modified_base 13: mod_base = OTHER; note = 2'-O-methyluridine-3'-phosphate
  modified_base 14: mod_base = OTHER; note = 2'-O-methyladenosine-3'-phosphate
  modified_base 15: mod_base = OTHER; note = 2'-O-methyladenosine-3'-phosphate
  modified_base 16: mod_base = OTHER; note = 2'-O-methylcytidine-3'-phosphate
  modified_base 17: mod_base = OTHER; note = 2'-O-methylguanosine-3'-phosphate
  modified_base 18: mod_base = OTHER; note = 2'-O-methylguanosine-3'-phosphate
  modified_base 19: mod_base = OTHER; note = 2'-O-methylcytidine-3'-phosphate
  modified_base 20: mod_base = OTHER; note = 2'-O-methyluridine-3'-phosphate
  modified_base 21: mod_base = OTHER; note = 2'-O-methyluridine-3'-phosphate ((2S,4R)-1-[29-[[2-(acetylamino)-2-deoxy-beta-D-galactopyra nosyl]oxy]-14,14-bis[[3-[[3-[[5-[[2-(acetylamino)-2-deoxy-b eta-D-galactopyranosyl]oxy]-1-oxopentyl]amino]propyl]amino] -3-oxopropoxy]methyl]-1,12,19,25-tetraoxo-16-oxa-13,20,24-t riazanonacos-1-yl]-4-hydroxy-2-pyrrolidinyl)methyl ester
cttgcactgtcctaacggctt

SEQ ID NO: 997 - RNA, 21 nt, synthetic construct
  source 1..21: mol_type = other RNA
  modified_base 1: mod_base = OTHER; note = 2'-O-methylcytidine-3'-phosphorothioate
  modified_base 2: mod_base = OTHER; note = 2'-O-methyluridine-3'-phosphorothioate
  modified_base 3: mod_base = OTHER; note = 2'-O-methylguanosine-3'-phosphate
  modified_base 4: mod_base = OTHER; note = 2'-O-methylcytidine-3'-phosphate
  modified_base 5: mod_base = OTHER; note = 2'-O-methyladenosine-3'-phosphate
  modified_base 6: mod_base = OTHER; note = 2'-O-methylcytidine-3'-phosphate
  modified_base 7: mod_base = OTHER; note = 2'-deoxy-2'-fluoroadenosine-3'-phosphate
  modified_base 8: mod_base = OTHER; note = 2'-O-methylcytidine-3'-phosphate
  modified_base 9: mod_base = OTHER; note = 2'-deoxy-2'-fluorocytidine-3'-phosphate
  modified_base 10: mod_base = OTHER; note = 2'-deoxy-2'-fluorouridine-3'-phosphate
  modified_base 11: mod_base = OTHER; note = 2'-deoxy-2'-fluoroadenosine-3'-phosphate
  modified_base 12: mod_base = OTHER; note = 2'-O-methylcytidine-3'-phosphate
  modified_base 13: mod_base = OTHER; note = 2'-O-methyladenosine-3'-phosphate
  modified_base 14: mod_base = OTHER; note = 2'-O-methylcytidine-3'-phosphate
  modified_base 15: mod_base = OTHER; note = 2'-O-methylcytidine-3'-phosphate
  modified_base 16: mod_base = OTHER; note = 2'-O-methylcytidine-3'-phosphate
  modified_base 17: mod_base = OTHER; note = 2'-O-methyladenosine-3'-phosphate
  modified_base 18: mod_base = OTHER; note = 2'-O-methylcytidine-3'-phosphate
  modified_base 19: mod_base = OTHER; note = 2'-O-methylguanosine-3'-phosphate
  modified_base 20: mod_base = OTHER; note = 2'-O-methyluridine-3'-phosphate
  modified_base 21: mod_base = OTHER; note = 2'-O-methyluridine-3'-phosphate ((2S,4R)-1-[29-[[2-(acetylamino)-2-deoxy-beta-D-galactopyra nosyl]oxy]-14,14-bis[[3-[[3-[[5-[[2-(acetylamino)-2-deoxy-b eta-D-galactopyranosyl]oxy]-1-oxopentyl]amino]propyl]amino] -3-oxopropoxy]methyl]-1,12,19,25-tetraoxo-16-oxa-13,20,24-t riazanonacos-1-yl]-4-hydroxy-2-pyrrolidinyl)methyl ester
ctgcacacctacacccacgtt

SEQ ID NO: 998 - RNA, 21 nt, synthetic construct
  source 1..21: mol_type = other RNA
  modified_base 1: mod_base = OTHER; note = 2'-O-methylguanosine-3'-phosphorothioate
  modified_base 2: mod_base = OTHER; note = 2'-O-methylcytidine-3'-phosphorothioate
  modified_base 3: mod_base = OTHER; note = 2'-O-methyladenosine-3'-phosphate
  modified_base 4: mod_base = OTHER; note = 2'-O-methylcytidine-3'-phosphate
  modified_base 5: mod_base = OTHER; note = 2'-O-methylguanosine-3'-phosphate
  modified_base 6: mod_base = OTHER; note = 2'-O-methylcytidine-3'-phosphate
  modified_base 7: mod_base = OTHER; note = 2'-deoxy-2'-fluorocytidine-3'-phosphate
  modified_base 8: mod_base = OTHER; note = 2'-O-methylcytidine-3'-phosphate
  modified_base 9: mod_base = OTHER; note = 2'-deoxy-2'-fluorouridine-3'-phosphate
  modified_base 10: mod_base = OTHER; note = 2'-deoxy-2'-fluorouridine-3'-phosphate
  modified_base 11: mod_base = OTHER; note = 2'-deoxy-2'-fluorocytidine-3'-phosphate
  modified_base 12: mod_base = OTHER; note = 2'-O-methyluridine-3'-phosphate
  modified_base 13: mod_base = OTHER; note = 2'-O-methylguanosine-3'-phosphate
  modified_base 14: mod_base = OTHER; note = 2'-O-methyluridine-3'-phosphate
  modified_base 15: mod_base = OTHER; note = 2'-O-methylguanosine-3'-phosphate
  modified_base 16: mod_base = OTHER; note = 2'-O-methyluridine-3'-phosphate
  modified_base 17: mod_base = OTHER; note = 2'-O-methylcytidine-3'-phosphate
  modified_base 18: mod_base = OTHER; note = 2'-O-methylcytidine-3'-phosphate
  modified_base 19: mod_base = OTHER; note = 2'-O-methylcytidine-3'-phosphate
  modified_base 20: mod_base = OTHER; note = 2'-O-methyluridine-3'-phosphate
  modified_base 21: mod_base = OTHER; note = 2'-O-methyluridine-3'-phosphate ((2S,4R)-1-[29-[[2-(acetylamino)-2-deoxy-beta-D-galactopyra nosyl]oxy]-14,14-bis[[3-[[3-[[5-[[2-(acetylamino)-2-deoxy-b eta-D-galactopyranosyl]oxy]-1-oxopentyl]amino]propyl]amino] -3-oxopropoxy]methyl]-1,12,19,25-tetraoxo-16-oxa-13,20,24-t riazanonacos-1-yl]-4-hydroxy-2-pyrrolidinyl)methyl ester
gcacgcccttctgtgtccctt

SEQ ID NO: 999 - RNA, 21 nt, synthetic construct
  source 1..21: mol_type = other RNA
  modified_base 1: mod_base = OTHER; note = 2'-O-methyladenosine-3'-phosphorothioate
  modified_base 2: mod_base = OTHER; note = 2'-O-methylcytidine-3'-phosphorothioate
  modified_base 3: mod_base = OTHER; note = 2'-O-methyluridine-3'-phosphate
  modified_base 4: mod_base = OTHER; note = 2'-O-methylguanosine-3'-phosphate
  modified_base 5: mod_base = OTHER; note = 2'-O-methylcytidine-3'-phosphate
  modified_base 6: mod_base = OTHER; note = 2'-O-methyluridine-3'-phosphate
  modified_base 7: mod_base = OTHER; note = 2'-deoxy-2'-fluoroguanosine-3'-phosphate
  modified_base 8: mod_base = OTHER; note = 2'-O-methyluridine-3'-phosphate
  modified_base 9: mod_base = OTHER; note = 2'-deoxy-2'-fluorocytidine-3'-phosphate
  modified_base 10: mod_base = OTHER; note = 2'-deoxy-2'-fluorouridine-3'-phosphate
  modified_base 11: mod_base = OTHER; note = 2'-deoxy-2'-fluoroguanosine-3'-phosphate
  modified_base 12: mod_base = OTHER; note = 2'-O-methyladenosine-3'-phosphate
  modified_base 13: mod_base = OTHER; note = 2'-O-methylguanosine-3'-phosphate
  modified_base 14: mod_base = OTHER; note = 2'-O-methyladenosine-3'-phosphate
  modified_base 15: mod_base = OTHER; note = 2'-O-methyladenosine-3'-phosphate
  modified_base 16: mod_base = OTHER; note = 2'-O-methylcytidine-3'-phosphate
  modified_base 17: mod_base = OTHER; note = 2'-O-methylguanosine-3'-phosphate
  modified_base 18: mod_base = OTHER; note = 2'-O-methyluridine-3'-phosphate
  modified_base 19: mod_base = OTHER; note = 2'-O-methyluridine-3'-phosphate
  modified_base 20: mod_base = OTHER; note = 2'-O-methylcytidine-3'-phosphate
  modified_base 21: mod_base = OTHER; note = 2'-O-methyluridine-3'-phosphate ((2S,4R)-1-[29-[[2-(acetylamino)-2-deoxy-beta-D-galactopyra nosyl]oxy]-14,14-bis[[3-[[3-[[5-[[2-(acetylamino)-2-deoxy-b eta-D-galactopyranosyl]oxy]-1-oxopentyl]amino]propyl]amino] -3-oxopropoxy]methyl]-1,12,19,25-tetraoxo-16-oxa-13,20,24-t riazanonacos-1-yl]-4-hydroxy-2-pyrrolidinyl)methyl ester
actgctgtctgagaacgttct

SEQ ID NO: 1000 - RNA, 21 nt, synthetic construct
  source 1..21: mol_type = other RNA
  modified_base 1: mod_base = OTHER; note = 2'-O-methylcytidine-3'-phosphorothioate
  modified_base 2: mod_base = OTHER; note = 2'-O-methyladenosine-3'-phosphorothioate
  modified_base 3: mod_base = OTHER; note = 2'-O-methyluridine-3'-phosphate
  modified_base 4: mod_base = OTHER; note = 2'-O-methylguanosine-3'-phosphate
  modified_base 5: mod_base = OTHER; note = 2'-O-methylcytidine-3'-phosphate
  modified_base 6: mod_base = OTHER; note = 2'-O-methyluridine-3'-phosphate
  modified_base 7: mod_base = OTHER; note = 2'-deoxy-2'-fluorocytidine-3'-phosphate
  modified_base 8: mod_base = OTHER; note = 2'-O-methyluridine-3'-phosphate
  modified_base 9: mod_base = OTHER; note = 2'-deoxy-2'-fluoroguanosine-3'-phosphate
  modified_base 10: mod_base = OTHER; note = 2'-deoxy-2'-fluorouridine-3'-phosphate
  modified_base 11: mod_base = OTHER; note = 2'-deoxy-2'-fluorocytidine-3'-phosphate
  modified_base 12: mod_base = OTHER; note = 2'-O-methylcytidine-3'-phosphate
  modified_base 13: mod_base = OTHER; note = 2'-O-methyladenosine-3'-phosphate
  modified_base 14: mod_base = OTHER; note = 2'-O-methylcytidine-3'-phosphate
  modified_base 15: mod_base = OTHER; note = 2'-O-methylcytidine-3'-phosphate
  modified_base 16: mod_base = OTHER; note = 2'-O-methyluridine-3'-phosphate
  modified_base 17: mod_base = OTHER; note = 2'-O-methylguanosine-3'-phosphate
  modified_base 18: mod_base = OTHER; note = 2'-O-methylguanosine-3'-phosphate
  modified_base 19: mod_base = OTHER; note = 2'-O-methyladenosine-3'-phosphate
  modified_base 20: mod_base = OTHER; note = 2'-O-methylguanosine-3'-phosphate
  modified_base 21: mod_base = OTHER; note = 2'-O-methyluridine-3'-phosphate ((2S,4R)-1-[29-[[2-(acetylamino)-2-deoxy-beta-D-galactopyra nosyl]oxy]-14,14-bis[[3-[[3-[[5-[[2-(acetylamino)-2-deoxy-b eta-D-galactopyranosyl]oxy]-1-oxopentyl]amino]propyl]amino] -3-oxopropoxy]methyl]-1,12,19,25-tetraoxo-16-oxa-13,20,24-t riazanonacos-1-yl]-4-hydroxy-2-pyrrolidinyl)methyl ester
catgctctgtccacctggagt

SEQ ID NO: 1001 - RNA, 21 nt, synthetic construct
  source 1..21: mol_type = other RNA
  modified_base 1: mod_base = OTHER; note = 2'-O-methylguanosine-3'-phosphorothioate
  modified_base 2: mod_base = OTHER; note = 2'-O-methylcytidine-3'-phosphorothioate
  modified_base 3: mod_base = OTHER; note = 2'-O-methyladenosine-3'-phosphate
  modified_base 4: mod_base = OTHER; note = 2'-O-methyluridine-3'-phosphate
  modified_base 5: mod_base = OTHER; note = 2'-O-methyluridine-3'-phosphate
  modified_base 6: mod_base = OTHER; note = 2'-O-methylguanosine-3'-phosphate
  modified_base 7: mod_base = OTHER; note = 2'-deoxy-2'-fluorouridine-3'-phosphate
  modified_base 8: mod_base = OTHER; note = 2'-O-methylcytidine-3'-phosphate
  modified_base 9: mod_base = OTHER; note = 2'-deoxy-2'-fluorouridine-3'-phosphate
  modified_base 10: mod_base = OTHER; note = 2'-deoxy-2'-fluoroguanosine-3'-phosphate
  modified_base 11: mod_base = OTHER; note = 2'-deoxy-2'-fluoroadenosine-3'-phosphate
  modified_base 12: mod_base = OTHER; note = 2'-O-methyluridine-3'-phosphate
  modified_base 13: mod_base = OTHER; note = 2'-O-methylcytidine-3'-phosphate
  modified_base 14: mod_base = OTHER; note = 2'-O-methyladenosine-3'-phosphate
  modified_base 15: mod_base = OTHER; note = 2'-O-methyluridine-3'-phosphate
  modified_base 16: mod_base = OTHER; note = 2'-O-methylguanosine-3'-phosphate
  modified_base 17: mod_base = OTHER; note = 2'-O-methyladenosine-3'-phosphate
  modified_base 18: mod_base = OTHER; note = 2'-O-methyladenosine-3'-phosphate
  modified_base 19: mod_base = OTHER; note = 2'-O-methyladenosine-3'-phosphate
  modified_base 20: mod_base = OTHER; note = 2'-O-methyladenosine-3'-phosphate
  modified_base 21: mod_base = OTHER; note = 2'-O-methyluridine-3'-phosphate ((2S,4R)-1-[29-[[2-(acetylamino)-2-deoxy-beta-D-galactopyra nosyl]oxy]-14,14-bis[[3-[[3-[[5-[[2-(acetylamino)-2-deoxy-b eta-D-galactopyranosyl]oxy]-1-oxopentyl]amino]propyl]amino] -3-oxopropoxy]methyl]-1,12,19,25-tetraoxo-16-oxa-13,20,24-t riazanonacos-1-yl]-4-hydroxy-2-pyrrolidinyl)methyl ester
gcattgtctgatcatgaaaat

SEQ ID NO: 1002 - RNA, 21 nt, synthetic construct
  source 1..21: mol_type = other RNA
  modified_base 1: mod_base = OTHER; note = 2'-O-methylguanosine-3'-phosphorothioate
  modified_base 2: mod_base = OTHER; note = 2'-O-methylguanosine-3'-phosphorothioate
  modified_base 3: mod_base = OTHER; note = 2'-O-methylcytidine-3'-phosphate
  modified_base 4: mod_base = OTHER; note = 2'-O-methylguanosine-3'-phosphate
  modified_base 5: mod_base = OTHER; note = 2'-O-methylcytidine-3'-phosphate
  modified_base 6: mod_base = OTHER; note = 2'-O-methylcytidine-3'-phosphate
  modified_base 7: mod_base = OTHER; note = 2'-deoxy-2'-fluoroadenosine-3'-phosphate
  modified_base 8: mod_base = OTHER; note = 2'-O-methylcytidine-3'-phosphate
  modified_base 9: mod_base = OTHER; note = 2'-deoxy-2'-fluorouridine-3'-phosphate
  modified_base 10: mod_base = OTHER; note = 2'-deoxy-2'-fluorocytidine-3'-phosphate
  modified_base 11: mod_base = OTHER; note = 2'-deoxy-2'-fluoroadenosine-3'-phosphate
  modified_base 12: mod_base = OTHER; note = 2'-O-methylguanosine-3'-phosphate
  modified_base 13: mod_base = OTHER; note = 2'-O-methylguanosine-3'-phosphate
  modified_base 14: mod_base = OTHER; note = 2'-O-methyladenosine-3'-phosphate
  modified_base 15: mod_base = OTHER; note = 2'-O-methylguanosine-3'-phosphate
  modified_base 16: mod_base = OTHER; note = 2'-O-methyluridine-3'-phosphate
  modified_base 17: mod_base = OTHER; note = 2'-O-methylcytidine-3'-phosphate
  modified_base 18: mod_base = OTHER; note = 2'-O-methylcytidine-3'-phosphate
  modified_base 19: mod_base = OTHER; note = 2'-O-methyluridine-3'-phosphate
  modified_base 20: mod_base = OTHER; note = 2'-O-methyladenosine-3'-phosphate
  modified_base 21: mod_base = OTHER; note = 2'-O-methyluridine-3'-phosphate ((2S,4R)-1-[29-[[2-(acetylamino)-2-deoxy-beta-D-galactopyra nosyl]oxy]-14,14-bis[[3-[[3-[[5-[[2-(acetylamino)-2-deoxy-b eta-D-galactopyranosyl]oxy]-1-oxopentyl]amino]propyl]amino] -3-oxopropoxy]methyl]-1,12,19,25-tetraoxo-16-oxa-13,20,24-t riazanonacos-1-yl]-4-hydroxy-2-pyrrolidinyl)methyl ester
ggcgccactcaggagtcctat

SEQ ID NO: 1003 - RNA, 21 nt, synthetic construct
  source 1..21: mol_type = other RNA
  modified_base 1: mod_base = OTHER; note = 2'-O-methylcytidine-3'-phosphorothioate
  modified_base 2: mod_base = OTHER; note = 2'-O-methyluridine-3'-phosphorothioate
  modified_base 3: mod_base = OTHER; note = 2'-O-methylcytidine-3'-phosphate
  modified_base 4: mod_base = OTHER; note = 2'-O-methylcytidine-3'-phosphate
  modified_base 5: mod_base = OTHER; note = 2'-O-methylcytidine-3'-phosphate
  modified_base 6: mod_base = OTHER; note = 2'-O-methyluridine-3'-phosphate
  modified_base 7: mod_base = OTHER; note = 2'-deoxy-2'-fluoroguanosine-3'-phosphate
  modified_base 8: mod_base = OTHER; note = 2'-O-methyladenosine-3'-phosphate
  modified_base 9: mod_base = OTHER; note = 2'-deoxy-2'-fluorouridine-3'-phosphate
  modified_base 10: mod_base = OTHER; note = 2'-deoxy-2'-fluoroguanosine-3'-phosphate
  modified_base 11: mod_base = OTHER; note = 2'-deoxy-2'-fluorouridine-3'-phosphate
  modified_base 12: mod_base = OTHER; note = 2'-O-methylcytidine-3'-phosphate
  modified_base 13: mod_base = OTHER; note = 2'-O-methyladenosine-3'-phosphate
  modified_base 14: mod_base = OTHER; note = 2'-O-methylcytidine-3'-phosphate
  modified_base 15: mod_base = OTHER; note = 2'-O-methyluridine-3'-phosphate
  modified_base 16: mod_base = OTHER; note = 2'-O-methylguanosine-3'-phosphate
  modified_base 17: mod_base = OTHER; note = 2'-O-methylguanosine-3'-phosphate
  modified_base 18: mod_base = OTHER; note = 2'-O-methylguanosine-3'-phosphate
  modified_base 19: mod_base = OTHER; note = 2'-O-methyladenosine-3'-phosphate
  modified_base 20: mod_base = OTHER; note = 2'-O-methylcytidine-3'-phosphate
  modified_base 21: mod_base = OTHER; note = 2'-O-methyluridine-3'-phosphate ((2S,4R)-1-[29-[[2-(acetylamino)-2-deoxy-beta-D-galactopyra nosyl]oxy]-14,14-bis[[3-[[3-[[5-[[2-(acetylamino)-2-deoxy-b eta-D-galactopyranosyl]oxy]-1-oxopentyl]amino]propyl]amino] -3-oxopropoxy]methyl]-1,12,19,25-tetraoxo-16-oxa-13,20,24-t riazanonacos-1-yl]-4-hydroxy-2-pyrrolidinyl)methyl ester
ctccctgatgtcactgggact

SEQ ID NO: 1004 - RNA, 21 nt, synthetic construct
  source 1..21: mol_type = other RNA
  modified_base 1: mod_base = OTHER; note = 2'-O-methylcytidine-3'-phosphorothioate
  modified_base 2: mod_base = OTHER; note = 2'-O-methyluridine-3'-phosphorothioate
  modified_base 3: mod_base = OTHER; note = 2'-O-methylguanosine-3'-phosphate
  modified_base 4: mod_base = OTHER; note = 2'-O-methylguanosine-3'-phosphate
  modified_base 5: mod_base = OTHER; note = 2'-O-methyladenosine-3'-phosphate
  modified_base 6: mod_base = OTHER; note = 2'-O-methyladenosine-3'-phosphate
  modified_base 7: mod_base = OTHER; note = 2'-deoxy-2'-fluorocytidine-3'-phosphate
  modified_base 8: mod_base = OTHER; note = 2'-O-methyladenosine-3'-phosphate
  modified_base 9: mod_base = OTHER; note = 2'-deoxy-2'-fluoroadenosine-3'-phosphate
  modified_base 10: mod_base = OTHER; note = 2'-deoxy-2'-fluoroadenosine-3'-phosphate
  modified_base 11: mod_base = OTHER; note = 2'-deoxy-2'-fluorocytidine-3'-phosphate
  modified_base 12: mod_base = OTHER; note = 2'-O-methyluridine-3'-phosphate
  modified_base 13: mod_base = OTHER; note = 2'-O-methyladenosine-3'-phosphate
  modified_base 14: mod_base = OTHER; note = 2'-O-methyladenosine-3'-phosphate
  modified_base 15: mod_base = OTHER; note = 2'-O-methylguanosine-3'-phosphate
  modified_base 16: mod_base = OTHER; note = 2'-O-methylcytidine-3'-phosphate
  modified_base 17: mod_base = OTHER; note = 2'-O-methyladenosine-3'-phosphate
  modified_base 18: mod_base = OTHER; note = 2'-O-methyluridine-3'-phosphate
  modified_base 19: mod_base = OTHER; note = 2'-O-methylguanosine-3'-phosphate
  modified_base 20: mod_base = OTHER; note = 2'-O-methyluridine-3'-phosphate
  modified_base 21: mod_base = OTHER; note = 2'-O-methyluridine-3'-phosphate ((2S,4R)-1-[29-[[2-(acetylamino)-2-deoxy-beta-D-galactopyra nosyl]oxy]-14,14-bis[[3-[[3-[[5-[[2-(acetylamino)-2-deoxy-b eta-D-galactopyranosyl]oxy]-1-oxopentyl]amino]propyl]amino] -3-oxopropoxy]methyl]-1,12,19,25-tetraoxo-16-oxa-13,20,24-t riazanonacos-1-yl]-4-hydroxy-2-pyrrolidinyl)methyl ester
ctggaacaaactaagcatgtt

SEQ ID NO: 1005 - RNA, 21 nt, synthetic construct
  source 1..21: mol_type = other RNA
  modified_base 1: mod_base = OTHER; note = 2'-O-methylcytidine-3'-phosphorothioate
  modified_base 2: mod_base = OTHER; note = 2'-O-methyladenosine-3'-phosphorothioate
  modified_base 3: mod_base = OTHER; note = 2'-O-methylcytidine-3'-phosphate
  modified_base 4: mod_base = OTHER; note = 2'-O-methylguanosine-3'-phosphate
  modified_base 5: mod_base = OTHER; note = 2'-O-methylguanosine-3'-phosphate
  modified_base 6: mod_base = OTHER; note = 2'-O-methyladenosine-3'-phosphate
  modified_base 7: mod_base = OTHER; note = 2'-deoxy-2'-fluorouridine-3'-phosphate
  modified_base 8: mod_base = OTHER; note = 2'-O-methyluridine-3'-phosphate
  modified_base 9: mod_base = OTHER; note = 2'-deoxy-2'-fluorocytidine-3'-phosphate
  modified_base 10: mod_base = OTHER; note = 2'-deoxy-2'-fluorocytidine-3'-phosphate
  modified_base 11: mod_base = OTHER; note = 2'-deoxy-2'-fluoroadenosine-3'-phosphate
  modified_base 12: mod_base = OTHER; note = 2'-O-methylguanosine-3'-phosphate
  modified_base 13: mod_base = OTHER; note = 2'-O-methylcytidine-3'-phosphate
  modified_base 14: mod_base = OTHER; note = 2'-O-methyluridine-3'-phosphate
  modified_base 15: mod_base = OTHER; note = 2'-O-methylguanosine-3'-phosphate
  modified_base 16: mod_base = OTHER; note = 2'-O-methylguanosine-3'-phosphate
  modified_base 17: mod_base = OTHER; note = 2'-O-methylcytidine-3'-phosphate
  modified_base 18: mod_base = OTHER; note = 2'-O-methylcytidine-3'-phosphate
  modified_base 19: mod_base = OTHER; note = 2'-O-methyladenosine-3'-phosphate
  modified_base 20: mod_base = OTHER; note = 2'-O-methylcytidine-3'-phosphate
  modified_base 21: mod_base = OTHER; note = 2'-O-methyluridine-3'-phosphate ((2S,4R)-1-[29-[[2-(acetylamino)-2-deoxy-beta-D-galactopyra nosyl]oxy]-14,14-bis[[3-[[3-[[5-[[2-(acetylamino)-2-deoxy-b eta-D-galactopyranosyl]oxy]-1-oxopentyl]amino]propyl]amino] -3-oxopropoxy]methyl]-1,12,19,25-tetraoxo-16-oxa-13,20,24-t riazanonacos-1-yl]-4-hydroxy-2-pyrrolidinyl)methyl ester
cacggattccagctggccact

SEQ ID NO: 1006 - RNA, 21 nt, synthetic construct
  source 1..21: mol_type = other RNA
  modified_base 1: mod_base = OTHER; note = 2'-O-methylguanosine-3'-phosphorothioate
  modified_base 2: mod_base = OTHER; note = 2'-O-methyladenosine-3'-phosphorothioate
  modified_base 3: mod_base = OTHER; note = 2'-O-methylcytidine-3'-phosphate
  modified_base 4: mod_base = OTHER; note = 2'-O-methyladenosine-3'-phosphate
  modified_base 5: mod_base = OTHER; note = 2'-O-methylguanosine-3'-phosphate
  modified_base 6: mod_base = OTHER; note = 2'-O-methylguanosine-3'-phosphate
  modified_base 7: mod_base = OTHER; note = 2'-deoxy-2'-fluorocytidine-3'-phosphate
  modified_base 8: mod_base = OTHER; note = 2'-O-methyluridine-3'-phosphate
  modified_base 9: mod_base = OTHER; note = 2'-deoxy-2'-fluoroguanosine-3'-phosphate
  modified_base 10: mod_base = OTHER; note = 2'-deoxy-2'-fluoroguanosine-3'-phosphate
  modified_base 11: mod_base = OTHER; note = 2'-deoxy-2'-fluorouridine-3'-phosphate
  modified_base 12: mod_base = OTHER; note = 2'-O-methylcytidine-3'-phosphate
  modified_base 13: mod_base = OTHER; note = 2'-O-methylcytidine-3'-phosphate
  modified_base 14: mod_base = OTHER; note = 2'-O-methyladenosine-3'-phosphate
  modified_base 15: mod_base = OTHER; note = 2'-O-methylguanosine-3'-phosphate
  modified_base 16: mod_base = OTHER; note = 2'-O-methylguanosine-3'-phosphate
  modified_base 17: mod_base = OTHER; note = 2'-O-methylcytidine-3'-phosphate
  modified_base 18: mod_base = OTHER; note = 2'-O-methyladenosine-3'-phosphate
  modified_base 19: mod_base = OTHER; note = 2'-O-methyladenosine-3'-phosphate
  modified_base 20: mod_base = OTHER; note = 2'-O-methylguanosine-3'-phosphate
  modified_base 21: mod_base = OTHER; note = 2'-O-methyluridine-3'-phosphate ((2S,4R)-1-[29-[[2-(acetylamino)-2-deoxy-beta-D-galactopyra nosyl]oxy]-14,14-bis[[3-[[3-[[5-[[2-(acetylamino)-2-deoxy-b eta-D-galactopyranosyl]oxy]-1-oxopentyl]amino]propyl]amino] -3-oxopropoxy]methyl]-1,12,19,25-tetraoxo-16-oxa-13,20,24-t riazanonacos-1-yl]-4-hydroxy-2-pyrrolidinyl)methyl ester
gacaggctggtccaggcaagt

SEQ ID NO: 1007 - RNA, 21 nt, synthetic construct
  source 1..21: mol_type = other RNA
  modified_base 1: mod_base = OTHER; note = 2'-O-methylcytidine-3'-phosphorothioate
  modified_base 2: mod_base = OTHER; note = 2'-O-methyluridine-3'-phosphorothioate
  modified_base 3: mod_base = OTHER; note = 2'-O-methylguanosine-3'-phosphate
  modified_base 4: mod_base = OTHER; note = 2'-O-methylcytidine-3'-phosphate
  modified_base 5: mod_base = OTHER; note = 2'-O-methylcytidine-3'-phosphate
  modified_base 6: mod_base = OTHER; note = 2'-O-methyladenosine-3'-phosphate
  modified_base 7: mod_base = OTHER; note = 2'-deoxy-2'-fluoroguanosine-3'-phosphate
  modified_base 8: mod_base = OTHER; note = 2'-O-methylguanosine-3'-phosphate
  modified_base 9: mod_base = OTHER; note = 2'-deoxy-2'-fluoroadenosine-3'-phosphate
  modified_base 10: mod_base = OTHER; note = 2'-deoxy-2'-fluoroadenosine-3'-phosphate
  modified_base 11: mod_base = OTHER; note = 2'-deoxy-2'-fluoroguanosine-3'-phosphate
  modified_base 12: mod_base = OTHER; note = 2'-O-methylcytidine-3'-phosphate
  modified_base 13: mod_base = OTHER; note = 2'-O-methyluridine-3'-phosphate
  modified_base 14: mod_base = OTHER; note = 2'-O-methylguanosine-3'-phosphate
  modified_base 15: mod_base = OTHER; note = 2'-O-methylcytidine-3'-phosphate
  modified_base 16: mod_base = OTHER; note = 2'-O-methylguanosine-3'-phosphate
  modified_base 17: mod_base = OTHER; note = 2'-O-methyladenosine-3'-phosphate
  modified_base 18: mod_base = OTHER; note = 2'-O-methylcytidine-3'-phosphate
  modified_base 19: mod_base = OTHER; note = 2'-O-methyladenosine-3'-phosphate
  modified_base 20: mod_base = OTHER; note = 2'-O-methylguanosine-3'-phosphate
  modified_base 21: mod_base = OTHER; note = 2'-O-methyluridine-3'-phosphate ((2S,4R)-1-[29-[[2-(acetylamino)-2-deoxy-beta-D-galactopyra nosyl]oxy]-14,14-bis[[3-[[3-[[5-[[2-(acetylamino)-2-deoxy-b eta-D-galactopyranosyl]oxy]-1-oxopentyl]amino]propyl]amino] -3-oxopropoxy]methyl]-1,12,19,25-tetraoxo-16-oxa-13,20,24-t riazanonacos-1-yl]-4-hydroxy-2-pyrrolidinyl)methyl ester
ctgccaggaagctgcgacagt

SEQ ID NO: 1008 - RNA, 21 nt, synthetic construct
  source 1..21: mol_type = other RNA
  modified_base 1: mod_base = OTHER; note = 2'-O-methylcytidine-3'-phosphorothioate
  modified_base 2: mod_base = OTHER; note = 2'-O-methyluridine-3'-phosphorothioate
  modified_base 3: mod_base = OTHER; note = 2'-O-methylguanosine-3'-phosphate
  modified_base 4: mod_base = OTHER; note = 2'-O-methylcytidine-3'-phosphate
  modified_base 5: mod_base = OTHER; note = 2'-O-methyluridine-3'-phosphate
  modified_base 6: mod_base = OTHER; note = 2'-O-methylguanosine-3'-phosphate
  modified_base 7: mod_base = OTHER; note = 2'-deoxy-2'-fluorocytidine-3'-phosphate
  modified_base 8: mod_base = OTHER; note = 2'-O-methyladenosine-3'-phosphate
  modified_base 9: mod_base = OTHER; note = 2'-deoxy-2'-fluoroguanosine-3'-phosphate
  modified_base 10: mod_base = OTHER; note = 2'-deoxy-2'-fluoroguanosine-3'-phosphate
  modified_base 11: mod_base = OTHER; note = 2'-deoxy-2'-fluoroguanosine-3'-phosphate
  modified_base 12: mod_base = OTHER; note = 2'-O-methyluridine-3'-phosphate
  modified_base 13: mod_base = OTHER; note = 2'-O-methyladenosine-3'-phosphate
  modified_base 14: mod_base = OTHER; note = 2'-O-methyladenosine-3'-phosphate
  modified_base 15: mod_base = OTHER; note = 2'-O-methylcytidine-3'-phosphate
  modified_base 16: mod_base = OTHER; note = 2'-O-methyluridine-3'-phosphate
  modified_base 17: mod_base = OTHER; note = 2'-O-methylcytidine-3'-phosphate
  modified_base 18: mod_base = OTHER; note = 2'-O-methyladenosine-3'-phosphate
  modified_base 19: mod_base = OTHER; note = 2'-O-methylguanosine-3'-phosphate
  modified_base 20: mod_base = OTHER; note = 2'-O-methylguanosine-3'-phosphate
  modified_base 21: mod_base = OTHER; note = 2'-O-methyluridine-3'-phosphate ((2S,4R)-1-[29-[[2-(acetylamino)-2-deoxy-beta-D-galactopyra nosyl]oxy]-14,14-bis[[3-[[3-[[5-[[2-(acetylamino)-2-deoxy-b eta-D-galactopyranosyl]oxy]-1-oxopentyl]amino]propyl]amino] -3-oxopropoxy]methyl]-1,12,19,25-tetraoxo-16-oxa-13,20,24-t riazanonacos-1-yl]-4-hydroxy-2-pyrrolidinyl)methyl ester
ctgctgcagggtaactcaggt

SEQ ID NO: 1009 - RNA, 21 nt, synthetic construct
  source 1..21: mol_type = other RNA
  modified_base 1: mod_base = OTHER; note = 2'-O-methylguanosine-3'-phosphorothioate
  modified_base 2: mod_base = OTHER; note = 2'-O-methylcytidine-3'-phosphorothioate
  modified_base 3: mod_base = OTHER; note = 2'-O-methyladenosine-3'-phosphate
  modified_base 4: mod_base = OTHER; note = 2'-O-methyladenosine-3'-phosphate
  modified_base 5: mod_base = OTHER; note = 2'-O-methylcytidine-3'-phosphate
  modified_base 6: mod_base = OTHER; note = 2'-O-methylguanosine-3'-phosphate
  modified_base 7: mod_base = OTHER; note = 2'-deoxy-2'-fluoroguanosine-3'-phosphate
  modified_base 8: mod_base = OTHER; note = 2'-O-methylcytidine-3'-phosphate
  modified_base 9: mod_base = OTHER; note = 2'-deoxy-2'-fluorocytidine-3'-phosphate
  modified_base 10: mod_base = OTHER; note = 2'-deoxy-2'-fluoroadenosine-3'-phosphate
  modified_base 11: mod_base = OTHER; note = 2'-deoxy-2'-fluoroguanosine-3'-phosphate
  modified_base 12: mod_base = OTHER; note = 2'-O-methylguanosine-3'-phosphate
  modified_base 13: mod_base = OTHER; note = 2'-O-methyluridine-3'-phosphate
  modified_base 14: mod_base = OTHER; note = 2'-O-methylcytidine-3'-phosphate
  modified_base 15: mod_base = OTHER; note = 2'-O-methyladenosine-3'-phosphate
  modified_base 16: mod_base = OTHER; note = 2'-O-methylguanosine-3'-phosphate
  modified_base 17: mod_base = OTHER; note = 2'-O-methyladenosine-3'-phosphate
  modified_base 18: mod_base = OTHER; note = 2'-O-methylguanosine-3'-phosphate
  modified_base 19: mod_base = OTHER; note = 2'-O-methyladenosine-3'-phosphate
  modified_base 20: mod_base = OTHER; note = 2'-O-methylguanosine-3'-phosphate
  modified_base 21: mod_base = OTHER; note = 2'-O-methyluridine-3'-phosphate ((2S,4R)-1-[29-[[2-(acetylamino)-2-deoxy-beta-D-galactopyra nosyl]oxy]-14,14-bis[[3-[[3-[[5-[[2-(acetylamino)-2-deoxy-b eta-D-galactopyranosyl]oxy]-1-oxopentyl]amino]propyl]amino] -3-oxopropoxy]methyl]-1,12,19,25-tetraoxo-16-oxa-13,20,24-t riazanonacos-1-yl]-4-hydroxy-2-pyrrolidinyl)methyl ester
gcaacggccaggtcagagagt

SEQ ID NO: 1010 - RNA, 21 nt, synthetic construct
  source 1..21: mol_type = other RNA
  modified_base 1: mod_base = OTHER; note = 2'-O-methylcytidine-3'-phosphorothioate
  modified_base 2: mod_base = OTHER; note = 2'-O-methylcytidine-3'-phosphorothioate
  modified_base 3: mod_base = OTHER; note = 2'-O-methylcytidine-3'-phosphate
  modified_base 4: mod_base = OTHER; note = 2'-O-methyladenosine-3'-phosphate
  modified_base 5: mod_base = OTHER; note = 2'-O-methylguanosine-3'-phosphate
  modified_base 6: mod_base = OTHER; note = 2'-O-methyluridine-3'-phosphate
  modified_base 7: mod_base = OTHER; note = 2'-deoxy-2'-fluorouridine-3'-phosphate
  modified_base 8: mod_base = OTHER; note = 2'-O-methyluridine-3'-phosphate
  modified_base 9: mod_base = OTHER; note = 2'-deoxy-2'-fluorouridine-3'-phosphate
  modified_base 10: mod_base = OTHER; note = 2'-deoxy-2'-fluoroguanosine-3'-phosphate
  modified_base 11: mod_base = OTHER; note = 2'-deoxy-2'-fluorocytidine-3'-phosphate
  modified_base 12: mod_base = OTHER; note = 2'-O-methyladenosine-3'-phosphate
  modified_base 13: mod_base = OTHER; note = 2'-O-methyladenosine-3'-phosphate
  modified_base 14: mod_base = OTHER; note = 2'-O-methyladenosine-3'-phosphate
  modified_base 15: mod_base = OTHER; note = 2'-O-methyluridine-3'-phosphate
  modified_base 16: mod_base = OTHER; note = 2'-O-methyladenosine-3'-phosphate
  modified_base 17: mod_base = OTHER; note = 2'-O-methyladenosine-3'-phosphate
  modified_base 18: mod_base = OTHER; note = 2'-O-methyladenosine-3'-phosphate
  modified_base 19: mod_base = OTHER; note = 2'-O-methylcytidine-3'-phosphate
  modified_base 20: mod_base = OTHER; note = 2'-O-methylcytidine-3'-phosphate
  modified_base 21: mod_base = OTHER; note = 2'-O-methyluridine-3'-phosphate ((2S,4R)-1-[29-[[2-(acetylamino)-2-deoxy-beta-D-galactopyra nosyl]oxy]-14,14-bis[[3-[[3-[[5-[[2-(acetylamino)-2-deoxy-b eta-D-galactopyranosyl]oxy]-1-oxopentyl]amino]propyl]amino] -3-oxopropoxy]methyl]-1,12,19,25-tetraoxo-16-oxa-13,20,24-t riazanonacos-1-yl]-4-hydroxy-2-pyrrolidinyl)methyl ester
cccagttttgcaaataaacct

SEQ ID NO: 1011 - RNA, 23 nt, synthetic construct
  source 1..23: mol_type = other RNA
  modified_base 1: mod_base = OTHER; note = 2'-O-methyladenosine-3'-phosphorothioate
  modified_base 2: mod_base = OTHER; note = 2'-deoxy-2'-fluoroadenosine-3'-phosphorothioate
  modified_base 3: mod_base = OTHER; note = 2'-O-methylguanosine-3'-phosphate
  modified_base 4: mod_base = OTHER; note = 2'-O-methylcytidine-3'-phosphate
  modified_base 5: mod_base = OTHER; note = 2'-O-methyladenosine-3'-phosphate
  modified_base 6: mod_base = OTHER; note = 2'-deoxy-2'-fluorouridine-3'-phosphate
  modified_base 7: mod_base = OTHER; note = 2'-O-methylguanosine-3'-phosphate
  modified_base 8: mod_base = OTHER; note = 2'-deoxy-2'-fluoroguanosine-3'-phosphate
  modified_base 9: mod_base = OTHER; note = 2'-deoxy-2'-fluorocytidine-3'-phosphate
  modified_base 10: mod_base = OTHER; note = 2'-O-methylcytidine-3'-phosphate
  modified_base 11: mod_base = OTHER; note = 2'-O-methylguanosine-3'-phosphate
  modified_base 12: mod_base = OTHER; note = 2'-O-methylcytidine-3'-phosphate
  modified_base 13: mod_base = OTHER; note = 2'-O-methylcytidine-3'-phosphate
  modified_base 14: mod_base = OTHER; note = 2'-deoxy-2'-fluoroadenosine-3'-phosphate
  modified_base 15: mod_base = OTHER; note = 2'-O-methylguanosine-3'-phosphate
  modified_base 16: mod_base = OTHER; note = 2'-deoxy-2'-fluoroadenosine-3'-phosphate
  modified_base 17: mod_base = OTHER; note = 2'-O-methylguanosine-3'-phosphate
  modified_base 18: mod_base = OTHER; note = 2'-O-methylcytidine-3'-phosphate
  modified_base 19: mod_base = OTHER; note = 2'-O-methylcytidine-3'-phosphate
  modified_base 20: mod_base = OTHER; note = 2'-O-methyladenosine-3'-phosphate
  modified_base 21: mod_base = OTHER; note = 2'-O-methyladenosine-3'-phosphorothioate
  modified_base 22: mod_base = OTHER; note = 2'-O-methylcytidine-3'-phosphorothioate
  modified_base 23: mod_base = OTHER; note = 2'-O-methyladenosine
aagcatggccgccagagccaaca

SEQ ID NO: 1012 - RNA, 23 nt, synthetic construct
  source 1..23: mol_type = other RNA
  modified_base 1: mod_base = OTHER; note = 2'-O-methyladenosine-3'-phosphorothioate
  modified_base 2: mod_base = OTHER; note = 2'-deoxy-2'-fluorocytidine-3'-phosphorothioate
  modified_base 3: mod_base = OTHER; note = 2'-O-methylcytidine-3'-phosphate
  modified_base 4: mod_base = OTHER; note = 2'-O-methyluridine-3'-phosphate
  modified_base 5: mod_base = OTHER; note = 2'-O-methylguanosine-3'-phosphate
  modified_base 6: mod_base = OTHER; note = 2'-deoxy-2'-fluorocytidine-3'-phosphate
  modified_base 7: mod_base = OTHER; note = 2'-O-methyladenosine-3'-phosphate
  modified_base 8: mod_base = OTHER; note = 2'-deoxy-2'-fluorouridine-3'-phosphate
  modified_base 9: mod_base = OTHER; note = 2'-deoxy-2'-fluorouridine-3'-phosphate
  modified_base 10: mod_base = OTHER; note = 2'-O-methylcytidine-3'-phosphate
  modified_base 11: mod_base = OTHER; note = 2'-O-methyluridine-3'-phosphate
  modified_base 12: mod_base = OTHER; note = 2'-O-methylcytidine-3'-phosphate
  modified_base 13: mod_base = OTHER; note = 2'-O-methylcytidine-3'-phosphate
  modified_base 14: mod_base = OTHER; note = 2'-deoxy-2'-fluorocytidine-3'-phosphate
  modified_base 15: mod_base = OTHER; note = 2'-O-methyladenosine-3'-phosphate
  modified_base 16: mod_base = OTHER; note = 2'-deoxy-2'-fluoroguanosine-3'-phosphate
  modified_base 17: mod_base = OTHER; note = 2'-O-methylcytidine-3'-phosphate
  modified_base 18: mod_base = OTHER; note = 2'-O-methyluridine-3'-phosphate
  modified_base 19: mod_base = OTHER; note = 2'-O-methylcytidine-3'-phosphate
  modified_base 20: mod_base = OTHER; note = 2'-O-methylguanosine-3'-phosphate
  modified_base 21: mod_base = OTHER; note = 2'-O-methylguanosine-3'-phosphorothioate
  modified_base 22: mod_base = OTHER; note = 2'-O-methylcytidine-3'-phosphorothioate
  modified_base 23: mod_base = OTHER; note = 2'-O-methyluridine
acctgcattctcccagctcggct

SEQ ID NO: 1013 - RNA, 23 nt, synthetic construct
  source 1..23: mol_type = other RNA
  modified_base 1: mod_base = OTHER; note = 2'-O-methyladenosine-3'-phosphorothioate
  modified_base 2: mod_base = OTHER; note = 2'-deoxy-2'-fluoroguanosine-3'-phosphorothioate
  modified_base 3: mod_base = OTHER; note = 2'-O-methyluridine-3'-phosphate
  modified_base 4: mod_base = OTHER; note = 2'-O-methylguanosine-3'-phosphate
  modified_base 5: mod_base = OTHER; note = 2'-O-methylguanosine-3'-phosphate
  modified_base 6: mod_base = OTHER; note = 2'-deoxy-2'-fluoroadenosine-3'-phosphate
  modified_base 7: mod_base = OTHER; note = 2'-O-methyladenosine-3'-phosphate
  modified_base 8: mod_base = OTHER; note = 2'-deoxy-2'-fluorocytidine-3'-phosphate
  modified_base 9: mod_base = OTHER; note = 2'-deoxy-2'-fluoroadenosine-3'-phosphate
  modified_base 10: mod_base = OTHER; note = 2'-O-methyladenosine-3'-phosphate
  modified_base 11: mod_base = OTHER; note = 2'-O-methyladenosine-3'-phosphate
  modified_base 12: mod_base = OTHER; note = 2'-O-methylguanosine-3'-phosphate
  modified_base 13: mod_base = OTHER; note = 2'-O-methylcytidine-3'-phosphate
  modified_base 14: mod_base = OTHER; note = 2'-deoxy-2'-fluorouridine-3'-phosphate
  modified_base 15: mod_base = OTHER; note = 2'-O-methylcytidine-3'-phosphate
  modified_base 16: mod_base = OTHER; note = 2'-deoxy-2'-fluoroadenosine-3'-phosphate
  modified_base 17: mod_base = OTHER; note = 2'-O-methylcytidine-3'-phosphate
  modified_base 18: mod_base = OTHER; note = 2'-O-methylguanosine-3'-phosphate
  modified_base 19: mod_base = OTHER; note = 2'-O-methylcytidine-3'-phosphate
  modified_base 20: mod_base = OTHER; note = 2'-O-methylguanosine-3'-phosphate
  modified_base 21: mod_base = OTHER; note = 2'-O-methylcytidine-3'-phosphorothioate
  modified_base 22: mod_base = OTHER; note = 2'-O-methylcytidine-3'-phosphorothioate
  modified_base 23: mod_base = OTHER; note = 2'-O-methylguanosine
agtggaacaaagctcacgcgccg

SEQ ID NO: 1014 - RNA, 23 nt, synthetic construct
  source 1..23: mol_type = other RNA
  modified_base 1: mod_base = OTHER; note = 2'-O-methyladenosine-3'-phosphorothioate
  modified_base 2: mod_base = OTHER; note = 2'-deoxy-2'-fluoroadenosine-3'-phosphorothioate
  modified_base 3: mod_base = OTHER; note = 2'-O-methylguanosine-3'-phosphate
  modified_base 4: mod_base = OTHER; note = 2'-O-methylguanosine-3'-phosphate
  modified_base 5: mod_base = OTHER; note = 2'-O-methyluridine-3'-phosphate
  modified_base 6: mod_base = OTHER; note = 2'-deoxy-2'-fluoroguanosine-3'-phosphate
  modified_base 7: mod_base = OTHER; note = 2'-O-methylcytidine-3'-phosphate
  modified_base 8: mod_base = OTHER; note = 2'-deoxy-2'-fluorouridine-3'-phosphate
  modified_base 9: mod_base = OTHER; note = 2'-deoxy-2'-fluoroguanosine-3'-phosphate
  modified_base 10: mod_base = OTHER; note = 2'-O-methylcytidine-3'-phosphate
  modified_base 11: mod_base = OTHER; note = 2'-O-methyladenosine-3'-phosphate
  modified_base 12: mod_base = OTHER; note = 2'-O-methylcytidine-3'-phosphate
  modified_base 13: mod_base = OTHER; note = 2'-O-methyladenosine-3'-phosphate
  modified_base 14: mod_base = OTHER; note = 2'-deoxy-2'-fluorocytidine-3'-phosphate
  modified_base 15: mod_base = OTHER; note = 2'-O-methylcytidine-3'-phosphate
  modified_base 16: mod_base = OTHER; note = 2'-deoxy-2'-fluorocytidine-3'-phosphate
  modified_base 17: mod_base = OTHER; note = 2'-O-methylguanosine-3'-phosphate
  modified_base 18: mod_base = OTHER; note = 2'-O-methylcytidine-3'-phosphate
  modified_base 19: mod_base = OTHER; note = 2'-O-methylcytidine-3'-phosphate
  modified_base 20: mod_base = OTHER; note = 2'-O-methylcytidine-3'-phosphate
  modified_base 21: mod_base = OTHER; note = 2'-O-methyladenosine-3'-phosphorothioate
  modified_base 22: mod_base = OTHER; note = 2'-O-methyluridine-3'-phosphorothioate
  modified_base 23: mod_base = OTHER; note = 2'-O-methyluridine
aaggtgctgcacacccgcccatt

SEQ ID NO: 1015 - RNA, 23 nt, synthetic construct
  source 1..23: mol_type = other RNA
  modified_base 1: mod_base = OTHER; note = 2'-O-methyladenosine-3'-phosphorothioate
  modified_base 2: mod_base = OTHER; note = 2'-deoxy-2'-fluorocytidine-3'-phosphorothioate
  modified_base 3: mod_base = OTHER; note = 2'-O-methylguanosine-3'-phosphate
  modified_base 4: mod_base = OTHER; note = 2'-O-methyluridine-3'-phosphate
  modified_base 5: mod_base = OTHER; note = 2'-O-methylcytidine-3'-phosphate
  modified_base 6: mod_base = OTHER; note = 2'-deoxy-2'-fluoroguanosine-3'-phosphate
  modified_base 7: mod_base = OTHER; note = 2'-O-methyladenosine-3'-phosphate
  modified_base 8: mod_base = OTHER; note = 2'-deoxy-2'-fluoroadenosine-3'-phosphate
  modified_base 9: mod_base = OTHER; note = 2'-deoxy-2'-fluoroguanosine-3'-phosphate
  modified_base 10: mod_base = OTHER; note = 2'-O-methylguanosine-3'-phosphate
  modified_base 11: mod_base = OTHER; note = 2'-O-methyluridine-3'-phosphate
  modified_base 12: mod_base = OTHER; note = 2'-O-methylcytidine-3'-phosphate
  modified_base 13: mod_base = OTHER; note = 2'-O-methyluridine-3'-phosphate
  modified_base 14: mod_base = OTHER; note = 2'-deoxy-2'-fluorouridine-3'-phosphate
  modified_base 15: mod_base = OTHER; note = 2'-O-methylguanosine-3'-phosphate
  modified_base 16: mod_base = OTHER; note = 2'-deoxy-2'-fluorouridine-3'-phosphate
  modified_base 17: mod_base = OTHER; note = 2'-O-methyladenosine-3'-phosphate
  modified_base 18: mod_base = OTHER; note = 2'-O-methylguanosine-3'-phosphate
  modified_base 19: mod_base = OTHER; note = 2'-O-methyluridine-3'-phosphate
  modified_base 20: mod_base = OTHER; note = 2'-O-methylguanosine-3'-phosphate
  modified_base 21: mod_base = OTHER; note = 2'-O-methylguanosine-3'-phosphorothioate
  modified_base 22: mod_base = OTHER; note = 2'-O-methyladenosine-3'-phosphorothioate
  modified_base 23: mod_base = OTHER; note = 2'-O-methyladenosine
acgtcgaaggtcttgtagtggaa

SEQ ID NO: 1016 - RNA, 23 nt, synthetic construct
  source 1..23: mol_type = other RNA
  modified_base 1: mod_base = OTHER; note = 2'-O-methyladenosine-3'-phosphorothioate
  modified_base 2: mod_base = OTHER; note = 2'-deoxy-2'-fluoroadenosine-3'-phosphorothioate
  modified_base 3: mod_base = OTHER; note = 2'-O-methylguanosine-3'-phosphate
  modified_base 4: mod_base = OTHER; note = 2'-O-methyladenosine-3'-phosphate
  modified_base 5: mod_base = OTHER; note = 2'-O-methyladenosine-3'-phosphate
  modified_base 6: mod_base = OTHER; note = 2'-deoxy-2'-fluorocytidine-3'-phosphate
  modified_base 7: mod_base = OTHER; note = 2'-O-methyladenosine-3'-phosphate
  modified_base 8: mod_base = OTHER; note = 2'-deoxy-2'-fluorocytidine-3'-phosphate
  modified_base 9: mod_base = OTHER; note = 2'-deoxy-2'-fluoroguanosine-3'-phosphate
  modified_base 10: mod_base = OTHER; note = 2'-O-methyluridine-3'-phosphate
  modified_base 11: mod_base = OTHER; note = 2'-O-methyladenosine-3'-phosphate
  modified_base 12: mod_base = OTHER; note = 2'-O-methylguanosine-3'-phosphate
  modified_base 13: mod_base = OTHER; note = 2'-O-methyluridine-3'-phosphate
  modified_base 14: mod_base = OTHER; note = 2'-deoxy-2'-fluorouridine-3'-phosphate
  modified_base 15: mod_base = OTHER; note = 2'-O-methylguanosine-3'-phosphate
  modified_base 16: mod_base = OTHER; note = 2'-deoxy-2'-fluorocytidine-3'-phosphate
  modified_base 17: mod_base = OTHER; note = 2'-O-methyladenosine-3'-phosphate
  modified_base 18: mod_base = OTHER; note = 2'-O-methyladenosine-3'-phosphate
  modified_base 19: mod_base = OTHER; note = 2'-O-methyladenosine-3'-phosphate
  modified_base 20: mod_base = OTHER; note = 2'-O-methylguanosine-3'-phosphate
  modified_base 21: mod_base = OTHER; note = 2'-O-methylguanosine-3'-phosphorothioate
  modified_base 22: mod_base = OTHER; note = 2'-O-methylcytidine-3'-phosphorothioate
  modified_base 23: mod_base = OTHER; note = 2'-O-methylcytidine
aagaacacgtagttgcaaaggcc

SEQ ID NO: 1017 - RNA, 23 nt, synthetic construct
  source 1..23: mol_type = other RNA
  modified_base 1: mod_base = OTHER; note = 2'-O-methyladenosine-3'-phosphorothioate
  modified_base 2: mod_base = OTHER; note = 2'-deoxy-2'-fluoroadenosine-3'-phosphorothioate
  modified_base 3: mod_base = OTHER; note = 2'-O-methylguanosine-3'-phosphate
  modified_base 4: mod_base = OTHER; note = 2'-O-methylcytidine-3'-phosphate
  modified_base 5: mod_base = OTHER; note = 2'-O-methyluridine-3'-phosphate
  modified_base 6: mod_base = OTHER; note = 2'-deoxy-2'-fluoroguanosine-3'-phosphate
  modified_base 7: mod_base = OTHER; note = 2'-O-methylguanosine-3'-phosphate
  modified_base 8: mod_base = OTHER; note = 2'-deoxy-2'-fluoroadenosine-3'-phosphate
  modified_base 9: mod_base = OTHER; note = 2'-deoxy-2'-fluorocytidine-3'-phosphate
  modified_base 10: mod_base = OTHER; note = 2'-O-methylguanosine-3'-phosphate
  modified_base 11: mod_base = OTHER; note = 2'-O-methyluridine-3'-phosphate
  modified_base 12: mod_base = OTHER; note = 2'-O-methyluridine-3'-phosphate
  modified_base 13: mod_base = OTHER; note = 2'-O-methylguanosine-3'-phosphate
  modified_base 14: mod_base = OTHER; note = 2'-deoxy-2'-fluoroadenosine-3'-phosphate
  modified_base 15: mod_base = OTHER; note = 2'-O-methyladenosine-3'-phosphate
  modified_base 16: mod_base = OTHER; note = 2'-deoxy-2'-fluoroguanosine-3'-phosphate
  modified_base 17: mod_base = OTHER; note = 2'-O-methyluridine-3'-phosphate
  modified_base 18: mod_base = OTHER; note = 2'-O-methylcytidine-3'-phosphate
  modified_base 19: mod_base = OTHER; note = 2'-O-methylcytidine-3'-phosphate
  modified_base 20: mod_base = OTHER; note = 2'-O-methyluridine-3'-phosphate
  modified_base 21: mod_base = OTHER; note = 2'-O-methylcytidine-3'-phosphorothioate
  modified_base 22: mod_base = OTHER; note = 2'-O-methylguanosine-3'-phosphorothioate
  modified_base 23: mod_base = OTHER; note = 2'-O-methyluridine
aagctggacgttgaagtcctcgt

SEQ ID NO: 1018 - RNA, 23 nt, synthetic construct
  source 1..23: mol_type = other RNA
  modified_base 1: mod_base = OTHER; note = 2'-O-methyladenosine-3'-phosphorothioate
  modified_base 2: mod_base = OTHER; note = 2'-deoxy-2'-fluorocytidine-3'-phosphorothioate
  modified_base 3: mod_base = OTHER; note = 2'-O-methyluridine-3'-phosphate
  modified_base 4: mod_base = OTHER; note = 2'-O-methyluridine-3'-phosphate
  modified_base 5: mod_base = OTHER; note = 2'-O-methylguanosine-3'-phosphate
  modified_base 6: mod_base = OTHER; note = 2'-deoxy-2'-fluoroadenosine-3'-phosphate
  modified_base 7: mod_base = OTHER; note = 2'-O-methyluridine-3'-phosphate
  modified_base 8: mod_base = OTHER; note = 2'-deoxy-2'-fluoroguanosine-3'-phosphate
  modified_base 9: mod_base = OTHER; note = 2'-deoxy-2'-fluoroadenosine-3'-phosphate
  modified_base 10: mod_base = OTHER; note = 2'-O-methylcytidine-3'-phosphate
  modified_base 11: mod_base = OTHER; note = 2'-O-methyladenosine-3'-phosphate
  modified_base 12: mod_base = OTHER; note = 2'-O-methyladenosine-3'-phosphate
  modified_base 13: mod_base = OTHER; note = 2'-O-methylcytidine-3'-phosphate
  modified_base 14: mod_base = OTHER; note = 2'-deoxy-2'-fluoroadenosine-3'-phosphate
  modified_base 15: mod_base = OTHER; note = 2'-O-methylcytidine-3'-phosphate
  modified_base 16: mod_base = OTHER; note = 2'-deoxy-2'-fluoroguanosine-3'-phosphate
  modified_base 17: mod_base = OTHER; note = 2'-O-methylguanosine-3'-phosphate
  modified_base 18: mod_base = OTHER; note = 2'-O-methylguanosine-3'-phosphate
  modified_base 19: mod_base = OTHER; note = 2'-O-methyluridine-3'-phosphate
  modified_base 20: mod_base = OTHER; note = 2'-O-methylguanosine-3'-phosphate
  modified_base 21: mod_base = OTHER; note = 2'-O-methyladenosine-3'-phosphorothioate
  modified_base 22: mod_base = OTHER; note = 2'-O-methylcytidine-3'-phosphorothioate
  modified_base 23: mod_base = OTHER; note = 2'-O-methylcytidine
acttgatgacaacacgggtgacc

SEQ ID NO: 1019 - RNA, 23 nt, synthetic construct
  source 1..23: mol_type = other RNA
  modified_base 1: mod_base = OTHER; note = 2'-O-methyladenosine-3'-phosphorothioate
  modified_base 2: mod_base = OTHER; note = 2'-deoxy-2'-fluorocytidine-3'-phosphorothioate
  modified_base 3: mod_base = OTHER; note = 2'-O-methylcytidine-3'-phosphate
  modified_base 4: mod_base = OTHER; note = 2'-O-methyladenosine-3'-phosphate
  modified_base 5: mod_base = OTHER; note = 2'-O-methyluridine-3'-phosphate
  modified_base 6: mod_base = OTHER; note = 2'-deoxy-2'-fluorouridine-3'-phosphate
  modified_base 7: mod_base = OTHER; note = 2'-O-methylguanosine-3'-phosphate
  modified_base 8: mod_base = OTHER; note = 2'-deoxy-2'-fluoroadenosine-3'-phosphate
  modified_base 9: mod_base = OTHER; note = 2'-deoxy-2'-fluorouridine-3'-phosphate
  modified_base 10: mod_base = OTHER; note = 2'-O-methylguanosine-3'-phosphate
  modified_base 11: mod_base = OTHER; note = 2'-O-methyladenosine-3'-phosphate
  modified_base 12: mod_base = OTHER; note = 2'-O-methylguanosine-3'-phosphate
  modified_base 13: mod_base = OTHER; note = 2'-O-methylguanosine-3'-phosphate
  modified_base 14: mod_base = OTHER; note = 2'-deoxy-2'-fluoroadenosine-3'-phosphate
  modified_base 15: mod_base = OTHER; note = 2'-O-methylcytidine-3'-phosphate
  modified_base 16: mod_base = OTHER; note = 2'-deoxy-2'-fluoroguanosine-3'-phosphate
  modified_base 17: mod_base = OTHER; note = 2'-O-methylguanosine-3'-phosphate
  modified_base 18: mod_base = OTHER; note = 2'-O-methyladenosine-3'-phosphate
  modified_base 19: mod_base = OTHER; note = 2'-O-methylguanosine-3'-phosphate
  modified_base 20: mod_base = OTHER; note = 2'-O-methylcytidine-3'-phosphate
  modified_base 21: mod_base = OTHER; note = 2'-O-methylcytidine-3'-phosphorothioate
  modified_base 22: mod_base = OTHER; note = 2'-O-methylguanosine-3'-phosphorothioate
  modified_base 23: mod_base = OTHER; note = 2'-O-methyluridine
accattgatgaggacggagccgt

SEQ ID NO: 1020 - RNA, 23 nt, synthetic construct
  source 1..23: mol_type = other RNA
  modified_base 1: mod_base = OTHER; note = 2'-O-methyladenosine-3'-phosphorothioate
  modified_base 2: mod_base = OTHER; note = 2'-deoxy-2'-fluorocytidine-3'-phosphorothioate
  modified_base 3: mod_base = OTHER; note = 2'-O-methyladenosine-3'-phosphate
  modified_base 4: mod_base = OTHER; note = 2'-O-methylguanosine-3'-phosphate
  modified_base 5: mod_base = OTHER; note = 2'-O-methyluridine-3'-phosphate
  modified_base 6: mod_base = OTHER; note = 2'-deoxy-2'-fluoroguanosine-3'-phosphate
  modified_base 7: mod_base = OTHER; note = 2'-O-methylcytidine-3'-phosphate
  modified_base 8: mod_base = OTHER; note = 2'-deoxy-2'-fluoroguanosine-3'-phosphate
  modified_base 9: mod_base = OTHER; note = 2'-deoxy-2'-fluoroguanosine-3'-phosphate
  modified_base 10: mod_base = OTHER; note = 2'-O-methylcytidine-3'-phosphate
  modified_base 11: mod_base = OTHER; note = 2'-O-methyluridine-3'-phosphate
  modified_base 12: mod_base = OTHER; note = 2'-O-methylguanosine-3'-phosphate
  modified_base 13: mod_base = OTHER; note = 2'-O-methyluridine-3'-phosphate
  modified_base 14: mod_base = OTHER; note = 2'-deoxy-2'-fluoroadenosine-3'-phosphate
  modified_base 15: mod_base = OTHER; note = 2'-O-methyladenosine-3'-phosphate
  modified_base 16: mod_base = OTHER; note = 2'-deoxy-2'-fluoroguanosine-3'-phosphate
  modified_base 17: mod_base = OTHER; note = 2'-O-methylguanosine-3'-phosphate
  modified_base 18: mod_base = OTHER; note = 2'-O-methylcytidine-3'-phosphate
  modified_base 19: mod_base = OTHER; note = 2'-O-methyladenosine-3'-phosphate
  modified_base 20: mod_base = OTHER; note = 2'-O-methylguanosine-3'-phosphate
  modified_base 21: mod_base = OTHER; note = 2'-O-methylcytidine-3'-phosphorothioate
  modified_base 22: mod_base = OTHER; note = 2'-O-methyluridine-3'-phosphorothioate
  modified_base 23: mod_base = OTHER; note = 2'-O-methylcytidine
acagtgcggctgtaaggcagctc

SEQ ID NO: 1021 - RNA, 23 nt, synthetic construct
  source 1..23: mol_type = other RNA
  modified_base 1: mod_base = OTHER; note = 2'-O-methyladenosine-3'-phosphorothioate
  modified_base 2: mod_base = OTHER; note = 2'-deoxy-2'-fluoroadenosine-3'-phosphorothioate
  modified_base 3: mod_base = OTHER; note = 2'-O-methyluridine-3'-phosphate
  modified_base 4: mod_base = OTHER; note = 2'-O-methylguanosine-3'-phosphate
  modified_base 5: mod_base = OTHER; note = 2'-O-methylcytidine-3'-phosphate
  modified_base 6: mod_base = OTHER; note = 2'-deoxy-2'-fluorouridine-3'-phosphate
  modified_base 7: mod_base = OTHER; note = 2'-O-methylguanosine-3'-phosphate
  modified_base 8: mod_base = OTHER; note = 2'-deoxy-2'-fluoroadenosine-3'-phosphate
  modified_base 9: mod_base = OTHER; note = 2'-deoxy-2'-fluorocytidine-3'-phosphate
  modified_base 10: mod_base = OTHER; note = 2'-O-methylcytidine-3'-phosphate
  modified_base 11: mod_base = OTHER; note = 2'-O-methyluridine-3'-phosphate
  modified_base 12: mod_base = OTHER; note = 2'-O-methyluridine-3'-phosphate
  modified_base 13: mod_base = OTHER; note = 2'-O-methylguanosine-3'-phosphate
  modified_base 14: mod_base = OTHER; note = 2'-deoxy-2'-fluoroadenosine-3'-phosphate
  modified_base 15: mod_base = OTHER; note = 2'-O-methyluridine-3'-phosphate
  modified_base 16: mod_base = OTHER; note = 2'-deoxy-2'-fluoroguanosine-3'-phosphate
  modified_base 17: mod_base = OTHER; note = 2'-O-methyluridine-3'-phosphate
  modified_base 18: mod_base = OTHER; note = 2'-O-methyladenosine-3'-phosphate
  modified_base 19: mod_base = OTHER; note = 2'-O-methylguanosine-3'-phosphate
  modified_base 20: mod_base = OTHER; note = 2'-O-methyluridine-3'-phosphate
  modified_base 21: mod_base = OTHER; note = 2'-O-methylcytidine-3'-phosphorothioate
  modified_base 22: mod_base = OTHER; note = 2'-O-methylcytidine-3'-phosphorothioate
  modified_base 23: mod_base = OTHER; note = 2'-O-methylcytidine
aatgctgaccttgatgtagtccc

SEQ ID NO: 1022 - RNA, 23 nt, synthetic construct
  source 1..23: mol_type = other RNA
  modified_base 1: mod_base = OTHER; note = 2'-O-methyladenosine-3'-phosphorothioate
  modified_base 2: mod_base = OTHER; note = 2'-deoxy-2'-fluorocytidine-3'-phosphorothioate
  modified_base 3: mod_base = OTHER; note = 2'-O-methylguanosine-3'-phosphate
  modified_base 4: mod_base = OTHER; note = 2'-O-methyluridine-3'-phosphate
  modified_base 5: mod_base = OTHER; note = 2'-O-methyluridine-3'-phosphate
  modified_base 6: mod_base = OTHER; note = 2'-deoxy-2'-fluorocytidine-3'-phosphate
  modified_base 7: mod_base = OTHER; note = 2'-O-methylcytidine-3'-phosphate
  modified_base 8: mod_base = OTHER; note = 2'-deoxy-2'-fluoroadenosine-3'-phosphate
  modified_base 9: mod_base = OTHER; note = 2'-deoxy-2'-fluorocytidine-3'-phosphate
  modified_base 10: mod_base = OTHER; note = 2'-O-methyladenosine-3'-phosphate
  modified_base 11: mod_base = OTHER; note = 2'-O-methylguanosine-3'-phosphate
  modified_base 12: mod_base = OTHER; note = 2'-O-methylguanosine-3'-phosphate
  modified_base 13: mod_base = OTHER; note = 2'-O-methyladenosine-3'-phosphate
  modified_base 14: mod_base = OTHER; note = 2'-deoxy-2'-fluoroadenosine-3'-phosphate
  modified_base 15: mod_base = OTHER; note = 2'-O-methyluridine-3'-phosphate
  modified_base 16: mod_base = OTHER; note = 2'-deoxy-2'-fluoroguanosine-3'-phosphate
  modified_base 17: mod_base = OTHER; note = 2'-O-methyluridine-3'-phosphate
  modified_base 18: mod_base = OTHER; note = 2'-O-methylcytidine-3'-phosphate
  modified_base 19: mod_base = OTHER; note = 2'-O-methyladenosine-3'-phosphate
  modified_base 20: mod_base = OTHER; note = 2'-O-methylguanosine-3'-phosphate
  modified_base 21: mod_base = OTHER; note = 2'-O-methylcytidine-3'-phosphorothioate
  modified_base 22: mod_base = OTHER; note = 2'-O-methyladenosine-3'-phosphorothioate
  modified_base 23: mod_base = OTHER; note = 2'-O-methylcytidine
acgttccacaggaatgtcagcac

SEQ ID NO: 1023 - RNA, 23 nt, synthetic construct
  source 1..23: mol_type = other RNA
  modified_base 1: mod_base = OTHER; note = 2'-O-methyladenosine-3'-phosphorothioate
  modified_base 2: mod_base = OTHER; note = 2'-deoxy-2'-fluoroguanosine-3'-phosphorothioate
  modified_base 3: mod_base = OTHER; note = 2'-O-methylcytidine-3'-phosphate
  modified_base 4: mod_base = OTHER; note = 2'-O-methylguanosine-3'-phosphate
  modified_base 5: mod_base = OTHER; note = 2'-O-methyluridine-3'-phosphate
  modified_base 6: mod_base = OTHER; note = 2'-deoxy-2'-fluoroadenosine-3'-phosphate
  modified_base 7: mod_base = OTHER; note = 2'-O-methyluridine-3'-phosphate
  modified_base 8: mod_base = OTHER; note = 2'-deoxy-2'-fluorouridine-3'-phosphate
  modified_base 9: mod_base = OTHER; note = 2'-deoxy-2'-fluorouridine-3'-phosphate
  modified_base 10: mod_base = OTHER; note = 2'-O-methylguanosine-3'-phosphate
  modified_base 11: mod_base = OTHER; note = 2'-O-methylguanosine-3'-phosphate
  modified_base 12: mod_base = OTHER; note = 2'-O-methylguanosine-3'-phosphate
  modified_base 13: mod_base = OTHER; note = 2'-O-methyladenosine-3'-phosphate
  modified_base 14: mod_base = OTHER; note = 2'-deoxy-2'-fluorouridine-3'-phosphate
  modified_base 15: mod_base = OTHER; note = 2'-O-methylcytidine-3'-phosphate
  modified_base 16: mod_base = OTHER; note = 2'-deoxy-2'-fluorocytidine-3'-phosphate
  modified_base 17: mod_base = OTHER; note = 2'-O-methyladenosine-3'-phosphate
  modified_base 18: mod_base = OTHER; note = 2'-O-methylguanosine-3'-phosphate
  modified_base 19: mod_base = OTHER; note = 2'-O-methylcytidine-3'-phosphate
  modified_base 20: mod_base = OTHER; note = 2'-O-methyluridine-3'-phosphate
  modified_base 21: mod_base = OTHER; note = 2'-O-methylcytidine-3'-phosphorothioate
  modified_base 22: mod_base = OTHER; note = 2'-O-methylcytidine-3'-phosphorothioate
  modified_base 23: mod_base = OTHER; note = 2'-O-methyladenosine
agcgtatttgggatccagctcca

SEQ ID NO: 1024 - RNA, 23 nt, synthetic construct
  source 1..23: mol_type = other RNA
  modified_base 1: mod_base = OTHER; note = 2'-O-methyladenosine-3'-phosphorothioate
  modified_base 2: mod_base = OTHER; note = 2'-deoxy-2'-fluorocytidine-3'-phosphorothioate
  modified_base 3: mod_base = OTHER; note = 2'-O-methylcytidine-3'-phosphate
  modified_base 4: mod_base = OTHER; note = 2'-O-methyladenosine-3'-phosphate
  modified_base 5: mod_base = OTHER; note = 2'-O-methylcytidine-3'-phosphate
  modified_base 6: mod_base = OTHER; note = 2'-deoxy-2'-fluoroadenosine-3'-phosphate
  modified_base 7: mod_base = OTHER; note = 2'-O-methylcytidine-3'-phosphate
  modified_base 8: mod_base = OTHER; note = 2'-deoxy-2'-fluoroadenosine-3'-phosphate
  modified_base 9: mod_base = OTHER; note = 2'-deoxy-2'-fluoroguanosine-3'-phosphate
  modified_base 10: mod_base = OTHER; note = 2'-O-methylguanosine-3'-phosphate
  modified_base 11: mod_base = OTHER; note = 2'-O-methylcytidine-3'-phosphate
  modified_base 12: mod_base = OTHER; note = 2'-O-methylcytidine-3'-phosphate
  modified_base 13: mod_base = OTHER; note = 2'-O-methyladenosine-3'-phosphate
  modified_base 14: mod_base = OTHER; note = 2'-deoxy-2'-fluorocytidine-3'-phosphate
  modified_base 15: mod_base = OTHER; note = 2'-O-methyladenosine-3'-phosphate
  modified_base 16: mod_base = OTHER; note = 2'-deoxy-2'-fluoroguanosine-3'-phosphate
  modified_base 17: mod_base = OTHER; note = 2'-O-methylguanosine-3'-phosphate
  modified_base 18: mod_base = OTHER; note = 2'-O-methyluridine-3'-phosphate
  modified_base 19: mod_base = OTHER; note = 2'-O-methylcytidine-3'-phosphate
  modified_base 20: mod_base = OTHER; note = 2'-O-methyluridine-3'-phosphate
  modified_base 21: mod_base = OTHER; note = 2'-O-methylguanosine-3'-phosphorothioate
  modified_base 22: mod_base = OTHER; note = 2'-O-methylguanosine-3'-phosphorothioate
  modified_base 23: mod_base = OTHER; note = 2'-O-methyluridine
accacacaggccacaggtctggt

SEQ ID NO: 1025 - RNA, 23 nt, synthetic construct
  source 1..23: mol_type = other RNA
  modified_base 1: mod_base = OTHER; note = 2'-O-methyladenosine-3'-phosphorothioate
  modified_base 2: mod_base = OTHER; note = 2'-deoxy-2'-fluoroguanosine-3'-phosphorothioate
  modified_base 3: mod_base = OTHER; note = 2'-O-methylcytidine-3'-phosphate
  modified_base 4: mod_base = OTHER; note = 2'-O-methyladenosine-3'-phosphate
  modified_base 5: mod_base = OTHER; note = 2'-O-methyluridine-3'-phosphate
  modified_base 6: mod_base = OTHER; note = 2'-deoxy-2'-fluoroadenosine-3'-phosphate
  modified_base 7: mod_base = OTHER; note = 2'-O-methylguanosine-3'-phosphate
  modified_base 8: mod_base = OTHER; note = 2'-deoxy-2'-fluoroadenosine-3'-phosphate
  modified_base 9: mod_base = OTHER; note = 2'-deoxy-2'-fluoroadenosine-3'-phosphate
  modified_base 10: mod_base = OTHER; note = 2'-O-methylcytidine-3'-phosphate
  modified_base 11: mod_base = OTHER; note = 2'-O-methyluridine-3'-phosphate
  modified_base 12: mod_base = OTHER; note = 2'-O-methylcytidine-3'-phosphate
  modified_base 13: mod_base = OTHER; note = 2'-O-methylguanosine-3'-phosphate
  modified_base 14: mod_base = OTHER; note = 2'-deoxy-2'-fluorouridine-3'-phosphate
  modified_base 15: mod_base = OTHER; note = 2'-O-methyluridine-3'-phosphate
  modified_base 16: mod_base = OTHER; note = 2'-deoxy-2'-fluoroguanosine-3'-phosphate
  modified_base 17: mod_base = OTHER; note = 2'-O-methyladenosine-3'-phosphate
  modified_base 18: mod_base = OTHER; note = 2'-O-methyladenosine-3'-phosphate
  modified_base 19: mod_base = OTHER; note = 2'-O-methylguanosine-3'-phosphate
  modified_base 20: mod_base = OTHER; note = 2'-O-methylguanosine-3'-phosphate
  modified_base 21: mod_base = OTHER; note = 2'-O-methylcytidine-3'-phosphorothioate
  modified_base 22: mod_base = OTHER; note = 2'-O-methylcytidine-3'-phosphorothioate
  modified_base 23: mod_base = OTHER; note = 2'-O-methylguanosine
agcatagaactcgttgaaggccg

SEQ ID NO: 1026 - RNA, 23 nt, synthetic construct
  source 1..23: mol_type = other RNA
  modified_base 1: mod_base = OTHER; note = 2'-O-methyladenosine-3'-phosphorothioate
  modified_base 2: mod_base = OTHER; note = 2'-deoxy-2'-fluorocytidine-3'-phosphorothioate
  modified_base 3: mod_base = OTHER; note = 2'-O-methyladenosine-3'-phosphate
  modified_base 4: mod_base = OTHER; note = 2'-O-methyluridine-3'-phosphate
  modified_base 5: mod_base = OTHER; note = 2'-O-methylcytidine-3'-phosphate
  modified_base 6: mod_base = OTHER; note = 2'-deoxy-2'-fluorocytidine-3'-phosphate
  modified_base 7: mod_base = OTHER; note = 2'-O-methyladenosine-3'-phosphate
  modified_base 8: mod_base = OTHER; note = 2'-deoxy-2'-fluoroadenosine-3'-phosphate
  modified_base 9: mod_base = OTHER; note = 2'-deoxy-2'-fluorocytidine-3'-phosphate
  modified_base 10: mod_base = OTHER; note = 2'-O-methyluridine-3'-phosphate
  modified_base 11: mod_base = OTHER; note = 2'-O-methyluridine-3'-phosphate
  modified_base 12: mod_base = OTHER; note = 2'-O-methylcytidine-3'-phosphate
  modified_base 13: mod_base = OTHER; note = 2'-O-methyluridine-3'-phosphate
  modified_base 14: mod_base = OTHER; note = 2'-deoxy-2'-fluoroguanosine-3'-phosphate
  modified_base 15: mod_base = OTHER; note = 2'-O-methylcytidine-3'-phosphate
  modified_base 16: mod_base = OTHER; note = 2'-deoxy-2'-fluoroadenosine-3'-phosphate
  modified_base 17: mod_base = OTHER; note = 2'-O-methylguanosine-3'-phosphate
  modified_base 18: mod_base = OTHER; note = 2'-O-methylguanosine-3'-phosphate
  modified_base 19: mod_base = OTHER; note = 2'-O-methyluridine-3'-phosphate
  modified_base 20: mod_base = OTHER; note = 2'-O-methyluridine-3'-phosphate
  modified_base 21: mod_base = OTHER; note = 2'-O-methylcytidine-3'-phosphorothioate
  modified_base 22: mod_base = OTHER; note = 2'-O-methylcytidine-3'-phosphorothioate
  modified_base 23: mod_base = OTHER; note = 2'-O-methylcytidine
acatccaacttctgcaggttccc

SEQ ID NO: 1027 - RNA, 23 nt, synthetic construct
  source 1..23: mol_type = other RNA
  modified_base 1: mod_base = OTHER; note = 2'-O-methyladenosine-3'-phosphorothioate
  modified_base 2: mod_base = OTHER; note = 2'-deoxy-2'-fluoroadenosine-3'-phosphorothioate
  modified_base 3: mod_base = OTHER; note = 2'-O-methyluridine-3'-phosphate
  modified_base 4: mod_base = OTHER; note = 2'-O-methylguanosine-3'-phosphate
  modified_base 5: mod_base = OTHER; note = 2'-O-methylcytidine-3'-phosphate
  modified_base 6: mod_base = OTHER; note = 2'-deoxy-2'-fluorocytidine-3'-phosphate
  modified_base 7: mod_base = OTHER; note = 2'-O-methylcytidine-3'-phosphate
  modified_base 8: mod_base = OTHER; note = 2'-deoxy-2'-fluorouridine-3'-phosphate
  modified_base 9: mod_base = OTHER; note = 2'-deoxy-2'-fluorocytidine-3'-phosphate
  modified_base 10: mod_base = OTHER; note = 2'-O-methylcytidine-3'-phosphate
  modified_base 11: mod_base = OTHER; note = 2'-O-methyluridine-3'-phosphate
  modified_base 12: mod_base = OTHER; note = 2'-O-methylcytidine-3'-phosphate
  modified_base 13: mod_base = OTHER; note = 2'-O-methylguanosine-3'-phosphate
  modified_base 14: mod_base = OTHER; note = 2'-deoxy-2'-fluorouridine-3'-phosphate
  modified_base 15: mod_base = OTHER; note = 2'-O-methylcytidine-3'-phosphate
  modified_base 16: mod_base = OTHER; note = 2'-deoxy-2'-fluorocytidine-3'-phosphate
  modified_base 17: mod_base = OTHER; note = 2'-O-methylguanosine-3'-phosphate
  modified_base 18: mod_base = OTHER; note = 2'-O-methyluridine-3'-phosphate
  modified_base 19: mod_base = OTHER; note = 2'-O-methylguanosine-3'-phosphate
  modified_base 20: mod_base = OTHER; note = 2'-O-methylcytidine-3'-phosphate
  modified_base 21: mod_base = OTHER; note = 2'-O-methyladenosine-3'-phosphorothioate
  modified_base 22: mod_base = OTHER; note = 2'-O-methylguanosine-3'-phosphorothioate
  modified_base 23: mod_base = OTHER; note = 2'-O-methyluridine
aatgccctcctcgtccgtgcagt

SEQ ID NO: 1028 - RNA, 23 nt, synthetic construct
  source 1..23: mol_type = other RNA
  modified_base 1: mod_base = OTHER; note = 2'-O-methyladenosine-3'-phosphorothioate
  modified_base 2: mod_base = OTHER; note = 2'-deoxy-2'-fluoroadenosine-3'-phosphorothioate
  modified_base 3: mod_base = OTHER; note = 2'-O-methylguanosine-3'-phosphate
  modified_base 4: mod_base = OTHER; note = 2'-O-methylguanosine-3'-phosphate
  modified_base 5: mod_base = OTHER; note = 2'-O-methyluridine-3'-phosphate
  modified_base 6: mod_base = OTHER; note = 2'-deoxy-2'-fluoroadenosine-3'-phosphate
  modified_base 7: mod_base = OTHER; note = 2'-O-methylcytidine-3'-phosphate
  modified_base 8: mod_base = OTHER; note = 2'-deoxy-2'-fluoroguanosine-3'-phosphate
  modified_base 9: mod_base = OTHER; note = 2'-deoxy-2'-fluorocytidine-3'-phosphate
  modified_base 10: mod_base = OTHER; note = 2'-O-methyladenosine-3'-phosphate
  modified_base 11: mod_base = OTHER; note = 2'-O-methylguanosine-3'-phosphate
  modified_base 12: mod_base = OTHER; note = 2'-O-methyluridine-3'-phosphate
  modified_base 13: mod_base = OTHER; note = 2'-O-methylguanosine-3'-phosphate
  modified_base 14: mod_base = OTHER; note = 2'-deoxy-2'-fluorocytidine-3'-phosphate
  modified_base 15: mod_base = OTHER; note = 2'-O-methyluridine-3'-phosphate
  modified_base 16: mod_base = OTHER; note = 2'-deoxy-2'-fluoroguanosine-3'-phosphate
  modified_base 17: mod_base = OTHER; note = 2'-O-methyluridine-3'-phosphate
  modified_base 18: mod_base = OTHER; note = 2'-O-methylcytidine-3'-phosphate
  modified_base 19: mod_base = OTHER; note = 2'-O-methylcytidine-3'-phosphate
  modified_base 20: mod_base = OTHER; note = 2'-O-methyladenosine-3'-phosphate
  modified_base 21: mod_base = OTHER; note = 2'-O-methylcytidine-3'-phosphorothioate
  modified_base 22: mod_base = OTHER; note = 2'-O-methylcytidine-3'-phosphorothioate
  modified_base 23: mod_base = OTHER; note = 2'-O-methyladenosine
aaggtacgcagtgctgtccacca

SEQ ID NO: 1029 - RNA, 23 nt, synthetic construct
  source 1..23: mol_type = other RNA
  modified_base 1: mod_base = OTHER; note = 2'-O-methyladenosine-3'-phosphorothioate
  modified_base 2: mod_base = OTHER; note = 2'-deoxy-2'-fluoroguanosine-3'-phosphorothioate
  modified_base 3: mod_base = OTHER; note = 2'-O-methyladenosine-3'-phosphate
  modified_base 4: mod_base = OTHER; note = 2'-O-methylguanosine-3'-phosphate
  modified_base 5: mod_base = OTHER; note = 2'-O-methyluridine-3'-phosphate
  modified_base 6: mod_base = OTHER; note = 2'-deoxy-2'-fluoroadenosine-3'-phosphate
  modified_base 7: mod_base = OTHER; note = 2'-O-methyluridine-3'-phosphate
  modified_base 8: mod_base = OTHER; note = 2'-deoxy-2'-fluorouridine-3'-phosphate
  modified_base 9: mod_base = OTHER; note = 2'-deoxy-2'-fluorocytidine-3'-phosphate
  modified_base 10: mod_base = OTHER; note = 2'-O-methylcytidine-3'-phosphate
  modified_base 11: mod_base = OTHER; note = 2'-O-methyladenosine-3'-phosphate
  modified_base 12: mod_base = OTHER; note = 2'-O-methylcytidine-3'-phosphate
  modified_base 13: mod_base = OTHER; note = 2'-O-methyladenosine-3'-phosphate
  modified_base 14: mod_base = OTHER; note = 2'-deoxy-2'-fluoroadenosine-3'-phosphate
  modified_base 15: mod_base = OTHER; note = 2'-O-methyladenosine-3'-phosphate
  modified_base 16: mod_base = OTHER; note = 2'-deoxy-2'-fluoroguanosine-3'-phosphate
  modified_base 17: mod_base = OTHER; note = 2'-O-methylguanosine-3'-phosphate
  modified_base 18: mod_base = OTHER; note = 2'-O-methyluridine-3'-phosphate
  modified_base 19: mod_base = OTHER; note = 2'-O-methylguanosine-3'-phosphate
  modified_base 20: mod_base = OTHER; note = 2'-O-methylguanosine-3'-phosphate
  modified_base 21: mod_base = OTHER; note = 2'-O-methylcytidine-3'-phosphorothioate
  modified_base 22: mod_base = OTHER; note = 2'-O-methyladenosine-3'-phosphorothioate
  modified_base 23: mod_base = OTHER; note = 2'-O-methylcytidine
agagtattccacaaaggtggcac

SEQ ID NO: 1030 - RNA, 23 nt, synthetic construct
  source 1..23: mol_type = other RNA
  modified_base 1: mod_base = OTHER; note = 2'-O-methyladenosine-3'-phosphorothioate
  modified_base 2: mod_base = OTHER; note = 2'-deoxy-2'-fluoroadenosine-3'-phosphorothioate
  modified_base 3: mod_base = OTHER; note = 2'-O-methylguanosine-3'-phosphate
  modified_base 4: mod_base = OTHER; note = 2'-O-methyladenosine-3'-phosphate
  modified_base 5: mod_base = OTHER; note = 2'-O-methylguanosine-3'-phosphate
  modified_base 6: mod_base = OTHER; note = 2'-deoxy-2'-fluorocytidine-3'-phosphate
  modified_base 7: mod_base = OTHER; note = 2'-O-methyluridine-3'-phosphate
  modified_base 8: mod_base = OTHER; note = 2'-deoxy-2'-fluorocytidine-3'-phosphate
  modified_base 9: mod_base = OTHER; note = 2'-deoxy-2'-fluoroadenosine-3'-phosphate
  modified_base 10: mod_base = OTHER; note = 2'-O-methylguanosine-3'-phosphate
  modified_base 11: mod_base = OTHER; note = 2'-O-methylguanosine-3'-phosphate
  modified_base 12: mod_base = OTHER; note = 2'-O-methylguanosine-3'-phosphate
  modified_base 13: mod_base = OTHER; note = 2'-O-methylcytidine-3'-phosphate
  modified_base 14: mod_base = OTHER; note = 2'-deoxy-2'-fluoroadenosine-3'-phosphate
  modified_base 15: mod_base = OTHER; note = 2'-O-methylcytidine-3'-phosphate
  modified_base 16: mod_base = OTHER; note = 2'-deoxy-2'-fluorocytidine-3'-phosphate
  modified_base 17: mod_base = OTHER; note = 2'-O-methyluridine-3'-phosphate
  modified_base 18: mod_base = OTHER; note = 2'-O-methylcytidine-3'-phosphate
  modified_base 19: mod_base = OTHER; note = 2'-O-methylcytidine-3'-phosphate
  modified_base 20: mod_base = OTHER; note = 2'-O-methyladenosine-3'-phosphate
  modified_base 21: mod_base = OTHER; note = 2'-O-methylguanosine-3'-phosphorothioate
  modified_base 22: mod_base = OTHER; note = 2'-O-methyluridine-3'-phosphorothioate
  modified_base 23: mod_base = OTHER; note = 2'-O-methyluridine
aagagctcagggcacctccagtt

SEQ ID NO: 1031 - RNA, 23 nt, synthetic construct
  source 1..23: mol_type = other RNA
  modified_base 1: mod_base = OTHER; note = 2'-O-methyladenosine-3'-phosphorothioate
  modified_base 2: mod_base = OTHER; note = 2'-deoxy-2'-fluorouridine-3'-phosphorothioate
  modified_base 3: mod_base = OTHER; note = 2'-O-methylcytidine-3'-phosphate
  modified_base 4: mod_base = OTHER; note = 2'-O-methylcytidine-3'-phosphate
  modified_base 5: mod_base = OTHER; note = 2'-O-methyluridine-3'-phosphate
  modified_base 6: mod_base = OTHER; note = 2'-deoxy-2'-fluoroguanosine-3'-phosphate
  modified_base 7: mod_base = OTHER; note = 2'-O-methylguanosine-3'-phosphate
  modified_base 8: mod_base = OTHER; note = 2'-deoxy-2'-fluorouridine-3'-phosphate
  modified_base 9: mod_base = OTHER; note = 2'-deoxy-2'-fluoroguanosine-3'-phosphate
  modified_base 10: mod_base = OTHER; note = 2'-O-methylcytidine-3'-phosphate
  modified_base 11: mod_base = OTHER; note = 2'-O-methyluridine-3'-phosphate
  modified_base 12: mod_base = OTHER; note = 2'-O-methylguanosine-3'-phosphate
  modified_base 13: mod_base = OTHER; note = 2'-O-methylcytidine-3'-phosphate
  modified_base 14: mod_base = OTHER; note = 2'-deoxy-2'-fluoroadenosine-3'-phosphate
  modified_base 15: mod_base = OTHER; note = 2'-O-methyluridine-3'-phosphate
  modified_base 16: mod_base = OTHER; note = 2'-deoxy-2'-fluoroguanosine-3'-phosphate
  modified_base 17: mod_base = OTHER; note = 2'-O-methyluridine-3'-phosphate
  modified_base 18: mod_base = OTHER; note = 2'-O-methyluridine-3'-phosphate
  modified_base 19: mod_base = OTHER; note = 2'-O-methylguanosine-3'-phosphate
  modified_base 20: mod_base = OTHER; note = 2'-O-methyladenosine-3'-phosphate
  modified_base 21: mod_base = OTHER; note = 2'-O-methylguanosine-3'-phosphorothioate
  modified_base 22: mod_base = OTHER; note = 2'-O-methylguanosine-3'-phosphorothioate
  modified_base 23: mod_base = OTHER; note = 2'-O-methylguanosine
atcctggtgctgcatgttgaggg

SEQ ID NO: 1032 - RNA, 23 nt, synthetic construct
  source 1..23: mol_type = other RNA
  modified_base 1: mod_base = OTHER; note = 2'-O-methyladenosine-3'-phosphorothioate
  modified_base 2: mod_base = OTHER; note = 2'-deoxy-2'-fluoroadenosine-3'-phosphorothioate
  modified_base 3: mod_base = OTHER; note = 2'-O-methylguanosine-3'-phosphate
  modified_base 4: mod_base = OTHER; note = 2'-O-methylcytidine-3'-phosphate
  modified_base 5: mod_base = OTHER; note = 2'-O-methyladenosine-3'-phosphate
  modified_base 6: mod_base = OTHER; note = 2'-deoxy-2'-fluoroguanosine-3'-phosphate
  modified_base 7: mod_base = OTHER; note = 2'-O-methylguanosine-3'-phosphate
  modified_base 8: mod_base = OTHER; note = 2'-deoxy-2'-fluorouridine-3'-phosphate
  modified_base 9: mod_base = OTHER; note = 2'-deoxy-2'-fluoroguanosine-3'-phosphate
  modified_base 10: mod_base = OTHER; note = 2'-O-methyluridine-3'-phosphate
  modified_base 11: mod_base = OTHER; note = 2'-O-methylcytidine-3'-phosphate
  modified_base 12: mod_base = OTHER; note = 2'-O-methylcytidine-3'-phosphate
  modified_base 13: mod_base = OTHER; note = 2'-O-methylguanosine-3'-phosphate
  modified_base 14: mod_base = OTHER; note = 2'-deoxy-2'-fluorouridine-3'-phosphate
  modified_base 15: mod_base = OTHER; note = 2'-O-methylguanosine-3'-phosphate
  modified_base 16: mod_base = OTHER; note = 2'-deoxy-2'-fluorocytidine-3'-phosphate
  modified_base 17: mod_base = OTHER; note = 2'-O-methyladenosine-3'-phosphate
  modified_base 18: mod_base = OTHER; note = 2'-O-methylguanosine-3'-phosphate
  modified_base 19: mod_base = OTHER; note = 2'-O-methylguanosine-3'-phosphate
  modified_base 20: mod_base = OTHER; note = 2'-O-methylguanosine-3'-phosphate
  modified_base 21: mod_base = OTHER; note = 2'-O-methyluridine-3'-phosphorothioate
  modified_base 22: mod_base = OTHER; note = 2'-O-methylguanosine-3'-phosphorothioate
  modified_base 23: mod_base = OTHER; note = 2'-O-methyladenosine
aagcaggtgtccgtgcagggtga

SEQ ID NO: 1033 - RNA, 23 nt, synthetic construct
  source 1..23: mol_type = other RNA
  modified_base 1: mod_base = OTHER; note = 2'-O-methyladenosine-3'-phosphorothioate
  modified_base 2: mod_base = OTHER; note = 2'-deoxy-2'-fluoroadenosine-3'-phosphorothioate
  modified_base 3: mod_base = OTHER; note = 2'-O-methylguanosine-3'-phosphate
  modified_base 4: mod_base = OTHER; note = 2'-O-methylcytidine-3'-phosphate
  modified_base 5: mod_base = OTHER; note = 2'-O-methylcytidine-3'-phosphate
  modified_base 6: mod_base = OTHER; note = 2'-deoxy-2'-fluoroguanosine-3'-phosphate
  modified_base 7: mod_base = OTHER; note = 2'-O-methyluridine-3'-phosphate
  modified_base 8: mod_base = OTHER; note = 2'-deoxy-2'-fluorocytidine-3'-phosphate
  modified_base 9: mod_base = OTHER; note = 2'-deoxy-2'-fluorocytidine-3'-phosphate
  modified_base 10: mod_base = OTHER; note = 2'-O-methyladenosine-3'-phosphate
  modified_base 11: mod_base = OTHER; note = 2'-O-methylcytidine-3'-phosphate
  modified_base 12: mod_base = OTHER; note = 2'-O-methyladenosine-3'-phosphate
  modified_base 13: mod_base = OTHER; note = 2'-O-methylcytidine-3'-phosphate
  modified_base 14: mod_base = OTHER; note = 2'-deoxy-2'-fluoroadenosine-3'-phosphate
  modified_base 15: mod_base = OTHER; note = 2'-O-methylguanosine-3'-phosphate
  modified_base 16: mod_base = OTHER; note = 2'-deoxy-2'-fluorouridine-3'-phosphate
  modified_base 17: mod_base = OTHER; note = 2'-O-methylguanosine-3'-phosphate
  modified_base 18: mod_base = OTHER; note = 2'-O-methylguanosine-3'-phosphate
  modified_base 19: mod_base = OTHER; note = 2'-O-methyluridine-3'-phosphate
  modified_base 20: mod_base = OTHER; note = 2'-O-methylcytidine-3'-phosphate
  modified_base 21: mod_base = OTHER; note = 2'-O-methylcytidine-3'-phosphorothioate
  modified_base 22: mod_base = OTHER; note = 2'-O-methyluridine-3'-phosphorothioate
  modified_base 23: mod_base = OTHER; note = 2'-O-methylcytidine
aagccgtccacacagtggtcctc

SEQ ID NO: 1034 - RNA, 23 nt, synthetic construct
  source 1..23: mol_type = other RNA
  modified_base 1: mod_base = OTHER; note = 2'-O-methyladenosine-3'-phosphorothioate
  modified_base 2: mod_base = OTHER; note = 2'-deoxy-2'-fluoroadenosine-3'-phosphorothioate
  modified_base 3: mod_base = OTHER; note = 2'-O-methylguanosine-3'-phosphate
  modified_base 4: mod_base = OTHER; note = 2'-O-methyluridine-3'-phosphate
  modified_base 5: mod_base = OTHER; note = 2'-O-methylguanosine-3'-phosphate
  modified_base 6: mod_base = OTHER; note = 2'-deoxy-2'-fluorocytidine-3'-phosphate
  modified_base 7: mod_base = OTHER; note = 2'-O-methylguanosine-3'-phosphate
  modified_base 8: mod_base = OTHER; note = 2'-deoxy-2'-fluorouridine-3'-phosphate
  modified_base 9: mod_base = OTHER; note = 2'-deoxy-2'-fluoroguanosine-3'-phosphate
  modified_base 10: mod_base = OTHER; note = 2'-O-methyladenosine-3'-phosphate
  modified_base 11: mod_base = OTHER; note = 2'-O-methyluridine-3'-phosphate
  modified_base 12: mod_base = OTHER; note = 2'-O-methylguanosine-3'-phosphate
  modified_base 13: mod_base = OTHER; note = 2'-O-methyluridine-3'-phosphate
  modified_base 14: mod_base = OTHER; note = 2'-deoxy-2'-fluorocytidine-3'-phosphate
  modified_base 15: mod_base = OTHER; note = 2'-O-methyladenosine-3'-phosphate
  modified_base 16: mod_base = OTHER; note = 2'-deoxy-2'-fluorouridine-3'-phosphate
  modified_base 17: mod_base = OTHER; note = 2'-O-methylcytidine-3'-phosphate
  modified_base 18: mod_base = OTHER; note = 2'-O-methylcytidine-3'-phosphate
  modified_base 19: mod_base = OTHER; note = 2'-O-methyladenosine-3'-phosphate
  modified_base 20: mod_base = OTHER; note = 2'-O-methylguanosine-3'-phosphate
  modified_base 21: mod_base = OTHER; note = 2'-O-methylcytidine-3'-phosphorothioate
  modified_base 22: mod_base = OTHER; note = 2'-O-methyladenosine-3'-phosphorothioate
  modified_base 23: mod_base = OTHER; note = 2'-O-methylcytidine
aagtgcgtgatgtcatccagcac

SEQ ID NO: 1035 - RNA, 23 nt, synthetic construct
  source 1..23: mol_type = other RNA
  modified_base 1: mod_base = OTHER; note = 2'-O-methyladenosine-3'-phosphorothioate
  modified_base 2: mod_base = OTHER; note = 2'-deoxy-2'-fluoroadenosine-3'-phosphorothioate
  modified_base 3: mod_base = OTHER; note = 2'-O-methylguanosine-3'-phosphate
  modified_base 4: mod_base = OTHER; note = 2'-O-methylguanosine-3'-phosphate
  modified_base 5: mod_base = OTHER; note = 2'-O-methyluridine-3'-phosphate
  modified_base 6: mod_base = OTHER; note = 2'-deoxy-2'-fluoroguanosine-3'-phosphate
  modified_base 7: mod_base = OTHER; note = 2'-O-methylguanosine-3'-phosphate
  modified_base 8: mod_base = OTHER; note = 2'-deoxy-2'-fluorouridine-3'-phosphate
  modified_base 9: mod_base = OTHER; note = 2'-deoxy-2'-fluoroguanosine-3'-phosphate
  modified_base 10: mod_base = OTHER; note = 2'-O-methyluridine-3'-phosphate
  modified_base 11: mod_base = OTHER; note = 2'-O-methyluridine-3'-phosphate
  modified_base 12: mod_base = OTHER; note = 2'-O-methylguanosine-3'-phosphate
  modified_base 13: mod_base = OTHER; note = 2'-O-methyladenosine-3'-phosphate
  modified_base 14: mod_base = OTHER; note = 2'-deoxy-2'-fluoroadenosine-3'-phosphate
  modified_base 15: mod_base = OTHER; note = 2'-O-methylguanosine-3'-phosphate
  modified_base 16: mod_base = OTHER; note = 2'-deoxy-2'-fluoroguanosine-3'-phosphate
  modified_base 17: mod_base = OTHER; note = 2'-O-methyladenosine-3'-phosphate
  modified_base 18: mod_base = OTHER; note = 2'-O-methylguanosine-3'-phosphate
  modified_base 19: mod_base = OTHER; note = 2'-O-methylguanosine-3'-phosphate
  modified_base 20: mod_base = OTHER; note = 2'-O-methyluridine-3'-phosphate
  modified_base 21: mod_base = OTHER; note = 2'-O-methylguanosine-3'-phosphorothioate
  modified_base 22: mod_base = OTHER; note = 2'-O-methylcytidine-3'-phosphorothioate
  modified_base 23: mod_base = OTHER; note = 2'-O-methylcytidine
aaggtggtgttgaaggaggtgcc

SEQ ID NO: 1036 - RNA, 23 nt, synthetic construct
  source 1..23: mol_type = other RNA
  modified_base 1: mod_base = OTHER; note = 2'-O-methyladenosine-3'-phosphorothioate
  modified_base 2: mod_base = OTHER; note = 2'-deoxy-2'-fluoroadenosine-3'-phosphorothioate
  modified_base 3: mod_base = OTHER; note = 2'-O-methylguanosine-3'-phosphate
  modified_base 4: mod_base = OTHER; note = 2'-O-methylguanosine-3'-phosphate
  modified_base 5: mod_base = OTHER; note = 2'-O-methyluridine-3'-phosphate
  modified_base 6: mod_base = OTHER; note = 2'-deoxy-2'-fluorocytidine-3'-phosphate
  modified_base 7: mod_base = OTHER; note = 2'-O-methylcytidine-3'-phosphate
  modified_base 8: mod_base = OTHER; note = 2'-deoxy-2'-fluorouridine-3'-phosphate
  modified_base 9: mod_base = OTHER; note = 2'-deoxy-2'-fluoroguanosine-3'-phosphate
  modified_base 10: mod_base = OTHER; note = 2'-O-methylguanosine-3'-phosphate
  modified_base 11: mod_base = OTHER; note = 2'-O-methylcytidine-3'-phosphate
  modified_base 12: mod_base = OTHER; note = 2'-O-methyladenosine-3'-phosphate
  modified_base 13: mod_base = OTHER; note = 2'-O-methylcytidine-3'-phosphate
  modified_base 14: mod_base = OTHER; note = 2'-deoxy-2'-fluorouridine-3'-phosphate
  modified_base 15: mod_base = OTHER; note = 2'-O-methylguanosine-3'-phosphate
  modified_base 16: mod_base = OTHER; note = 2'-deoxy-2'-fluorocytidine-3'-phosphate
  modified_base 17: mod_base = OTHER; note = 2'-O-methylcytidine-3'-phosphate
  modified_base 18: mod_base = OTHER; note = 2'-O-methyladenosine-3'-phosphate
  modified_base 19: mod_base = OTHER; note = 2'-O-methyluridine-3'-phosphate
  modified_base 20: mod_base = OTHER; note = 2'-O-methyladenosine-3'-phosphate
  modified_base 21: mod_base = OTHER; note = 2'-O-methylguanosine-3'-phosphorothioate
  modified_base 22: mod_base = OTHER; note = 2'-O-methylcytidine-3'-phosphorothioate
  modified_base 23: mod_base = OTHER; note = 2'-O-methylcytidine
aaggtcctggcactgccatagcc

SEQ ID NO: 1037 - RNA, 23 nt, synthetic construct
  source 1..23: mol_type = other RNA
  modified_base 1: mod_base = OTHER; note = 2'-O-methyladenosine-3'-phosphorothioate
  modified_base 2: mod_base = OTHER; note = 2'-deoxy-2'-fluoroguanosine-3'-phosphorothioate
  modified_base 3: mod_base = OTHER; note = 2'-O-methyluridine-3'-phosphate
  modified_base 4: mod_base = OTHER; note = 2'-O-methyladenosine-3'-phosphate
  modified_base 5: mod_base = OTHER; note = 2'-O-methylguanosine-3'-phosphate
  modified_base 6: mod_base = OTHER; note = 2'-deoxy-2'-fluoroadenosine-3'-phosphate
  modified_base 7: mod_base = OTHER; note = 2'-O-methylguanosine-3'-phosphate
  modified_base 8: mod_base = OTHER; note = 2'-deoxy-2'-fluorouridine-3'-phosphate
  modified_base 9: mod_base = OTHER; note = 2'-deoxy-2'-fluorouridine-3'-phosphate
  modified_base 10: mod_base = OTHER; note = 2'-O-methyluridine-3'-phosphate
  modified_base 11: mod_base = OTHER; note = 2'-O-methylcytidine-3'-phosphate
  modified_base 12: mod_base = OTHER; note = 2'-O-methyluridine-3'-phosphate
  modified_base 13: mod_base = OTHER; note = 2'-O-methylcytidine-3'-phosphate
  modified_base 14: mod_base = OTHER; note = 2'-deoxy-2'-fluoroadenosine-3'-phosphate
  modified_base 15: mod_base = OTHER; note = 2'-O-methyluridine-3'-phosphate
  modified_base 16: mod_base = OTHER; note = 2'-deoxy-2'-fluorocytidine-3'-phosphate
  modified_base 17: mod_base = OTHER; note = 2'-O-methyladenosine-3'-phosphate
  modified_base 18: mod_base = OTHER; note = 2'-O-methyluridine-3'-phosphate
  modified_base 19: mod_base = OTHER; note = 2'-O-methyladenosine-3'-phosphate
  modified_base 20: mod_base = OTHER; note = 2'-O-methylguanosine-3'-phosphate
  modified_base 21: mod_base = OTHER; note = 2'-O-methylguanosine-3'-phosphorothioate
  modified_base 22: mod_base = OTHER; note = 2'-O-methyluridine-3'-phosphorothioate
  modified_base 23: mod_base = OTHER; note = 2'-O-methylguanosine
agtagagtttctcatcataggtg

SEQ ID NO: 1038 - RNA, 23 nt, synthetic construct
  source 1..23: mol_type = other RNA
  modified_base 1: mod_base = OTHER; note = 2'-O-methyladenosine-3'-phosphorothioate
  modified_base 2: mod_base = OTHER; note = 2'-deoxy-2'-fluorocytidine-3'-phosphorothioate
  modified_base 3: mod_base = OTHER; note = 2'-O-methyladenosine-3'-phosphate
  modified_base 4: mod_base = OTHER; note = 2'-O-methyluridine-3'-phosphate
  modified_base 5: mod_base = OTHER; note = 2'-O-methyluridine-3'-phosphate
  modified_base 6: mod_base = OTHER; note = 2'-deoxy-2'-fluorouridine-3'-phosphate
  modified_base 7: mod_base = OTHER; note = 2'-O-methylcytidine-3'-phosphate
  modified_base 8: mod_base = OTHER; note = 2'-deoxy-2'-fluorouridine-3'-phosphate
  modified_base 9: mod_base = OTHER; note = 2'-deoxy-2'-fluorouridine-3'-phosphate
  modified_base 10: mod_base = OTHER; note = 2'-O-methylguanosine-3'-phosphate
  modified_base 11: mod_base = OTHER; note = 2'-O-methylguanosine-3'-phosphate
  modified_base 12: mod_base = OTHER; note = 2'-O-methyladenosine-3'-phosphate
  modified_base 13: mod_base = OTHER; note = 2'-O-methylcytidine-3'-phosphate
  modified_base 14: mod_base = OTHER; note = 2'-deoxy-2'-fluoroadenosine-3'-phosphate
  modified_base 15: mod_base = OTHER; note = 2'-O-methylguanosine-3'-phosphate
  modified_base 16: mod_base = OTHER; note = 2'-deoxy-2'-fluoroadenosine-3'-phosphate
  modified_base 17: mod_base = OTHER; note = 2'-O-methyladenosine-3'-phosphate
  modified_base 18: mod_base = OTHER; note = 2'-O-methylcytidine-3'-phosphate
  modified_base 19: mod_base = OTHER; note = 2'-O-methylguanosine-3'-phosphate
  modified_base 20: mod_base = OTHER; note = 2'-O-methyluridine-3'-phosphate
  modified_base 21: mod_base = OTHER; note = 2'-O-methyladenosine-3'-phosphorothioate
  modified_base 22: mod_base = OTHER; note = 2'-O-methylguanosine-3'-phosphorothioate
  modified_base 23: mod_base = OTHER; note = 2'-O-methylcytidine
acatttcttggacagaacgtagc

SEQ ID NO: 1039 - RNA, 23 nt, synthetic construct
  source 1..23: mol_type = other RNA
  modified_base 1: mod_base = OTHER; note = 2'-O-methyladenosine-3'-phosphorothioate
  modified_base 2: mod_base = OTHER; note = 2'-deoxy-2'-fluoroadenosine-3'-phosphorothioate
  modified_base 3: mod_base = OTHER; note = 2'-O-methylguanosine-3'-phosphate
  modified_base 4: mod_base = OTHER; note = 2'-O-methylcytidine-3'-phosphate
  modified_base 5: mod_base = OTHER; note = 2'-O-methyladenosine-3'-phosphate
  modified_base 6: mod_base = OTHER; note = 2'-deoxy-2'-fluorocytidine-3'-phosphate
  modified_base 7: mod_base = OTHER; note = 2'-O-methylguanosine-3'-phosphate
  modified_base 8: mod_base = OTHER; note = 2'-deoxy-2'-fluoroguanosine-3'-phosphate
  modified_base 9: mod_base = OTHER; note = 2'-deoxy-2'-fluorouridine-3'-phosphate
  modified_base 10: mod_base = OTHER; note = 2'-O-methylguanosine-3'-phosphate
  modified_base 11: mod_base = OTHER; note = 2'-O-methyladenosine-3'-phosphate
  modified_base 12: mod_base = OTHER; note = 2'-O-methyladenosine-3'-phosphate
  modified_base 13: mod_base = OTHER; note = 2'-O-methylguanosine-3'-phosphate
  modified_base 14: mod_base = OTHER; note = 2'-deoxy-2'-fluorocytidine-3'-phosphate
  modified_base 15: mod_base = OTHER; note = 2'-O-methyluridine-3'-phosphate
  modified_base 16: mod_base = OTHER; note = 2'-deoxy-2'-fluoroguanosine-3'-phosphate
  modified_base 17: mod_base = OTHER; note = 2'-O-methylcytidine-3'-phosphate
  modified_base 18: mod_base = OTHER; note = 2'-O-methyluridine-3'-phosphate
  modified_base 19: mod_base = OTHER; note = 2'-O-methylguanosine-3'-phosphate
  modified_base 20: mod_base = OTHER; note = 2'-O-methyluridine-3'-phosphate
  modified_base 21: mod_base = OTHER; note = 2'-O-methylcytidine-3'-phosphorothioate
  modified_base 22: mod_base = OTHER; note = 2'-O-methylguanosine-3'-phosphorothioate
  modified_base 23: mod_base = OTHER; note = 2'-O-methylguanosine
aagcacggtgaagctgctgtcgg

SEQ ID NO: 1040 - RNA, 23 nt, synthetic construct
  source 1..23: mol_type = other RNA
  modified_base 1: mod_base = OTHER; note = 2'-O-methyladenosine-3'-phosphorothioate
  modified_base 2: mod_base = OTHER; note = 2'-deoxy-2'-fluoroguanosine-3'-phosphorothioate
  modified_base 3: mod_base = OTHER; note = 2'-O-methylcytidine-3'-phosphate
  modified_base 4: mod_base = OTHER; note = 2'-O-methyluridine-3'-phosphate
  modified_base 5: mod_base = OTHER; note = 2'-O-methyluridine-3'-phosphate
  modified_base 6: mod_base = OTHER; note = 2'-deoxy-2'-fluorouridine-3'-phosphate
  modified_base 7: mod_base = OTHER; note = 2'-O-methylcytidine-3'-phosphate
  modified_base 8: mod_base = OTHER; note = 2'-deoxy-2'-fluoroadenosine-3'-phosphate
  modified_base 9: mod_base = OTHER; note = 2'-deoxy-2'-fluoroguanosine-3'-phosphate
  modified_base 10: mod_base = OTHER; note = 2'-O-methylguanosine-3'-phosphate
  modified_base 11: mod_base = OTHER; note = 2'-O-methylcytidine-3'-phosphate
  modified_base 12: mod_base = OTHER; note = 2'-O-methyladenosine-3'-phosphate
  modified_base 13: mod_base = OTHER; note = 2'-O-methylguanosine-3'-phosphate
  modified_base 14: mod_base = OTHER; note = 2'-deoxy-2'-fluorouridine-3'-phosphate
  modified_base 15: mod_base = OTHER; note = 2'-O-methyluridine-3'-phosphate
  modified_base 16: mod_base = OTHER; note = 2'-deoxy-2'-fluorocytidine-3'-phosphate
  modified_base 17: mod_base = OTHER; note = 2'-O-methyluridine-3'-phosphate
  modified_base 18: mod_base = OTHER; note = 2'-O-methylcytidine-3'-phosphate
  modified_base 19: mod_base = OTHER; note = 2'-O-methylguanosine-3'-phosphate
  modified_base 20: mod_base = OTHER; note = 2'-O-methyluridine-3'-phosphate
  modified_base 21: mod_base = OTHER; note = 2'-O-methyluridine-3'-phosphorothioate
  modified_base 22: mod_base = OTHER; note = 2'-O-methylguanosine-3'-phosphorothioate
  modified_base 23: mod_base = OTHER; note = 2'-O-methyluridine
agctttcaggcagttctcgttgt

SEQ ID NO: 1041 - RNA, 23 nt, synthetic construct
  source 1..23: mol_type = other RNA
  modified_base 1: mod_base = OTHER; note = 2'-O-methyladenosine-3'-phosphorothioate
  modified_base 2: mod_base = OTHER; note = 2'-deoxy-2'-fluorocytidine-3'-phosphorothioate
  modified_base 3: mod_base = OTHER; note = 2'-O-methylguanosine-3'-phosphate
  modified_base 4: mod_base = OTHER; note = 2'-O-methyluridine-3'-phosphate
  modified_base 5: mod_base = OTHER; note = 2'-O-methylguanosine-3'-phosphate
  modified_base 6: mod_base = OTHER; note = 2'-deoxy-2'-fluorouridine-3'-phosphate
  modified_base 7: mod_base = OTHER; note = 2'-O-methyladenosine-3'-phosphate
  modified_base 8: mod_base = OTHER; note = 2'-deoxy-2'-fluoroguanosine-3'-phosphate
  modified_base 9: mod_base = OTHER; note = 2'-deoxy-2'-fluoroadenosine-3'-phosphate
  modified_base 10: mod_base = OTHER; note = 2'-O-methyluridine-3'-phosphate
  modified_base 11: mod_base = OTHER; note = 2'-O-methylguanosine-3'-phosphate
  modified_base 12: mod_base = OTHER; note = 2'-O-methylguanosine-3'-phosphate
  modified_base 13: mod_base = OTHER; note = 2'-O-methyladenosine-3'-phosphate
  modified_base 14: mod_base = OTHER; note = 2'-deoxy-2'-fluoroguanosine-3'-phosphate
  modified_base 15: mod_base = OTHER; note = 2'-O-methyluridine-3'-phosphate
  modified_base 16: mod_base = OTHER; note = 2'-deoxy-2'-fluorouridine-3'-phosphate
  modified_base 17: mod_base = OTHER; note = 2'-O-methylguanosine-3'-phosphate
  modified_base 18: mod_base = OTHER; note = 2'-O-methyladenosine-3'-phosphate
  modified_base 19: mod_base = OTHER; note = 2'-O-methylguanosine-3'-phosphate
  modified_base 20: mod_base = OTHER; note = 2'-O-methylguanosine-3'-phosphate
  modified_base 21: mod_base = OTHER; note = 2'-O-methyladenosine-3'-phosphorothioate
  modified_base 22: mod_base = OTHER; note = 2'-O-methyladenosine-3'-phosphorothioate
  modified_base 23: mod_base = OTHER; note = 2'-O-methylcytidine
acgtgtagatggagttgaggaac

SEQ ID NO: 1042 - RNA, 23 nt, synthetic construct
  source 1..23: mol_type = other RNA
  modified_base 1: mod_base = OTHER; note = 2'-O-methyladenosine-3'-phosphorothioate
  modified_base 2: mod_base = OTHER; note = 2'-deoxy-2'-fluoroguanosine-3'-phosphorothioate
  modified_base 3: mod_base = OTHER; note = 2'-O-methyluridine-3'-phosphate
  modified_base 4: mod_base = OTHER; note = 2'-O-methylguanosine-3'-phosphate
  modified_base 5: mod_base = OTHER; note = 2'-O-methyladenosine-3'-phosphate
  modified_base 6: mod_base = OTHER; note = 2'-deoxy-2'-fluoroadenosine-3'-phosphate
  modified_base 7: mod_base = OTHER; note = 2'-O-methylcytidine-3'-phosphate
  modified_base 8: mod_base = OTHER; note = 2'-deoxy-2'-fluoroadenosine-3'-phosphate
  modified_base 9: mod_base = OTHER; note = 2'-deoxy-2'-fluoroguanosine-3'-phosphate
  modified_base 10: mod_base = OTHER; note = 2'-O-methylguanosine-3'-phosphate
  modified_base 11: mod_base = OTHER; note = 2'-O-methylguanosine-3'-phosphate
  modified_base 12: mod_base = OTHER; note = 2'-O-methyluridine-3'-phosphate
  modified_base 13: mod_base = OTHER; note = 2'-O-methylguanosine-3'-phosphate
  modified_base 14: mod_base = OTHER; note = 2'-deoxy-2'-fluoroadenosine-3'-phosphate
  modified_base 15: mod_base = OTHER; note = 2'-O-methyluridine-3'-phosphate
  modified_base 16: mod_base = OTHER; note = 2'-deoxy-2'-fluoroguanosine-3'-phosphate
  modified_base 17: mod_base = OTHER; note = 2'-O-methyluridine-3'-phosphate
  modified_base 18: mod_base = OTHER; note = 2'-O-methyluridine-3'-phosphate
  modified_base 19: mod_base = OTHER; note = 2'-O-methylguanosine-3'-phosphate
  modified_base 20: mod_base = OTHER; note = 2'-O-methylguanosine-3'-phosphate
  modified_base 21: mod_base = OTHER; note = 2'-O-methylcytidine-3'-phosphorothioate
  modified_base 22: mod_base = OTHER; note = 2'-O-methyluridine-3'-phosphorothioate
  modified_base 23: mod_base = OTHER; note = 2'-O-methylguanosine
agtgaacagggtgatgttggctg

SEQ ID NO: 1043 - RNA, 23 nt, synthetic construct
  source 1..23: mol_type = other RNA
  modified_base 1: mod_base = OTHER; note = 2'-O-methyladenosine-3'-phosphorothioate
  modified_base 2: mod_base = OTHER; note = 2'-deoxy-2'-fluoroadenosine-3'-phosphorothioate
  modified_base 3: mod_base = OTHER; note = 2'-O-methylcytidine-3'-phosphate
  modified_base 4: mod_base = OTHER; note = 2'-O-methylcytidine-3'-phosphate
  modified_base 5: mod_base = OTHER; note = 2'-O-methyladenosine-3'-phosphate
  modified_base 6: mod_base = OTHER; note = 2'-deoxy-2'-fluorocytidine-3'-phosphate
  modified_base 7: mod_base = OTHER; note = 2'-O-methylguanosine-3'-phosphate
  modified_base 8: mod_base = OTHER; note = 2'-deoxy-2'-fluoroadenosine-3'-phosphate
  modified_base 9: mod_base = OTHER; note = 2'-deoxy-2'-fluorouridine-3'-phosphate
  modified_base 10: mod_base = OTHER; note = 2'-O-methylguanosine-3'-phosphate
  modified_base 11: mod_base = OTHER; note = 2'-O-methyladenosine-3'-phosphate
  modified_base 12: mod_base = OTHER; note = 2'-O-methyladenosine-3'-phosphate
  modified_base 13: mod_base = OTHER; note = 2'-O-methylguanosine-3'-phosphate
  modified_base 14: mod_base = OTHER; note = 2'-deoxy-2'-fluoroadenosine-3'-phosphate
  modified_base 15: mod_base = OTHER; note = 2'-O-methyladenosine-3'-phosphate
  modified_base 16: mod_base = OTHER; note = 2'-deoxy-2'-fluoroguanosine-3'-phosphate
  modified_base 17: mod_base = OTHER; note = 2'-O-methylcytidine-3'-phosphate
  modified_base 18: mod_base = OTHER; note = 2'-O-methyluridine-3'-phosphate
  modified_base 19: mod_base = OTHER; note = 2'-O-methylcytidine-3'-phosphate
  modified_base 20: mod_base = OTHER; note = 2'-O-methylguanosine-3'-phosphate
  modified_base 21: mod_base = OTHER; note = 2'-O-methyladenosine-3'-phosphorothioate
  modified_base 22: mod_base = OTHER; note = 2'-O-methylguanosine-3'-phosphorothioate
  modified_base 23: mod_base = OTHER; note = 2'-O-methylguanosine
aaccacgatgaagaagctcgagg

SEQ ID NO: 1044 - RNA, 23 nt, synthetic construct
  source 1..23: mol_type = other RNA
  modified_base 1: mod_base = OTHER; note = 2'-O-methyladenosine-3'-phosphorothioate
  modified_base 2: mod_base = OTHER; note = 2'-deoxy-2'-fluoroadenosine-3'-phosphorothioate
  modified_base 3: mod_base = OTHER; note = 2'-O-methylcytidine-3'-phosphate
  modified_base 4: mod_base = OTHER; note = 2'-O-methylcytidine-3'-phosphate
  modified_base 5: mod_base = OTHER; note = 2'-O-methyladenosine-3'-phosphate
  modified_base 6: mod_base = OTHER; note = 2'-deoxy-2'-fluoroguanosine-3'-phosphate
  modified_base 7: mod_base = OTHER; note = 2'-O-methylcytidine-3'-phosphate
  modified_base 8: mod_base = OTHER; note = 2'-deoxy-2'-fluorouridine-3'-phosphate
  modified_base 9: mod_base = OTHER; note = 2'-deoxy-2'-fluoroguanosine-3'-phosphate
  modified_base 10: mod_base = OTHER; note = 2'-O-methylcytidine-3'-phosphate
  modified_base 11: mod_base = OTHER; note = 2'-O-methyladenosine-3'-phosphate
  modified_base 12: mod_base = OTHER; note = 2'-O-methylcytidine-3'-phosphate
  modified_base 13: mod_base = OTHER; note = 2'-O-methylcytidine-3'-phosphate
  modified_base 14: mod_base = OTHER; note = 2'-deoxy-2'-fluoroadenosine-3'-phosphate
  modified_base 15: mod_base = OTHER; note = 2'-O-methylguanosine-3'-phosphate
  modified_base 16: mod_base = OTHER; note = 2'-deoxy-2'-fluorocytidine-3'-phosphate
  modified_base 17: mod_base = OTHER; note = 2'-O-methyladenosine-3'-phosphate
  modified_base 18: mod_base = OTHER; note = 2'-O-methylguanosine-3'-phosphate
  modified_base 19: mod_base = OTHER; note = 2'-O-methylcytidine-3'-phosphate
  modified_base 20: mod_base = OTHER; note = 2'-O-methyluridine-3'-phosphate
  modified_base 21: mod_base = OTHER; note = 2'-O-methylguanosine-3'-phosphorothioate
  modified_base 22: mod_base = OTHER; note = 2'-O-methylcytidine-3'-phosphorothioate
  modified_base 23: mod_base = OTHER; note = 2'-O-methyladenosine
aaccagctgcaccagcagctgca

SEQ ID NO: 1045 - RNA, 23 nt, synthetic construct
  source 1..23: mol_type = other RNA
  modified_base 1: mod_base = OTHER; note = 2'-O-methyladenosine-3'-phosphorothioate
  modified_base 2: mod_base = OTHER; note = 2'-deoxy-2'-fluorocytidine-3'-phosphorothioate
  modified_base 3: mod_base = OTHER; note = 2'-O-methyluridine-3'-phosphate
  modified_base 4: mod_base = OTHER; note = 2'-O-methylguanosine-3'-phosphate
  modified_base 5: mod_base = OTHER; note = 2'-O-methyladenosine-3'-phosphate
  modified_base 6: mod_base = OTHER; note = 2'-deoxy-2'-fluorocytidine-3'-phosphate
  modified_base 7: mod_base = OTHER; note = 2'-O-methyladenosine-3'-phosphate
  modified_base 8: mod_base = OTHER; note = 2'-deoxy-2'-fluoroadenosine-3'-phosphate
  modified_base 9: mod_base = OTHER; note = 2'-deoxy-2'-fluoroadenosine-3'-phosphate
  modified_base 10: mod_base = OTHER; note = 2'-O-methylcytidine-3'-phosphate
  modified_base 11: mod_base = OTHER; note = 2'-O-methyladenosine-3'-phosphate
  modified_base 12: mod_base = OTHER; note = 2'-O-methylcytidine-3'-phosphate
  modified_base 13: mod_base = OTHER; note = 2'-O-methylcytidine-3'-phosphate
  modified_base 14: mod_base = OTHER; note = 2'-deoxy-2'-fluorouridine-3'-phosphate
  modified_base 15: mod_base = OTHER; note = 2'-O-methylguanosine-3'-phosphate
  modified_base 16: mod_base = OTHER; note = 2'-deoxy-2'-fluorocytidine-3'-phosphate
  modified_base 17: mod_base = OTHER; note = 2'-O-methyladenosine-3'-phosphate
  modified_base 18: mod_base = OTHER; note = 2'-O-methyluridine-3'-phosphate
  modified_base 19: mod_base = OTHER; note = 2'-O-methylguanosine-3'-phosphate
  modified_base 20: mod_base = OTHER; note = 2'-O-methyladenosine-3'-phosphate
  modified_base 21: mod_base = OTHER; note = 2'-O-methylguanosine-3'-phosphorothioate
  modified_base 22: mod_base = OTHER; note = 2'-O-methyluridine-3'-phosphorothioate
  modified_base 23: mod_base = OTHER; note = 2'-O-methylguanosine
actgacaaacacctgcatgagtg

SEQ ID NO: 1046 - RNA, 23 nt, synthetic construct
  source 1..23: mol_type = other RNA
  modified_base 1: mod_base = OTHER; note = 2'-O-methyladenosine-3'-phosphorothioate
  modified_base 2: mod_base = OTHER; note = 2'-deoxy-2'-fluoroguanosine-3'-phosphorothioate
  modified_base 3: mod_base = OTHER; note = 2'-O-methyluridine-3'-phosphate
  modified_base 4: mod_base = OTHER; note = 2'-O-methyluridine-3'-phosphate
  modified_base 5: mod_base = OTHER; note = 2'-O-methylcytidine-3'-phosphate
  modified_base 6: mod_base = OTHER; note = 2'-deoxy-2'-fluorouridine-3'-phosphate
  modified_base 7: mod_base = OTHER; note = 2'-O-methylguanosine-3'-phosphate
  modified_base 8: mod_base = OTHER; note = 2'-deoxy-2'-fluoroguanosine-3'-phosphate
  modified_base 9: mod_base = OTHER; note = 2'-deoxy-2'-fluorouridine-3'-phosphate
  modified_base 10: mod_base = OTHER; note = 2'-O-methyluridine-3'-phosphate
  modified_base 11: mod_base = OTHER; note = 2'-O-methylguanosine-3'-phosphate
  modified_base 12: mod_base = OTHER; note = 2'-O-methyladenosine-3'-phosphate
  modified_base 13: mod_base = OTHER; note = 2'-O-methyladenosine-3'-phosphate
  modified_base 14: mod_base = OTHER; note = 2'-deoxy-2'-fluoroguanosine-3'-phosphate
  modified_base 15: mod_base = OTHER; note = 2'-O-methyluridine-3'-phosphate
  modified_base 16: mod_base = OTHER; note = 2'-deoxy-2'-fluorouridine-3'-phosphate
  modified_base 17: mod_base = OTHER; note = 2'-O-methylcytidine-3'-phosphate
  modified_base 18: mod_base = OTHER; note = 2'-O-methylcytidine-3'-phosphate
  modified_base 19: mod_base = OTHER; note = 2'-O-methylcytidine-3'-phosphate
  modified_base 20: mod_base = OTHER; note = 2'-O-methyladenosine-3'-phosphate
  modified_base 21: mod_base = OTHER; note = 2'-O-methylcytidine-3'-phosphorothioate
  modified_base 22: mod_base = OTHER; note = 2'-O-methyladenosine-3'-phosphorothioate
  modified_base 23: mod_base = OTHER; note = 2'-O-methylcytidine
agttctggttgaagttcccacac

SEQ ID NO: 1047 - RNA, 23 nt, synthetic construct
  source 1..23: mol_type = other RNA
  modified_base 1: mod_base = OTHER; note = 2'-O-methyladenosine-3'-phosphorothioate
  modified_base 2: mod_base = OTHER; note = 2'-deoxy-2'-fluorouridine-3'-phosphorothioate
  modified_base 3: mod_base = OTHER; note = 2'-O-methylguanosine-3'-phosphate
  modified_base 4: mod_base = OTHER; note = 2'-O-methyladenosine-3'-phosphate
  modified_base 5: mod_base = OTHER; note = 2'-O-methylguanosine-3'-phosphate
  modified_base 6: mod_base = OTHER; note = 2'-deoxy-2'-fluoroguanosine-3'-phosphate
  modified_base 7: mod_base = OTHER; note = 2'-O-methylguanosine-3'-phosphate
  modified_base 8: mod_base = OTHER; note = 2'-deoxy-2'-fluorocytidine-3'-phosphate
  modified_base 9: mod_base = OTHER; note = 2'-deoxy-2'-fluorocytidine-3'-phosphate
  modified_base 10: mod_base = OTHER; note = 2'-O-methylguanosine-3'-phosphate
  modified_base 11: mod_base = OTHER; note = 2'-O-methyluridine-3'-phosphate
  modified_base 12: mod_base = OTHER; note = 2'-O-methylguanosine-3'-phosphate
  modified_base 13: mod_base = OTHER; note = 2'-O-methyladenosine-3'-phosphate
  modified_base 14: mod_base = OTHER; note = 2'-deoxy-2'-fluoroadenosine-3'-phosphate
  modified_base 15: mod_base = OTHER; note = 2'-O-methylguanosine-3'-phosphate
  modified_base 16: mod_base = OTHER; note = 2'-deoxy-2'-fluorouridine-3'-phosphate
  modified_base 17: mod_base = OTHER; note = 2'-O-methylcytidine-3'-phosphate
  modified_base 18: mod_base = OTHER; note = 2'-O-methylguanosine-3'-phosphate
  modified_base 19: mod_base = OTHER; note = 2'-O-methyluridine-3'-phosphate
  modified_base 20: mod_base = OTHER; note = 2'-O-methylcytidine-3'-phosphate
  modified_base 21: mod_base = OTHER; note = 2'-O-methyladenosine-3'-phosphorothioate
  modified_base 22: mod_base = OTHER; note = 2'-O-methylguanosine-3'-phosphorothioate
  modified_base 23: mod_base = OTHER; note = 2'-O-methylcytidine
atgagggccgtgaagtcgtcagc

SEQ ID NO: 1048 - RNA, 23 nt, synthetic construct
  source 1..23: mol_type = other RNA
  modified_base 1: mod_base = OTHER; note = 2'-O-methyladenosine-3'-phosphorothioate
  modified_base 2: mod_base = OTHER; note = 2'-deoxy-2'-fluorouridine-3'-phosphorothioate
  modified_base 3: mod_base = OTHER; note = 2'-O-methylcytidine-3'-phosphate
  modified_base 4: mod_base = OTHER; note = 2'-O-methylcytidine-3'-phosphate
  modified_base 5: mod_base = OTHER; note = 2'-O-methyladenosine-3'-phosphate
  modified_base 6: mod_base = OTHER; note = 2'-deoxy-2'-fluoroguanosine-3'-phosphate
  modified_base 7: mod_base = OTHER; note = 2'-O-methylguanosine-3'-phosphate
  modified_base 8: mod_base = OTHER; note = 2'-deoxy-2'-fluorouridine-3'-phosphate
  modified_base 9: mod_base = OTHER; note = 2'-deoxy-2'-fluoroguanosine-3'-phosphate
  modified_base 10: mod_base = OTHER; note = 2'-O-methyluridine-3'-phosphate
  modified_base 11: mod_base = OTHER; note = 2'-O-methyluridine-3'-phosphate
  modified_base 12: mod_base = OTHER; note = 2'-O-methylguanosine-3'-phosphate
  modified_base 13: mod_base = OTHER; note = 2'-O-methylguanosine-3'-phosphate
  modified_base 14: mod_base = OTHER; note = 2'-deoxy-2'-fluorocytidine-3'-phosphate
  modified_base 15: mod_base = OTHER; note = 2'-O-methylguanosine-3'-phosphate
  modified_base 16: mod_base = OTHER; note = 2'-deoxy-2'-fluoroadenosine-3'-phosphate
  modified_base 17: mod_base = OTHER; note = 2'-O-methyladenosine-3'-phosphate
  modified_base 18: mod_base = OTHER; note = 2'-O-methylguanosine-3'-phosphate
  modified_base 19: mod_base = OTHER; note = 2'-O-methylguanosine-3'-phosphate
  modified_base 20: mod_base = OTHER; note = 2'-O-methylcytidine-3'-phosphate
  modified_base 21: mod_base = OTHER; note = 2'-O-methyluridine-3'-phosphorothioate
  modified_base 22: mod_base = OTHER; note = 2'-O-methylguanosine-3'-phosphorothioate
  modified_base 23: mod_base = OTHER; note = 2'-O-methylcytidine
atccaggtgttggcgaaggctgc

SEQ ID NO: 1049 - RNA, 23 nt, synthetic construct
  source 1..23: mol_type = other RNA
  modified_base 1: mod_base = OTHER; note = 2'-O-methyladenosine-3'-phosphorothioate
  modified_base 2: mod_base = OTHER; note = 2'-deoxy-2'-fluoroguanosine-3'-phosphorothioate
  modified_base 3: mod_base = OTHER; note = 2'-O-methyluridine-3'-phosphate
  modified_base 4: mod_base = OTHER; note = 2'-O-methylcytidine-3'-phosphate
  modified_base 5: mod_base = OTHER; note = 2'-O-methylcytidine-3'-phosphate
  modified_base 6: mod_base = OTHER; note = 2'-deoxy-2'-fluorouridine-3'-phosphate
  modified_base 7: mod_base = OTHER; note = 2'-O-methylcytidine-3'-phosphate
  modified_base 8: mod_base = OTHER; note = 2'-deoxy-2'-fluoroadenosine-3'-phosphate
  modified_base 9: mod_base = OTHER; note = 2'-deoxy-2'-fluoroadenosine-3'-phosphate
  modified_base 10: mod_base = OTHER; note = 2'-O-methyladenosine-3'-phosphate
  modified_base 11: mod_base = OTHER; note = 2'-O-methylguanosine-3'-phosphate
  modified_base 12: mod_base = OTHER; note = 2'-O-methylcytidine-3'-phosphate
  modified_base 13: mod_base = OTHER; note = 2'-O-methyluridine-3'-phosphate
  modified_base 14: mod_base = OTHER; note = 2'-deoxy-2'-fluoroguanosine-3'-phosphate
  modified_base 15: mod_base = OTHER; note = 2'-O-methyluridine-3'-phosphate
  modified_base 16: mod_base = OTHER; note = 2'-deoxy-2'-fluorouridine-3'-phosphate
  modified_base 17: mod_base = OTHER; note = 2'-O-methylcytidine-3'-phosphate
  modified_base 18: mod_base = OTHER; note = 2'-O-methylcytidine-3'-phosphate
  modified_base 19: mod_base = OTHER; note = 2'-O-methyluridine-3'-phosphate
  modified_base 20: mod_base = OTHER; note = 2'-O-methylguanosine-3'-phosphate
  modified_base 21: mod_base = OTHER; note = 2'-O-methylguanosine-3'-phosphorothioate
  modified_base 22: mod_base = OTHER; note = 2'-O-methylcytidine-3'-phosphorothioate
  modified_base 23: mod_base = OTHER; note = 2'-O-methyladenosine
agtcctcaaagctgttcctggca

SEQ ID NO: 1050 - RNA, 23 nt, synthetic construct
  source 1..23: mol_type = other RNA
  modified_base 1: mod_base = OTHER; note = 2'-O-methyladenosine-3'-phosphorothioate
  modified_base 2: mod_base = OTHER; note = 2'-deoxy-2'-fluoroguanosine-3'-phosphorothioate
  modified_base 3: mod_base = OTHER; note = 2'-O-methylcytidine-3'-phosphate
  modified_base 4: mod_base = OTHER; note = 2'-O-methylguanosine-3'-phosphate
  modified_base 5: mod_base = OTHER; note = 2'-O-methyluridine-3'-phosphate
  modified_base 6: mod_base = OTHER; note = 2'-deoxy-2'-fluoroadenosine-3'-phosphate
  modified_base 7: mod_base = OTHER; note = 2'-O-methylguanosine-3'-phosphate
  modified_base 8: mod_base = OTHER; note = 2'-deoxy-2'-fluorouridine-3'-phosphate
  modified_base 9: mod_base = OTHER; note = 2'-deoxy-2'-fluorouridine-3'-phosphate
  modified_base 10: mod_base = OTHER; note = 2'-O-methylcytidine-3'-phosphate
  modified_base 11: mod_base = OTHER; note = 2'-O-methyluridine-3'-phosphate
  modified_base 12: mod_base = OTHER; note = 2'-O-methylcytidine-3'-phosphate
  modified_base 13: mod_base = OTHER; note = 2'-O-methyladenosine-3'-phosphate
  modified_base 14: mod_base = OTHER; note = 2'-deoxy-2'-fluorouridine-3'-phosphate
  modified_base 15: mod_base = OTHER; note = 2'-O-methyluridine-3'-phosphate
  modified_base 16: mod_base = OTHER; note = 2'-deoxy-2'-fluorocytidine-3'-phosphate
  modified_base 17: mod_base = OTHER; note = 2'-O-methyluridine-3'-phosphate
  modified_base 18: mod_base = OTHER; note = 2'-O-methylcytidine-3'-phosphate
  modified_base 19: mod_base = OTHER; note = 2'-O-methylcytidine-3'-phosphate
  modified_base 20: mod_base = OTHER; note = 2'-O-methyladenosine-3'-phosphate
  modified_base 21: mod_base = OTHER; note = 2'-O-methylcytidine-3'-phosphorothioate
  modified_base 22: mod_base = OTHER; note = 2'-O-methyladenosine-3'-phosphorothioate
  modified_base 23: mod_base = OTHER; note = 2'-O-methylcytidine
agcgtagttctcattctccacac

SEQ ID NO: 1051 - RNA, 23 nt, synthetic construct
  source 1..23: mol_type = other RNA
  modified_base 1: mod_base = OTHER; note = 2'-O-methyladenosine-3'-phosphorothioate
  modified_base 2: mod_base = OTHER; note = 2'-deoxy-2'-fluoroguanosine-3'-phosphorothioate
  modified_base 3: mod_base = OTHER; note = 2'-O-methylcytidine-3'-phosphate
  modified_base 4: mod_base = OTHER; note = 2'-O-methylguanosine-3'-phosphate
  modified_base 5: mod_base = OTHER; note = 2'-O-methyladenosine-3'-phosphate
  modified_base 6: mod_base = OTHER; note = 2'-deoxy-2'-fluoroguanosine-3'-phosphate
  modified_base 7: mod_base = OTHER; note = 2'-O-methyladenosine-3'-phosphate
  modified_base 8: mod_base = OTHER; note = 2'-deoxy-2'-fluoroadenosine-3'-phosphate
  modified_base 9: mod_base = OTHER; note = 2'-deoxy-2'-fluoroguanosine-3'-phosphate
  modified_base 10: mod_base = OTHER; note = 2'-O-methylguanosine-3'-phosphate
  modified_base 11: mod_base = OTHER; note = 2'-O-methylcytidine-3'-phosphate
  modified_base 12: mod_base = OTHER; note = 2'-O-methyladenosine-3'-phosphate
  modified_base 13: mod_base = OTHER; note = 2'-O-methylcytidine-3'-phosphate
  modified_base 14: mod_base = OTHER; note = 2'-deoxy-2'-fluorouridine-3'-phosphate
  modified_base 15: mod_base = OTHER; note = 2'-O-methylguanosine-3'-phosphate
  modified_base 16: mod_base = OTHER; note = 2'-deoxy-2'-fluorouridine-3'-phosphate
  modified_base 17: mod_base = OTHER; note = 2'-O-methyluridine-3'-phosphate
  modified_base 18: mod_base = OTHER; note = 2'-O-methylguanosine-3'-phosphate
  modified_base 19: mod_base = OTHER; note = 2'-O-methylguanosine-3'-phosphate
  modified_base 20: mod_base = OTHER; note = 2'-O-methylguanosine-3'-phosphate
  modified_base 21: mod_base = OTHER; note = 2'-O-methyladenosine-3'-phosphorothioate
  modified_base 22: mod_base = OTHER; note = 2'-O-methyluridine-3'-phosphorothioate
  modified_base 23: mod_base = OTHER; note = 2'-O-methylcytidine
agcgagaaggcactgttgggatc

SEQ ID NO: 1052 - RNA, 23 nt, synthetic construct
  source 1..23: mol_type = other RNA
  modified_base 1: mod_base = OTHER; note = 2'-O-methyladenosine-3'-phosphorothioate
  modified_base 2: mod_base = OTHER; note = 2'-deoxy-2'-fluoroadenosine-3'-phosphorothioate
  modified_base 3: mod_base = OTHER; note = 2'-O-methylcytidine-3'-phosphate
  modified_base 4: mod_base = OTHER; note = 2'-O-methyladenosine-3'-phosphate
  modified_base 5: mod_base = OTHER; note = 2'-O-methyluridine-3'-phosphate
  modified_base 6: mod_base = OTHER; note = 2'-deoxy-2'-fluoroguanosine-3'-phosphate
  modified_base 7: mod_base = OTHER; note = 2'-O-methylcytidine-3'-phosphate
  modified_base 8: mod_base = OTHER; note = 2'-deoxy-2'-fluoroadenosine-3'-phosphate
  modified_base 9: mod_base = OTHER; note = 2'-deoxy-2'-fluoroguanosine-3'-phosphate
  modified_base 10: mod_base = OTHER; note = 2'-O-methyluridine-3'-phosphate
  modified_base 11: mod_base = OTHER; note = 2'-O-methyluridine-3'-phosphate
  modified_base 12: mod_base = OTHER; note = 2'-O-methylcytidine-3'-phosphate
  modified_base 13: mod_base = OTHER; note = 2'-O-methylguanosine-3'-phosphate
  modified_base 14: mod_base = OTHER; note = 2'-deoxy-2'-fluoroadenosine-3'-phosphate
  modified_base 15: mod_base = OTHER; note = 2'-O-methylguanosine-3'-phosphate
  modified_base 16: mod_base = OTHER; note = 2'-deoxy-2'-fluorouridine-3'-phosphate
  modified_base 17: mod_base = OTHER; note = 2'-O-methylguanosine-3'-phosphate
  modified_base 18: mod_base = OTHER; note = 2'-O-methylguanosine-3'-phosphate
  modified_base 19: mod_base = OTHER; note = 2'-O-methyladenosine-3'-phosphate
  modified_base 20: mod_base = OTHER; note = 2'-O-methyladenosine-3'-phosphate
  modified_base 21: mod_base = OTHER; note = 2'-O-methylguanosine-3'-phosphorothioate
  modified_base 22: mod_base = OTHER; note = 2'-O-methylguanosine-3'-phosphorothioate
  modified_base 23: mod_base = OTHER; note = 2'-O-methylguanosine
aacatgcagttcgagtggaaggg

SEQ ID NO: 1053 - RNA, 23 nt, synthetic construct
  source 1..23: mol_type = other RNA
  modified_base 1: mod_base = OTHER; note = 2'-O-methyladenosine-3'-phosphorothioate
  modified_base 2: mod_base = OTHER; note = 2'-deoxy-2'-fluorouridine-3'-phosphorothioate
  modified_base 3: mod_base = OTHER; note = 2'-O-methylcytidine-3'-phosphate
  modified_base 4: mod_base = OTHER; note = 2'-O-methylcytidine-3'-phosphate
  modified_base 5: mod_base = OTHER; note = 2'-O-methylguanosine-3'-phosphate
  modified_base 6: mod_base = OTHER; note = 2'-deoxy-2'-fluorocytidine-3'-phosphate
  modified_base 7: mod_base = OTHER; note = 2'-O-methyluridine-3'-phosphate
  modified_base 8: mod_base = OTHER; note = 2'-deoxy-2'-fluorocytidine-3'-phosphate
  modified_base 9: mod_base = OTHER; note = 2'-deoxy-2'-fluoroadenosine-3'-phosphate
  modified_base 10: mod_base = OTHER; note = 2'-O-methylcytidine-3'-phosphate
  modified_base 11: mod_base = OTHER; note = 2'-O-methyladenosine-3'-phosphate
  modified_base 12: mod_base = OTHER; note = 2'-O-methylguanosine-3'-phosphate
  modified_base 13: mod_base = OTHER; note = 2'-O-methyluridine-3'-phosphate
  modified_base 14: mod_base = OTHER; note = 2'-deoxy-2'-fluorouridine-3'-phosphate
  modified_base 15: mod_base = OTHER; note = 2'-O-methylguanosine-3'-phosphate
  modified_base 16: mod_base = OTHER; note = 2'-deoxy-2'-fluorocytidine-3'-phosphate
  modified_base 17: mod_base = OTHER; note = 2'-O-methyladenosine-3'-phosphate
  modified_base 18: mod_base = OTHER; note = 2'-O-methylguanosine-3'-phosphate
  modified_base 19: mod_base = OTHER; note = 2'-O-methylguanosine-3'-phosphate
  modified_base 20: mod_base = OTHER; note = 2'-O-methyluridine-3'-phosphate
  modified_base 21: mod_base = OTHER; note = 2'-O-methylguanosine-3'-phosphorothioate
  modified_base 22: mod_base = OTHER; note = 2'-O-methyluridine-3'-phosphorothioate
  modified_base 23: mod_base = OTHER; note = 2'-O-methylcytidine
atccgctcacagttgcaggtgtc

SEQ ID NO: 1054 - RNA, 23 nt, synthetic construct
  source 1..23: mol_type = other RNA
  modified_base 1: mod_base = OTHER; note = 2'-O-methyladenosine-3'-phosphorothioate
  modified_base 2: mod_base = OTHER; note = 2'-deoxy-2'-fluoroadenosine-3'-phosphorothioate
  modified_base 3: mod_base = OTHER; note = 2'-O-methylcytidine-3'-phosphate
  modified_base 4: mod_base = OTHER; note = 2'-O-methyladenosine-3'-phosphate
  modified_base 5: mod_base = OTHER; note = 2'-O-methylguanosine-3'-phosphate
  modified_base 6: mod_base = OTHER; note = 2'-deoxy-2'-fluoroguanosine-3'-phosphate
  modified_base 7: mod_base = OTHER; note = 2'-O-methylcytidine-3'-phosphate
  modified_base 8: mod_base = OTHER; note = 2'-deoxy-2'-fluoroguanosine-3'-phosphate
  modified_base 9: mod_base = OTHER; note = 2'-deoxy-2'-fluorouridine-3'-phosphate
  modified_base 10: mod_base = OTHER; note = 2'-O-methylguanosine-3'-phosphate
  modified_base 11: mod_base = OTHER; note = 2'-O-methylcytidine-3'-phosphate
  modified_base 12: mod_base = OTHER; note = 2'-O-methyladenosine-3'-phosphate
  modified_base 13: mod_base = OTHER; note = 2'-O-methylcytidine-3'-phosphate
  modified_base 14: mod_base = OTHER; note = 2'-deoxy-2'-fluoroadenosine-3'-phosphate
  modified_base 15: mod_base = OTHER; note = 2'-O-methyluridine-3'-phosphate
  modified_base 16: mod_base = OTHER; note = 2'-deoxy-2'-fluoroadenosine-3'-phosphate
  modified_base 17: mod_base = OTHER; note = 2'-O-methylguanosine-3'-phosphate
  modified_base 18: mod_base = OTHER; note = 2'-O-methylguanosine-3'-phosphate
  modified_base 19: mod_base = OTHER; note = 2'-O-methyladenosine-3'-phosphate
  modified_base 20: mod_base = OTHER; note = 2'-O-methylguanosine-3'-phosphate
  modified_base 21: mod_base = OTHER; note = 2'-O-methylguanosine-3'-phosphorothioate
  modified_base 22: mod_base = OTHER; note = 2'-O-methyladenosine-3'-phosphorothioate
  modified_base 23: mod_base = OTHER; note = 2'-O-methylcytidine
aacaggcgtgcacataggaggac

SEQ ID NO: 1055 - RNA, 23 nt, synthetic construct
  source 1..23: mol_type = other RNA
  modified_base 1: mod_base = OTHER; note = 2'-O-methyladenosine-3'-phosphorothioate
  modified_base 2: mod_base = OTHER; note = 2'-deoxy-2'-fluoroadenosine-3'-phosphorothioate
  modified_base 3: mod_base = OTHER; note = 2'-O-methylguanosine-3'-phosphate
  modified_base 4: mod_base = OTHER; note = 2'-O-methyluridine-3'-phosphate
  modified_base 5: mod_base = OTHER; note = 2'-O-methylcytidine-3'-phosphate
  modified_base 6: mod_base = OTHER; note = 2'-deoxy-2'-fluoroguanosine-3'-phosphate
  modified_base 7: mod_base = OTHER; note = 2'-O-methylcytidine-3'-phosphate
  modified_base 8: mod_base = OTHER; note = 2'-deoxy-2'-fluorouridine-3'-phosphate
  modified_base 9: mod_base = OTHER; note = 2'-deoxy-2'-fluoroguanosine-3'-phosphate
  modified_base 10: mod_base = OTHER; note = 2'-O-methyladenosine-3'-phosphate
  modified_base 11: mod_base = OTHER; note = 2'-O-methylguanosine-3'-phosphate
  modified_base 12: mod_base = OTHER; note = 2'-O-methylcytidine-3'-phosphate
  modified_base 13: mod_base = OTHER; note = 2'-O-methyluridine-3'-phosphate
  modified_base 14: mod_base = OTHER; note = 2'-deoxy-2'-fluoroguanosine-3'-phosphate
  modified_base 15: mod_base = OTHER; note = 2'-O-methyluridine-3'-phosphate
  modified_base 16: mod_base = OTHER; note = 2'-deoxy-2'-fluoroadenosine-3'-phosphate
  modified_base 17: mod_base = OTHER; note = 2'-O-methylcytidine-3'-phosphate
  modified_base 18: mod_base = OTHER; note = 2'-O-methylguanosine-3'-phosphate
  modified_base 19: mod_base = OTHER; note = 2'-O-methylcytidine-3'-phosphate
  modified_base 20: mod_base = OTHER; note = 2'-O-methylcytidine-3'-phosphate
  modified_base 21: mod_base = OTHER; note = 2'-O-methylcytidine-3'-phosphorothioate
  modified_base 22: mod_base = OTHER; note = 2'-O-methyluridine-3'-phosphorothioate
  modified_base 23: mod_base = OTHER; note = 2'-O-methyluridine
aagtcgctgagctgtacgccctt

SEQ ID NO: 1056 - RNA, 23 nt, synthetic construct
  source 1..23: mol_type = other RNA
  modified_base 1: mod_base = OTHER; note = 2'-O-methyladenosine-3'-phosphorothioate
  modified_base 2: mod_base = OTHER; note = 2'-deoxy-2'-fluorocytidine-3'-phosphorothioate
  modified_base 3: mod_base = OTHER; note = 2'-O-methyladenosine-3'-phosphate
  modified_base 4: mod_base = OTHER; note = 2'-O-methylguanosine-3'-phosphate
  modified_base 5: mod_base = OTHER; note = 2'-O-methyluridine-3'-phosphate
  modified_base 6: mod_base = OTHER; note = 2'-deoxy-2'-fluorouridine-3'-phosphate
  modified_base 7: mod_base = OTHER; note = 2'-O-methylcytidine-3'-phosphate
  modified_base 8: mod_base = OTHER; note = 2'-deoxy-2'-fluorouridine-3'-phosphate
  modified_base 9: mod_base = OTHER; note = 2'-deoxy-2'-fluoroguanosine-3'-phosphate
  modified_base 10: mod_base = OTHER; note = 2'-O-methylcytidine-3'-phosphate
  modified_base 11: mod_base = OTHER; note = 2'-O-methyladenosine-3'-phosphate
  modified_base 12: mod_base = OTHER; note = 2'-O-methyluridine-3'-phosphate
  modified_base 13: mod_base = OTHER; note = 2'-O-methylguanosine-3'-phosphate
  modified_base 14: mod_base = OTHER; note = 2'-deoxy-2'-fluorouridine-3'-phosphate
  modified_base 15: mod_base = OTHER; note = 2'-O-methyladenosine-3'-phosphate
  modified_base 16: mod_base = OTHER; note = 2'-deoxy-2'-fluorocytidine-3'-phosphate
  modified_base 17: mod_base = OTHER; note = 2'-O-methyluridine-3'-phosphate
  modified_base 18: mod_base = OTHER; note = 2'-O-methyluridine-3'-phosphate
  modified_base 19: mod_base = OTHER; note = 2'-O-methylguanosine-3'-phosphate
  modified_base 20: mod_base = OTHER; note = 2'-O-methylguanosine-3'-phosphate
  modified_base 21: mod_base = OTHER; note = 2'-O-methyluridine-3'-phosphorothioate
  modified_base 22: mod_base = OTHER; note = 2'-O-methylguanosine-3'-phosphorothioate
  modified_base 23: mod_base = OTHER; note = 2'-O-methylcytidine
acagttctgcatgtacttggtgc

SEQ ID NO: 1057 - RNA, 23 nt, synthetic construct
  source 1..23: mol_type = other RNA
  modified_base 1: mod_base = OTHER; note = 2'-O-methyladenosine-3'-phosphorothioate
  modified_base 2: mod_base = OTHER; note = 2'-deoxy-2'-fluorouridine-3'-phosphorothioate
  modified_base 3: mod_base = OTHER; note = 2'-O-methyladenosine-3'-phosphate
  modified_base 4: mod_base = OTHER; note = 2'-O-methylguanosine-3'-phosphate
  modified_base 5: mod_base = OTHER; note = 2'-O-methylguanosine-3'-phosphate
  modified_base 6: mod_base = OTHER; note = 2'-deoxy-2'-fluorocytidine-3'-phosphate
  modified_base 7: mod_base = OTHER; note = 2'-O-methylguanosine-3'-phosphate
  modified_base 8: mod_base = OTHER; note = 2'-deoxy-2'-fluorouridine-3'-phosphate
  modified_base 9: mod_base = OTHER; note = 2'-deoxy-2'-fluoroadenosine-3'-phosphate
  modified_base 10: mod_base = OTHER; note = 2'-O-methylguanosine-3'-phosphate
  modified_base 11: mod_base = OTHER; note = 2'-O-methylcytidine-3'-phosphate
  modified_base 12: mod_base = OTHER; note = 2'-O-methylguanosine-3'-phosphate
  modified_base 13: mod_base = OTHER; note = 2'-O-methylcytidine-3'-phosphate
  modified_base 14: mod_base = OTHER; note = 2'-deoxy-2'-fluorouridine-3'-phosphate
  modified_base 15: mod_base = OTHER; note = 2'-O-methylguanosine-3'-phosphate
  modified_base 16: mod_base = OTHER; note = 2'-deoxy-2'-fluoroguanosine-3'-phosphate
  modified_base 17: mod_base = OTHER; note = 2'-O-methylguanosine-3'-phosphate
  modified_base 18: mod_base = OTHER; note = 2'-O-methyladenosine-3'-phosphate
  modified_base 19: mod_base = OTHER; note = 2'-O-methylcytidine-3'-phosphate
  modified_base 20: mod_base = OTHER; note = 2'-O-methyluridine-3'-phosphate
  modified_base 21: mod_base = OTHER; note = 2'-O-methyluridine-3'-phosphorothioate
  modified_base 22: mod_base = OTHER; note = 2'-O-methylguanosine-3'-phosphorothioate
  modified_base 23: mod_base = OTHER; note = 2'-O-methylguanosine
ataggcgtagcgctgggacttgg

SEQ ID NO: 1058 - RNA, 23 nt, synthetic construct
  source 1..23: mol_type = other RNA
  modified_base 1: mod_base = OTHER; note = 2'-O-methyladenosine-3'-phosphorothioate
  modified_base 2: mod_base = OTHER; note = 2'-deoxy-2'-fluoroadenosine-3'-phosphorothioate
  modified_base 3: mod_base = OTHER; note = 2'-O-methyladenosine-3'-phosphate
  modified_base 4: mod_base = OTHER; note = 2'-O-methylguanosine-3'-phosphate
  modified_base 5: mod_base = OTHER; note = 2'-O-methyluridine-3'-phosphate
  modified_base 6: mod_base = OTHER; note = 2'-deoxy-2'-fluoroguanosine-3'-phosphate
  modified_base 7: mod_base = OTHER; note = 2'-O-methylguanosine-3'-phosphate
  modified_base 8: mod_base = OTHER; note = 2'-deoxy-2'-fluoroguanosine-3'-phosphate
  modified_base 9: mod_base = OTHER; note = 2'-deoxy-2'-fluorocytidine-3'-phosphate
  modified_base 10: mod_base = OTHER; note = 2'-O-methyluridine-3'-phosphate
  modified_base 11: mod_base = OTHER; note = 2'-O-methylguanosine-3'-phosphate
  modified_base 12: mod_base = OTHER; note = 2'-O-methylguanosine-3'-phosphate
  modified_base 13: mod_base = OTHER; note = 2'-O-methylcytidine-3'-phosphate
  modified_base 14: mod_base = OTHER; note = 2'-deoxy-2'-fluoroadenosine-3'-phosphate
  modified_base 15: mod_base = OTHER; note = 2'-O-methylguanosine-3'-phosphate
  modified_base 16: mod_base = OTHER; note = 2'-deoxy-2'-fluoroguanosine-3'-phosphate
  modified_base 17: mod_base = OTHER; note = 2'-O-methylcytidine-3'-phosphate
  modified_base 18: mod_base = OTHER; note = 2'-O-methyladenosine-3'-phosphate
  modified_base 19: mod_base = OTHER; note = 2'-O-methyluridine-3'-phosphate
  modified_base 20: mod_base = OTHER; note = 2'-O-methylcytidine-3'-phosphate
  modified_base 21: mod_base = OTHER; note = 2'-O-methylcytidine-3'-phosphorothioate
  modified_base 22: mod_base = OTHER; note = 2'-O-methyladenosine-3'-phosphorothioate
  modified_base 23: mod_base = OTHER; note = 2'-O-methylcytidine
aaagtgggctggcaggcatccac

SEQ ID NO: 1059 - RNA, 23 nt, synthetic construct
  source 1..23: mol_type = other RNA
  modified_base 1: mod_base = OTHER; note = 2'-O-methyladenosine-3'-phosphorothioate
  modified_base 2: mod_base = OTHER; note = 2'-deoxy-2'-fluoroguanosine-3'-phosphorothioate
  modified_base 3: mod_base = OTHER; note = 2'-O-methyladenosine-3'-phosphate
  modified_base 4: mod_base = OTHER; note = 2'-O-methyladenosine-3'-phosphate
  modified_base 5: mod_base = OTHER; note = 2'-O-methylguanosine-3'-phosphate
  modified_base 6: mod_base = OTHER; note = 2'-deoxy-2'-fluoroguanosine-3'-phosphate
  modified_base 7: mod_base = OTHER; note = 2'-O-methyladenosine-3'-phosphate
  modified_base 8: mod_base = OTHER; note = 2'-deoxy-2'-fluoroadenosine-3'-phosphate
  modified_base 9: mod_base = OTHER; note = 2'-deoxy-2'-fluoroadenosine-3'-phosphate
  modified_base 10: mod_base = OTHER; note = 2'-O-methylcytidine-3'-phosphate
  modified_base 11: mod_base = OTHER; note = 2'-O-methylguanosine-3'-phosphate
  modified_base 12: mod_base = OTHER; note = 2'-O-methylcytidine-3'-phosphate
  modified_base 13: mod_base = OTHER; note = 2'-O-methyluridine-3'-phosphate
  modified_base 14: mod_base = OTHER; note = 2'-deoxy-2'-fluoroguanosine-3'-phosphate
  modified_base 15: mod_base = OTHER; note = 2'-O-methylcytidine-3'-phosphate
  modified_base 16: mod_base = OTHER; note = 2'-deoxy-2'-fluoroadenosine-3'-phosphate
  modified_base 17: mod_base = OTHER; note = 2'-O-methylguanosine-3'-phosphate
  modified_base 18: mod_base = OTHER; note = 2'-O-methylguanosine-3'-phosphate
  modified_base 19: mod_base = OTHER; note = 2'-O-methyluridine-3'-phosphate
  modified_base 20: mod_base = OTHER; note = 2'-O-methylguanosine-3'-phosphate
  modified_base 21: mod_base = OTHER; note = 2'-O-methyladenosine-3'-phosphorothioate
  modified_base 22: mod_base = OTHER; note = 2'-O-methylcytidine-3'-phosphorothioate
  modified_base 23: mod_base = OTHER; note = 2'-O-methylguanosine
agaaggaaacgctgcaggtgacg

SEQ ID NO: 1060 - RNA, 23 nt, synthetic construct
  source 1..23: mol_type = other RNA
  modified_base 1: mod_base = OTHER; note = 2'-O-methyladenosine-3'-phosphorothioate
  modified_base 2: mod_base = OTHER; note = 2'-deoxy-2'-fluorocytidine-3'-phosphorothioate
  modified_base 3: mod_base = OTHER; note = 2'-O-methylguanosine-3'-phosphate
  modified_base 4: mod_base = OTHER; note = 2'-O-methyluridine-3'-phosphate
  modified_base 5: mod_base = OTHER; note = 2'-O-methylcytidine-3'-phosphate
  modified_base 6: mod_base = OTHER; note = 2'-deoxy-2'-fluoroadenosine-3'-phosphate
  modified_base 7: mod_base = OTHER; note = 2'-O-methyluridine-3'-phosphate
  modified_base 8: mod_base = OTHER; note = 2'-deoxy-2'-fluorouridine-3'-phosphate
  modified_base 9: mod_base = OTHER; note = 2'-deoxy-2'-fluoroguanosine-3'-phosphate
  modified_base 10: mod_base = OTHER; note = 2'-O-methyladenosine-3'-phosphate
  modified_base 11: mod_base = OTHER; note = 2'-O-methylguanosine-3'-phosphate
  modified_base 12: mod_base = OTHER; note = 2'-O-methylguanosine-3'-phosphate
  modified_base 13: mod_base = OTHER; note = 2'-O-methyladenosine-3'-phosphate
  modified_base 14: mod_base = OTHER; note = 2'-deoxy-2'-fluoroadenosine-3'-phosphate
  modified_base 15: mod_base = OTHER; note = 2'-O-methylguanosine-3'-phosphate
  modified_base 16: mod_base = OTHER; note = 2'-deoxy-2'-fluoroguanosine-3'-phosphate
  modified_base 17: mod_base = OTHER; note = 2'-O-methyluridine-3'-phosphate
  modified_base 18: mod_base = OTHER; note = 2'-O-methylguanosine-3'-phosphate
  modified_base 19: mod_base = OTHER; note = 2'-O-methylcytidine-3'-phosphate
  modified_base 20: mod_base = OTHER; note = 2'-O-methylcytidine-3'-phosphate
  modified_base 21: mod_base = OTHER; note = 2'-O-methylcytidine-3'-phosphorothioate
  modified_base 22: mod_base = OTHER; note = 2'-O-methylguanosine-3'-phosphorothioate
  modified_base 23: mod_base = OTHER; note = 2'-O-methylcytidine
acgtcattgaggaaggtgcccgc

SEQ ID NO: 1061 - RNA, 23 nt, synthetic construct
  source 1..23: mol_type = other RNA
  modified_base 1: mod_base = OTHER; note = 2'-O-methyladenosine-3'-phosphorothioate
  modified_base 2: mod_base = OTHER; note = 2'-deoxy-2'-fluoroadenosine-3'-phosphorothioate
  modified_base 3: mod_base = OTHER; note = 2'-O-methylcytidine-3'-phosphate
  modified_base 4: mod_base = OTHER; note = 2'-O-methylcytidine-3'-phosphate
  modified_base 5: mod_base = OTHER; note = 2'-O-methyladenosine-3'-phosphate
  modified_base 6: mod_base = OTHER; note = 2'-deoxy-2'-fluorocytidine-3'-phosphate
  modified_base 7: mod_base = OTHER; note = 2'-O-methylcytidine-3'-phosphate
  modified_base 8: mod_base = OTHER; note = 2'-deoxy-2'-fluorouridine-3'-phosphate
  modified_base 9: mod_base = OTHER; note = 2'-deoxy-2'-fluorocytidine-3'-phosphate
  modified_base 10: mod_base = OTHER; note = 2'-O-methyluridine-3'-phosphate
  modified_base 11: mod_base = OTHER; note = 2'-O-methylcytidine-3'-phosphate
  modified_base 12: mod_base = OTHER; note = 2'-O-methylcytidine-3'-phosphate
  modified_base 13: mod_base = OTHER; note = 2'-O-methyladenosine-3'-phosphate
  modified_base 14: mod_base = OTHER; note = 2'-deoxy-2'-fluoroguanosine-3'-phosphate
  modified_base 15: mod_base = OTHER; note = 2'-O-methylguanosine-3'-phosphate
  modified_base 16: mod_base = OTHER; note = 2'-deoxy-2'-fluoroadenosine-3'-phosphate
  modified_base 17: mod_base = OTHER; note = 2'-O-methylguanosine-3'-phosphate
  modified_base 18: mod_base = OTHER; note = 2'-O-methylcytidine-3'-phosphate
  modified_base 19: mod_base = OTHER; note = 2'-O-methylcytidine-3'-phosphate
  modified_base 20: mod_base = OTHER; note = 2'-O-methyladenosine-3'-phosphate
  modified_base 21: mod_base = OTHER; note = 2'-O-methylguanosine-3'-phosphorothioate
  modified_base 22: mod_base = OTHER; note = 2'-O-methylcytidine-3'-phosphorothioate
  modified_base 23: mod_base = OTHER; note = 2'-O-methyladenosine
aaccacctctccaggagccagca

SEQ ID NO: 1062 - RNA, 23 nt, synthetic construct
  source 1..23: mol_type = other RNA
  modified_base 1: mod_base = OTHER; note = 2'-O-methyladenosine-3'-phosphorothioate
  modified_base 2: mod_base = OTHER; note = 2'-deoxy-2'-fluoroadenosine-3'-phosphorothioate
  modified_base 3: mod_base = OTHER; note = 2'-O-methylcytidine-3'-phosphate
  modified_base 4: mod_base = OTHER; note = 2'-O-methylcytidine-3'-phosphate
  modified_base 5: mod_base = OTHER; note = 2'-O-methylcytidine-3'-phosphate
  modified_base 6: mod_base = OTHER; note = 2'-deoxy-2'-fluoroguanosine-3'-phosphate
  modified_base 7: mod_base = OTHER; note = 2'-O-methyluridine-3'-phosphate
  modified_base 8: mod_base = OTHER; note = 2'-deoxy-2'-fluoroadenosine-3'-phosphate
  modified_base 9: mod_base = OTHER; note = 2'-deoxy-2'-fluorocytidine-3'-phosphate
  modified_base 10: mod_base = OTHER; note = 2'-O-methyladenosine-3'-phosphate
  modified_base 11: mod_base = OTHER; note = 2'-O-methyluridine-3'-phosphate
  modified_base 12: mod_base = OTHER; note = 2'-O-methylguanosine-3'-phosphate
  modified_base 13: mod_base = OTHER; note = 2'-O-methyladenosine-3'-phosphate
  modified_base 14: mod_base = OTHER; note = 2'-deoxy-2'-fluoroadenosine-3'-phosphate
  modified_base 15: mod_base = OTHER; note = 2'-O-methylcytidine-3'-phosphate
  modified_base 16: mod_base = OTHER; note = 2'-deoxy-2'-fluoroadenosine-3'-phosphate
  modified_base 17: mod_base = OTHER; note = 2'-O-methylcytidine-3'-phosphate
  modified_base 18: mod_base = OTHER; note = 2'-O-methyladenosine-3'-phosphate
  modified_base 19: mod_base = OTHER; note = 2'-O-methylcytidine-3'-phosphate
  modified_base 20: mod_base = OTHER; note = 2'-O-methylguanosine-3'-phosphate
  modified_base 21: mod_base = OTHER; note = 2'-O-methylguanosine-3'-phosphorothioate
  modified_base 22: mod_base = OTHER; note = 2'-O-methylcytidine-3'-phosphorothioate
  modified_base 23: mod_base = OTHER; note = 2'-O-methylguanosine
aacccgtacatgaacacacggcg

SEQ ID NO: 1063 - RNA, 23 nt, synthetic construct
  source 1..23: mol_type = other RNA
  modified_base 1: mod_base = OTHER; note = 2'-O-methyladenosine-3'-phosphorothioate
  modified_base 2: mod_base = OTHER; note = 2'-deoxy-2'-fluorouridine-3'-phosphorothioate
  modified_base 3: mod_base = OTHER; note = 2'-O-methylguanosine-3'-phosphate
  modified_base 4: mod_base = OTHER; note = 2'-O-methyluridine-3'-phosphate
  modified_base 5: mod_base = OTHER; note = 2'-O-methylguanosine-3'-phosphate
  modified_base 6: mod_base = OTHER; note = 2'-deoxy-2'-fluorocytidine-3'-phosphate
  modified_base 7: mod_base = OTHER; note = 2'-O-methyluridine-3'-phosphate
  modified_base 8: mod_base = OTHER; note = 2'-deoxy-2'-fluorouridine-3'-phosphate
  modified_base 9: mod_base = OTHER; note = 2'-deoxy-2'-fluorouridine-3'-phosphate
  modified_base 10: mod_base = OTHER; note = 2'-O-methyluridine-3'-phosphate
  modified_base 11: mod_base = OTHER; note = 2'-O-methylcytidine-3'-phosphate
  modified_base 12: mod_base = OTHER; note = 2'-O-methyluridine-3'-phosphate
  modified_base 13: mod_base = OTHER; note = 2'-O-methylguanosine-3'-phosphate
  modified_base 14: mod_base = OTHER; note = 2'-deoxy-2'-fluorocytidine-3'-phosphate
  modified_base 15: mod_base = OTHER; note = 2'-O-methyladenosine-3'-phosphate
  modified_base 16: mod_base = OTHER; note = 2'-deoxy-2'-fluoroguanosine-3'-phosphate
  modified_base 17: mod_base = OTHER; note = 2'-O-methyladenosine-3'-phosphate
  modified_base 18: mod_base = OTHER; note = 2'-O-methylguanosine-3'-phosphate
  modified_base 19: mod_base = OTHER; note = 2'-O-methyladenosine-3'-phosphate
  modified_base 20: mod_base = OTHER; note = 2'-O-methylguanosine-3'-phosphate
  modified_base 21: mod_base = OTHER; note = 2'-O-methylguanosine-3'-phosphorothioate
  modified_base 22: mod_base = OTHER; note = 2'-O-methylcytidine-3'-phosphorothioate
  modified_base 23: mod_base = OTHER; note = 2'-O-methyluridine
atgtgcttttctgcagagaggct

SEQ ID NO: 1064 - RNA, 23 nt, synthetic construct
  source 1..23: mol_type = other RNA
  modified_base 1: mod_base = OTHER; note = 2'-O-methyladenosine-3'-phosphorothioate
  modified_base 2: mod_base = OTHER; note = 2'-deoxy-2'-fluoroadenosine-3'-phosphorothioate
  modified_base 3: mod_base = OTHER; note = 2'-O-methylguanosine-3'-phosphate
  modified_base 4: mod_base = OTHER; note = 2'-O-methylcytidine-3'-phosphate
  modified_base 5: mod_base = OTHER; note = 2'-O-methyluridine-3'-phosphate
  modified_base 6: mod_base = OTHER; note = 2'-deoxy-2'-fluoroguanosine-3'-phosphate
  modified_base 7: mod_base = OTHER; note = 2'-O-methyluridine-3'-phosphate
  modified_base 8: mod_base = OTHER; note = 2'-deoxy-2'-fluorouridine-3'-phosphate
  modified_base 9: mod_base = OTHER; note = 2'-deoxy-2'-fluoroguanosine-3'-phosphate
  modified_base 10: mod_base = OTHER; note = 2'-O-methylcytidine-3'-phosphate
  modified_base 11: mod_base = OTHER; note = 2'-O-methyluridine-3'-phosphate
  modified_base 12: mod_base = OTHER; note = 2'-O-methylguanosine-3'-phosphate
  modified_base 13: mod_base = OTHER; note = 2'-O-methylcytidine-3'-phosphate
  modified_base 14: mod_base = OTHER; note = 2'-deoxy-2'-fluoroadenosine-3'-phosphate
  modified_base 15: mod_base = OTHER; note = 2'-O-methylguanosine-3'-phosphate
  modified_base 16: mod_base = OTHER; note = 2'-deoxy-2'-fluorouridine-3'-phosphate
  modified_base 17: mod_base = OTHER; note = 2'-O-methylcytidine-3'-phosphate
  modified_base 18: mod_base = OTHER; note = 2'-O-methylcytidine-3'-phosphate
  modified_base 19: mod_base = OTHER; note = 2'-O-methyladenosine-3'-phosphate
  modified_base 20: mod_base = OTHER; note = 2'-O-methylguanosine-3'-phosphate
  modified_base 21: mod_base = OTHER; note = 2'-O-methylguanosine-3'-phosphorothioate
  modified_base 22: mod_base = OTHER; note = 2'-O-methyluridine-3'-phosphorothioate
  modified_base 23: mod_base = OTHER; note = 2'-O-methyladenosine
aagctgttgctgcagtccaggta

SEQ ID NO: 1065 - RNA, 23 nt, synthetic construct
  source 1..23: mol_type = other RNA
  modified_base 1: mod_base = OTHER; note = 2'-O-methyladenosine-3'-phosphorothioate
  modified_base 2: mod_base = OTHER; note = 2'-deoxy-2'-fluoroguanosine-3'-phosphorothioate
  modified_base 3: mod_base = OTHER; note = 2'-O-methylcytidine-3'-phosphate
  modified_base 4: mod_base = OTHER; note = 2'-O-methyladenosine-3'-phosphate
  modified_base 5: mod_base = OTHER; note = 2'-O-methylguanosine-3'-phosphate
  modified_base 6: mod_base = OTHER; note = 2'-deoxy-2'-fluorouridine-3'-phosphate
  modified_base 7: mod_base = OTHER; note = 2'-O-methylguanosine-3'-phosphate
  modified_base 8: mod_base = OTHER; note = 2'-deoxy-2'-fluorouridine-3'-phosphate
  modified_base 9: mod_base = OTHER; note = 2'-deoxy-2'-fluoroguanosine-3'-phosphate
  modified_base 10: mod_base = OTHER; note = 2'-O-methyluridine-3'-phosphate
  modified_base 11: mod_base = OTHER; note = 2'-O-methylguanosine-3'-phosphate
  modified_base 12: mod_base = OTHER; note = 2'-O-methylcytidine-3'-phosphate
  modified_base 13: mod_base = OTHER; note = 2'-O-methyluridine-3'-phosphate
  modified_base 14: mod_base = OTHER; note = 2'-deoxy-2'-fluoroguanosine-3'-phosphate
  modified_base 15: mod_base = OTHER; note = 2'-O-methyladenosine-3'-phosphate
  modified_base 16: mod_base = OTHER; note = 2'-deoxy-2'-fluoroadenosine-3'-phosphate
  modified_base 17: mod_base = OTHER; note = 2'-O-methyladenosine-3'-phosphate
  modified_base 18: mod_base = OTHER; note = 2'-O-methylcytidine-3'-phosphate
  modified_base 19: mod_base = OTHER; note = 2'-O-methyladenosine-3'-phosphate
  modified_base 20: mod_base = OTHER; note = 2'-O-methylguanosine-3'-phosphate
  modified_base 21: mod_base = OTHER; note = 2'-O-methylcytidine-3'-phosphorothioate
  modified_base 22: mod_base = OTHER; note = 2'-O-methylcytidine-3'-phosphorothioate
  modified_base 23: mod_base = OTHER; note = 2'-O-methylcytidine
agcagtgtgtgctgaaacagccc

SEQ ID NO: 1066 - RNA, 23 nt, synthetic construct
  source 1..23: mol_type = other RNA
  modified_base 1: mod_base = OTHER; note = 2'-O-methyladenosine-3'-phosphorothioate
  modified_base 2: mod_base = OTHER; note = 2'-deoxy-2'-fluoroadenosine-3'-phosphorothioate
  modified_base 3: mod_base = OTHER; note = 2'-O-methylguanosine-3'-phosphate
  modified_base 4: mod_base = OTHER; note = 2'-O-methyluridine-3'-phosphate
  modified_base 5: mod_base = OTHER; note = 2'-O-methylcytidine-3'-phosphate
  modified_base 6: mod_base = OTHER; note = 2'-deoxy-2'-fluorocytidine-3'-phosphate
  modified_base 7: mod_base = OTHER; note = 2'-O-methyluridine-3'-phosphate
  modified_base 8: mod_base = OTHER; note = 2'-deoxy-2'-fluorocytidine-3'-phosphate
  modified_base 9: mod_base = OTHER; note = 2'-deoxy-2'-fluorocytidine-3'-phosphate
  modified_base 10: mod_base = OTHER; note = 2'-O-methyluridine-3'-phosphate
  modified_base 11: mod_base = OTHER; note = 2'-O-methylcytidine-3'-phosphate
  modified_base 12: mod_base = OTHER; note = 2'-O-methylguanosine-3'-phosphate
  modified_base 13: mod_base = OTHER; note = 2'-O-methylguanosine-3'-phosphate
  modified_base 14: mod_base = OTHER; note = 2'-deoxy-2'-fluorocytidine-3'-phosphate
  modified_base 15: mod_base = OTHER; note = 2'-O-methyladenosine-3'-phosphate
  modified_base 16: mod_base = OTHER; note = 2'-deoxy-2'-fluoroadenosine-3'-phosphate
  modified_base 17: mod_base = OTHER; note = 2'-O-methyluridine-3'-phosphate
  modified_base 18: mod_base = OTHER; note = 2'-O-methylguanosine-3'-phosphate
  modified_base 19: mod_base = OTHER; note = 2'-O-methylcytidine-3'-phosphate
  modified_base 20: mod_base = OTHER; note = 2'-O-methyladenosine-3'-phosphate
  modified_base 21: mod_base = OTHER; note = 2'-O-methylguanosine-3'-phosphorothioate
  modified_base 22: mod_base = OTHER; note = 2'-O-methylcytidine-3'-phosphorothioate
  modified_base 23: mod_base = OTHER; note = 2'-O-methylcytidine
aagtcctcctcggcaatgcagcc

SEQ ID NO: 1067 - RNA, 23 nt, synthetic construct
  source 1..23: mol_type = other RNA
  modified_base 1: mod_base = OTHER; note = 2'-O-methyladenosine-3'-phosphorothioate
  modified_base 2: mod_base = OTHER; note = 2'-deoxy-2'-fluorouridine-3'-phosphorothioate
  modified_base 3: mod_base = OTHER; note = 2'-O-methylcytidine-3'-phosphate
  modified_base 4: mod_base = OTHER; note = 2'-O-methyluridine-3'-phosphate
  modified_base 5: mod_base = OTHER; note = 2'-O-methylcytidine-3'-phosphate
  modified_base 6: mod_base = OTHER; note = 2'-deoxy-2'-fluorouridine-3'-phosphate
  modified_base 7: mod_base = OTHER; note = 2'-O-methylcytidine-3'-phosphate
  modified_base 8: mod_base = OTHER; note = 2'-deoxy-2'-fluorocytidine-3'-phosphate
  modified_base 9: mod_base = OTHER; note = 2'-deoxy-2'-fluoroadenosine-3'-phosphate
  modified_base 10: mod_base = OTHER; note = 2'-O-methylguanosine-3'-phosphate
  modified_base 11: mod_base = OTHER; note = 2'-O-methylguanosine-3'-phosphate
  modified_base 12: mod_base = OTHER; note = 2'-O-methylcytidine-3'-phosphate
  modified_base 13: mod_base = OTHER; note = 2'-O-methyluridine-3'-phosphate
  modified_base 14: mod_base = OTHER; note = 2'-deoxy-2'-fluorouridine-3'-phosphate
  modified_base 15: mod_base = OTHER; note = 2'-O-methylguanosine-3'-phosphate
  modified_base 16: mod_base = OTHER; note = 2'-deoxy-2'-fluorouridine-3'-phosphate
  modified_base 17: mod_base = OTHER; note = 2'-O-methyladenosine-3'-phosphate
  modified_base 18: mod_base = OTHER; note = 2'-O-methylguanosine-3'-phosphate
  modified_base 19: mod_base = OTHER; note = 2'-O-methylguanosine-3'-phosphate
  modified_base 20: mod_base = OTHER; note = 2'-O-methyluridine-3'-phosphate
  modified_base 21: mod_base = OTHER; note = 2'-O-methylguanosine-3'-phosphorothioate
  modified_base 22: mod_base = OTHER; note = 2'-O-methylguanosine-3'-phosphorothioate
  modified_base 23: mod_base = OTHER; note = 2'-O-methylcytidine
atctctccaggcttgtaggtggc

SEQ ID NO: 1068 - RNA, 23 nt, synthetic construct
  source 1..23: mol_type = other RNA
  modified_base 1: mod_base = OTHER; note = 2'-O-methyladenosine-3'-phosphorothioate
  modified_base 2: mod_base = OTHER; note = 2'-deoxy-2'-fluoroadenosine-3'-phosphorothioate
  modified_base 3: mod_base = OTHER; note = 2'-O-methylguanosine-3'-phosphate
  modified_base 4: mod_base = OTHER; note = 2'-O-methylguanosine-3'-phosphate
  modified_base 5: mod_base = OTHER; note = 2'-O-methyluridine-3'-phosphate
  modified_base 6: mod_base = OTHER; note = 2'-deoxy-2'-fluoroguanosine-3'-phosphate
  modified_base 7: mod_base = OTHER; note = 2'-O-methylcytidine-3'-phosphate
  modified_base 8: mod_base = OTHER; note = 2'-deoxy-2'-fluoroadenosine-3'-phosphate
  modified_base 9: mod_base = OTHER; note = 2'-deoxy-2'-fluoroguanosine-3'-phosphate
  modified_base 10: mod_base = OTHER; note = 2'-O-methylguanosine-3'-phosphate
  modified_base 11: mod_base = OTHER; note = 2'-O-methyluridine-3'-phosphate
  modified_base 12: mod_base = OTHER; note = 2'-O-methylguanosine-3'-phosphate
  modified_base 13: mod_base = OTHER; note = 2'-O-methyluridine-3'-phosphate
  modified_base 14: mod_base = OTHER; note = 2'-deoxy-2'-fluorouridine-3'-phosphate
  modified_base 15: mod_base = OTHER; note = 2'-O-methylguanosine-3'-phosphate
  modified_base 16: mod_base = OTHER; note = 2'-deoxy-2'-fluorocytidine-3'-phosphate
  modified_base 17: mod_base = OTHER; note = 2'-O-methyladenosine-3'-phosphate
  modified_base 18: mod_base = OTHER; note = 2'-O-methylguanosine-3'-phosphate
  modified_base 19: mod_base = OTHER; note = 2'-O-methyluridine-3'-phosphate
  modified_base 20: mod_base = OTHER; note = 2'-O-methylcytidine-3'-phosphate
  modified_base 21: mod_base = OTHER; note = 2'-O-methylguanosine-3'-phosphorothioate
  modified_base 22: mod_base = OTHER; note = 2'-O-methyladenosine-3'-phosphorothioate
  modified_base 23: mod_base = OTHER; note = 2'-O-methylcytidine
aaggtgcaggtgttgcagtcgac

SEQ ID NO: 1069 - RNA, 23 nt, synthetic construct
  source 1..23: mol_type = other RNA
  modified_base 1: mod_base = OTHER; note = 2'-O-methyladenosine-3'-phosphorothioate
  modified_base 2: mod_base = OTHER; note = 2'-deoxy-2'-fluorouridine-3'-phosphorothioate
  modified_base 3: mod_base = OTHER; note = 2'-O-methylguanosine-3'-phosphate
  modified_base 4: mod_base = OTHER; note = 2'-O-methylcytidine-3'-phosphate
  modified_base 5: mod_base = OTHER; note = 2'-O-methyladenosine-3'-phosphate
  modified_base 6: mod_base = OTHER; note = 2'-deoxy-2'-fluorocytidine-3'-phosphate
  modified_base 7: mod_base = OTHER; note = 2'-O-methyluridine-3'-phosphate
  modified_base 8: mod_base = OTHER; note = 2'-deoxy-2'-fluorocytidine-3'-phosphate
  modified_base 9: mod_base = OTHER; note = 2'-deoxy-2'-fluorocytidine-3'-phosphate
  modified_base 10: mod_base = OTHER; note = 2'-O-methylcytidine-3'-phosphate
  modified_base 11: mod_base = OTHER; note = 2'-O-methyladenosine-3'-phosphate
  modified_base 12: mod_base = OTHER; note = 2'-O-methylcytidine-3'-phosphate
  modified_base 13: mod_base = OTHER; note = 2'-O-methylcytidine-3'-phosphate
  modified_base 14: mod_base = OTHER; note = 2'-deoxy-2'-fluorouridine-3'-phosphate
  modified_base 15: mod_base = OTHER; note = 2'-O-methylcytidine-3'-phosphate
  modified_base 16: mod_base = OTHER; note = 2'-deoxy-2'-fluorocytidine-3'-phosphate
  modified_base 17: mod_base = OTHER; note = 2'-O-methylguanosine-3'-phosphate
  modified_base 18: mod_base = OTHER; note = 2'-O-methylguanosine-3'-phosphate
  modified_base 19: mod_base = OTHER; note = 2'-O-methyluridine-3'-phosphate
  modified_base 20: mod_base = OTHER; note = 2'-O-methyluridine-3'-phosphate
  modified_base 21: mod_base = OTHER; note = 2'-O-methylcytidine-3'-phosphorothioate
  modified_base 22: mod_base = OTHER; note = 2'-O-methylcytidine-3'-phosphorothioate
  modified_base 23: mod_base = OTHER; note = 2'-O-methyluridine
atgcactcccacctccggttcct

SEQ ID NO: 1070 - RNA, 23 nt, synthetic construct
  source 1..23: mol_type = other RNA
  modified_base 1: mod_base = OTHER; note = 2'-O-methyladenosine-3'-phosphorothioate
  modified_base 2: mod_base = OTHER; note = 2'-deoxy-2'-fluorocytidine-3'-phosphorothioate
  modified_base 3: mod_base = OTHER; note = 2'-O-methyladenosine-3'-phosphate
  modified_base 4: mod_base = OTHER; note = 2'-O-methyladenosine-3'-phosphate
  modified_base 5: mod_base = OTHER; note = 2'-O-methyladenosine-3'-phosphate
  modified_base 6: mod_base = OTHER; note = 2'-deoxy-2'-fluoroguanosine-3'-phosphate
  modified_base 7: mod_base = OTHER; note = 2'-O-methylguanosine-3'-phosphate
  modified_base 8: mod_base = OTHER; note = 2'-deoxy-2'-fluorouridine-3'-phosphate
  modified_base 9: mod_base = OTHER; note = 2'-deoxy-2'-fluoroguanosine-3'-phosphate
  modified_base 10: mod_base = OTHER; note = 2'-O-methyladenosine-3'-phosphate
  modified_base 11: mod_base = OTHER; note = 2'-O-methyluridine-3'-phosphate
  modified_base 12: mod_base = OTHER; note = 2'-O-methylguanosine-3'-phosphate
  modified_base 13: mod_base = OTHER; note = 2'-O-methyladenosine-3'-phosphate
  modified_base 14: mod_base = OTHER; note = 2'-deoxy-2'-fluoroadenosine-3'-phosphate
  modified_base 15: mod_base = OTHER; note = 2'-O-methylguanosine-3'-phosphate
  modified_base 16: mod_base = OTHER; note = 2'-deoxy-2'-fluorouridine-3'-phosphate
  modified_base 17: mod_base = OTHER; note = 2'-O-methylguanosine-3'-phosphate
  modified_base 18: mod_base = OTHER; note = 2'-O-methylguanosine-3'-phosphate
  modified_base 19: mod_base = OTHER; note = 2'-O-methylcytidine-3'-phosphate
  modified_base 20: mod_base = OTHER; note = 2'-O-methylcytidine-3'-phosphate
  modified_base 21: mod_base = OTHER; note = 2'-O-methyladenosine-3'-phosphorothioate
  modified_base 22: mod_base = OTHER; note = 2'-O-methyluridine-3'-phosphorothioate
  modified_base 23: mod_base = OTHER; note = 2'-O-methylcytidine
acaaaggtgatgaagtggccatc

SEQ ID NO: 1071 - RNA, 23 nt, synthetic construct
  source 1..23: mol_type = other RNA
  modified_base 1: mod_base = OTHER; note = 2'-O-methyladenosine-3'-phosphorothioate
  modified_base 2: mod_base = OTHER; note = 2'-deoxy-2'-fluorocytidine-3'-phosphorothioate
  modified_base 3: mod_base = OTHER; note = 2'-O-methyluridine-3'-phosphate
  modified_base 4: mod_base = OTHER; note = 2'-O-methyluridine-3'-phosphate
  modified_base 5: mod_base = OTHER; note = 2'-O-methylcytidine-3'-phosphate
  modified_base 6: mod_base = OTHER; note = 2'-deoxy-2'-fluoroadenosine-3'-phosphate
  modified_base 7: mod_base = OTHER; note = 2'-O-methyladenosine-3'-phosphate
  modified_base 8: mod_base = OTHER; note = 2'-deoxy-2'-fluoroadenosine-3'-phosphate
  modified_base 9: mod_base = OTHER; note = 2'-deoxy-2'-fluoroguanosine-3'-phosphate
  modified_base 10: mod_base = OTHER; note = 2'-O-methylcytidine-3'-phosphate
  modified_base 11: mod_base = OTHER; note = 2'-O-methyluridine-3'-phosphate
  modified_base 12: mod_base = OTHER; note = 2'-O-methylguanosine-3'-phosphate
  modified_base 13: mod_base = OTHER; note = 2'-O-methyluridine-3'-phosphate
  modified_base 14: mod_base = OTHER; note = 2'-deoxy-2'-fluoroadenosine-3'-phosphate
  modified_base 15: mod_base = OTHER; note = 2'-O-methylguanosine-3'-phosphate
  modified_base 16: mod_base = OTHER; note = 2'-deoxy-2'-fluorocytidine-3'-phosphate
  modified_base 17: mod_base = OTHER; note = 2'-O-methylguanosine-3'-phosphate
  modified_base 18: mod_base = OTHER; note = 2'-O-methyladenosine-3'-phosphate
  modified_base 19: mod_base = OTHER; note = 2'-O-methyluridine-3'-phosphate
  modified_base 20: mod_base = OTHER; note = 2'-O-methylcytidine-3'-phosphate
  modified_base 21: mod_base = OTHER; note = 2'-O-methylguanosine-3'-phosphorothioate
  modified_base 22: mod_base = OTHER; note = 2'-O-methylcytidine-3'-phosphorothioate
  modified_base 23: mod_base = OTHER; note = 2'-O-methylcytidine
acttcaaagctgtagcgatcgcc

SEQ ID NO: 1072 - RNA, 23 nt, synthetic construct
  source 1..23: mol_type = other RNA
  modified_base 1: mod_base = OTHER; note = 2'-O-methyladenosine-3'-phosphorothioate
  modified_base 2: mod_base = OTHER; note = 2'-deoxy-2'-fluoroguanosine-3'-phosphorothioate
  modified_base 3: mod_base = OTHER; note = 2'-O-methylguanosine-3'-phosphate
  modified_base 4: mod_base = OTHER; note = 2'-O-methylcytidine-3'-phosphate
  modified_base 5: mod_base = OTHER; note = 2'-O-methylcytidine-3'-phosphate
  modified_base 6: mod_base = OTHER; note = 2'-deoxy-2'-fluoroadenosine-3'-phosphate
  modified_base 7: mod_base = OTHER; note = 2'-O-methyladenosine-3'-phosphate
  modified_base 8: mod_base = OTHER; note = 2'-deoxy-2'-fluoroguanosine-3'-phosphate
  modified_base 9: mod_base = OTHER; note = 2'-deoxy-2'-fluoroadenosine-3'-phosphate
  modified_base 10: mod_base = OTHER; note = 2'-O-methyluridine-3'-phosphate
  modified_base 11: mod_base = OTHER; note = 2'-O-methylguanosine-3'-phosphate
  modified_base 12: mod_base = OTHER; note = 2'-O-methyluridine-3'-phosphate
  modified_base 13: mod_base = OTHER; note = 2'-O-methyladenosine-3'-phosphate
  modified_base 14: mod_base = OTHER; note = 2'-deoxy-2'-fluorocytidine-3'-phosphate
  modified_base 15: mod_base = OTHER; note = 2'-O-methyluridine-3'-phosphate
  modified_base 16: mod_base = OTHER; note = 2'-deoxy-2'-fluorocytidine-3'-phosphate
  modified_base 17: mod_base = OTHER; note = 2'-O-methylguanosine-3'-phosphate
  modified_base 18: mod_base = OTHER; note = 2'-O-methylcytidine-3'-phosphate
  modified_base 19: mod_base = OTHER; note = 2'-O-methyladenosine-3'-phosphate
  modified_base 20: mod_base = OTHER; note = 2'-O-methylguanosine-3'-phosphate
  modified_base 21: mod_base = OTHER; note = 2'-O-methylcytidine-3'-phosphorothioate
  modified_base 22: mod_base = OTHER; note = 2'-O-methyluridine-3'-phosphorothioate
  modified_base 23: mod_base = OTHER; note = 2'-O-methylguanosine
aggccaagatgtactcgcagctg

SEQ ID NO: 1073 - RNA, 23 nt, synthetic construct
  source 1..23: mol_type = other RNA
  modified_base 1: mod_base = OTHER; note = 2'-O-methyladenosine-3'-phosphorothioate
  modified_base 2: mod_base = OTHER; note = 2'-deoxy-2'-fluoroguanosine-3'-phosphorothioate
  modified_base 3: mod_base = OTHER; note = 2'-O-methyluridine-3'-phosphate
  modified_base 4: mod_base = OTHER; note = 2'-O-methyluridine-3'-phosphate
  modified_base 5: mod_base = OTHER; note = 2'-O-methylcytidine-3'-phosphate
  modified_base 6: mod_base = OTHER; note = 2'-deoxy-2'-fluorouridine-3'-phosphate
  modified_base 7: mod_base = OTHER; note = 2'-O-methylcytidine-3'-phosphate
  modified_base 8: mod_base = OTHER; note = 2'-deoxy-2'-fluoroguanosine-3'-phosphate
  modified_base 9: mod_base = OTHER; note = 2'-deoxy-2'-fluoroguanosine-3'-phosphate
  modified_base 10: mod_base = OTHER; note = 2'-O-methyluridine-3'-phosphate
  modified_base 11: mod_base = OTHER; note = 2'-O-methylguanosine-3'-phosphate
  modified_base 12: mod_base = OTHER; note = 2'-O-methyladenosine-3'-phosphate
  modified_base 13: mod_base = OTHER; note = 2'-O-methylcytidine-3'-phosphate
  modified_base 14: mod_base = OTHER; note = 2'-deoxy-2'-fluoroguanosine-3'-phosphate
  modified_base 15: mod_base = OTHER; note = 2'-O-methyladenosine-3'-phosphate
  modified_base 16: mod_base = OTHER; note = 2'-deoxy-2'-fluorouridine-3'-phosphate
  modified_base 17: mod_base = OTHER; note = 2'-O-methylguanosine-3'-phosphate
  modified_base 18: mod_base = OTHER; note = 2'-O-methylcytidine-3'-phosphate
  modified_base 19: mod_base = OTHER; note = 2'-O-methylguanosine-3'-phosphate
  modified_base 20: mod_base = OTHER; note = 2'-O-methylguanosine-3'-phosphate
  modified_base 21: mod_base = OTHER; note = 2'-O-methyladenosine-3'-phosphorothioate
  modified_base 22: mod_base = OTHER; note = 2'-O-methyladenosine-3'-phosphorothioate
  modified_base 23: mod_base = OTHER; note = 2'-O-methylguanosine
agttctcggtgacgatgcggaag

SEQ ID NO: 1074 - RNA, 23 nt, synthetic construct
  source 1..23: mol_type = other RNA
  modified_base 1: mod_base = OTHER; note = 2'-O-methyladenosine-3'-phosphorothioate
  modified_base 2: mod_base = OTHER; note = 2'-deoxy-2'-fluoroadenosine-3'-phosphorothioate
  modified_base 3: mod_base = OTHER; note = 2'-O-methylcytidine-3'-phosphate
  modified_base 4: mod_base = OTHER; note = 2'-O-methylguanosine-3'-phosphate
  modified_base 5: mod_base = OTHER; note = 2'-O-methyladenosine-3'-phosphate
  modified_base 6: mod_base = OTHER; note = 2'-deoxy-2'-fluoroadenosine-3'-phosphate
  modified_base 7: mod_base = OTHER; note = 2'-O-methylguanosine-3'-phosphate
  modified_base 8: mod_base = OTHER; note = 2'-deoxy-2'-fluoroadenosine-3'-phosphate
  modified_base 9: mod_base = OTHER; note = 2'-deoxy-2'-fluoroguanosine-3'-phosphate
  modified_base 10: mod_base = OTHER; note = 2'-O-methylcytidine-3'-phosphate
  modified_base 11: mod_base = OTHER; note = 2'-O-methyluridine-3'-phosphate
  modified_base 12: mod_base = OTHER; note = 2'-O-methyluridine-3'-phosphate
  modified_base 13: mod_base = OTHER; note = 2'-O-methylguanosine-3'-phosphate
  modified_base 14: mod_base = OTHER; note = 2'-deoxy-2'-fluoroadenosine-3'-phosphate
  modified_base 15: mod_base = OTHER; note = 2'-O-methyluridine-3'-phosphate
  modified_base 16: mod_base = OTHER; note = 2'-deoxy-2'-fluoroguanosine-3'-phosphate
  modified_base 17: mod_base = OTHER; note = 2'-O-methylguanosine-3'-phosphate
  modified_base 18: mod_base = OTHER; note = 2'-O-methylcytidine-3'-phosphate
  modified_base 19: mod_base = OTHER; note = 2'-O-methylcytidine-3'-phosphate
  modified_base 20: mod_base = OTHER; note = 2'-O-methyluridine-3'-phosphate
  modified_base 21: mod_base = OTHER; note = 2'-O-methyluridine-3'-phosphorothioate
  modified_base 22: mod_base = OTHER; note = 2'-O-methylguanosine-3'-phosphorothioate
  modified_base 23: mod_base = OTHER; note = 2'-O-methylguanosine
aacgaagagcttgatggccttgg

SEQ ID NO: 1075 - RNA, 23 nt, synthetic construct
  source 1..23: mol_type = other RNA
  modified_base 1: mod_base = OTHER; note = 2'-O-methyladenosine-3'-phosphorothioate
  modified_base 2: mod_base = OTHER; note = 2'-deoxy-2'-fluoroguanosine-3'-phosphorothioate
  modified_base 3: mod_base = OTHER; note = 2'-O-methylguanosine-3'-phosphate
  modified_base 4: mod_base = OTHER; note = 2'-O-methyladenosine-3'-phosphate
  modified_base 5: mod_base = OTHER; note = 2'-O-methylguanosine-3'-phosphate
  modified_base 6: mod_base = OTHER; note = 2'-deoxy-2'-fluoroguanosine-3'-phosphate
  modified_base 7: mod_base = OTHER; note = 2'-O-methyladenosine-3'-phosphate
  modified_base 8: mod_base = OTHER; note = 2'-deoxy-2'-fluorouridine-3'-phosphate
  modified_base 9: mod_base = OTHER; note = 2'-deoxy-2'-fluorocytidine-3'-phosphate
  modified_base 10: mod_base = OTHER; note = 2'-O-methyladenosine-3'-phosphate
  modified_base 11: mod_base = OTHER; note = 2'-O-methylguanosine-3'-phosphate
  modified_base 12: mod_base = OTHER; note = 2'-O-methylcytidine-3'-phosphate
  modified_base 13: mod_base = OTHER; note = 2'-O-methyluridine-3'-phosphate
  modified_base 14: mod_base = OTHER; note = 2'-deoxy-2'-fluorocytidine-3'-phosphate
  modified_base 15: mod_base = OTHER; note = 2'-O-methylguanosine-3'-phosphate
  modified_base 16: mod_base = OTHER; note = 2'-deoxy-2'-fluorouridine-3'-phosphate
  modified_base 17: mod_base = OTHER; note = 2'-O-methyladenosine-3'-phosphate
  modified_base 18: mod_base = OTHER; note = 2'-O-methylguanosine-3'-phosphate
  modified_base 19: mod_base = OTHER; note = 2'-O-methylcytidine-3'-phosphate
  modified_base 20: mod_base = OTHER; note = 2'-O-methyluridine-3'-phosphate
  modified_base 21: mod_base = OTHER; note = 2'-O-methylcytidine-3'-phosphorothioate
  modified_base 22: mod_base = OTHER; note = 2'-O-methyluridine-3'-phosphorothioate
  modified_base 23: mod_base = OTHER; note = 2'-O-methylcytidine
aggaggatcagctcgtagctctc

SEQ ID NO: 1076 - RNA, 23 nt, synthetic construct
  source 1..23: mol_type = other RNA
  modified_base 1: mod_base = OTHER; note = 2'-O-methyladenosine-3'-phosphorothioate
  modified_base 2: mod_base = OTHER; note = 2'-deoxy-2'-fluorouridine-3'-phosphorothioate
  modified_base 3: mod_base = OTHER; note = 2'-O-methylcytidine-3'-phosphate
  modified_base 4: mod_base = OTHER; note = 2'-O-methylguanosine-3'-phosphate
  modified_base 5: mod_base = OTHER; note = 2'-O-methylcytidine-3'-phosphate
  modified_base 6: mod_base = OTHER; note = 2'-deoxy-2'-fluorocytidine-3'-phosphate
  modified_base 7: mod_base = OTHER; note = 2'-O-methyladenosine-3'-phosphate
  modified_base 8: mod_base = OTHER; note = 2'-deoxy-2'-fluorocytidine-3'-phosphate
  modified_base 9: mod_base = OTHER; note = 2'-deoxy-2'-fluorocytidine-3'-phosphate
  modified_base 10: mod_base = OTHER; note = 2'-O-methylguanosine-3'-phosphate
  modified_base 11: mod_base = OTHER; note = 2'-O-methylcytidine-3'-phosphate
  modified_base 12: mod_base = OTHER; note = 2'-O-methylcytidine-3'-phosphate
  modified_base 13: mod_base = OTHER; note = 2'-O-methyluridine-3'-phosphate
  modified_base 14: mod_base = OTHER; note = 2'-deoxy-2'-fluorouridine-3'-phosphate
  modified_base 15: mod_base = OTHER; note = 2'-O-methyladenosine-3'-phosphate
  modified_base 16: mod_base = OTHER; note = 2'-deoxy-2'-fluoroadenosine-3'-phosphate
  modified_base 17: mod_base = OTHER; note = 2'-O-methyladenosine-3'-phosphate
  modified_base 18: mod_base = OTHER; note = 2'-O-methylguanosine-3'-phosphate
  modified_base 19: mod_base = OTHER; note = 2'-O-methylguanosine-3'-phosphate
  modified_base 20: mod_base = OTHER; note = 2'-O-methyluridine-3'-phosphate
  modified_base 21: mod_base = OTHER; note = 2'-O-methylcytidine-3'-phosphorothioate
  modified_base 22: mod_base = OTHER; note = 2'-O-methylcytidine-3'-phosphorothioate
  modified_base 23: mod_base = OTHER; note = 2'-O-methylcytidine
atcgccaccgccttaaaggtccc

SEQ ID NO: 1077 - RNA, 23 nt, synthetic construct
  source 1..23: mol_type = other RNA
  modified_base 1: mod_base = OTHER; note = 2'-O-methyladenosine-3'-phosphorothioate
  modified_base 2: mod_base = OTHER; note = 2'-deoxy-2'-fluoroguanosine-3'-phosphorothioate
  modified_base 3: mod_base = OTHER; note = 2'-O-methyluridine-3'-phosphate
  modified_base 4: mod_base = OTHER; note = 2'-O-methyladenosine-3'-phosphate
  modified_base 5: mod_base = OTHER; note = 2'-O-methylguanosine-3'-phosphate
  modified_base 6: mod_base = OTHER; note = 2'-deoxy-2'-fluorocytidine-3'-phosphate
  modified_base 7: mod_base = OTHER; note = 2'-O-methylguanosine-3'-phosphate
  modified_base 8: mod_base = OTHER; note = 2'-deoxy-2'-fluorouridine-3'-phosphate
  modified_base 9: mod_base = OTHER; note = 2'-deoxy-2'-fluoroadenosine-3'-phosphate
  modified_base 10: mod_base = OTHER; note = 2'-O-methyluridine-3'-phosphate
  modified_base 11: mod_base = OTHER; note = 2'-O-methylcytidine-3'-phosphate
  modified_base 12: mod_base = OTHER; note = 2'-O-methyluridine-3'-phosphate
  modified_base 13: mod_base = OTHER; note = 2'-O-methyluridine-3'-phosphate
  modified_base 14: mod_base = OTHER; note = 2'-deoxy-2'-fluoroguanosine-3'-phosphate
  modified_base 15: mod_base = OTHER; note = 2'-O-methyluridine-3'-phosphate
  modified_base 16: mod_base = OTHER; note = 2'-deoxy-2'-fluoroadenosine-3'-phosphate
  modified_base 17: mod_base = OTHER; note = 2'-O-methylguanosine-3'-phosphate
  modified_base 18: mod_base = OTHER; note = 2'-O-methylguanosine-3'-phosphate
  modified_base 19: mod_base = OTHER; note = 2'-O-methylguanosine-3'-phosphate
  modified_base 20: mod_base = OTHER; note = 2'-O-methyluridine-3'-phosphate
  modified_base 21: mod_base = OTHER; note = 2'-O-methylguanosine-3'-phosphorothioate
  modified_base 22: mod_base = OTHER; note = 2'-O-methylguanosine-3'-phosphorothioate
  modified_base 23: mod_base = OTHER; note = 2'-O-methylguanosine
agtagcgtatcttgtagggtggg

SEQ ID NO: 1078 - RNA, 23 nt, synthetic construct
  source 1..23: mol_type = other RNA
  modified_base 1: mod_base = OTHER; note = 2'-O-methyladenosine-3'-phosphorothioate
  modified_base 2: mod_base = OTHER; note = 2'-deoxy-2'-fluoroguanosine-3'-phosphorothioate
  modified_base 3: mod_base = OTHER; note = 2'-O-methyluridine-3'-phosphate
  modified_base 4: mod_base = OTHER; note = 2'-O-methylcytidine-3'-phosphate
  modified_base 5: mod_base = OTHER; note = 2'-O-methyluridine-3'-phosphate
  modified_base 6: mod_base = OTHER; note = 2'-deoxy-2'-fluorocytidine-3'-phosphate
  modified_base 7: mod_base = OTHER; note = 2'-O-methylguanosine-3'-phosphate
  modified_base 8: mod_base = OTHER; note = 2'-deoxy-2'-fluoroadenosine-3'-phosphate
  modified_base 9: mod_base = OTHER; note = 2'-deoxy-2'-fluorouridine-3'-phosphate
  modified_base 10: mod_base = OTHER; note = 2'-O-methylguanosine-3'-phosphate
  modified_base 11: mod_base = OTHER; note = 2'-O-methyladenosine-3'-phosphate
  modified_base 12: mod_base = OTHER; note = 2'-O-methylcytidine-3'-phosphate
  modified_base 13: mod_base = OTHER; note = 2'-O-methylcytidine-3'-phosphate
  modified_base 14: mod_base = OTHER; note = 2'-deoxy-2'-fluoroadenosine-3'-phosphate
  modified_base 15: mod_base = OTHER; note = 2'-O-methylguanosine-3'-phosphate
  modified_base 16: mod_base = OTHER; note = 2'-deoxy-2'-fluoroguanosine-3'-phosphate
  modified_base 17: mod_base = OTHER; note = 2'-O-methyladenosine-3'-phosphate
  modified_base 18: mod_base = OTHER; note = 2'-O-methyladenosine-3'-phosphate
  modified_base 19: mod_base = OTHER; note = 2'-O-methylguanosine-3'-phosphate
  modified_base 20: mod_base = OTHER; note = 2'-O-methyladenosine-3'-phosphate
  modified_base 21: mod_base = OTHER; note = 2'-O-methyluridine-3'-phosphorothioate
  modified_base 22: mod_base = OTHER; note = 2'-O-methylcytidine-3'-phosphorothioate
  modified_base 23: mod_base = OTHER; note = 2'-O-methylcytidine
agtctcgatgaccaggaagatcc

SEQ ID NO: 1079 - RNA, 23 nt, synthetic construct
  source 1..23: mol_type = other RNA
  modified_base 1: mod_base = OTHER; note = 2'-O-methyladenosine-3'-phosphorothioate
  modified_base 2: mod_base = OTHER; note = 2'-deoxy-2'-fluoroguanosine-3'-phosphorothioate
  modified_base 3: mod_base = OTHER; note = 2'-O-methylcytidine-3'-phosphate
  modified_base 4: mod_base = OTHER; note = 2'-O-methyladenosine-3'-phosphate
  modified_base 5: mod_base = OTHER; note = 2'-O-methylguanosine-3'-phosphate
  modified_base 6: mod_base = OTHER; note = 2'-deoxy-2'-fluorouridine-3'-phosphate
  modified_base 7: mod_base = OTHER; note = 2'-O-methylcytidine-3'-phosphate
  modified_base 8: mod_base = OTHER; note = 2'-deoxy-2'-fluoroguanosine-3'-phosphate
  modified_base 9: mod_base = OTHER; note = 2'-deoxy-2'-fluoroguanosine-3'-phosphate
  modified_base 10: mod_base = OTHER; note = 2'-O-methyladenosine-3'-phosphate
  modified_base 11: mod_base = OTHER; note = 2'-O-methyluridine-3'-phosphate
  modified_base 12: mod_base = OTHER; note = 2'-O-methylguanosine-3'-phosphate
  modified_base 13: mod_base = OTHER; note = 2'-O-methyladenosine-3'-phosphate
  modified_base 14: mod_base = OTHER; note = 2'-deoxy-2'-fluoroadenosine-3'-phosphate
  modified_base 15: mod_base = OTHER; note = 2'-O-methylcytidine-3'-phosphate
  modified_base 16: mod_base = OTHER; note = 2'-deoxy-2'-fluoroadenosine-3'-phosphate
  modified_base 17: mod_base = OTHER; note = 2'-O-methylcytidine-3'-phosphate
  modified_base 18: mod_base = OTHER; note = 2'-O-methylguanosine-3'-phosphate
  modified_base 19: mod_base = OTHER; note = 2'-O-methylcytidine-3'-phosphate
  modified_base 20: mod_base = OTHER; note = 2'-O-methyluridine-3'-phosphate
  modified_base 21: mod_base = OTHER; note = 2'-O-methylguanosine-3'-phosphorothioate
  modified_base 22: mod_base = OTHER; note = 2'-O-methylguanosine-3'-phosphorothioate
  modified_base 23: mod_base = OTHER; note = 2'-O-methyluridine
agcagtcggatgaacacgctggt

SEQ ID NO: 1080 - RNA, 23 nt, synthetic construct
  source 1..23: mol_type = other RNA
  modified_base 1: mod_base = OTHER; note = 2'-O-methyladenosine-3'-phosphorothioate
  modified_base 2: mod_base = OTHER; note = 2'-deoxy-2'-fluoroadenosine-3'-phosphorothioate
  modified_base 3: mod_base = OTHER; note = 2'-O-methylguanosine-3'-phosphate
  modified_base 4: mod_base = OTHER; note = 2'-O-methyladenosine-3'-phosphate
  modified_base 5: mod_base = OTHER; note = 2'-O-methylcytidine-3'-phosphate
  modified_base 6: mod_base = OTHER; note = 2'-deoxy-2'-fluorocytidine-3'-phosphate
  modified_base 7: mod_base = OTHER; note = 2'-O-methylcytidine-3'-phosphate
  modified_base 8: mod_base = OTHER; note = 2'-deoxy-2'-fluorouridine-3'-phosphate
  modified_base 9: mod_base = OTHER; note = 2'-deoxy-2'-fluoroguanosine-3'-phosphate
  modified_base 10: mod_base = OTHER; note = 2'-O-methylcytidine-3'-phosphate
  modified_base 11: mod_base = OTHER; note = 2'-O-methylcytidine-3'-phosphate
  modified_base 12: mod_base = OTHER; note = 2'-O-methylcytidine-3'-phosphate
  modified_base 13: mod_base = OTHER; note = 2'-O-methyluridine-3'-phosphate
  modified_base 14: mod_base = OTHER; note = 2'-deoxy-2'-fluorouridine-3'-phosphate
  modified_base 15: mod_base = OTHER; note = 2'-O-methylguanosine-3'-phosphate
  modified_base 16: mod_base = OTHER; note = 2'-deoxy-2'-fluorouridine-3'-phosphate
  modified_base 17: mod_base = OTHER; note = 2'-O-methyladenosine-3'-phosphate
  modified_base 18: mod_base = OTHER; note = 2'-O-methylguanosine-3'-phosphate
  modified_base 19: mod_base = OTHER; note = 2'-O-methyluridine-3'-phosphate
  modified_base 20: mod_base = OTHER; note = 2'-O-methylcytidine-3'-phosphate
  modified_base 21: mod_base = OTHER; note = 2'-O-methylcytidine-3'-phosphorothioate
  modified_base 22: mod_base = OTHER; note = 2'-O-methyluridine-3'-phosphorothioate
  modified_base 23: mod_base = OTHER; note = 2'-O-methylguanosine
aagaccctgcccttgtagtcctg

SEQ ID NO: 1081 - RNA, 23 nt, synthetic construct
  source 1..23: mol_type = other RNA
  modified_base 1: mod_base = OTHER; note = 2'-O-methyladenosine-3'-phosphorothioate
  modified_base 2: mod_base = OTHER; note = 2'-deoxy-2'-fluoroadenosine-3'-phosphorothioate
  modified_base 3: mod_base = OTHER; note = 2'-O-methyladenosine-3'-phosphate
  modified_base 4: mod_base = OTHER; note = 2'-O-methylguanosine-3'-phosphate
  modified_base 5: mod_base = OTHER; note = 2'-O-methyluridine-3'-phosphate
  modified_base 6: mod_base = OTHER; note = 2'-deoxy-2'-fluorocytidine-3'-phosphate
  modified_base 7: mod_base = OTHER; note = 2'-O-methyladenosine-3'-phosphate
  modified_base 8: mod_base = OTHER; note = 2'-deoxy-2'-fluorouridine-3'-phosphate
  modified_base 9: mod_base = OTHER; note = 2'-deoxy-2'-fluorouridine-3'-phosphate
  modified_base 10: mod_base = OTHER; note = 2'-O-methylguanosine-3'-phosphate
  modified_base 11: mod_base = OTHER; note = 2'-O-methyladenosine-3'-phosphate
  modified_base 12: mod_base = OTHER; note = 2'-O-methyluridine-3'-phosphate
  modified_base 13: mod_base = OTHER; note = 2'-O-methylguanosine-3'-phosphate
  modified_base 14: mod_base = OTHER; note = 2'-deoxy-2'-fluoroguanosine-3'-phosphate
  modified_base 15: mod_base = OTHER; note = 2'-O-methylcytidine-3'-phosphate
  modified_base 16: mod_base = OTHER; note = 2'-deoxy-2'-fluoroadenosine-3'-phosphate
  modified_base 17: mod_base = OTHER; note = 2'-O-methyluridine-3'-phosphate
  modified_base 18: mod_base = OTHER; note = 2'-O-methyluridine-3'-phosphate
  modified_base 19: mod_base = OTHER; note = 2'-O-methylguanosine-3'-phosphate
  modified_base 20: mod_base = OTHER; note = 2'-O-methyluridine-3'-phosphate
  modified_base 21: mod_base = OTHER; note = 2'-O-methylcytidine-3'-phosphorothioate
  modified_base 22: mod_base = OTHER; note = 2'-O-methylguanosine-3'-phosphorothioate
  modified_base 23: mod_base = OTHER; note = 2'-O-methyluridine
aaagtcattgatggcattgtcgt

SEQ ID NO: 1082 - RNA, 23 nt, synthetic construct
  source 1..23: mol_type = other RNA
  modified_base 1: mod_base = OTHER; note = 2'-O-methyladenosine-3'-phosphorothioate
  modified_base 2: mod_base = OTHER; note = 2'-deoxy-2'-fluorocytidine-3'-phosphorothioate
  modified_base 3: mod_base = OTHER; note = 2'-O-methyluridine-3'-phosphate
  modified_base 4: mod_base = OTHER; note = 2'-O-methylguanosine-3'-phosphate
  modified_base 5: mod_base = OTHER; note = 2'-O-methyluridine-3'-phosphate
  modified_base 6: mod_base = OTHER; note = 2'-deoxy-2'-fluorouridine-3'-phosphate
  modified_base 7: mod_base = OTHER; note = 2'-O-methylcytidine-3'-phosphate
  modified_base 8: mod_base = OTHER; note = 2'-deoxy-2'-fluorocytidine-3'-phosphate
  modified_base 9: mod_base = OTHER; note = 2'-deoxy-2'-fluorocytidine-3'-phosphate
  modified_base 10: mod_base = OTHER; note = 2'-O-methyladenosine-3'-phosphate
  modified_base 11: mod_base = OTHER; note = 2'-O-methyladenosine-3'-phosphate
  modified_base 12: mod_base = OTHER; note = 2'-O-methyladenosine-3'-phosphate
  modified_base 13: mod_base = OTHER; note = 2'-O-methylcytidine-3'-phosphate
  modified_base 14: mod_base = OTHER; note = 2'-deoxy-2'-fluorouridine-3'-phosphate
  modified_base 15: mod_base = OTHER; note = 2'-O-methylcytidine-3'-phosphate
  modified_base 16: mod_base = OTHER; note = 2'-deoxy-2'-fluorocytidine-3'-phosphate
  modified_base 17: mod_base = OTHER; note = 2'-O-methyladenosine-3'-phosphate
  modified_base 18: mod_base = OTHER; note = 2'-O-methylguanosine-3'-phosphate
  modified_base 19: mod_base = OTHER; note = 2'-O-methyluridine-3'-phosphate
  modified_base 20: mod_base = OTHER; note = 2'-O-methylguanosine-3'-phosphate
  modified_base 21: mod_base = OTHER; note = 2'-O-methylcytidine-3'-phosphorothioate
  modified_base 22: mod_base = OTHER; note = 2'-O-methylguanosine-3'-phosphorothioate
  modified_base 23: mod_base = OTHER; note = 2'-O-methyluridine
actgttcccaaactccagtgcgt

SEQ ID NO: 1083 - RNA, 23 nt, synthetic construct
  source 1..23: mol_type = other RNA
  modified_base 1: mod_base = OTHER; note = 2'-O-methyladenosine-3'-phosphorothioate
  modified_base 2: mod_base = OTHER; note = 2'-deoxy-2'-fluoroadenosine-3'-phosphorothioate
  modified_base 3: mod_base = OTHER; note = 2'-O-methylguanosine-3'-phosphate
  modified_base 4: mod_base = OTHER; note = 2'-O-methylguanosine-3'-phosphate
  modified_base 5: mod_base = OTHER; note = 2'-O-methyladenosine-3'-phosphate
  modified_base 6: mod_base = OTHER; note = 2'-deoxy-2'-fluorouridine-3'-phosphate
  modified_base 7: mod_base = OTHER; note = 2'-O-methylguanosine-3'-phosphate
  modified_base 8: mod_base = OTHER; note = 2'-deoxy-2'-fluorocytidine-3'-phosphate
  modified_base 9: mod_base = OTHER; note = 2'-deoxy-2'-fluorouridine-3'-phosphate
  modified_base 10: mod_base = OTHER; note = 2'-O-methylguanosine-3'-phosphate
  modified_base 11: mod_base = OTHER; note = 2'-O-methylcytidine-3'-phosphate
  modified_base 12: mod_base = OTHER; note = 2'-O-methyladenosine-3'-phosphate
  modified_base 13: mod_base = OTHER; note = 2'-O-methylcytidine-3'-phosphate
  modified_base 14: mod_base = OTHER; note = 2'-deoxy-2'-fluorouridine-3'-phosphate
  modified_base 15: mod_base = OTHER; note = 2'-O-methylguanosine-3'-phosphate
  modified_base 16: mod_base = OTHER; note = 2'-deoxy-2'-fluorocytidine-3'-phosphate
  modified_base 17: mod_base = OTHER; note = 2'-O-methyluridine-3'-phosphate
  modified_base 18: mod_base = OTHER; note = 2'-O-methyluridine-3'-phosphate
  modified_base 19: mod_base = OTHER; note = 2'-O-methylcytidine-3'-phosphate
  modified_base 20: mod_base = OTHER; note = 2'-O-methyluridine-3'-phosphate
  modified_base 21: mod_base = OTHER; note = 2'-O-methylguanosine-3'-phosphorothioate
  modified_base 22: mod_base = OTHER; note = 2'-O-methylguanosine-3'-phosphorothioate
  modified_base 23: mod_base = OTHER; note = 2'-O-methylguanosine
aaggatgctgcactgcttctggg

SEQ ID NO: 1084 - RNA, 23 nt, synthetic construct
  source 1..23: mol_type = other RNA
  modified_base 1: mod_base = OTHER; note = 2'-O-methyladenosine-3'-phosphorothioate
  modified_base 2: mod_base = OTHER; note = 2'-deoxy-2'-fluoroadenosine-3'-phosphorothioate
  modified_base 3: mod_base = OTHER; note = 2'-O-methylcytidine-3'-phosphate
  modified_base 4: mod_base = OTHER; note = 2'-O-methyluridine-3'-phosphate
  modified_base 5: mod_base = OTHER; note = 2'-O-methyluridine-3'-phosphate
  modified_base 6: mod_base = OTHER; note = 2'-deoxy-2'-fluoroguanosine-3'-phosphate
  modified_base 7: mod_base = OTHER; note = 2'-O-methylguanosine-3'-phosphate
  modified_base 8: mod_base = OTHER; note = 2'-deoxy-2'-fluorouridine-3'-phosphate
  modified_base 9: mod_base = OTHER; note = 2'-deoxy-2'-fluoroguanosine-3'-phosphate
  modified_base 10: mod_base = OTHER; note = 2'-O-methylguanosine-3'-phosphate
  modified_base 11: mod_base = OTHER; note = 2'-O-methyladenosine-3'-phosphate
  modified_base 12: mod_base = OTHER; note = 2'-O-methylguanosine-3'-phosphate
  modified_base 13: mod_base = OTHER; note = 2'-O-methyluridine-3'-phosphate
  modified_base 14: mod_base = OTHER; note = 2'-deoxy-2'-fluorocytidine-3'-phosphate
  modified_base 15: mod_base = OTHER; note = 2'-O-methyladenosine-3'-phosphate
  modified_base 16: mod_base = OTHER; note = 2'-deoxy-2'-fluoroadenosine-3'-phosphate
  modified_base 17: mod_base = OTHER; note = 2'-O-methylcytidine-3'-phosphate
  modified_base 18: mod_base = OTHER; note = 2'-O-methylcytidine-3'-phosphate
  modified_base 19: mod_base = OTHER; note = 2'-O-methyluridine-3'-phosphate
  modified_base 20: mod_base = OTHER; note = 2'-O-methylguanosine-3'-phosphate
  modified_base 21: mod_base = OTHER; note = 2'-O-methylguanosine-3'-phosphorothioate
  modified_base 22: mod_base = OTHER; note = 2'-O-methylguanosine-3'-phosphorothioate
  modified_base 23: mod_base = OTHER; note = 2'-O-methyladenosine
aacttggtggagtcaacctggga

SEQ ID NO: 1085 - RNA, 23 nt, synthetic construct
  source 1..23: mol_type = other RNA
  modified_base 1: mod_base = OTHER; note = 2'-O-methyladenosine-3'-phosphorothioate
  modified_base 2: mod_base = OTHER; note = 2'-deoxy-2'-fluorocytidine-3'-phosphorothioate
  modified_base 3: mod_base = OTHER; note = 2'-O-methylguanosine-3'-phosphate
  modified_base 4: mod_base = OTHER; note = 2'-O-methyluridine-3'-phosphate
  modified_base 5: mod_base = OTHER; note = 2'-O-methylcytidine-3'-phosphate
  modified_base 6: mod_base = OTHER; note = 2'-deoxy-2'-fluoroguanosine-3'-phosphate
  modified_base 7: mod_base = OTHER; note = 2'-O-methyluridine-3'-phosphate
  modified_base 8: mod_base = OTHER; note = 2'-deoxy-2'-fluorouridine-3'-phosphate
  modified_base 9: mod_base = OTHER; note = 2'-deoxy-2'-fluorocytidine-3'-phosphate
  modified_base 10: mod_base = OTHER; note = 2'-O-methyladenosine-3'-phosphate
  modified_base 11: mod_base = OTHER; note = 2'-O-methylcytidine-3'-phosphate
  modified_base 12: mod_base = OTHER; note = 2'-O-methylguanosine-3'-phosphate
  modified_base 13: mod_base = OTHER; note = 2'-O-methylcytidine-3'-phosphate
  modified_base 14: mod_base = OTHER; note = 2'-deoxy-2'-fluoroadenosine-3'-phosphate
  modified_base 15: mod_base = OTHER; note = 2'-O-methylguanosine-3'-phosphate
  modified_base 16: mod_base = OTHER; note = 2'-deoxy-2'-fluoroguanosine-3'-phosphate
  modified_base 17: mod_base = OTHER; note = 2'-O-methylcytidine-3'-phosphate
  modified_base 18: mod_base = OTHER; note = 2'-O-methylcytidine-3'-phosphate
  modified_base 19: mod_base = OTHER; note = 2'-O-methyluridine-3'-phosphate
  modified_base 20: mod_base = OTHER; note = 2'-O-methylcytidine-3'-phosphate
  modified_base 21: mod_base = OTHER; note = 2'-O-methylguanosine-3'-phosphorothioate
  modified_base 22: mod_base = OTHER; note = 2'-O-methyluridine-3'-phosphorothioate
  modified_base 23: mod_base = OTHER; note = 2'-O-methyladenosine
acgtcgttcacgcaggcctcgta

SEQ ID NO: 1086 - RNA, 23 nt, synthetic construct
  source 1..23: mol_type = other RNA
  modified_base 1: mod_base = OTHER; note = 2'-O-methyladenosine-3'-phosphorothioate
  modified_base 2: mod_base = OTHER; note = 2'-deoxy-2'-fluorocytidine-3'-phosphorothioate
  modified_base 3: mod_base = OTHER; note = 2'-O-methylguanosine-3'-phosphate
  modified_base 4: mod_base = OTHER; note = 2'-O-methyluridine-3'-phosphate
  modified_base 5: mod_base = OTHER; note = 2'-O-methylguanosine-3'-phosphate
  modified_base 6: mod_base = OTHER; note = 2'-deoxy-2'-fluorocytidine-3'-phosphate
  modified_base 7: mod_base = OTHER; note = 2'-O-methyladenosine-3'-phosphate
  modified_base 8: mod_base = OTHER; note = 2'-deoxy-2'-fluoroguanosine-3'-phosphate
  modified_base 9: mod_base = OTHER; note = 2'-deoxy-2'-fluoroadenosine-3'-phosphate
  modified_base 10: mod_base = OTHER; note = 2'-O-methyladenosine-3'-phosphate
  modified_base 11: mod_base = OTHER; note = 2'-O-methyladenosine-3'-phosphate
  modified_base 12: mod_base = OTHER; note = 2'-O-methylcytidine-3'-phosphate
  modified_base 13: mod_base = OTHER; note = 2'-O-methyladenosine-3'-phosphate
  modified_base 14: mod_base = OTHER; note = 2'-deoxy-2'-fluorocytidine-3'-phosphate
  modified_base 15: mod_base = OTHER; note = 2'-O-methyluridine-3'-phosphate
  modified_base 16: mod_base = OTHER; note = 2'-deoxy-2'-fluorocytidine-3'-phosphate
  modified_base 17: mod_base = OTHER; note = 2'-O-methylguanosine-3'-phosphate
  modified_base 18: mod_base = OTHER; note = 2'-O-methylcytidine-3'-phosphate
  modified_base 19: mod_base = OTHER; note = 2'-O-methyladenosine-3'-phosphate
  modified_base 20: mod_base = OTHER; note = 2'-O-methylguanosine-3'-phosphate
  modified_base 21: mod_base = OTHER; note = 2'-O-methyluridine-3'-phosphorothioate
  modified_base 22: mod_base = OTHER; note = 2'-O-methylcytidine-3'-phosphorothioate
  modified_base 23: mod_base = OTHER; note = 2'-O-methylguanosine
acgtgcagaaacactcgcagtcg

SEQ ID NO: 1087 - RNA, 23 nt, synthetic construct
  source 1..23: mol_type = other RNA
  modified_base 1: mod_base = OTHER; note = 2'-O-methyladenosine-3'-phosphorothioate
  modified_base 2: mod_base = OTHER; note = 2'-deoxy-2'-fluoroadenosine-3'-phosphorothioate
  modified_base 3: mod_base = OTHER; note = 2'-O-methylguanosine-3'-phosphate
  modified_base 4: mod_base = OTHER; note = 2'-O-methyluridine-3'-phosphate
  modified_base 5: mod_base = OTHER; note = 2'-O-methylcytidine-3'-phosphate
  modified_base 6: mod_base = OTHER; note = 2'-deoxy-2'-fluorocytidine-3'-phosphate
  modified_base 7: mod_base = OTHER; note = 2'-O-methylguanosine-3'-phosphate
  modified_base 8: mod_base = OTHER; note = 2'-deoxy-2'-fluorocytidine-3'-phosphate
  modified_base 9: mod_base = OTHER; note = 2'-deoxy-2'-fluorocytidine-3'-phosphate
  modified_base 10: mod_base = OTHER; note = 2'-O-methyladenosine-3'-phosphate
  modified_base 11: mod_base = OTHER; note = 2'-O-methylguanosine-3'-phosphate
  modified_base 12: mod_base = OTHER; note = 2'-O-methylguanosine-3'-phosphate
  modified_base 13: mod_base = OTHER; note = 2'-O-methyladenosine-3'-phosphate
  modified_base 14: mod_base = OTHER; note = 2'-deoxy-2'-fluorocytidine-3'-phosphate
  modified_base 15: mod_base = OTHER; note = 2'-O-methyladenosine-3'-phosphate
  modified_base 16: mod_base = OTHER; note = 2'-deoxy-2'-fluorocytidine-3'-phosphate
  modified_base 17: mod_base = OTHER; note = 2'-O-methyladenosine-3'-phosphate
  modified_base 18: mod_base = OTHER; note = 2'-O-methylcytidine-3'-phosphate
  modified_base 19: mod_base = OTHER; note = 2'-O-methyladenosine-3'-phosphate
  modified_base 20: mod_base = OTHER; note = 2'-O-methylcytidine-3'-phosphate
  modified_base 21: mod_base = OTHER; note = 2'-O-methyladenosine-3'-phosphorothioate
  modified_base 22: mod_base = OTHER; note = 2'-O-methylguanosine-3'-phosphorothioate
  modified_base 23: mod_base = OTHER; note = 2'-O-methylguanosine
aagtccgccaggacacacacagg

SEQ ID NO: 1088 - RNA, 23 nt, synthetic construct
  source 1..23: mol_type = other RNA
  modified_base 1: mod_base = OTHER; note = 2'-O-methyladenosine-3'-phosphorothioate
  modified_base 2: mod_base = OTHER; note = 2'-deoxy-2'-fluoroguanosine-3'-phosphorothioate
  modified_base 3: mod_base = OTHER; note = 2'-O-methyluridine-3'-phosphate
  modified_base 4: mod_base = OTHER; note = 2'-O-methyluridine-3'-phosphate
  modified_base 5: mod_base = OTHER; note = 2'-O-methylguanosine-3'-phosphate
  modified_base 6: mod_base = OTHER; note = 2'-deoxy-2'-fluorouridine-3'-phosphate
  modified_base 7: mod_base = OTHER; note = 2'-O-methyladenosine-3'-phosphate
  modified_base 8: mod_base = OTHER; note = 2'-deoxy-2'-fluoroguanosine-3'-phosphate
  modified_base 9: mod_base = OTHER; note = 2'-deoxy-2'-fluoroadenosine-3'-phosphate
  modified_base 10: mod_base = OTHER; note = 2'-O-methyladenosine-3'-phosphate
  modified_base 11: mod_base = OTHER; note = 2'-O-methylguanosine-3'-phosphate
  modified_base 12: mod_base = OTHER; note = 2'-O-methyluridine-3'-phosphate
  modified_base 13: mod_base = OTHER; note = 2'-O-methylcytidine-3'-phosphate
  modified_base 14: mod_base = OTHER; note = 2'-deoxy-2'-fluoroadenosine-3'-phosphate
  modified_base 15: mod_base = OTHER; note = 2'-O-methylcytidine-3'-phosphate
  modified_base 16: mod_base = OTHER; note = 2'-deoxy-2'-fluoroadenosine-3'-phosphate
  modified_base 17: mod_base = OTHER; note = 2'-O-methylguanosine-3'-phosphate
  modified_base 18: mod_base = OTHER; note = 2'-O-methyladenosine-3'-phosphate
  modified_base 19: mod_base = OTHER; note = 2'-O-methyladenosine-3'-phosphate
  modified_base 20: mod_base = OTHER; note = 2'-O-methylcytidine-3'-phosphate
  modified_base 21: mod_base = OTHER; note = 2'-O-methyladenosine-3'-phosphorothioate
  modified_base 22: mod_base = OTHER; note = 2'-O-methyladenosine-3'-phosphorothioate
  modified_base 23: mod_base = OTHER; note = 2'-O-methylguanosine
agttgtagaagtcacagaacaag

SEQ ID NO: 1089 - RNA, 23 nt, synthetic construct
  source 1..23: mol_type = other RNA
  modified_base 1: mod_base = OTHER; note = 2'-O-methyladenosine-3'-phosphorothioate
  modified_base 2: mod_base = OTHER; note = 2'-deoxy-2'-fluoroguanosine-3'-phosphorothioate
  modified_base 3: mod_base = OTHER; note = 2'-O-methylcytidine-3'-phosphate
  modified_base 4: mod_base = OTHER; note = 2'-O-methyluridine-3'-phosphate
  modified_base 5: mod_base = OTHER; note = 2'-O-methylguanosine-3'-phosphate
  modified_base 6: mod_base = OTHER; note = 2'-deoxy-2'-fluoroguanosine-3'-phosphate
  modified_base 7: mod_base = OTHER; note = 2'-O-methyluridine-3'-phosphate
  modified_base 8: mod_base = OTHER; note = 2'-deoxy-2'-fluoroadenosine-3'-phosphate
  modified_base 9: mod_base = OTHER; note = 2'-deoxy-2'-fluoroguanosine-3'-phosphate
  modified_base 10: mod_base = OTHER; note = 2'-O-methyluridine-3'-phosphate
  modified_base 11: mod_base = OTHER; note = 2'-O-methylguanosine-3'-phosphate
  modified_base 12: mod_base = OTHER; note = 2'-O-methylcytidine-3'-phosphate
  modified_base 13: mod_base = OTHER; note = 2'-O-methylcytidine-3'-phosphate
  modified_base 14: mod_base = OTHER; note = 2'-deoxy-2'-fluoroadenosine-3'-phosphate
  modified_base 15: mod_base = OTHER; note = 2'-O-methylcytidine-3'-phosphate
  modified_base 16: mod_base = OTHER; note = 2'-deoxy-2'-fluorouridine-3'-phosphate
  modified_base 17: mod_base = OTHER; note = 2'-O-methylcytidine-3'-phosphate
  modified_base 18: mod_base = OTHER; note = 2'-O-methyladenosine-3'-phosphate
  modified_base 19: mod_base = OTHER; note = 2'-O-methylcytidine-3'-phosphate
  modified_base 20: mod_base = OTHER; note = 2'-O-methyladenosine-3'-phosphate
  modified_base 21: mod_base = OTHER; note = 2'-O-methylguanosine-3'-phosphorothioate
  modified_base 22: mod_base = OTHER; note = 2'-O-methylcytidine-3'-phosphorothioate
  modified_base 23: mod_base = OTHER; note = 2'-O-methylcytidine
agctggtagtgccactcacagcc

SEQ ID NO: 1090 - RNA, 23 nt, synthetic construct
  source 1..23: mol_type = other RNA
  modified_base 1: mod_base = OTHER; note = 2'-O-methyladenosine-3'-phosphorothioate
  modified_base 2: mod_base = OTHER; note = 2'-deoxy-2'-fluorouridine-3'-phosphorothioate
  modified_base 3: mod_base = OTHER; note = 2'-O-methylguanosine-3'-phosphate
  modified_base 4: mod_base = OTHER; note = 2'-O-methylguanosine-3'-phosphate
  modified_base 5: mod_base = OTHER; note = 2'-O-methylguanosine-3'-phosphate
  modified_base 6: mod_base = OTHER; note = 2'-deoxy-2'-fluorocytidine-3'-phosphate
  modified_base 7: mod_base = OTHER; note = 2'-O-methyladenosine-3'-phosphate
  modified_base 8: mod_base = OTHER; note = 2'-deoxy-2'-fluorocytidine-3'-phosphate
  modified_base 9: mod_base = OTHER; note = 2'-deoxy-2'-fluorouridine-3'-phosphate
  modified_base 10: mod_base = OTHER; note = 2'-O-methyluridine-3'-phosphate
  modified_base 11: mod_base = OTHER; note = 2'-O-methylcytidine-3'-phosphate
  modified_base 12: mod_base = OTHER; note = 2'-O-methylguanosine-3'-phosphate
  modified_base 13: mod_base = OTHER; note = 2'-O-methylguanosine-3'-phosphate
  modified_base 14: mod_base = OTHER; note = 2'-deoxy-2'-fluoroguanosine-3'-phosphate
  modified_base 15: mod_base = OTHER; note = 2'-O-methyluridine-3'-phosphate
  modified_base 16: mod_base = OTHER; note = 2'-deoxy-2'-fluoroadenosine-3'-phosphate
  modified_base 17: mod_base = OTHER; note = 2'-O-methylguanosine-3'-phosphate
  modified_base 18: mod_base = OTHER; note = 2'-O-methylcytidine-3'-phosphate
  modified_base 19: mod_base = OTHER; note = 2'-O-methyladenosine-3'-phosphate
  modified_base 20: mod_base = OTHER; note = 2'-O-methylguanosine-3'-phosphate
  modified_base 21: mod_base = OTHER; note = 2'-O-methylcytidine-3'-phosphorothioate
  modified_base 22: mod_base = OTHER; note = 2'-O-methylcytidine-3'-phosphorothioate
  modified_base 23: mod_base = OTHER; note = 2'-O-methyluridine
atgggcacttcgggtagcagcct

SEQ ID NO: 1091 - RNA, 23 nt, synthetic construct
  source 1..23: mol_type = other RNA
  modified_base 1: mod_base = OTHER; note = 2'-O-methyladenosine-3'-phosphorothioate
  modified_base 2: mod_base = OTHER; note = 2'-deoxy-2'-fluoroguanosine-3'-phosphorothioate
  modified_base 3: mod_base = OTHER; note = 2'-O-methyluridine-3'-phosphate
  modified_base 4: mod_base = OTHER; note = 2'-O-methylcytidine-3'-phosphate
  modified_base 5: mod_base = OTHER; note = 2'-O-methylcytidine-3'-phosphate
  modified_base 6: mod_base = OTHER; note = 2'-deoxy-2'-fluorouridine-3'-phosphate
  modified_base 7: mod_base = OTHER; note = 2'-O-methylcytidine-3'-phosphate
  modified_base 8: mod_base = OTHER; note = 2'-deoxy-2'-fluoroadenosine-3'-phosphate
  modified_base 9: mod_base = OTHER; note = 2'-deoxy-2'-fluorouridine-3'-phosphate
  modified_base 10: mod_base = OTHER; note = 2'-O-methyluridine-3'-phosphate
  modified_base 11: mod_base = OTHER; note = 2'-O-methylguanosine-3'-phosphate
  modified_base 12: mod_base = OTHER; note = 2'-O-methyladenosine-3'-phosphate
  modified_base 13: mod_base = OTHER; note = 2'-O-methyladenosine-3'-phosphate
  modified_base 14: mod_base = OTHER; note = 2'-deoxy-2'-fluoroguanosine-3'-phosphate
  modified_base 15: mod_base = OTHER; note = 2'-O-methyladenosine-3'-phosphate
  modified_base 16: mod_base = OTHER; note = 2'-deoxy-2'-fluoroadenosine-3'-phosphate
  modified_base 17: mod_base = OTHER; note = 2'-O-methylguanosine-3'-phosphate
  modified_base 18: mod_base = OTHER; note = 2'-O-methylguanosine-3'-phosphate
  modified_base 19: mod_base = OTHER; note = 2'-O-methylguanosine-3'-phosphate
  modified_base 20: mod_base = OTHER; note = 2'-O-methylcytidine-3'-phosphate
  modified_base 21: mod_base = OTHER; note = 2'-O-methyluridine-3'-phosphorothioate
  modified_base 22: mod_base = OTHER; note = 2'-O-methylguanosine-3'-phosphorothioate
  modified_base 23: mod_base = OTHER; note = 2'-O-methylguanosine
agtcctcattgaagaagggctgg

SEQ ID NO: 1092 - RNA, 23 nt, synthetic construct
  source 1..23: mol_type = other RNA
  modified_base 1: mod_base = OTHER; note = 2'-O-methyladenosine-3'-phosphorothioate
  modified_base 2: mod_base = OTHER; note = 2'-deoxy-2'-fluorocytidine-3'-phosphorothioate
  modified_base 3: mod_base = OTHER; note = 2'-O-methylcytidine-3'-phosphate
  modified_base 4: mod_base = OTHER; note = 2'-O-methyladenosine-3'-phosphate
  modified_base 5: mod_base = OTHER; note = 2'-O-methylcytidine-3'-phosphate
  modified_base 6: mod_base = OTHER; note = 2'-deoxy-2'-fluoroadenosine-3'-phosphate
  modified_base 7: mod_base = OTHER; note = 2'-O-methylcytidine-3'-phosphate
  modified_base 8: mod_base = OTHER; note = 2'-deoxy-2'-fluorouridine-3'-phosphate
  modified_base 9: mod_base = OTHER; note = 2'-deoxy-2'-fluoroguanosine-3'-phosphate
  modified_base 10: mod_base = OTHER; note = 2'-O-methylguanosine-3'-phosphate
  modified_base 11: mod_base = OTHER; note = 2'-O-methylguanosine-3'-phosphate
  modified_base 12: mod_base = OTHER; note = 2'-O-methylcytidine-3'-phosphate
  modified_base 13: mod_base = OTHER; note = 2'-O-methylcytidine-3'-phosphate
  modified_base 14: mod_base = OTHER; note = 2'-deoxy-2'-fluoroadenosine-3'-phosphate
  modified_base 15: mod_base = OTHER; note = 2'-O-methylcytidine-3'-phosphate
  modified_base 16: mod_base = OTHER; note = 2'-deoxy-2'-fluoroguanosine-3'-phosphate
  modified_base 17: mod_base = OTHER; note = 2'-O-methylcytidine-3'-phosphate
  modified_base 18: mod_base = OTHER; note = 2'-O-methyladenosine-3'-phosphate
  modified_base 19: mod_base = OTHER; note = 2'-O-methylcytidine-3'-phosphate
  modified_base 20: mod_base = OTHER; note = 2'-O-methyluridine-3'-phosphate
  modified_base 21: mod_base = OTHER; note = 2'-O-methyluridine-3'-phosphorothioate
  modified_base 22: mod_base = OTHER; note = 2'-O-methylcytidine-3'-phosphorothioate
  modified_base 23: mod_base = OTHER; note = 2'-O-methyladenosine
accacactgggccacgcacttca

SEQ ID NO: 1093 - RNA, 23 nt, synthetic construct
  source 1..23: mol_type = other RNA
  modified_base 1: mod_base = OTHER; note = 2'-O-methyladenosine-3'-phosphorothioate
  modified_base 2: mod_base = OTHER; note = 2'-deoxy-2'-fluoroadenosine-3'-phosphorothioate
  modified_base 3: mod_base = OTHER; note = 2'-O-methylguanosine-3'-phosphate
  modified_base 4: mod_base = OTHER; note = 2'-O-methyluridine-3'-phosphate
  modified_base 5: mod_base = OTHER; note = 2'-O-methyluridine-3'-phosphate
  modified_base 6: mod_base = OTHER; note = 2'-deoxy-2'-fluorouridine-3'-phosphate
  modified_base 7: mod_base = OTHER; note = 2'-O-methylcytidine-3'-phosphate
  modified_base 8: mod_base = OTHER; note = 2'-deoxy-2'-fluorocytidine-3'-phosphate
  modified_base 9: mod_base = OTHER; note = 2'-deoxy-2'-fluoroguanosine-3'-phosphate
  modified_base 10: mod_base = OTHER; note = 2'-O-methyluridine-3'-phosphate
  modified_base 11: mod_base = OTHER; note = 2'-O-methylcytidine-3'-phosphate
  modified_base 12: mod_base = OTHER; note = 2'-O-methylcytidine-3'-phosphate
  modified_base 13: mod_base = OTHER; note = 2'-O-methyluridine-3'-phosphate
  modified_base 14: mod_base = OTHER; note = 2'-deoxy-2'-fluorouridine-3'-phosphate
  modified_base 15: mod_base = OTHER; note = 2'-O-methylguanosine-3'-phosphate
  modified_base 16: mod_base = OTHER; note = 2'-deoxy-2'-fluorouridine-3'-phosphate
  modified_base 17: mod_base = OTHER; note = 2'-O-methylcytidine-3'-phosphate
  modified_base 18: mod_base = OTHER; note = 2'-O-methylguanosine-3'-phosphate
  modified_base 19: mod_base = OTHER; note = 2'-O-methyluridine-3'-phosphate
  modified_base 20: mod_base = OTHER; note = 2'-O-methyladenosine-3'-phosphate
  modified_base 21: mod_base = OTHER; note = 2'-O-methylguanosine-3'-phosphorothioate
  modified_base 22: mod_base = OTHER; note = 2'-O-methylcytidine-3'-phosphorothioate
  modified_base 23: mod_base = OTHER; note = 2'-O-methyladenosine
aagtttccgtccttgtcgtagca

SEQ ID NO: 1094 - RNA, 23 nt, synthetic construct
  source 1..23: mol_type = other RNA
  modified_base 1: mod_base = OTHER; note = 2'-O-methyladenosine-3'-phosphorothioate
  modified_base 2: mod_base = OTHER; note = 2'-deoxy-2'-fluoroguanosine-3'-phosphorothioate
  modified_base 3: mod_base = OTHER; note = 2'-O-methyladenosine-3'-phosphate
  modified_base 4: mod_base = OTHER; note = 2'-O-methylcytidine-3'-phosphate
  modified_base 5: mod_base = OTHER; note = 2'-O-methylcytidine-3'-phosphate
  modified_base 6: mod_base = OTHER; note = 2'-deoxy-2'-fluorocytidine-3'-phosphate
  modified_base 7: mod_base = OTHER; note = 2'-O-methyluridine-3'-phosphate
  modified_base 8: mod_base = OTHER; note = 2'-deoxy-2'-fluorouridine-3'-phosphate
  modified_base 9: mod_base = OTHER; note = 2'-deoxy-2'-fluoroguanosine-3'-phosphate
  modified_base 10: mod_base = OTHER; note = 2'-O-methylcytidine-3'-phosphate
  modified_base 11: mod_base = OTHER; note = 2'-O-methyladenosine-3'-phosphate
  modified_base 12: mod_base = OTHER; note = 2'-O-methylcytidine-3'-phosphate
  modified_base 13: mod_base = OTHER; note = 2'-O-methylcytidine-3'-phosphate
  modified_base 14: mod_base = OTHER; note = 2'-deoxy-2'-fluoroguanosine-3'-phosphate
  modified_base 15: mod_base = OTHER; note = 2'-O-methyladenosine-3'-phosphate
  modified_base 16: mod_base = OTHER; note = 2'-deoxy-2'-fluorocytidine-3'-phosphate
  modified_base 17: mod_base = OTHER; note = 2'-O-methylguanosine-3'-phosphate
  modified_base 18: mod_base = OTHER; note = 2'-O-methyluridine-3'-phosphate
  modified_base 19: mod_base = OTHER; note = 2'-O-methylcytidine-3'-phosphate
  modified_base 20: mod_base = OTHER; note = 2'-O-methyladenosine-3'-phosphate
  modified_base 21: mod_base = OTHER; note = 2'-O-methyluridine-3'-phosphorothioate
  modified_base 22: mod_base = OTHER; note = 2'-O-methyladenosine-3'-phosphorothioate
  modified_base 23: mod_base = OTHER; note = 2'-O-methylguanosine
agacccttgcaccgacgtcatag

SEQ ID NO: 1095 - RNA, 23 nt, synthetic construct
  source 1..23: mol_type = other RNA
  modified_base 1: mod_base = OTHER; note = 2'-O-methyladenosine-3'-phosphorothioate
  modified_base 2: mod_base = OTHER; note = 2'-deoxy-2'-fluoroguanosine-3'-phosphorothioate
  modified_base 3: mod_base = OTHER; note = 2'-O-methyluridine-3'-phosphate
  modified_base 4: mod_base = OTHER; note = 2'-O-methylguanosine-3'-phosphate
  modified_base 5: mod_base = OTHER; note = 2'-O-methyluridine-3'-phosphate
  modified_base 6: mod_base = OTHER; note = 2'-deoxy-2'-fluoroguanosine-3'-phosphate
  modified_base 7: mod_base = OTHER; note = 2'-O-methylcytidine-3'-phosphate
  modified_base 8: mod_base = OTHER; note = 2'-deoxy-2'-fluoroadenosine-3'-phosphate
  modified_base 9: mod_base = OTHER; note = 2'-deoxy-2'-fluoroguanosine-3'-phosphate
  modified_base 10: mod_base = OTHER; note = 2'-O-methyluridine-3'-phosphate
  modified_base 11: mod_base = OTHER; note = 2'-O-methyluridine-3'-phosphate
  modified_base 12: mod_base = OTHER; note = 2'-O-methyladenosine-3'-phosphate
  modified_base 13: mod_base = OTHER; note = 2'-O-methylcytidine-3'-phosphate
  modified_base 14: mod_base = OTHER; note = 2'-deoxy-2'-fluoroadenosine-3'-phosphate
  modified_base 15: mod_base = OTHER; note = 2'-O-methylguanosine-3'-phosphate
  modified_base 16: mod_base = OTHER; note = 2'-deoxy-2'-fluorocytidine-3'-phosphate
  modified_base 17: mod_base = OTHER; note = 2'-O-methyluridine-3'-phosphate
  modified_base 18: mod_base = OTHER; note = 2'-O-methylcytidine-3'-phosphate
  modified_base 19: mod_base = OTHER; note = 2'-O-methyluridine-3'-phosphate
  modified_base 20: mod_base = OTHER; note = 2'-O-methylguanosine-3'-phosphate
  modified_base 21: mod_base = OTHER; note = 2'-O-methylguanosine-3'-phosphorothioate
  modified_base 22: mod_base = OTHER; note = 2'-O-methylcytidine-3'-phosphorothioate
  modified_base 23: mod_base = OTHER; note = 2'-O-methyladenosine
agtgtgcagttacagctctggca

SEQ ID NO: 1096 - RNA, 23 nt, synthetic construct
  source 1..23: mol_type = other RNA
  modified_base 1: mod_base = OTHER; note = 2'-O-methyladenosine-3'-phosphorothioate
  modified_base 2: mod_base = OTHER; note = 2'-deoxy-2'-fluorouridine-3'-phosphorothioate
  modified_base 3: mod_base = OTHER; note = 2'-O-methylcytidine-3'-phosphate
  modified_base 4: mod_base = OTHER; note = 2'-O-methyladenosine-3'-phosphate
  modified_base 5: mod_base = OTHER; note = 2'-O-methyladenosine-3'-phosphate
  modified_base 6: mod_base = OTHER; note = 2'-deoxy-2'-fluoroguanosine-3'-phosphate
  modified_base 7: mod_base = OTHER; note = 2'-O-methylguanosine-3'-phosphate
  modified_base 8: mod_base = OTHER; note = 2'-deoxy-2'-fluorocytidine-3'-phosphate
  modified_base 9: mod_base = OTHER; note = 2'-deoxy-2'-fluorouridine-3'-phosphate
  modified_base 10: mod_base = OTHER; note = 2'-O-methylguanosine-3'-phosphate
  modified_base 11: mod_base = OTHER; note = 2'-O-methyluridine-3'-phosphate
  modified_base 12: mod_base = OTHER; note = 2'-O-methylguanosine-3'-phosphate
  modified_base 13: mod_base = OTHER; note = 2'-O-methyladenosine-3'-phosphate
  modified_base 14: mod_base = OTHER; note = 2'-deoxy-2'-fluoroguanosine-3'-phosphate
  modified_base 15: mod_base = OTHER; note = 2'-O-methylcytidine-3'-phosphate
  modified_base 16: mod_base = OTHER; note = 2'-deoxy-2'-fluoroguanosine-3'-phosphate
  modified_base 17: mod_base = OTHER; note = 2'-O-methylcytidine-3'-phosphate
  modified_base 18: mod_base = OTHER; note = 2'-O-methyladenosine-3'-phosphate
  modified_base 19: mod_base = OTHER; note = 2'-O-methylcytidine-3'-phosphate
  modified_base 20: mod_base = OTHER; note = 2'-O-methyluridine-3'-phosphate
  modified_base 21: mod_base = OTHER; note = 2'-O-methylguanosine-3'-phosphorothioate
  modified_base 22: mod_base = OTHER; note = 2'-O-methylguanosine-3'-phosphorothioate
  modified_base 23: mod_base = OTHER; note = 2'-O-methyladenosine
atcaaggctgtgagcgcactgga

SEQ ID NO: 1097 - RNA, 23 nt, synthetic construct
  source 1..23: mol_type = other RNA
  modified_base 1: mod_base = OTHER; note = 2'-O-methyladenosine-3'-phosphorothioate
  modified_base 2: mod_base = OTHER; note = 2'-deoxy-2'-fluoroguanosine-3'-phosphorothioate
  modified_base 3: mod_base = OTHER; note = 2'-O-methyluridine-3'-phosphate
  modified_base 4: mod_base = OTHER; note = 2'-O-methylcytidine-3'-phosphate
  modified_base 5: mod_base = OTHER; note = 2'-O-methylcytidine-3'-phosphate
  modified_base 6: mod_base = OTHER; note = 2'-deoxy-2'-fluorouridine-3'-phosphate
  modified_base 7: mod_base = OTHER; note = 2'-O-methylguanosine-3'-phosphate
  modified_base 8: mod_base = OTHER; note = 2'-deoxy-2'-fluorouridine-3'-phosphate
  modified_base 9: mod_base = OTHER; note = 2'-deoxy-2'-fluorocytidine-3'-phosphate
  modified_base 10: mod_base = OTHER; note = 2'-O-methylcytidine-3'-phosphate
  modified_base 11: mod_base = OTHER; note = 2'-O-methyluridine-3'-phosphate
  modified_base 12: mod_base = OTHER; note = 2'-O-methylcytidine-3'-phosphate
  modified_base 13: mod_base = OTHER; note = 2'-O-methyladenosine-3'-phosphate
  modified_base 14: mod_base = OTHER; note = 2'-deoxy-2'-fluorouridine-3'-phosphate
  modified_base 15: mod_base = OTHER; note = 2'-O-methyladenosine-3'-phosphate
  modified_base 16: mod_base = OTHER; note = 2'-deoxy-2'-fluoroguanosine-3'-phosphate
  modified_base 17: mod_base = OTHER; note = 2'-O-methylguanosine-3'-phosphate
  modified_base 18: mod_base = OTHER; note = 2'-O-methyluridine-3'-phosphate
  modified_base 19: mod_base = OTHER; note = 2'-O-methylguanosine-3'-phosphate
  modified_base 20: mod_base = OTHER; note = 2'-O-methylcytidine-3'-phosphate
  modified_base 21: mod_base = OTHER; note = 2'-O-methyladenosine-3'-phosphorothioate
  modified_base 22: mod_base = OTHER; note = 2'-O-methylguanosine-3'-phosphorothioate
  modified_base 23: mod_base = OTHER; note = 2'-O-methylguanosine
agtcctgtcctcataggtgcagg

SEQ ID NO: 1098 - RNA, 23 nt, synthetic construct
  source 1..23: mol_type = other RNA
  modified_base 1: mod_base = OTHER; note = 2'-O-methyladenosine-3'-phosphorothioate
  modified_base 2: mod_base = OTHER; note = 2'-deoxy-2'-fluoroguanosine-3'-phosphorothioate
  modified_base 3: mod_base = OTHER; note = 2'-O-methyluridine-3'-phosphate
  modified_base 4: mod_base = OTHER; note = 2'-O-methylguanosine-3'-phosphate
  modified_base 5: mod_base = OTHER; note = 2'-O-methyluridine-3'-phosphate
  modified_base 6: mod_base = OTHER; note = 2'-deoxy-2'-fluorouridine-3'-phosphate
  modified_base 7: mod_base = OTHER; note = 2'-O-methylguanosine-3'-phosphate
  modified_base 8: mod_base = OTHER; note = 2'-deoxy-2'-fluorouridine-3'-phosphate
  modified_base 9: mod_base = OTHER; note = 2'-deoxy-2'-fluoroadenosine-3'-phosphate
  modified_base 10: mod_base = OTHER; note = 2'-O-methylguanosine-3'-phosphate
  modified_base 11: mod_base = OTHER; note = 2'-O-methyladenosine-3'-phosphate
  modified_base 12: mod_base = OTHER; note = 2'-O-methyluridine-3'-phosphate
  modified_base 13: mod_base = OTHER; note = 2'-O-methylguanosine-3'-phosphate
  modified_base 14: mod_base = OTHER; note = 2'-deoxy-2'-fluoroadenosine-3'-phosphate
  modified_base 15: mod_base = OTHER; note = 2'-O-methylcytidine-3'-phosphate
  modified_base 16: mod_base = OTHER; note = 2'-deoxy-2'-fluoroguanosine-3'-phosphate
  modified_base 17: mod_base = OTHER; note = 2'-O-methyluridine-3'-phosphate
  modified_base 18: mod_base = OTHER; note = 2'-O-methylcytidine-3'-phosphate
  modified_base 19: mod_base = OTHER; note = 2'-O-methylcytidine-3'-phosphate
  modified_base 20: mod_base = OTHER; note = 2'-O-methyluridine-3'-phosphate
  modified_base 21: mod_base = OTHER; note = 2'-O-methylguanosine-3'-phosphorothioate
  modified_base 22: mod_base = OTHER; note = 2'-O-methylguanosine-3'-phosphorothioate
  modified_base 23: mod_base = OTHER; note = 2'-O-methyluridine
agtgttgtagatgacgtcctggt

SEQ ID NO: 1099 - RNA, 23 nt, synthetic construct
  source 1..23: mol_type = other RNA
  modified_base 1: mod_base = OTHER; note = 2'-O-methyladenosine-3'-phosphorothioate
  modified_base 2: mod_base = OTHER; note = 2'-deoxy-2'-fluoroadenosine-3'-phosphorothioate
  modified_base 3: mod_base = OTHER; note = 2'-O-methylguanosine-3'-phosphate
  modified_base 4: mod_base = OTHER; note = 2'-O-methyladenosine-3'-phosphate
  modified_base 5: mod_base = OTHER; note = 2'-O-methyluridine-3'-phosphate
  modified_base 6: mod_base = OTHER; note = 2'-deoxy-2'-fluoroguanosine-3'-phosphate
  modified_base 7: mod_base = OTHER; note = 2'-O-methylguanosine-3'-phosphate
  modified_base 8: mod_base = OTHER; note = 2'-deoxy-2'-fluorocytidine-3'-phosphate
  modified_base 9: mod_base = OTHER; note = 2'-deoxy-2'-fluoroguanosine-3'-phosphate
  modified_base 10: mod_base = OTHER; note = 2'-O-methyladenosine-3'-phosphate
  modified_base 11: mod_base = OTHER; note = 2'-O-methyluridine-3'-phosphate
  modified_base 12: mod_base = OTHER; note = 2'-O-methylcytidine-3'-phosphate
  modified_base 13: mod_base = OTHER; note = 2'-O-methyladenosine-3'-phosphate
  modified_base 14: mod_base = OTHER; note = 2'-deoxy-2'-fluoroadenosine-3'-phosphate
  modified_base 15: mod_base = OTHER; note = 2'-O-methylguanosine-3'-phosphate
  modified_base 16: mod_base = OTHER; note = 2'-deoxy-2'-fluorocytidine-3'-phosphate
  modified_base 17: mod_base = OTHER; note = 2'-O-methyladenosine-3'-phosphate
  modified_base 18: mod_base = OTHER; note = 2'-O-methylguanosine-3'-phosphate
  modified_base 19: mod_base = OTHER; note = 2'-O-methylguanosine-3'-phosphate
  modified_base 20: mod_base = OTHER; note = 2'-O-methylcytidine-3'-phosphate
  modified_base 21: mod_base = OTHER; note = 2'-O-methylguanosine-3'-phosphorothioate
  modified_base 22: mod_base = OTHER; note = 2'-O-methylcytidine-3'-phosphorothioate
  modified_base 23: mod_base = OTHER; note = 2'-O-methylcytidine
aagatggcgatcaagcaggcgcc

SEQ ID NO: 1100 - RNA, 23 nt, synthetic construct
  source 1..23: mol_type = other RNA
  modified_base 1: mod_base = OTHER; note = 2'-O-methyladenosine-3'-phosphorothioate
  modified_base 2: mod_base = OTHER; note = 2'-deoxy-2'-fluoroadenosine-3'-phosphorothioate
  modified_base 3: mod_base = OTHER; note = 2'-O-methylcytidine-3'-phosphate
  modified_base 4: mod_base = OTHER; note = 2'-O-methyladenosine-3'-phosphate
  modified_base 5: mod_base = OTHER; note = 2'-O-methylguanosine-3'-phosphate
  modified_base 6: mod_base = OTHER; note = 2'-deoxy-2'-fluorocytidine-3'-phosphate
  modified_base 7: mod_base = OTHER; note = 2'-O-methylcytidine-3'-phosphate
  modified_base 8: mod_base = OTHER; note = 2'-deoxy-2'-fluorouridine-3'-phosphate
  modified_base 9: mod_base = OTHER; note = 2'-deoxy-2'-fluorouridine-3'-phosphate
  modified_base 10: mod_base = OTHER; note = 2'-O-methylcytidine-3'-phosphate
  modified_base 11: mod_base = OTHER; note = 2'-O-methylcytidine-3'-phosphate
  modified_base 12: mod_base = OTHER; note = 2'-O-methyluridine-3'-phosphate
  modified_base 13: mod_base = OTHER; note = 2'-O-methylguanosine-3'-phosphate
  modified_base 14: mod_base = OTHER; note = 2'-deoxy-2'-fluoroadenosine-3'-phosphate
  modified_base 15: mod_base = OTHER; note = 2'-O-methyluridine-3'-phosphate
  modified_base 16: mod_base = OTHER; note = 2'-deoxy-2'-fluoroguanosine-3'-phosphate
  modified_base 17: mod_base = OTHER; note = 2'-O-methyladenosine-3'-phosphate
  modified_base 18: mod_base = OTHER; note = 2'-O-methyluridine-3'-phosphate
  modified_base 19: mod_base = OTHER; note = 2'-O-methylguanosine-3'-phosphate
  modified_base 20: mod_base = OTHER; note = 2'-O-methylguanosine-3'-phosphate
  modified_base 21: mod_base = OTHER; note = 2'-O-methyluridine-3'-phosphorothioate
  modified_base 22: mod_base = OTHER; note = 2'-O-methylguanosine-3'-phosphorothioate
  modified_base 23: mod_base = OTHER; note = 2'-O-methylcytidine
aacagccttcctgatgatggtgc

SEQ ID NO: 1101 - RNA, 23 nt, synthetic construct
  source 1..23: mol_type = other RNA
  modified_base 1: mod_base = OTHER; note = 2'-O-methyladenosine-3'-phosphorothioate
  modified_base 2: mod_base = OTHER; note = 2'-deoxy-2'-fluoroguanosine-3'-phosphorothioate
  modified_base 3: mod_base = OTHER; note = 2'-O-methyladenosine-3'-phosphate
  modified_base 4: mod_base = OTHER; note = 2'-O-methyladenosine-3'-phosphate
  modified_base 5: mod_base = OTHER; note = 2'-O-methylguanosine-3'-phosphate
  modified_base 6: mod_base = OTHER; note = 2'-deoxy-2'-fluoroguanosine-3'-phosphate
  modified_base 7: mod_base = OTHER; note = 2'-O-methyluridine-3'-phosphate
  modified_base 8: mod_base = OTHER; note = 2'-deoxy-2'-fluoroguanosine-3'-phosphate
  modified_base 9: mod_base = OTHER; note = 2'-deoxy-2'-fluoroadenosine-3'-phosphate
  modified_base 10: mod_base = OTHER; note = 2'-O-methyladenosine-3'-phosphate
  modified_base 11: mod_base = OTHER; note = 2'-O-methyluridine-3'-phosphate
  modified_base 12: mod_base = OTHER; note = 2'-O-methylguanosine-3'-phosphate
  modified_base 13: mod_base = OTHER; note = 2'-O-methylguanosine-3'-phosphate
  modified_base 14: mod_base = OTHER; note = 2'-deoxy-2'-fluorocytidine-3'-phosphate
  modified_base 15: mod_base = OTHER; note = 2'-O-methylguanosine-3'-phosphate
  modified_base 16: mod_base = OTHER; note = 2'-deoxy-2'-fluorouridine-3'-phosphate
  modified_base 17: mod_base = OTHER; note = 2'-O-methyluridine-3'-phosphate
  modified_base 18: mod_base = OTHER; note = 2'-O-methylguanosine-3'-phosphate
  modified_base 19: mod_base = OTHER; note = 2'-O-methyluridine-3'-phosphate
  modified_base 20: mod_base = OTHER; note = 2'-O-methylguanosine-3'-phosphate
  modified_base 21: mod_base = OTHER; note = 2'-O-methylguanosine-3'-phosphorothioate
  modified_base 22: mod_base = OTHER; note = 2'-O-methylcytidine-3'-phosphorothioate
  modified_base 23: mod_base = OTHER; note = 2'-O-methyluridine
agaaggtgaatggcgttgtggct

SEQ ID NO: 1102 - RNA, 23 nt, synthetic construct
  source 1..23: mol_type = other RNA
  modified_base 1: mod_base = OTHER; note = 2'-O-methyladenosine-3'-phosphorothioate
  modified_base 2: mod_base = OTHER; note = 2'-deoxy-2'-fluorouridine-3'-phosphorothioate
  modified_base 3: mod_base = OTHER; note = 2'-O-methylcytidine-3'-phosphate
  modified_base 4: mod_base = OTHER; note = 2'-O-methylguanosine-3'-phosphate
  modified_base 5: mod_base = OTHER; note = 2'-O-methylcytidine-3'-phosphate
  modified_base 6: mod_base = OTHER; note = 2'-deoxy-2'-fluoroguanosine-3'-phosphate
  modified_base 7: mod_base = OTHER; note = 2'-O-methylguanosine-3'-phosphate
  modified_base 8: mod_base = OTHER; note = 2'-deoxy-2'-fluoroadenosine-3'-phosphate
  modified_base 9: mod_base = OTHER; note = 2'-deoxy-2'-fluorocytidine-3'-phosphate
  modified_base 10: mod_base = OTHER; note = 2'-O-methyladenosine-3'-phosphate
  modified_base 11: mod_base = OTHER; note = 2'-O-methylcytidine-3'-phosphate
  modified_base 12: mod_base = OTHER; note = 2'-O-methyladenosine-3'-phosphate
  modified_base 13: mod_base = OTHER; note = 2'-O-methylcytidine-3'-phosphate
  modified_base 14: mod_base = OTHER; note = 2'-deoxy-2'-fluoroadenosine-3'-phosphate
  modified_base 15: mod_base = OTHER; note = 2'-O-methylcytidine-3'-phosphate
  modified_base 16: mod_base = OTHER; note = 2'-deoxy-2'-fluoroguanosine-3'-phosphate
  modified_base 17: mod_base = OTHER; note = 2'-O-methylguanosine-3'-phosphate
  modified_base 18: mod_base = OTHER; note = 2'-O-methyluridine-3'-phosphate
  modified_base 19: mod_base = OTHER; note = 2'-O-methylguanosine-3'-phosphate
  modified_base 20: mod_base = OTHER; note = 2'-O-methylguanosine-3'-phosphate
  modified_base 21: mod_base = OTHER; note = 2'-O-methyladenosine-3'-phosphorothioate
  modified_base 22: mod_base = OTHER; note = 2'-O-methylguanosine-3'-phosphorothioate
  modified_base 23: mod_base = OTHER; note = 2'-O-methyladenosine
atcgcggacacacacggtggaga

SEQ ID NO: 1103 - RNA, 23 nt, synthetic construct
  source 1..23: mol_type = other RNA
  modified_base 1: mod_base = OTHER; note = 2'-O-methyladenosine-3'-phosphorothioate
  modified_base 2: mod_base = OTHER; note = 2'-deoxy-2'-fluoroguanosine-3'-phosphorothioate
  modified_base 3: mod_base = OTHER; note = 2'-O-methylcytidine-3'-phosphate
  modified_base 4: mod_base = OTHER; note = 2'-O-methylcytidine-3'-phosphate
  modified_base 5: mod_base = OTHER; note = 2'-O-methylcytidine-3'-phosphate
  modified_base 6: mod_base = OTHER; note = 2'-deoxy-2'-fluoroadenosine-3'-phosphate
  modified_base 7: mod_base = OTHER; note = 2'-O-methyluridine-3'-phosphate
  modified_base 8: mod_base = OTHER; note = 2'-deoxy-2'-fluorouridine-3'-phosphate
  modified_base 9: mod_base = OTHER; note = 2'-deoxy-2'-fluoroguanosine-3'-phosphate
  modified_base 10: mod_base = OTHER; note = 2'-O-methyluridine-3'-phosphate
  modified_base 11: mod_base = OTHER; note = 2'-O-methyladenosine-3'-phosphate
  modified_base 12: mod_base = OTHER; note = 2'-O-methylcytidine-3'-phosphate
  modified_base 13: mod_base = OTHER; note = 2'-O-methylcytidine-3'-phosphate
  modified_base 14: mod_base = OTHER; note = 2'-deoxy-2'-fluoroadenosine-3'-phosphate
  modified_base 15: mod_base = OTHER; note = 2'-O-methylguanosine-3'-phosphate
  modified_base 16: mod_base = OTHER; note = 2'-deoxy-2'-fluorocytidine-3'-phosphate
  modified_base 17: mod_base = OTHER; note = 2'-O-methyluridine-3'-phosphate
  modified_base 18: mod_base = OTHER; note = 2'-O-methylguanosine-3'-phosphate
  modified_base 19: mod_base = OTHER; note = 2'-O-methylguanosine-3'-phosphate
  modified_base 20: mod_base = OTHER; note = 2'-O-methyladenosine-3'-phosphate
  modified_base 21: mod_base = OTHER; note = 2'-O-methylcytidine-3'-phosphorothioate
  modified_base 22: mod_base = OTHER; note = 2'-O-methylcytidine-3'-phosphorothioate
  modified_base 23: mod_base = OTHER; note = 2'-O-methyladenosine
agcccattgtaccagctggacca

SEQ ID NO: 1104 - RNA, 23 nt, synthetic construct
  source 1..23: mol_type = other RNA
  modified_base 1: mod_base = OTHER; note = 2'-O-methyladenosine-3'-phosphorothioate
  modified_base 2: mod_base = OTHER; note = 2'-deoxy-2'-fluorouridine-3'-phosphorothioate
  modified_base 3: mod_base = OTHER; note = 2'-O-methyluridine-3'-phosphate
  modified_base 4: mod_base = OTHER; note = 2'-O-methyluridine-3'-phosphate
  modified_base 5: mod_base = OTHER; note = 2'-O-methyluridine-3'-phosphate
  modified_base 6: mod_base = OTHER; note = 2'-deoxy-2'-fluorocytidine-3'-phosphate
  modified_base 7: mod_base = OTHER; note = 2'-O-methyladenosine-3'-phosphate
  modified_base 8: mod_base = OTHER; note = 2'-deoxy-2'-fluoroadenosine-3'-phosphate
  modified_base 9: mod_base = OTHER; note = 2'-deoxy-2'-fluoroadenosine-3'-phosphate
  modified_base 10: mod_base = OTHER; note = 2'-O-methylcytidine-3'-phosphate
  modified_base 11: mod_base = OTHER; note = 2'-O-methylguanosine-3'-phosphate
  modified_base 12: mod_base = OTHER; note = 2'-O-methyluridine-3'-phosphate
  modified_base 13: mod_base = OTHER; note = 2'-O-methylcytidine-3'-phosphate
  modified_base 14: mod_base = OTHER; note = 2'-deoxy-2'-fluorouridine-3'-phosphate
  modified_base 15: mod_base = OTHER; note = 2'-O-methylcytidine-3'-phosphate
  modified_base 16: mod_base = OTHER; note = 2'-deoxy-2'-fluoroadenosine-3'-phosphate
  modified_base 17: mod_base = OTHER; note = 2'-O-methyladenosine-3'-phosphate
  modified_base 18: mod_base = OTHER; note = 2'-O-methyladenosine-3'-phosphate
  modified_base 19: mod_base = OTHER; note = 2'-O-methylguanosine-3'-phosphate
  modified_base 20: mod_base = OTHER; note = 2'-O-methyluridine-3'-phosphate
  modified_base 21: mod_base = OTHER; note = 2'-O-methylcytidine-3'-phosphorothioate
  modified_base 22: mod_base = OTHER; note = 2'-O-methyluridine-3'-phosphorothioate
  modified_base 23: mod_base = OTHER; note = 2'-O-methylcytidine
attttcaaacgtctcaaagtctc

SEQ ID NO: 1105 - RNA, 23 nt, synthetic construct
  source 1..23: mol_type = other RNA
  modified_base 1: mod_base = OTHER; note = 2'-O-methyladenosine-3'-phosphorothioate
  modified_base 2: mod_base = OTHER; note = 2'-deoxy-2'-fluoroguanosine-3'-phosphorothioate
  modified_base 3: mod_base = OTHER; note = 2'-O-methylguanosine-3'-phosphate
  modified_base 4: mod_base = OTHER; note = 2'-O-methylguanosine-3'-phosphate
  modified_base 5: mod_base = OTHER; note = 2'-O-methylcytidine-3'-phosphate
  modified_base 6: mod_base = OTHER; note = 2'-deoxy-2'-fluoroadenosine-3'-phosphate
  modified_base 7: mod_base = OTHER; note = 2'-O-methyluridine-3'-phosphate
  modified_base 8: mod_base = OTHER; note = 2'-deoxy-2'-fluoroadenosine-3'-phosphate
  modified_base 9: mod_base = OTHER; note = 2'-deoxy-2'-fluorocytidine-3'-phosphate
  modified_base 10: mod_base = OTHER; note = 2'-O-methylcytidine-3'-phosphate
  modified_base 11: mod_base = OTHER; note = 2'-O-methyluridine-3'-phosphate
  modified_base 12: mod_base = OTHER; note = 2'-O-methylguanosine-3'-phosphate
  modified_base 13: mod_base = OTHER; note = 2'-O-methylguanosine-3'-phosphate
  modified_base 14: mod_base = OTHER; note = 2'-deoxy-2'-fluorouridine-3'-phosphate
  modified_base 15: mod_base = OTHER; note = 2'-O-methyladenosine-3'-phosphate
  modified_base 16: mod_base = OTHER; note = 2'-deoxy-2'-fluorocytidine-3'-phosphate
  modified_base 17: mod_base = OTHER; note = 2'-O-methylcytidine-3'-phosphate
  modified_base 18: mod_base = OTHER; note = 2'-O-methylcytidine-3'-phosphate
  modified_base 19: mod_base = OTHER; note = 2'-O-methyluridine-3'-phosphate
  modified_base 20: mod_base = OTHER; note = 2'-O-methylcytidine-3'-phosphate
  modified_base 21: mod_base = OTHER; note = 2'-O-methyluridine-3'-phosphorothioate
  modified_base 22: mod_base = OTHER; note = 2'-O-methylcytidine-3'-phosphorothioate
  modified_base 23: mod_base = OTHER; note = 2'-O-methyluridine
agggcatacctggtaccctctct

SEQ ID NO: 1106 - RNA, 23 nt, synthetic construct
  source 1..23: mol_type = other RNA
  modified_base 1: mod_base = OTHER; note = 2'-O-methyladenosine-3'-phosphorothioate
  modified_base 2: mod_base = OTHER; note = 2'-deoxy-2'-fluoroguanosine-3'-phosphorothioate
  modified_base 3: mod_base = OTHER; note = 2'-O-methylguanosine-3'-phosphate
  modified_base 4: mod_base = OTHER; note = 2'-O-methylcytidine-3'-phosphate
  modified_base 5: mod_base = OTHER; note = 2'-O-methyladenosine-3'-phosphate
  modified_base 6: mod_base = OTHER; note = 2'-deoxy-2'-fluorocytidine-3'-phosphate
  modified_base 7: mod_base = OTHER; note = 2'-O-methyluridine-3'-phosphate
  modified_base 8: mod_base = OTHER; note = 2'-deoxy-2'-fluorocytidine-3'-phosphate
  modified_base 9: mod_base = OTHER; note = 2'-deoxy-2'-fluoroguanosine-3'-phosphate
  modified_base 10: mod_base = OTHER; note = 2'-O-methyladenosine-3'-phosphate
  modified_base 11: mod_base = OTHER; note = 2'-O-methyluridine-3'-phosphate
  modified_base 12: mod_base = OTHER; note = 2'-O-methylguanosine-3'-phosphate
  modified_base 13: mod_base = OTHER; note = 2'-O-methyluridine-3'-phosphate
  modified_base 14: mod_base = OTHER; note = 2'-deoxy-2'-fluorocytidine-3'-phosphate
  modified_base 15: mod_base = OTHER; note = 2'-O-methyladenosine-3'-phosphate
  modified_base 16: mod_base = OTHER; note = 2'-deoxy-2'-fluoroguanosine-3'-phosphate
  modified_base 17: mod_base = OTHER; note = 2'-O-methylcytidine-3'-phosphate
  modified_base 18: mod_base = OTHER; note = 2'-O-methylcytidine-3'-phosphate
  modified_base 19: mod_base = OTHER; note = 2'-O-methyladenosine-3'-phosphate
  modified_base 20: mod_base = OTHER; note = 2'-O-methylguanosine-3'-phosphate
  modified_base 21: mod_base = OTHER; note = 2'-O-methylcytidine-3'-phosphorothioate
  modified_base 22: mod_base = OTHER; note = 2'-O-methyladenosine-3'-phosphorothioate
  modified_base 23: mod_base = OTHER; note = 2'-O-methylcytidine
aggcactcgatgtcagccagcac

SEQ ID NO: 1107 - RNA, 23 nt, synthetic construct
  source 1..23: mol_type = other RNA
  modified_base 1: mod_base = OTHER; note = 2'-O-methyladenosine-3'-phosphorothioate
  modified_base 2: mod_base = OTHER; note = 2'-deoxy-2'-fluorouridine-3'-phosphorothioate
  modified_base 3: mod_base = OTHER; note = 2'-O-methylcytidine-3'-phosphate
  modified_base 4: mod_base = OTHER; note = 2'-O-methylcytidine-3'-phosphate
  modified_base 5: mod_base = OTHER; note = 2'-O-methyladenosine-3'-phosphate
  modified_base 6: mod_base = OTHER; note = 2'-deoxy-2'-fluoroguanosine-3'-phosphate
  modified_base 7: mod_base = OTHER; note = 2'-O-methylcytidine-3'-phosphate
  modified_base 8: mod_base = OTHER; note = 2'-deoxy-2'-fluoroguanosine-3'-phosphate
  modified_base 9: mod_base = OTHER; note = 2'-deoxy-2'-fluoroguanosine-3'-phosphate
  modified_base 10: mod_base = OTHER; note = 2'-O-methylcytidine-3'-phosphate
  modified_base 11: mod_base = OTHER; note = 2'-O-methyladenosine-3'-phosphate
  modified_base 12: mod_base = OTHER; note = 2'-O-methyluridine-3'-phosphate
  modified_base 13: mod_base = OTHER; note = 2'-O-methylguanosine-3'-phosphate
  modified_base 14: mod_base = OTHER; note = 2'-deoxy-2'-fluorouridine-3'-phosphate
  modified_base 15: mod_base = OTHER; note = 2'-O-methylcytidine-3'-phosphate
  modified_base 16: mod_base = OTHER; note = 2'-deoxy-2'-fluoroguanosine-3'-phosphate
  modified_base 17: mod_base = OTHER; note = 2'-O-methylguanosine-3'-phosphate
  modified_base 18: mod_base = OTHER; note = 2'-O-methylguanosine-3'-phosphate
  modified_base 19: mod_base = OTHER; note = 2'-O-methyladenosine-3'-phosphate
  modified_base 20: mod_base = OTHER; note = 2'-O-methyladenosine-3'-phosphate
  modified_base 21: mod_base = OTHER; note = 2'-O-methylguanosine-3'-phosphorothioate
  modified_base 22: mod_base = OTHER; note = 2'-O-methylcytidine-3'-phosphorothioate
  modified_base 23: mod_base = OTHER; note = 2'-O-methyluridine
atccagcggcatgtcgggaagct

SEQ ID NO: 1108 - RNA, 23 nt, synthetic construct
  source 1..23: mol_type = other RNA
  modified_base 1: mod_base = OTHER; note = 2'-O-methyladenosine-3'-phosphorothioate
  modified_base 2: mod_base = OTHER; note = 2'-deoxy-2'-fluoroadenosine-3'-phosphorothioate
  modified_base 3: mod_base = OTHER; note = 2'-O-methyluridine-3'-phosphate
  modified_base 4: mod_base = OTHER; note = 2'-O-methylguanosine-3'-phosphate
  modified_base 5: mod_base = OTHER; note = 2'-O-methylcytidine-3'-phosphate
  modified_base 6: mod_base = OTHER; note = 2'-deoxy-2'-fluoroguanosine-3'-phosphate
  modified_base 7: mod_base = OTHER; note = 2'-O-methylguanosine-3'-phosphate
  modified_base 8: mod_base = OTHER; note = 2'-deoxy-2'-fluorouridine-3'-phosphate
  modified_base 9: mod_base = OTHER; note = 2'-deoxy-2'-fluorocytidine-3'-phosphate
  modified_base 10: mod_base = OTHER; note = 2'-O-methyladenosine-3'-phosphate
  modified_base 11: mod_base = OTHER; note = 2'-O-methylcytidine-3'-phosphate
  modified_base 12: mod_base = OTHER; note = 2'-O-methyladenosine-3'-phosphate
  modified_base 13: mod_base = OTHER; note = 2'-O-methylguanosine-3'-phosphate
  modified_base 14: mod_base = OTHER; note = 2'-deoxy-2'-fluorouridine-3'-phosphate
  modified_base 15: mod_base = OTHER; note = 2'-O-methylcytidine-3'-phosphate
  modified_base 16: mod_base = OTHER; note = 2'-deoxy-2'-fluorocytidine-3'-phosphate
  modified_base 17: mod_base = OTHER; note = 2'-O-methyladenosine-3'-phosphate
  modified_base 18: mod_base = OTHER; note = 2'-O-methylcytidine-3'-phosphate
  modified_base 19: mod_base = OTHER; note = 2'-O-methylcytidine-3'-phosphate
  modified_base 20: mod_base = OTHER; note = 2'-O-methyluridine-3'-phosphate
  modified_base 21: mod_base = OTHER; note = 2'-O-methylguanosine-3'-phosphorothioate
  modified_base 22: mod_base = OTHER; note = 2'-O-methylcytidine-3'-phosphorothioate
  modified_base 23: mod_base = OTHER; note = 2'-O-methyluridine
aatgcggtcacagtccacctgct

SEQ ID NO: 1109 - RNA, 23 nt, synthetic construct
  source 1..23: mol_type = other RNA
  modified_base 1: mod_base = OTHER; note = 2'-O-methyladenosine-3'-phosphorothioate
  modified_base 2: mod_base = OTHER; note = 2'-deoxy-2'-fluoroguanosine-3'-phosphorothioate
  modified_base 3: mod_base = OTHER; note = 2'-O-methyladenosine-3'-phosphate
  modified_base 4: mod_base = OTHER; note = 2'-O-methylcytidine-3'-phosphate
  modified_base 5: mod_base = OTHER; note = 2'-O-methyluridine-3'-phosphate
  modified_base 6: mod_base = OTHER; note = 2'-deoxy-2'-fluorocytidine-3'-phosphate
  modified_base 7: mod_base = OTHER; note = 2'-O-methyluridine-3'-phosphate
  modified_base 8: mod_base = OTHER; note = 2'-deoxy-2'-fluoroguanosine-3'-phosphate
  modified_base 9: mod_base = OTHER; note = 2'-deoxy-2'-fluorouridine-3'-phosphate
  modified_base 10: mod_base = OTHER; note = 2'-O-methyluridine-3'-phosphate
  modified_base 11: mod_base = OTHER; note = 2'-O-methylguanosine-3'-phosphate
  modified_base 12: mod_base = OTHER; note = 2'-O-methylguanosine-3'-phosphate
  modified_base 13: mod_base = OTHER; note = 2'-O-methylcytidine-3'-phosphate
  modified_base 14: mod_base = OTHER; note = 2'-deoxy-2'-fluorouridine-3'-phosphate
  modified_base 15: mod_base = OTHER; note = 2'-O-methylguanosine-3'-phosphate
  modified_base 16: mod_base = OTHER; note = 2'-deoxy-2'-fluorouridine-3'-phosphate
  modified_base 17: mod_base = OTHER; note = 2'-O-methyluridine-3'-phosphate
  modified_base 18: mod_base = OTHER; note = 2'-O-methylguanosine-3'-phosphate
  modified_base 19: mod_base = OTHER; note = 2'-O-methylguanosine-3'-phosphate
  modified_base 20: mod_base = OTHER; note = 2'-O-methylcytidine-3'-phosphate
  modified_base 21: mod_base = OTHER; note = 2'-O-methylguanosine-3'-phosphorothioate
  modified_base 22: mod_base = OTHER; note = 2'-O-methylcytidine-3'-phosphorothioate
  modified_base 23: mod_base = OTHER; note = 2'-O-methyladenosine
agactctgttggctgttggcgca

SEQ ID NO: 1110 - RNA, 23 nt, synthetic construct
  source 1..23: mol_type = other RNA
  modified_base 1: mod_base = OTHER; note = 2'-O-methyladenosine-3'-phosphorothioate
  modified_base 2: mod_base = OTHER; note = 2'-deoxy-2'-fluoroadenosine-3'-phosphorothioate
  modified_base 3: mod_base = OTHER; note = 2'-O-methylguanosine-3'-phosphate
  modified_base 4: mod_base = OTHER; note = 2'-O-methylcytidine-3'-phosphate
  modified_base 5: mod_base = OTHER; note = 2'-O-methyluridine-3'-phosphate
  modified_base 6: mod_base = OTHER; note = 2'-deoxy-2'-fluorocytidine-3'-phosphate
  modified_base 7: mod_base = OTHER; note = 2'-O-methylguanosine-3'-phosphate
  modified_base 8: mod_base = OTHER; note = 2'-deoxy-2'-fluorouridine-3'-phosphate
  modified_base 9: mod_base = OTHER; note = 2'-deoxy-2'-fluoroadenosine-3'-phosphate
  modified_base 10: mod_base = OTHER; note = 2'-O-methylguanosine-3'-phosphate
  modified_base 11: mod_base = OTHER; note = 2'-O-methyluridine-3'-phosphate
  modified_base 12: mod_base = OTHER; note = 2'-O-methylcytidine-3'-phosphate
  modified_base 13: mod_base = OTHER; note = 2'-O-methylguanosine-3'-phosphate
  modified_base 14: mod_base = OTHER; note = 2'-deoxy-2'-fluorouridine-3'-phosphate
  modified_base 15: mod_base = OTHER; note = 2'-O-methylguanosine-3'-phosphate
  modified_base 16: mod_base = OTHER; note = 2'-deoxy-2'-fluoroadenosine-3'-phosphate
  modified_base 17: mod_base = OTHER; note = 2'-O-methylcytidine-3'-phosphate
  modified_base 18: mod_base = OTHER; note = 2'-O-methyladenosine-3'-phosphate
  modified_base 19: mod_base = OTHER; note = 2'-O-methylguanosine-3'-phosphate
  modified_base 20: mod_base = OTHER; note = 2'-O-methyladenosine-3'-phosphate
  modified_base 21: mod_base = OTHER; note = 2'-O-methylguanosine-3'-phosphorothioate
  modified_base 22: mod_base = OTHER; note = 2'-O-methylcytidine-3'-phosphorothioate
  modified_base 23: mod_base = OTHER; note = 2'-O-methylguanosine
aagctcgtagtcgtgacagagcg

SEQ ID NO: 1111 - RNA, 23 nt, synthetic construct
  source 1..23: mol_type = other RNA
  modified_base 1: mod_base = OTHER; note = 2'-O-methyladenosine-3'-phosphorothioate
  modified_base 2: mod_base = OTHER; note = 2'-deoxy-2'-fluoroguanosine-3'-phosphorothioate
  modified_base 3: mod_base = OTHER; note = 2'-O-methylcytidine-3'-phosphate
  modified_base 4: mod_base = OTHER; note = 2'-O-methyladenosine-3'-phosphate
  modified_base 5: mod_base = OTHER; note = 2'-O-methylcytidine-3'-phosphate
  modified_base 6: mod_base = OTHER; note = 2'-deoxy-2'-fluoroguanosine-3'-phosphate
  modified_base 7: mod_base = OTHER; note = 2'-O-methyluridine-3'-phosphate
  modified_base 8: mod_base = OTHER; note = 2'-deoxy-2'-fluoroadenosine-3'-phosphate
  modified_base 9: mod_base = OTHER; note = 2'-deoxy-2'-fluorouridine-3'-phosphate
  modified_base 10: mod_base = OTHER; note = 2'-O-methyluridine-3'-phosphate
  modified_base 11: mod_base = OTHER; note = 2'-O-methylcytidine-3'-phosphate
  modified_base 12: mod_base = OTHER; note = 2'-O-methylguanosine-3'-phosphate
  modified_base 13: mod_base = OTHER; note = 2'-O-methylcytidine-3'-phosphate
  modified_base 14: mod_base = OTHER; note = 2'-deoxy-2'-fluoroadenosine-3'-phosphate
  modified_base 15: mod_base = OTHER; note = 2'-O-methylguanosine-3'-phosphate
  modified_base 16: mod_base = OTHER; note = 2'-deoxy-2'-fluorocytidine-3'-phosphate
  modified_base 17: mod_base = OTHER; note = 2'-O-methyladenosine-3'-phosphate
  modified_base 18: mod_base = OTHER; note = 2'-O-methylguanosine-3'-phosphate
  modified_base 19: mod_base = OTHER; note = 2'-O-methyladenosine-3'-phosphate
  modified_base 20: mod_base = OTHER; note = 2'-O-methylguanosine-3'-phosphate
  modified_base 21: mod_base = OTHER; note = 2'-O-methyladenosine-3'-phosphorothioate
  modified_base 22: mod_base = OTHER; note = 2'-O-methyladenosine-3'-phosphorothioate
  modified_base 23: mod_base = OTHER; note = 2'-O-methylcytidine
agcacgtattcgcagcagagaac

SEQ ID NO: 1112 - RNA, 23 nt, synthetic construct
  source 1..23: mol_type = other RNA
  modified_base 1: mod_base = OTHER; note = 2'-O-methyladenosine-3'-phosphorothioate
  modified_base 2: mod_base = OTHER; note = 2'-deoxy-2'-fluorouridine-3'-phosphorothioate
  modified_base 3: mod_base = OTHER; note = 2'-O-methyladenosine-3'-phosphate
  modified_base 4: mod_base = OTHER; note = 2'-O-methylguanosine-3'-phosphate
  modified_base 5: mod_base = OTHER; note = 2'-O-methylguanosine-3'-phosphate
  modified_base 6: mod_base = OTHER; note = 2'-deoxy-2'-fluorocytidine-3'-phosphate
  modified_base 7: mod_base = OTHER; note = 2'-O-methyladenosine-3'-phosphate
  modified_base 8: mod_base = OTHER; note = 2'-deoxy-2'-fluorocytidine-3'-phosphate
  modified_base 9: mod_base = OTHER; note = 2'-deoxy-2'-fluoroadenosine-3'-phosphate
  modified_base 10: mod_base = OTHER; note = 2'-O-methylguanosine-3'-phosphate
  modified_base 11: mod_base = OTHER; note = 2'-O-methylcytidine-3'-phosphate
  modified_base 12: mod_base = OTHER; note = 2'-O-methyladenosine-3'-phosphate
  modified_base 13: mod_base = OTHER; note = 2'-O-methylguanosine-3'-phosphate
  modified_base 14: mod_base = OTHER; note = 2'-deoxy-2'-fluoroguanosine-3'-phosphate
  modified_base 15: mod_base = OTHER; note = 2'-O-methylcytidine-3'-phosphate
  modified_base 16: mod_base = OTHER; note = 2'-deoxy-2'-fluorouridine-3'-phosphate
  modified_base 17: mod_base = OTHER; note = 2'-O-methylcytidine-3'-phosphate
  modified_base 18: mod_base = OTHER; note = 2'-O-methylcytidine-3'-phosphate
  modified_base 19: mod_base = OTHER; note = 2'-O-methylguanosine-3'-phosphate
  modified_base 20: mod_base = OTHER; note = 2'-O-methyluridine-3'-phosphate
  modified_base 21: mod_base = OTHER; note = 2'-O-methylguanosine-3'-phosphorothioate
  modified_base 22: mod_base = OTHER; note = 2'-O-methylcytidine-3'-phosphorothioate
  modified_base 23: mod_base = OTHER; note = 2'-O-methyluridine
ataggcacagcaggctccgtgct

SEQ ID NO: 1113 - RNA, 23 nt, synthetic construct
  source 1..23: mol_type = other RNA
  modified_base 1: mod_base = OTHER; note = 2'-O-methyladenosine-3'-phosphorothioate
  modified_base 2: mod_base = OTHER; note = 2'-deoxy-2'-fluorocytidine-3'-phosphorothioate
  modified_base 3: mod_base = OTHER; note = 2'-O-methyluridine-3'-phosphate
  modified_base 4: mod_base = OTHER; note = 2'-O-methyluridine-3'-phosphate
  modified_base 5: mod_base = OTHER; note = 2'-O-methyluridine-3'-phosphate
  modified_base 6: mod_base = OTHER; note = 2'-deoxy-2'-fluorouridine-3'-phosphate
  modified_base 7: mod_base = OTHER; note = 2'-O-methylcytidine-3'-phosphate
  modified_base 8: mod_base = OTHER; note = 2'-deoxy-2'-fluoroguanosine-3'-phosphate
  modified_base 9: mod_base = OTHER; note = 2'-deoxy-2'-fluoroguanosine-3'-phosphate
  modified_base 10: mod_base = OTHER; note = 2'-O-methyluridine-3'-phosphate
  modified_base 11: mod_base = OTHER; note = 2'-O-methyluridine-3'-phosphate
  modified_base 12: mod_base = OTHER; note = 2'-O-methylguanosine-3'-phosphate
  modified_base 13: mod_base = OTHER; note = 2'-O-methylcytidine-3'-phosphate
  modified_base 14: mod_base = OTHER; note = 2'-deoxy-2'-fluorouridine-3'-phosphate
  modified_base 15: mod_base = OTHER; note = 2'-O-methylguanosine-3'-phosphate
  modified_base 16: mod_base = OTHER; note = 2'-deoxy-2'-fluorouridine-3'-phosphate
  modified_base 17: mod_base = OTHER; note = 2'-O-methylguanosine-3'-phosphate
  modified_base 18: mod_base = OTHER; note = 2'-O-methylguanosine-3'-phosphate
  modified_base 19: mod_base = OTHER; note = 2'-O-methyluridine-3'-phosphate
  modified_base 20: mod_base = OTHER; note = 2'-O-methylcytidine-3'-phosphate
  modified_base 21: mod_base = OTHER; note = 2'-O-methyluridine-3'-phosphorothioate
  modified_base 22: mod_base = OTHER; note = 2'-O-methylguanosine-3'-phosphorothioate
  modified_base 23: mod_base = OTHER; note = 2'-O-methylguanosine
acttttcggttgctgtggtctgg

SEQ ID NO: 1114 - RNA, 23 nt, synthetic construct
  source 1..23: mol_type = other RNA
  modified_base 1: mod_base = OTHER; note = 2'-O-methyladenosine-3'-phosphorothioate
  modified_base 2: mod_base = OTHER; note = 2'-deoxy-2'-fluoroadenosine-3'-phosphorothioate
  modified_base 3: mod_base = OTHER; note = 2'-O-methylguanosine-3'-phosphate
  modified_base 4: mod_base = OTHER; note = 2'-O-methylcytidine-3'-phosphate
  modified_base 5: mod_base = OTHER; note = 2'-O-methyluridine-3'-phosphate
  modified_base 6: mod_base = OTHER; note = 2'-deoxy-2'-fluoroguanosine-3'-phosphate
  modified_base 7: mod_base = OTHER; note = 2'-O-methylguanosine-3'-phosphate
  modified_base 8: mod_base = OTHER; note = 2'-deoxy-2'-fluoroadenosine-3'-phosphate
  modified_base 9: mod_base = OTHER; note = 2'-deoxy-2'-fluorocytidine-3'-phosphate
  modified_base 10: mod_base = OTHER; note = 2'-O-methylcytidine-3'-phosphate
  modified_base 11: mod_base = OTHER; note = 2'-O-methylcytidine-3'-phosphate
  modified_base 12: mod_base = OTHER; note = 2'-O-methyladenosine-3'-phosphate
  modified_base 13: mod_base = OTHER; note = 2'-O-methylguanosine-3'-phosphate
  modified_base 14: mod_base = OTHER; note = 2'-deoxy-2'-fluorouridine-3'-phosphate
  modified_base 15: mod_base = OTHER; note = 2'-O-methylcytidine-3'-phosphate
  modified_base 16: mod_base = OTHER; note = 2'-deoxy-2'-fluorouridine-3'-phosphate
  modified_base 17: mod_base = OTHER; note = 2'-O-methylguanosine-3'-phosphate
  modified_base 18: mod_base = OTHER; note = 2'-O-methylcytidine-3'-phosphate
  modified_base 19: mod_base = OTHER; note = 2'-O-methylguanosine-3'-phosphate
  modified_base 20: mod_base = OTHER; note = 2'-O-methyladenosine-3'-phosphate
  modified_base 21: mod_base = OTHER; note = 2'-O-methylguanosine-3'-phosphorothioate
  modified_base 22: mod_base = OTHER; note = 2'-O-methylguanosine-3'-phosphorothioate
  modified_base 23: mod_base = OTHER; note = 2'-O-methyluridine
aagctggacccagtctgcgaggt

SEQ ID NO: 1115 - RNA, 23 nt, synthetic construct
  source 1..23: mol_type = other RNA
  modified_base 1: mod_base = OTHER; note = 2'-O-methyladenosine-3'-phosphorothioate
  modified_base 2: mod_base = OTHER; note = 2'-deoxy-2'-fluorocytidine-3'-phosphorothioate
  modified_base 3: mod_base = OTHER; note = 2'-O-methyladenosine-3'-phosphate
  modified_base 4: mod_base = OTHER; note = 2'-O-methyluridine-3'-phosphate
  modified_base 5: mod_base = OTHER; note = 2'-O-methylcytidine-3'-phosphate
  modified_base 6: mod_base = OTHER; note = 2'-deoxy-2'-fluoroadenosine-3'-phosphate
  modified_base 7: mod_base = OTHER; note = 2'-O-methyladenosine-3'-phosphate
  modified_base 8: mod_base = OTHER; note = 2'-deoxy-2'-fluoroadenosine-3'-phosphate
  modified_base 9: mod_base = OTHER; note = 2'-deoxy-2'-fluorocytidine-3'-phosphate
  modified_base 10: mod_base = OTHER; note = 2'-O-methylcytidine-3'-phosphate
  modified_base 11: mod_base = OTHER; note = 2'-O-methyladenosine-3'-phosphate
  modified_base 12: mod_base = OTHER; note = 2'-O-methylcytidine-3'-phosphate
  modified_base 13: mod_base = OTHER; note = 2'-O-methyluridine-3'-phosphate
  modified_base 14: mod_base = OTHER; note = 2'-deoxy-2'-fluorocytidine-3'-phosphate
  modified_base 15: mod_base = OTHER; note = 2'-O-methyluridine-3'-phosphate
  modified_base 16: mod_base = OTHER; note = 2'-deoxy-2'-fluoroguanosine-3'-phosphate
  modified_base 17: mod_base = OTHER; note = 2'-O-methyluridine-3'-phosphate
  modified_base 18: mod_base = OTHER; note = 2'-O-methylcytidine-3'-phosphate
  modified_base 19: mod_base = OTHER; note = 2'-O-methylcytidine-3'-phosphate
  modified_base 20: mod_base = OTHER; note = 2'-O-methyladenosine-3'-phosphate
  modified_base 21: mod_base = OTHER; note = 2'-O-methylcytidine-3'-phosphorothioate
  modified_base 22: mod_base = OTHER; note = 2'-O-methyluridine-3'-phosphorothioate
  modified_base 23: mod_base = OTHER; note = 2'-O-methylguanosine
acatcaaaccactctgtccactg

SEQ ID NO: 1116 - RNA, 23 nt, synthetic construct
  source 1..23: mol_type = other RNA
  modified_base 1: mod_base = OTHER; note = 2'-O-methyladenosine-3'-phosphorothioate
  modified_base 2: mod_base = OTHER; note = 2'-deoxy-2'-fluorocytidine-3'-phosphorothioate
  modified_base 3: mod_base = OTHER; note = 2'-O-methyluridine-3'-phosphate
  modified_base 4: mod_base = OTHER; note = 2'-O-methylcytidine-3'-phosphate
  modified_base 5: mod_base = OTHER; note = 2'-O-methylcytidine-3'-phosphate
  modified_base 6: mod_base = OTHER; note = 2'-deoxy-2'-fluoroadenosine-3'-phosphate
  modified_base 7: mod_base = OTHER; note = 2'-O-methyladenosine-3'-phosphate
  modified_base 8: mod_base = OTHER; note = 2'-deoxy-2'-fluoroguanosine-3'-phosphate
  modified_base 9: mod_base = OTHER; note = 2'-deoxy-2'-fluorouridine-3'-phosphate
  modified_base 10: mod_base = OTHER; note = 2'-O-methyluridine-3'-phosphate
  modified_base 11: mod_base = OTHER; note = 2'-O-methylguanosine-3'-phosphate
  modified_base 12: mod_base = OTHER; note = 2'-O-methyluridine-3'-phosphate
  modified_base 13: mod_base = OTHER; note = 2'-O-methyluridine-3'-phosphate
  modified_base 14: mod_base = OTHER; note = 2'-deoxy-2'-fluorocytidine-3'-phosphate
  modified_base 15: mod_base = OTHER; note = 2'-O-methyladenosine-3'-phosphate
  modified_base 16: mod_base = OTHER; note = 2'-deoxy-2'-fluoroguanosine-3'-phosphate
  modified_base 17: mod_base = OTHER; note = 2'-O-methyladenosine-3'-phosphate
  modified_base 18: mod_base = OTHER; note = 2'-O-methylcytidine-3'-phosphate
  modified_base 19: mod_base = OTHER; note = 2'-O-methyluridine-3'-phosphate
  modified_base 20: mod_base = OTHER; note = 2'-O-methyluridine-3'-phosphate
  modified_base 21: mod_base = OTHER; note = 2'-O-methylguanosine-3'-phosphorothioate
  modified_base 22: mod_base = OTHER; note = 2'-O-methylguanosine-3'-phosphorothioate
  modified_base 23: mod_base = OTHER; note = 2'-O-methylguanosine
actccaagttgttcagacttggg

SEQ ID NO: 1117 - RNA, 23 nt, synthetic construct
  source 1..23: mol_type = other RNA
  modified_base 1: mod_base = OTHER; note = 2'-O-methyladenosine-3'-phosphorothioate
  modified_base 2: mod_base = OTHER; note = 2'-deoxy-2'-fluoroguanosine-3'-phosphorothioate
  modified_base 3: mod_base = OTHER; note = 2'-O-methyladenosine-3'-phosphate
  modified_base 4: mod_base = OTHER; note = 2'-O-methyluridine-3'-phosphate
  modified_base 5: mod_base = OTHER; note = 2'-O-methylcytidine-3'-phosphate
  modified_base 6: mod_base = OTHER; note = 2'-deoxy-2'-fluorouridine-3'-phosphate
  modified_base 7: mod_base = OTHER; note = 2'-O-methyluridine-3'-phosphate
  modified_base 8: mod_base = OTHER; note = 2'-deoxy-2'-fluoroadenosine-3'-phosphate
  modified_base 9: mod_base = OTHER; note = 2'-deoxy-2'-fluorouridine-3'-phosphate
  modified_base 10: mod_base = OTHER; note = 2'-O-methylcytidine-3'-phosphate
  modified_base 11: mod_base = OTHER; note = 2'-O-methylguanosine-3'-phosphate
  modified_base 12: mod_base = OTHER; note = 2'-O-methyluridine-3'-phosphate
  modified_base 13: mod_base = OTHER; note = 2'-O-methyladenosine-3'-phosphate
  modified_base 14: mod_base = OTHER; note = 2'-deoxy-2'-fluoroguanosine-3'-phosphate
  modified_base 15: mod_base = OTHER; note = 2'-O-methylguanosine-3'-phosphate
  modified_base 16: mod_base = OTHER; note = 2'-deoxy-2'-fluoroadenosine-3'-phosphate
  modified_base 17: mod_base = OTHER; note = 2'-O-methylcytidine-3'-phosphate
  modified_base 18: mod_base = OTHER; note = 2'-O-methyluridine-3'-phosphate
  modified_base 19: mod_base = OTHER; note = 2'-O-methylcytidine-3'-phosphate
  modified_base 20: mod_base = OTHER; note = 2'-O-methyladenosine-3'-phosphate
  modified_base 21: mod_base = OTHER; note = 2'-O-methyladenosine-3'-phosphorothioate
  modified_base 22: mod_base = OTHER; note = 2'-O-methylcytidine-3'-phosphorothioate
  modified_base 23: mod_base = OTHER; note = 2'-O-methylguanosine
agatcttatcgtaggactcaacg

SEQ ID NO: 1118 - RNA, 23 nt, synthetic construct
  source 1..23: mol_type = other RNA
  modified_base 1: mod_base = OTHER; note = 2'-O-methyladenosine-3'-phosphorothioate
  modified_base 2: mod_base = OTHER; note = 2'-deoxy-2'-fluoroadenosine-3'-phosphorothioate
  modified_base 3: mod_base = OTHER; note = 2'-O-methylcytidine-3'-phosphate
  modified_base 4: mod_base = OTHER; note = 2'-O-methyluridine-3'-phosphate
  modified_base 5: mod_base = OTHER; note = 2'-O-methylcytidine-3'-phosphate
  modified_base 6: mod_base = OTHER; note = 2'-deoxy-2'-fluorouridine-3'-phosphate
  modified_base 7: mod_base = OTHER; note = 2'-O-methyladenosine-3'-phosphate
  modified_base 8: mod_base = OTHER; note = 2'-deoxy-2'-fluorouridine-3'-phosphate
  modified_base 9: mod_base = OTHER; note = 2'-deoxy-2'-fluoroguanosine-3'-phosphate
  modified_base 10: mod_base = OTHER; note = 2'-O-methyluridine-3'-phosphate
  modified_base 11: mod_base = OTHER; note = 2'-O-methylcytidine-3'-phosphate
  modified_base 12: mod_base = OTHER; note = 2'-O-methylcytidine-3'-phosphate
  modified_base 13: mod_base = OTHER; note = 2'-O-methyluridine-3'-phosphate
  modified_base 14: mod_base = OTHER; note = 2'-deoxy-2'-fluorouridine-3'-phosphate
  modified_base 15: mod_base = OTHER; note = 2'-O-methyladenosine-3'-phosphate
  modified_base 16: mod_base = OTHER; note = 2'-deoxy-2'-fluoroguanosine-3'-phosphate
  modified_base 17: mod_base = OTHER; note = 2'-O-methylguanosine-3'-phosphate
  modified_base 18: mod_base = OTHER; note = 2'-O-methylcytidine-3'-phosphate
  modified_base 19: mod_base = OTHER; note = 2'-O-methyluridine-3'-phosphate
  modified_base 20: mod_base = OTHER; note = 2'-O-methylguanosine-3'-phosphate
  modified_base 21: mod_base = OTHER; note = 2'-O-methylcytidine-3'-phosphorothioate
  modified_base 22: mod_base = OTHER; note = 2'-O-methyluridine-3'-phosphorothioate
  modified_base 23: mod_base = OTHER; note = 2'-O-methylguanosine
aactctatgtccttaggctgctg

SEQ ID NO: 1119 - RNA, 23 nt, synthetic construct
  source 1..23: mol_type = other RNA
  modified_base 1: mod_base = OTHER; note = 2'-O-methyladenosine-3'-phosphorothioate
  modified_base 2: mod_base = OTHER; note = 2'-deoxy-2'-fluorocytidine-3'-phosphorothioate
  modified_base 3: mod_base = OTHER; note = 2'-O-methylcytidine-3'-phosphate
  modified_base 4: mod_base = OTHER; note = 2'-O-methyladenosine-3'-phosphate
  modified_base 5: mod_base = OTHER; note = 2'-O-methylcytidine-3'-phosphate
  modified_base 6: mod_base = OTHER; note = 2'-deoxy-2'-fluorocytidine-3'-phosphate
  modified_base 7: mod_base = OTHER; note = 2'-O-methyluridine-3'-phosphate
  modified_base 8: mod_base = OTHER; note = 2'-deoxy-2'-fluoroguanosine-3'-phosphate
  modified_base 9: mod_base = OTHER; note = 2'-deoxy-2'-fluorouridine-3'-phosphate
  modified_base 10: mod_base = OTHER; note = 2'-O-methylguanosine-3'-phosphate
  modified_base 11: mod_base = OTHER; note = 2'-O-methylcytidine-3'-phosphate
  modified_base 12: mod_base = OTHER; note = 2'-O-methylcytidine-3'-phosphate
  modified_base 13: mod_base = OTHER; note = 2'-O-methyladenosine-3'-phosphate
  modified_base 14: mod_base = OTHER; note = 2'-deoxy-2'-fluoroguanosine-3'-phosphate
  modified_base 15: mod_base = OTHER; note = 2'-O-methylguanosine-3'-phosphate
  modified_base 16: mod_base = OTHER; note = 2'-deoxy-2'-fluoroguanosine-3'-phosphate
  modified_base 17: mod_base = OTHER; note = 2'-O-methyluridine-3'-phosphate
  modified_base 18: mod_base = OTHER; note = 2'-O-methylcytidine-3'-phosphate
  modified_base 19: mod_base = OTHER; note = 2'-O-methylcytidine-3'-phosphate
  modified_base 20: mod_base = OTHER; note = 2'-O-methyladenosine-3'-phosphate
  modified_base 21: mod_base = OTHER; note = 2'-O-methylguanosine-3'-phosphorothioate
  modified_base 22: mod_base = OTHER; note = 2'-O-methyluridine-3'-phosphorothioate
  modified_base 23: mod_base = OTHER; note = 2'-O-methyluridine
accacctgtgccagggtccagtt

SEQ ID NO: 1120 - RNA, 23 nt, synthetic construct
  source 1..23: mol_type = other RNA
  modified_base 1: mod_base = OTHER; note = 2'-O-methyladenosine-3'-phosphorothioate
  modified_base 2: mod_base = OTHER; note = 2'-deoxy-2'-fluorocytidine-3'-phosphorothioate
  modified_base 3: mod_base = OTHER; note = 2'-O-methylguanosine-3'-phosphate
  modified_base 4: mod_base = OTHER; note = 2'-O-methyladenosine-3'-phosphate
  modified_base 5: mod_base = OTHER; note = 2'-O-methyladenosine-3'-phosphate
  modified_base 6: mod_base = OTHER; note = 2'-deoxy-2'-fluoroguanosine-3'-phosphate
  modified_base 7: mod_base = OTHER; note = 2'-O-methyluridine-3'-phosphate
  modified_base 8: mod_base = OTHER; note = 2'-deoxy-2'-fluoroguanosine-3'-phosphate
  modified_base 9: mod_base = OTHER; note = 2'-deoxy-2'-fluoroguanosine-3'-phosphate
  modified_base 10: mod_base = OTHER; note = 2'-O-methyladenosine-3'-phosphate
  modified_base 11: mod_base = OTHER; note = 2'-O-methylcytidine-3'-phosphate
  modified_base 12: mod_base = OTHER; note = 2'-O-methylguanosine-3'-phosphate
  modified_base 13: mod_base = OTHER; note = 2'-O-methyluridine-3'-phosphate
  modified_base 14: mod_base = OTHER; note = 2'-deoxy-2'-fluorocytidine-3'-phosphate
  modified_base 15: mod_base = OTHER; note = 2'-O-methyladenosine-3'-phosphate
  modified_base 16: mod_base = OTHER; note = 2'-deoxy-2'-fluorocytidine-3'-phosphate
  modified_base 17: mod_base = OTHER; note = 2'-O-methyladenosine-3'-phosphate
  modified_base 18: mod_base = OTHER; note = 2'-O-methylguanosine-3'-phosphate
  modified_base 19: mod_base = OTHER; note = 2'-O-methyluridine-3'-phosphate
  modified_base 20: mod_base = OTHER; note = 2'-O-methylguanosine-3'-phosphate
  modified_base 21: mod_base = OTHER; note = 2'-O-methylcytidine-3'-phosphorothioate
  modified_base 22: mod_base = OTHER; note = 2'-O-methyladenosine-3'-phosphorothioate
  modified_base 23: mod_base = OTHER; note = 2'-O-methylcytidine
acgaagtggacgtcacagtgcac

SEQ ID NO: 1121 - RNA, 23 nt, synthetic construct
  source 1..23: mol_type = other RNA
  modified_base 1: mod_base = OTHER; note = 2'-O-methyladenosine-3'-phosphorothioate
  modified_base 2: mod_base = OTHER; note = 2'-deoxy-2'-fluorocytidine-3'-phosphorothioate
  modified_base 3: mod_base = OTHER; note = 2'-O-methylcytidine-3'-phosphate
  modified_base 4: mod_base = OTHER; note = 2'-O-methyluridine-3'-phosphate
  modified_base 5: mod_base = OTHER; note = 2'-O-methylguanosine-3'-phosphate
  modified_base 6: mod_base = OTHER; note = 2'-deoxy-2'-fluorocytidine-3'-phosphate
  modified_base 7: mod_base = OTHER; note = 2'-O-methyluridine-3'-phosphate
  modified_base 8: mod_base = OTHER; note = 2'-deoxy-2'-fluorocytidine-3'-phosphate
  modified_base 9: mod_base = OTHER; note = 2'-deoxy-2'-fluorocytidine-3'-phosphate
  modified_base 10: mod_base = OTHER; note = 2'-O-methylcytidine-3'-phosphate
  modified_base 11: mod_base = OTHER; note = 2'-O-methyladenosine-3'-phosphate
  modified_base 12: mod_base = OTHER; note = 2'-O-methylguanosine-3'-phosphate
  modified_base 13: mod_base = OTHER; note = 2'-O-methyluridine-3'-phosphate
  modified_base 14: mod_base = OTHER; note = 2'-deoxy-2'-fluorouridine-3'-phosphate
  modified_base 15: mod_base = OTHER; note = 2'-O-methylcytidine-3'-phosphate
  modified_base 16: mod_base = OTHER; note = 2'-deoxy-2'-fluorocytidine-3'-phosphate
  modified_base 17: mod_base = OTHER; note = 2'-O-methyluridine-3'-phosphate
  modified_base 18: mod_base = OTHER; note = 2'-O-methylguanosine-3'-phosphate
  modified_base 19: mod_base = OTHER; note = 2'-O-methylcytidine-3'-phosphate
  modified_base 20: mod_base = OTHER; note = 2'-O-methyladenosine-3'-phosphate
  modified_base 21: mod_base = OTHER; note = 2'-O-methylcytidine-3'-phosphorothioate
  modified_base 22: mod_base = OTHER; note = 2'-O-methyladenosine-3'-phosphorothioate
  modified_base 23: mod_base = OTHER; note = 2'-O-methylcytidine
acctgctcccagttcctgcacac

SEQ ID NO: 1122 - RNA, 23 nt, synthetic construct
  source 1..23: mol_type = other RNA
  modified_base 1: mod_base = OTHER; note = 2'-O-methyladenosine-3'-phosphorothioate
  modified_base 2: mod_base = OTHER; note = 2'-deoxy-2'-fluorouridine-3'-phosphorothioate
  modified_base 3: mod_base = OTHER; note = 2'-O-methylguanosine-3'-phosphate
  modified_base 4: mod_base = OTHER; note = 2'-O-methyluridine-3'-phosphate
  modified_base 5: mod_base = OTHER; note = 2'-O-methyladenosine-3'-phosphate
  modified_base 6: mod_base = OTHER; note = 2'-deoxy-2'-fluoroguanosine-3'-phosphate
  modified_base 7: mod_base = OTHER; note = 2'-O-methyluridine-3'-phosphate
  modified_base 8: mod_base = OTHER; note = 2'-deoxy-2'-fluorouridine-3'-phosphate
  modified_base 9: mod_base = OTHER; note = 2'-deoxy-2'-fluoroguanosine-3'-phosphate
  modified_base 10: mod_base = OTHER; note = 2'-O-methyluridine-3'-phosphate
  modified_base 11: mod_base = OTHER; note = 2'-O-methyladenosine-3'-phosphate
  modified_base 12: mod_base = OTHER; note = 2'-O-methylguanosine-3'-phosphate
  modified_base 13: mod_base = OTHER; note = 2'-O-methylcytidine-3'-phosphate
  modified_base 14: mod_base = OTHER; note = 2'-deoxy-2'-fluoroadenosine-3'-phosphate
  modified_base 15: mod_base = OTHER; note = 2'-O-methylcytidine-3'-phosphate
  modified_base 16: mod_base = OTHER; note = 2'-deoxy-2'-fluoroadenosine-3'-phosphate
  modified_base 17: mod_base = OTHER; note = 2'-O-methyluridine-3'-phosphate
  modified_base 18: mod_base = OTHER; note = 2'-O-methylcytidine-3'-phosphate
  modified_base 19: mod_base = OTHER; note = 2'-O-methyluridine-3'-phosphate
  modified_base 20: mod_base = OTHER; note = 2'-O-methyluridine-3'-phosphate
  modified_base 21: mod_base = OTHER; note = 2'-O-methylguanosine-3'-phosphorothioate
  modified_base 22: mod_base = OTHER; note = 2'-O-methyladenosine-3'-phosphorothioate
  modified_base 23: mod_base = OTHER; note = 2'-O-methyladenosine
atgtagttgtagcacatcttgaa

SEQ ID NO: 1123 - RNA, 23 nt, synthetic construct
  source 1..23: mol_type = other RNA
  modified_base 1: mod_base = OTHER; note = 2'-O-methyladenosine-3'-phosphorothioate
  modified_base 2: mod_base = OTHER; note = 2'-deoxy-2'-fluoroadenosine-3'-phosphorothioate
  modified_base 3: mod_base = OTHER; note = 2'-O-methylguanosine-3'-phosphate
  modified_base 4: mod_base = OTHER; note = 2'-O-methyluridine-3'-phosphate
  modified_base 5: mod_base = OTHER; note = 2'-O-methylguanosine-3'-phosphate
  modified_base 6: mod_base = OTHER; note = 2'-deoxy-2'-fluoroguanosine-3'-phosphate
  modified_base 7: mod_base = OTHER; note = 2'-O-methyluridine-3'-phosphate
  modified_base 8: mod_base = OTHER; note = 2'-deoxy-2'-fluorocytidine-3'-phosphate
  modified_base 9: mod_base = OTHER; note = 2'-deoxy-2'-fluoroguanosine-3'-phosphate
  modified_base 10: mod_base = OTHER; note = 2'-O-methyluridine-3'-phosphate
  modified_base 11: mod_base = OTHER; note = 2'-O-methylcytidine-3'-phosphate
  modified_base 12: mod_base = OTHER; note = 2'-O-methyladenosine-3'-phosphate
  modified_base 13: mod_base = OTHER; note = 2'-O-methylcytidine-3'-phosphate
  modified_base 14: mod_base = OTHER; note = 2'-deoxy-2'-fluorouridine-3'-phosphate
  modified_base 15: mod_base = OTHER; note = 2'-O-methylguanosine-3'-phosphate
  modified_base 16: mod_base = OTHER; note = 2'-deoxy-2'-fluorocytidine-3'-phosphate
  modified_base 17: mod_base = OTHER; note = 2'-O-methyladenosine-3'-phosphate
  modified_base 18: mod_base = OTHER; note = 2'-O-methylguanosine-3'-phosphate
  modified_base 19: mod_base = OTHER; note = 2'-O-methylcytidine-3'-phosphate
  modified_base 20: mod_base = OTHER; note = 2'-O-methyladenosine-3'-phosphate
  modified_base 21: mod_base = OTHER; note = 2'-O-methylguanosine-3'-phosphorothioate
  modified_base 22: mod_base = OTHER; note = 2'-O-methyladenosine-3'-phosphorothioate
  modified_base 23: mod_base = OTHER; note = 2'-O-methylguanosine
aagtggtcgtcactgcagcagag

SEQ ID NO: 1124 - RNA, 23 nt, synthetic construct
  source 1..23: mol_type = other RNA
  modified_base 1: mod_base = OTHER; note = 2'-O-methyladenosine-3'-phosphorothioate
  modified_base 2: mod_base = OTHER; note = 2'-deoxy-2'-fluorocytidine-3'-phosphorothioate
  modified_base 3: mod_base = OTHER; note = 2'-O-methylguanosine-3'-phosphate
  modified_base 4: mod_base = OTHER; note = 2'-O-methyluridine-3'-phosphate
  modified_base 5: mod_base = OTHER; note = 2'-O-methylcytidine-3'-phosphate
  modified_base 6: mod_base = OTHER; note = 2'-deoxy-2'-fluorouridine-3'-phosphate
  modified_base 7: mod_base = OTHER; note = 2'-O-methylcytidine-3'-phosphate
  modified_base 8: mod_base = OTHER; note = 2'-deoxy-2'-fluorocytidine-3'-phosphate
  modified_base 9: mod_base = OTHER; note = 2'-deoxy-2'-fluoroadenosine-3'-phosphate
  modified_base 10: mod_base = OTHER; note = 2'-O-methylguanosine-3'-phosphate
  modified_base 11: mod_base = OTHER; note = 2'-O-methylcytidine-3'-phosphate
  modified_base 12: mod_base = OTHER; note = 2'-O-methyluridine-3'-phosphate
  modified_base 13: mod_base = OTHER; note = 2'-O-methylcytidine-3'-phosphate
  modified_base 14: mod_base = OTHER; note = 2'-deoxy-2'-fluorouridine-3'-phosphate
  modified_base 15: mod_base = OTHER; note = 2'-O-methylguanosine-3'-phosphate
  modified_base 16: mod_base = OTHER; note = 2'-deoxy-2'-fluorouridine-3'-phosphate
  modified_base 17: mod_base = OTHER; note = 2'-O-methylguanosine-3'-phosphate
  modified_base 18: mod_base = OTHER; note = 2'-O-methylguanosine-3'-phosphate
  modified_base 19: mod_base = OTHER; note = 2'-O-methyluridine-3'-phosphate
  modified_base 20: mod_base = OTHER; note = 2'-O-methylcytidine-3'-phosphate
  modified_base 21: mod_base = OTHER; note = 2'-O-methylguanosine-3'-phosphorothioate
  modified_base 22: mod_base = OTHER; note = 2'-O-methylguanosine-3'-phosphorothioate
  modified_base 23: mod_base = OTHER; note = 2'-O-methyluridine
acgtctccagctctgtggtcggt

SEQ ID NO: 1125 - RNA, 23 nt, synthetic construct
  source 1..23: mol_type = other RNA
  modified_base 1: mod_base = OTHER; note = 2'-O-methyladenosine-3'-phosphorothioate
  modified_base 2: mod_base = OTHER; note = 2'-deoxy-2'-fluoroguanosine-3'-phosphorothioate
  modified_base 3: mod_base = OTHER; note = 2'-O-methyluridine-3'-phosphate
  modified_base 4: mod_base = OTHER; note = 2'-O-methyluridine-3'-phosphate
  modified_base 5: mod_base = OTHER; note = 2'-O-methylguanosine-3'-phosphate
  modified_base 6: mod_base = OTHER; note = 2'-deoxy-2'-fluoroadenosine-3'-phosphate
  modified_base 7: mod_base = OTHER; note = 2'-O-methylguanosine-3'-phosphate
  modified_base 8: mod_base = OTHER; note = 2'-deoxy-2'-fluoroadenosine-3'-phosphate
  modified_base 9: mod_base = OTHER; note = 2'-deoxy-2'-fluoroadenosine-3'-phosphate
  modified_base 10: mod_base = OTHER; note = 2'-O-methylcytidine-3'-phosphate
  modified_base 11: mod_base = OTHER; note = 2'-O-methyladenosine-3'-phosphate
  modified_base 12: mod_base = OTHER; note = 2'-O-methylguanosine-3'-phosphate
  modified_base 13: mod_base = OTHER; note = 2'-O-methylguanosine-3'-phosphate
  modified_base 14: mod_base = OTHER; note = 2'-deoxy-2'-fluoroguanosine-3'-phosphate
  modified_base 15: mod_base = OTHER; note = 2'-O-methylcytidine-3'-phosphate
  modified_base 16: mod_base = OTHER; note = 2'-deoxy-2'-fluorocytidine-3'-phosphate
  modified_base 17: mod_base = OTHER; note = 2'-O-methyluridine-3'-phosphate
  modified_base 18: mod_base = OTHER; note = 2'-O-methylguanosine-3'-phosphate
  modified_base 19: mod_base = OTHER; note = 2'-O-methylguanosine-3'-phosphate
  modified_base 20: mod_base = OTHER; note = 2'-O-methylguanosine-3'-phosphate
  modified_base 21: mod_base = OTHER; note = 2'-O-methyluridine-3'-phosphorothioate
  modified_base 22: mod_base = OTHER; note = 2'-O-methylguanosine-3'-phosphorothioate
  modified_base 23: mod_base = OTHER; note = 2'-O-methylguanosine
agttgagaacagggcctgggtgg

SEQ ID NO: 1126 - RNA, 23 nt, synthetic construct
  source 1..23: mol_type = other RNA
  modified_base 1: mod_base = OTHER; note = 2'-O-methyladenosine-3'-phosphorothioate
  modified_base 2: mod_base = OTHER; note = 2'-deoxy-2'-fluoroguanosine-3'-phosphorothioate
  modified_base 3: mod_base = OTHER; note = 2'-O-methyladenosine-3'-phosphate
  modified_base 4: mod_base = OTHER; note = 2'-O-methyluridine-3'-phosphate
  modified_base 5: mod_base = OTHER; note = 2'-O-methylguanosine-3'-phosphate
  modified_base 6: mod_base = OTHER; note = 2'-deoxy-2'-fluorouridine-3'-phosphate
  modified_base 7: mod_base = OTHER; note = 2'-O-methylcytidine-3'-phosphate
  modified_base 8: mod_base = OTHER; note = 2'-deoxy-2'-fluoroadenosine-3'-phosphate
  modified_base 9: mod_base = OTHER; note = 2'-deoxy-2'-fluoroguanosine-3'-phosphate
  modified_base 10: mod_base = OTHER; note = 2'-O-methyluridine-3'-phosphate
  modified_base 11: mod_base = OTHER; note = 2'-O-methylcytidine-3'-phosphate
  modified_base 12: mod_base = OTHER; note = 2'-O-methylcytidine-3'-phosphate
  modified_base 13: mod_base = OTHER; note = 2'-O-methyluridine-3'-phosphate
  modified_base 14: mod_base = OTHER; note = 2'-deoxy-2'-fluorouridine-3'-phosphate
  modified_base 15: mod_base = OTHER; note = 2'-O-methylcytidine-3'-phosphate
  modified_base 16: mod_base = OTHER; note = 2'-deoxy-2'-fluorouridine-3'-phosphate
  modified_base 17: mod_base = OTHER; note = 2'-O-methylguanosine-3'-phosphate
  modified_base 18: mod_base = OTHER; note = 2'-O-methyladenosine-3'-phosphate
  modified_base 19: mod_base = OTHER; note = 2'-O-methylguanosine-3'-phosphate
  modified_base 20: mod_base = OTHER; note = 2'-O-methyladenosine-3'-phosphate
  modified_base 21: mod_base = OTHER; note = 2'-O-methylguanosine-3'-phosphorothioate
  modified_base 22: mod_base = OTHER; note = 2'-O-methylguanosine-3'-phosphorothioate
  modified_base 23: mod_base = OTHER; note = 2'-O-methylguanosine
agatgtcagtccttctgagaggg

SEQ ID NO: 1127 - RNA, 23 nt, synthetic construct
  source 1..23: mol_type = other RNA
  modified_base 1: mod_base = OTHER; note = 2'-O-methyladenosine-3'-phosphorothioate
  modified_base 2: mod_base = OTHER; note = 2'-deoxy-2'-fluorocytidine-3'-phosphorothioate
  modified_base 3: mod_base = OTHER; note = 2'-O-methyladenosine-3'-phosphate
  modified_base 4: mod_base = OTHER; note = 2'-O-methyladenosine-3'-phosphate
  modified_base 5: mod_base = OTHER; note = 2'-O-methylguanosine-3'-phosphate
  modified_base 6: mod_base = OTHER; note = 2'-deoxy-2'-fluoroguanosine-3'-phosphate
  modified_base 7: mod_base = OTHER; note = 2'-O-methylguanosine-3'-phosphate
  modified_base 8: mod_base = OTHER; note = 2'-deoxy-2'-fluorouridine-3'-phosphate
  modified_base 9: mod_base = OTHER; note = 2'-deoxy-2'-fluoroguanosine-3'-phosphate
  modified_base 10: mod_base = OTHER; note = 2'-O-methylcytidine-3'-phosphate
  modified_base 11: mod_base = OTHER; note = 2'-O-methyluridine-3'-phosphate
  modified_base 12: mod_base = OTHER; note = 2'-O-methyluridine-3'-phosphate
  modified_base 13: mod_base = OTHER; note = 2'-O-methylguanosine-3'-phosphate
  modified_base 14: mod_base = OTHER; note = 2'-deoxy-2'-fluorouridine-3'-phosphate
  modified_base 15: mod_base = OTHER; note = 2'-O-methylguanosine-3'-phosphate
  modified_base 16: mod_base = OTHER; note = 2'-deoxy-2'-fluorouridine-3'-phosphate
  modified_base 17: mod_base = OTHER; note = 2'-O-methyladenosine-3'-phosphate
  modified_base 18: mod_base = OTHER; note = 2'-O-methyluridine-3'-phosphate
  modified_base 19: mod_base = OTHER; note = 2'-O-methylcytidine-3'-phosphate
  modified_base 20: mod_base = OTHER; note = 2'-O-methyluridine-3'-phosphate
  modified_base 21: mod_base = OTHER; note = 2'-O-methylguanosine-3'-phosphorothioate
  modified_base 22: mod_base = OTHER; note = 2'-O-methylguanosine-3'-phosphorothioate
  modified_base 23: mod_base = OTHER; note = 2'-O-methylguanosine
acaagggtgcttgtgtatctggg

SEQ ID NO: 1128 - RNA, 23 nt, synthetic construct
  source 1..23: mol_type = other RNA
  modified_base 1: mod_base = OTHER; note = 2'-O-methyladenosine-3'-phosphorothioate
  modified_base 2: mod_base = OTHER; note = 2'-deoxy-2'-fluoroguanosine-3'-phosphorothioate
  modified_base 3: mod_base = OTHER; note = 2'-O-methyladenosine-3'-phosphate
  modified_base 4: mod_base = OTHER; note = 2'-O-methylcytidine-3'-phosphate
  modified_base 5: mod_base = OTHER; note = 2'-O-methyladenosine-3'-phosphate
  modified_base 6: mod_base = OTHER; note = 2'-deoxy-2'-fluoroguanosine-3'-phosphate
  modified_base 7: mod_base = OTHER; note = 2'-O-methyluridine-3'-phosphate
  modified_base 8: mod_base = OTHER; note = 2'-deoxy-2'-fluoroguanosine-3'-phosphate
  modified_base 9: mod_base = OTHER; note = 2'-deoxy-2'-fluoroguanosine-3'-phosphate
  modified_base 10: mod_base = OTHER; note = 2'-O-methylguanosine-3'-phosphate
  modified_base 11: mod_base = OTHER; note = 2'-O-methyluridine-3'-phosphate
  modified_base 12: mod_base = OTHER; note = 2'-O-methyluridine-3'-phosphate
  modified_base 13: mod_base = OTHER; note = 2'-O-methylcytidine-3'-phosphate
  modified_base 14: mod_base = OTHER; note = 2'-deoxy-2'-fluorouridine-3'-phosphate
  modified_base 15: mod_base = OTHER; note = 2'-O-methylguanosine-3'-phosphate
  modified_base 16: mod_base = OTHER; note = 2'-deoxy-2'-fluorouridine-3'-phosphate
  modified_base 17: mod_base = OTHER; note = 2'-O-methylguanosine-3'-phosphate
  modified_base 18: mod_base = OTHER; note = 2'-O-methylguanosine-3'-phosphate
  modified_base 19: mod_base = OTHER; note = 2'-O-methyladenosine-3'-phosphate
  modified_base 20: mod_base = OTHER; note = 2'-O-methylguanosine-3'-phosphate
  modified_base 21: mod_base = OTHER; note = 2'-O-methylcytidine-3'-phosphorothioate
  modified_base 22: mod_base = OTHER; note = 2'-O-methylcytidine-3'-phosphorothioate
  modified_base 23: mod_base = OTHER; note = 2'-O-methyluridine
agacagtgggttctgtggagcct

SEQ ID NO: 1129 - RNA, 23 nt, synthetic construct
  source 1..23: mol_type = other RNA
  modified_base 1: mod_base = OTHER; note = 2'-O-methyladenosine-3'-phosphorothioate
  modified_base 2: mod_base = OTHER; note = 2'-deoxy-2'-fluorocytidine-3'-phosphorothioate
  modified_base 3: mod_base = OTHER; note = 2'-O-methyluridine-3'-phosphate
  modified_base 4: mod_base = OTHER; note = 2'-O-methylguanosine-3'-phosphate
  modified_base 5: mod_base = OTHER; note = 2'-O-methyladenosine-3'-phosphate
  modified_base 6: mod_base = OTHER; note = 2'-deoxy-2'-fluoroguanosine-3'-phosphate
  modified_base 7: mod_base = OTHER; note = 2'-O-methylcytidine-3'-phosphate
  modified_base 8: mod_base = OTHER; note = 2'-deoxy-2'-fluoroguanosine-3'-phosphate
  modified_base 9: mod_base = OTHER; note = 2'-deoxy-2'-fluorouridine-3'-phosphate
  modified_base 10: mod_base = OTHER; note = 2'-O-methylguanosine-3'-phosphate
  modified_base 11: mod_base = OTHER; note = 2'-O-methyluridine-3'-phosphate
  modified_base 12: mod_base = OTHER; note = 2'-O-methyluridine-3'-phosphate
  modified_base 13: mod_base = OTHER; note = 2'-O-methylguanosine-3'-phosphate
  modified_base 14: mod_base = OTHER; note = 2'-deoxy-2'-fluoroguanosine-3'-phosphate
  modified_base 15: mod_base = OTHER; note = 2'-O-methyladenosine-3'-phosphate
  modified_base 16: mod_base = OTHER; note = 2'-deoxy-2'-fluoroadenosine-3'-phosphate
  modified_base 17: mod_base = OTHER; note = 2'-O-methylguanosine-3'-phosphate
  modified_base 18: mod_base = OTHER; note = 2'-O-methylguanosine-3'-phosphate
  modified_base 19: mod_base = OTHER; note = 2'-O-methylguanosine-3'-phosphate
  modified_base 20: mod_base = OTHER; note = 2'-O-methyluridine-3'-phosphate
  modified_base 21: mod_base = OTHER; note = 2'-O-methylguanosine-3'-phosphorothioate
  modified_base 22: mod_base = OTHER; note = 2'-O-methylguanosine-3'-phosphorothioate
  modified_base 23: mod_base = OTHER; note = 2'-O-methyladenosine
actgagcgtgttggaagggtgga

SEQ ID NO: 1130 - RNA, 23 nt, synthetic construct
  source 1..23: mol_type = other RNA
  modified_base 1: mod_base = OTHER; note = 2'-O-methyladenosine-3'-phosphorothioate
  modified_base 2: mod_base = OTHER; note = 2'-deoxy-2'-fluoroguanosine-3'-phosphorothioate
  modified_base 3: mod_base = OTHER; note = 2'-O-methylguanosine-3'-phosphate
  modified_base 4: mod_base = OTHER; note = 2'-O-methyladenosine-3'-phosphate
  modified_base 5: mod_base = OTHER; note = 2'-O-methylguanosine-3'-phosphate
  modified_base 6: mod_base = OTHER; note = 2'-deoxy-2'-fluoroguanosine-3'-phosphate
  modified_base 7: mod_base = OTHER; note = 2'-O-methyluridine-3'-phosphate
  modified_base 8: mod_base = OTHER; note = 2'-deoxy-2'-fluorouridine-3'-phosphate
  modified_base 9: mod_base = OTHER; note = 2'-deoxy-2'-fluoroguanosine-3'-phosphate
  modified_base 10: mod_base = OTHER; note = 2'-O-methylcytidine-3'-phosphate
  modified_base 11: mod_base = OTHER; note = 2'-O-methylcytidine-3'-phosphate
  modified_base 12: mod_base = OTHER; note = 2'-O-methyladenosine-3'-phosphate
  modified_base 13: mod_base = OTHER; note = 2'-O-methyluridine-3'-phosphate
  modified_base 14: mod_base = OTHER; note = 2'-deoxy-2'-fluorouridine-3'-phosphate
  modified_base 15: mod_base = OTHER; note = 2'-O-methylguanosine-3'-phosphate
  modified_base 16: mod_base = OTHER; note = 2'-deoxy-2'-fluorouridine-3'-phosphate
  modified_base 17: mod_base = OTHER; note = 2'-O-methyluridine-3'-phosphate
  modified_base 18: mod_base = OTHER; note = 2'-O-methylguanosine-3'-phosphate
  modified_base 19: mod_base = OTHER; note = 2'-O-methyluridine-3'-phosphate
  modified_base 20: mod_base = OTHER; note = 2'-O-methyluridine-3'-phosphate
  modified_base 21: mod_base = OTHER; note = 2'-O-methylguanosine-3'-phosphorothioate
  modified_base 22: mod_base = OTHER; note = 2'-O-methylguanosine-3'-phosphorothioate
  modified_base 23: mod_base = OTHER; note = 2'-O-methylguanosine
aggaggttgccattgttgttggg

SEQ ID NO: 1131 - RNA, 23 nt, synthetic construct
  source 1..23: mol_type = other RNA
  modified_base 1: mod_base = OTHER; note = 2'-O-methyladenosine-3'-phosphorothioate
  modified_base 2: mod_base = OTHER; note = 2'-deoxy-2'-fluoroadenosine-3'-phosphorothioate
  modified_base 3: mod_base = OTHER; note = 2'-O-methylguanosine-3'-phosphate
  modified_base 4: mod_base = OTHER; note = 2'-O-methylcytidine-3'-phosphate
  modified_base 5: mod_base = OTHER; note = 2'-O-methylguanosine-3'-phosphate
  modified_base 6: mod_base = OTHER; note = 2'-deoxy-2'-fluoroguanosine-3'-phosphate
  modified_base 7: mod_base = OTHER; note = 2'-O-methylcytidine-3'-phosphate
  modified_base 8: mod_base = OTHER; note = 2'-deoxy-2'-fluorouridine-3'-phosphate
  modified_base 9: mod_base = OTHER; note = 2'-deoxy-2'-fluorocytidine-3'-phosphate
  modified_base 10: mod_base = OTHER; note = 2'-O-methyluridine-3'-phosphate
  modified_base 11: mod_base = OTHER; note = 2'-O-methyluridine-3'-phosphate
  modified_base 12: mod_base = OTHER; note = 2'-O-methyluridine-3'-phosphate
  modified_base 13: mod_base = OTHER; note = 2'-O-methylguanosine-3'-phosphate
  modified_base 14: mod_base = OTHER; note = 2'-deoxy-2'-fluoroguanosine-3'-phosphate
  modified_base 15: mod_base = OTHER; note = 2'-O-methyladenosine-3'-phosphate
  modified_base 16: mod_base = OTHER; note = 2'-deoxy-2'-fluoroadenosine-3'-phosphate
  modified_base 17: mod_base = OTHER; note = 2'-O-methylguanosine-3'-phosphate
  modified_base 18: mod_base = OTHER; note = 2'-O-methylcytidine-3'-phosphate
  modified_base 19: mod_base = OTHER; note = 2'-O-methylguanosine-3'-phosphate
  modified_base 20: mod_base = OTHER; note = 2'-O-methylguanosine-3'-phosphate
  modified_base 21: mod_base = OTHER; note = 2'-O-methyluridine-3'-phosphorothioate
  modified_base 22: mod_base = OTHER; note = 2'-O-methylguanosine-3'-phosphorothioate
  modified_base 23: mod_base = OTHER; note = 2'-O-methylcytidine
aagcggctctttggaagcggtgc

SEQ ID NO: 1132 - RNA, 23 nt, synthetic construct
  source 1..23: mol_type = other RNA
  modified_base 1: mod_base = OTHER; note = 2'-O-methyladenosine-3'-phosphorothioate
  modified_base 2: mod_base = OTHER; note = 2'-deoxy-2'-fluoroadenosine-3'-phosphorothioate
  modified_base 3: mod_base = OTHER; note = 2'-O-methylguanosine-3'-phosphate
  modified_base 4: mod_base = OTHER; note = 2'-O-methylcytidine-3'-phosphate
  modified_base 5: mod_base = OTHER; note = 2'-O-methyluridine-3'-phosphate
  modified_base 6: mod_base = OTHER; note = 2'-deoxy-2'-fluorocytidine-3'-phosphate
  modified_base 7: mod_base = OTHER; note = 2'-O-methylguanosine-3'-phosphate
  modified_base 8: mod_base = OTHER; note = 2'-deoxy-2'-fluorocytidine-3'-phosphate
  modified_base 9: mod_base = OTHER; note = 2'-deoxy-2'-fluorouridine-3'-phosphate
  modified_base 10: mod_base = OTHER; note = 2'-O-methylcytidine-3'-phosphate
  modified_base 11: mod_base = OTHER; note = 2'-O-methylguanosine-3'-phosphate
  modified_base 12: mod_base = OTHER; note = 2'-O-methyluridine-3'-phosphate
  modified_base 13: mod_base = OTHER; note = 2'-O-methylguanosine-3'-phosphate
  modified_base 14: mod_base = OTHER; note = 2'-deoxy-2'-fluoroadenosine-3'-phosphate
  modified_base 15: mod_base = OTHER; note = 2'-O-methylguanosine-3'-phosphate
  modified_base 16: mod_base = OTHER; note = 2'-deoxy-2'-fluorouridine-3'-phosphate
  modified_base 17: mod_base = OTHER; note = 2'-O-methylguanosine-3'-phosphate
  modified_base 18: mod_base = OTHER; note = 2'-O-methyluridine-3'-phosphate
  modified_base 19: mod_base = OTHER; note = 2'-O-methyluridine-3'-phosphate
  modified_base 20: mod_base = OTHER; note = 2'-O-methylguanosine-3'-phosphate
  modified_base 21: mod_base = OTHER; note = 2'-O-methylguanosine-3'-phosphorothioate
  modified_base 22: mod_base = OTHER; note = 2'-O-methylcytidine-3'-phosphorothioate
  modified_base 23: mod_base = OTHER; note = 2'-O-methylguanosine
aagctcgctcgtgagtgttggcg

SEQ ID NO: 1133 - RNA, 23 nt, synthetic construct
  source 1..23: mol_type = other RNA
  modified_base 1: mod_base = OTHER; note = 2'-O-methyladenosine-3'-phosphorothioate
  modified_base 2: mod_base = OTHER; note = 2'-deoxy-2'-fluorouridine-3'-phosphorothioate
  modified_base 3: mod_base = OTHER; note = 2'-O-methylguanosine-3'-phosphate
  modified_base 4: mod_base = OTHER; note = 2'-O-methylguanosine-3'-phosphate
  modified_base 5: mod_base = OTHER; note = 2'-O-methyluridine-3'-phosphate
  modified_base 6: mod_base = OTHER; note = 2'-deoxy-2'-fluorocytidine-3'-phosphate
  modified_base 7: mod_base = OTHER; note = 2'-O-methyluridine-3'-phosphate
  modified_base 8: mod_base = OTHER; note = 2'-deoxy-2'-fluorocytidine-3'-phosphate
  modified_base 9: mod_base = OTHER; note = 2'-deoxy-2'-fluoroguanosine-3'-phosphate
  modified_base 10: mod_base = OTHER; note = 2'-O-methylguanosine-3'-phosphate
  modified_base 11: mod_base = OTHER; note = 2'-O-methylcytidine-3'-phosphate
  modified_base 12: mod_base = OTHER; note = 2'-O-methylcytidine-3'-phosphate
  modified_base 13: mod_base = OTHER; note = 2'-O-methyluridine-3'-phosphate
  modified_base 14: mod_base = OTHER; note = 2'-deoxy-2'-fluoroguanosine-3'-phosphate
  modified_base 15: mod_base = OTHER; note = 2'-O-methyladenosine-3'-phosphate
  modified_base 16: mod_base = OTHER; note = 2'-deoxy-2'-fluoroguanosine-3'-phosphate
  modified_base 17: mod_base = OTHER; note = 2'-O-methyladenosine-3'-phosphate
  modified_base 18: mod_base = OTHER; note = 2'-O-methylguanosine-3'-phosphate
  modified_base 19: mod_base = OTHER; note = 2'-O-methylguanosine-3'-phosphate
  modified_base 20: mod_base = OTHER; note = 2'-O-methyluridine-3'-phosphate
  modified_base 21: mod_base = OTHER; note = 2'-O-methylguanosine-3'-phosphorothioate
  modified_base 22: mod_base = OTHER; note = 2'-O-methylguanosine-3'-phosphorothioate
  modified_base 23: mod_base = OTHER; note = 2'-O-methyladenosine
atggtctcggcctgagaggtgga

SEQ ID NO: 1134 - RNA, 23 nt, synthetic construct
  source 1..23: mol_type = other RNA
  modified_base 1: mod_base = OTHER; note = 2'-O-methyladenosine-3'-phosphorothioate
  modified_base 2: mod_base = OTHER; note = 2'-deoxy-2'-fluorocytidine-3'-phosphorothioate
  modified_base 3: mod_base = OTHER; note = 2'-O-methyladenosine-3'-phosphate
  modified_base 4: mod_base = OTHER; note = 2'-O-methyluridine-3'-phosphate
  modified_base 5: mod_base = OTHER; note = 2'-O-methyluridine-3'-phosphate
  modified_base 6: mod_base = OTHER; note = 2'-deoxy-2'-fluoroguanosine-3'-phosphate
  modified_base 7: mod_base = OTHER; note = 2'-O-methyluridine-3'-phosphate
  modified_base 8: mod_base = OTHER; note = 2'-deoxy-2'-fluorocytidine-3'-phosphate
  modified_base 9: mod_base = OTHER; note = 2'-deoxy-2'-fluoroguanosine-3'-phosphate
  modified_base 10: mod_base = OTHER; note = 2'-O-methyluridine-3'-phosphate
  modified_base 11: mod_base = OTHER; note = 2'-O-methylcytidine-3'-phosphate
  modified_base 12: mod_base = OTHER; note = 2'-O-methyluridine-3'-phosphate
  modified_base 13: mod_base = OTHER; note = 2'-O-methylcytidine-3'-phosphate
  modified_base 14: mod_base = OTHER; note = 2'-deoxy-2'-fluorouridine-3'-phosphate
  modified_base 15: mod_base = OTHER; note = 2'-O-methylguanosine-3'-phosphate
  modified_base 16: mod_base = OTHER; note = 2'-deoxy-2'-fluorouridine-3'-phosphate
  modified_base 17: mod_base = OTHER; note = 2'-O-methylcytidine-3'-phosphate
  modified_base 18: mod_base = OTHER; note = 2'-O-methylcytidine-3'-phosphate
  modified_base 19: mod_base = OTHER; note = 2'-O-methyluridine-3'-phosphate
  modified_base 20: mod_base = OTHER; note = 2'-O-methylguanosine-3'-phosphate
  modified_base 21: mod_base = OTHER; note = 2'-O-methylguanosine-3'-phosphorothioate
  modified_base 22: mod_base = OTHER; note = 2'-O-methylguanosine-3'-phosphorothioate
  modified_base 23: mod_base = OTHER; note = 2'-O-methylcytidine
acattgtcgtctctgtcctgggc

SEQ ID NO: 1135 - RNA, 23 nt, synthetic construct
  source 1..23: mol_type = other RNA
  modified_base 1: mod_base = OTHER; note = 2'-O-methyladenosine-3'-phosphorothioate
  modified_base 2: mod_base = OTHER; note = 2'-deoxy-2'-fluorouridine-3'-phosphorothioate
  modified_base 3: mod_base = OTHER; note = 2'-O-methylguanosine-3'-phosphate
  modified_base 4: mod_base = OTHER; note = 2'-O-methylguanosine-3'-phosphate
  modified_base 5: mod_base = OTHER; note = 2'-O-methyluridine-3'-phosphate
  modified_base 6: mod_base = OTHER; note = 2'-deoxy-2'-fluoroguanosine-3'-phosphate
  modified_base 7: mod_base = OTHER; note = 2'-O-methylguanosine-3'-phosphate
  modified_base 8: mod_base = OTHER; note = 2'-deoxy-2'-fluorouridine-3'-phosphate
  modified_base 9: mod_base = OTHER; note = 2'-deoxy-2'-fluoroguanosine-3'-phosphate
  modified_base 10: mod_base = OTHER; note = 2'-O-methylguanosine-3'-phosphate
  modified_base 11: mod_base = OTHER; note = 2'-O-methyluridine-3'-phosphate
  modified_base 12: mod_base = OTHER; note = 2'-O-methylguanosine-3'-phosphate
  modified_base 13: mod_base = OTHER; note = 2'-O-methyluridine-3'-phosphate
  modified_base 14: mod_base = OTHER; note = 2'-deoxy-2'-fluorouridine-3'-phosphate
  modified_base 15: mod_base = OTHER; note = 2'-O-methyladenosine-3'-phosphate
  modified_base 16: mod_base = OTHER; note = 2'-deoxy-2'-fluoroguanosine-3'-phosphate
  modified_base 17: mod_base = OTHER; note = 2'-O-methyluridine-3'-phosphate
  modified_base 18: mod_base = OTHER; note = 2'-O-methylcytidine-3'-phosphate
  modified_base 19: mod_base = OTHER; note = 2'-O-methyladenosine-3'-phosphate
  modified_base 20: mod_base = OTHER; note = 2'-O-methyladenosine-3'-phosphate
  modified_base 21: mod_base = OTHER; note = 2'-O-methylguanosine-3'-phosphorothioate
  modified_base 22: mod_base = OTHER; note = 2'-O-methylguanosine-3'-phosphorothioate
  modified_base 23: mod_base = OTHER; note = 2'-O-methylguanosine
atggtggtggtgttagtcaaggg

SEQ ID NO: 1136 - RNA, 23 nt, synthetic construct
  source 1..23: mol_type = other RNA
  modified_base 1: mod_base = OTHER; note = 2'-O-methyladenosine-3'-phosphorothioate
  modified_base 2: mod_base = OTHER; note = 2'-deoxy-2'-fluoroadenosine-3'-phosphorothioate
  modified_base 3: mod_base = OTHER; note = 2'-O-methylcytidine-3'-phosphate
  modified_base 4: mod_base = OTHER; note = 2'-O-methyluridine-3'-phosphate
  modified_base 5: mod_base = OTHER; note = 2'-O-methylcytidine-3'-phosphate
  modified_base 6: mod_base = OTHER; note = 2'-deoxy-2'-fluoroadenosine-3'-phosphate
  modified_base 7: mod_base = OTHER; note = 2'-O-methylcytidine-3'-phosphate
  modified_base 8: mod_base = OTHER; note = 2'-deoxy-2'-fluoroadenosine-3'-phosphate
  modified_base 9: mod_base = OTHER; note = 2'-deoxy-2'-fluorocytidine-3'-phosphate
  modified_base 10: mod_base = OTHER; note = 2'-O-methyluridine-3'-phosphate
  modified_base 11: mod_base = OTHER; note = 2'-O-methyluridine-3'-phosphate
  modified_base 12: mod_base = OTHER; note = 2'-O-methylcytidine-3'-phosphate
  modified_base 13: mod_base = OTHER; note = 2'-O-methylguanosine-3'-phosphate
  modified_base 14: mod_base = OTHER; note = 2'-deoxy-2'-fluoroguanosine-3'-phosphate
  modified_base 15: mod_base = OTHER; note = 2'-O-methyluridine-3'-phosphate
  modified_base 16: mod_base = OTHER; note = 2'-deoxy-2'-fluorouridine-3'-phosphate
  modified_base 17: mod_base = OTHER; note = 2'-O-methylguanosine-3'-phosphate
  modified_base 18: mod_base = OTHER; note = 2'-O-methyladenosine-3'-phosphate
  modified_base 19: mod_base = OTHER; note = 2'-O-methylcytidine-3'-phosphate
  modified_base 20: mod_base = OTHER; note = 2'-O-methyladenosine-3'-phosphate
  modified_base 21: mod_base = OTHER; note = 2'-O-methylguanosine-3'-phosphorothioate
  modified_base 22: mod_base = OTHER; note = 2'-O-methylcytidine-3'-phosphorothioate
  modified_base 23: mod_base = OTHER; note = 2'-O-methylguanosine
aactcacacttcggttgacagcg

SEQ ID NO: 1137 - RNA, 23 nt, synthetic construct
  source 1..23: mol_type = other RNA
  modified_base 1: mod_base = OTHER; note = 2'-O-methyladenosine-3'-phosphorothioate
  modified_base 2: mod_base = OTHER; note = 2'-deoxy-2'-fluorocytidine-3'-phosphorothioate
  modified_base 3: mod_base = OTHER; note = 2'-O-methyluridine-3'-phosphate
  modified_base 4: mod_base = OTHER; note = 2'-O-methylguanosine-3'-phosphate
  modified_base 5: mod_base = OTHER; note = 2'-O-methyladenosine-3'-phosphate
  modified_base 6: mod_base = OTHER; note = 2'-deoxy-2'-fluoroguanosine-3'-phosphate
  modified_base 7: mod_base = OTHER; note = 2'-O-methylguanosine-3'-phosphate
  modified_base 8: mod_base = OTHER; note = 2'-deoxy-2'-fluorouridine-3'-phosphate
  modified_base 9: mod_base = OTHER; note = 2'-deoxy-2'-fluorouridine-3'-phosphate
  modified_base 10: mod_base = OTHER; note = 2'-O-methylguanosine-3'-phosphate
  modified_base 11: mod_base = OTHER; note = 2'-O-methylguanosine-3'-phosphate
  modified_base 12: mod_base = OTHER; note = 2'-O-methylguanosine-3'-phosphate
  modified_base 13: mod_base = OTHER; note = 2'-O-methyladenosine-3'-phosphate
  modified_base 14: mod_base = OTHER; note = 2'-deoxy-2'-fluoroadenosine-3'-phosphate
  modified_base 15: mod_base = OTHER; note = 2'-O-methylguanosine-3'-phosphate
  modified_base 16: mod_base = OTHER; note = 2'-deoxy-2'-fluorouridine-3'-phosphate
  modified_base 17: mod_base = OTHER; note = 2'-O-methylcytidine-3'-phosphate
  modified_base 18: mod_base = OTHER; note = 2'-O-methylcytidine-3'-phosphate
  modified_base 19: mod_base = OTHER; note = 2'-O-methyladenosine-3'-phosphate
  modified_base 20: mod_base = OTHER; note = 2'-O-methylcytidine-3'-phosphate
  modified_base 21: mod_base = OTHER; note = 2'-O-methylguanosine-3'-phosphorothioate
  modified_base 22: mod_base = OTHER; note = 2'-O-methyluridine-3'-phosphorothioate
  modified_base 23: mod_base = OTHER; note = 2'-O-methylcytidine
actgaggttgggaagtccacgtc

SEQ ID NO: 1138 - RNA, 23 nt, synthetic construct
  source 1..23: mol_type = other RNA
  modified_base 1: mod_base = OTHER; note = 2'-O-methyladenosine-3'-phosphorothioate
  modified_base 2: mod_base = OTHER; note = 2'-deoxy-2'-fluoroguanosine-3'-phosphorothioate
  modified_base 3: mod_base = OTHER; note = 2'-O-methyluridine-3'-phosphate
  modified_base 4: mod_base = OTHER; note = 2'-O-methyluridine-3'-phosphate
  modified_base 5: mod_base = OTHER; note = 2'-O-methyluridine-3'-phosphate
  modified_base 6: mod_base = OTHER; note = 2'-deoxy-2'-fluorouridine-3'-phosphate
  modified_base 7: mod_base = OTHER; note = 2'-O-methylcytidine-3'-phosphate
  modified_base 8: mod_base = OTHER; note = 2'-deoxy-2'-fluoroadenosine-3'-phosphate
  modified_base 9: mod_base = OTHER; note = 2'-deoxy-2'-fluoroadenosine-3'-phosphate
  modified_base 10: mod_base = OTHER; note = 2'-O-methyladenosine-3'-phosphate
  modified_base 11: mod_base = OTHER; note = 2'-O-methyladenosine-3'-phosphate
  modified_base 12: mod_base = OTHER; note = 2'-O-methylguanosine-3'-phosphate
  modified_base 13: mod_base = OTHER; note = 2'-O-methyluridine-3'-phosphate
  modified_base 14: mod_base = OTHER; note = 2'-deoxy-2'-fluorouridine-3'-phosphate
  modified_base 15: mod_base = OTHER; note = 2'-O-methyluridine-3'-phosphate
  modified_base 16: mod_base = OTHER; note = 2'-deoxy-2'-fluorocytidine-3'-phosphate
  modified_base 17: mod_base = OTHER; note = 2'-O-methylcytidine-3'-phosphate
  modified_base 18: mod_base = OTHER; note = 2'-O-methyladenosine-3'-phosphate
  modified_base 19: mod_base = OTHER; note = 2'-O-methyluridine-3'-phosphate
  modified_base 20: mod_base = OTHER; note = 2'-O-methylguanosine-3'-phosphate
  modified_base 21: mod_base = OTHER; note = 2'-O-methyluridine-3'-phosphorothioate
  modified_base 22: mod_base = OTHER; note = 2'-O-methylcytidine-3'-phosphorothioate
  modified_base 23: mod_base = OTHER; note = 2'-O-methylcytidine
agttttcaaaagtttccatgtcc

SEQ ID NO: 1139 - RNA, 23 nt, synthetic construct
  source 1..23: mol_type = other RNA
  modified_base 1: mod_base = OTHER; note = 2'-O-methyladenosine-3'-phosphorothioate
  modified_base 2: mod_base = OTHER; note = 2'-deoxy-2'-fluorocytidine-3'-phosphorothioate
  modified_base 3: mod_base = OTHER; note = 2'-O-methyladenosine-3'-phosphate
  modified_base 4: mod_base = OTHER; note = 2'-O-methylcytidine-3'-phosphate
  modified_base 5: mod_base = OTHER; note = 2'-O-methyluridine-3'-phosphate
  modified_base 6: mod_base = OTHER; note = 2'-deoxy-2'-fluorocytidine-3'-phosphate
  modified_base 7: mod_base = OTHER; note = 2'-O-methyluridine-3'-phosphate
  modified_base 8: mod_base = OTHER; note = 2'-deoxy-2'-fluoroadenosine-3'-phosphate
  modified_base 9: mod_base = OTHER; note = 2'-deoxy-2'-fluorouridine-3'-phosphate
  modified_base 10: mod_base = OTHER; note = 2'-O-methylguanosine-3'-phosphate
  modified_base 11: mod_base = OTHER; note = 2'-O-methylcytidine-3'-phosphate
  modified_base 12: mod_base = OTHER; note = 2'-O-methyluridine-3'-phosphate
  modified_base 13: mod_base = OTHER; note = 2'-O-methylcytidine-3'-phosphate
  modified_base 14: mod_base = OTHER; note = 2'-deoxy-2'-fluorouridine-3'-phosphate
  modified_base 15: mod_base = OTHER; note = 2'-O-methyluridine-3'-phosphate
  modified_base 16: mod_base = OTHER; note = 2'-deoxy-2'-fluorouridine-3'-phosphate
  modified_base 17: mod_base = OTHER; note = 2'-O-methylguanosine-3'-phosphate
  modified_base 18: mod_base = OTHER; note = 2'-O-methylguanosine-3'-phosphate
  modified_base 19: mod_base = OTHER; note = 2'-O-methyluridine-3'-phosphate
  modified_base 20: mod_base = OTHER; note = 2'-O-methylguanosine-3'-phosphate
  modified_base 21: mod_base = OTHER; note = 2'-O-methylcytidine-3'-phosphorothioate
  modified_base 22: mod_base = OTHER; note = 2'-O-methylcytidine-3'-phosphorothioate
  modified_base 23: mod_base = OTHER; note = 2'-O-methylcytidine
acactctatgctctttggtgccc

SEQ ID NO: 1140 - RNA, 23 nt, synthetic construct
  source 1..23: mol_type = other RNA
  modified_base 1: mod_base = OTHER; note = 2'-O-methyladenosine-3'-phosphorothioate
  modified_base 2: mod_base = OTHER; note = 2'-deoxy-2'-fluorocytidine-3'-phosphorothioate
  modified_base 3: mod_base = OTHER; note = 2'-O-methylguanosine-3'-phosphate
  modified_base 4: mod_base = OTHER; note = 2'-O-methyladenosine-3'-phosphate
  modified_base 5: mod_base = OTHER; note = 2'-O-methylcytidine-3'-phosphate
  modified_base 6: mod_base = OTHER; note = 2'-deoxy-2'-fluorocytidine-3'-phosphate
  modified_base 7: mod_base = OTHER; note = 2'-O-methyluridine-3'-phosphate
  modified_base 8: mod_base = OTHER; note = 2'-deoxy-2'-fluoroguanosine-3'-phosphate
  modified_base 9: mod_base = OTHER; note = 2'-deoxy-2'-fluoroguanosine-3'-phosphate
  modified_base 10: mod_base = OTHER; note = 2'-O-methyluridine-3'-phosphate
  modified_base 11: mod_base = OTHER; note = 2'-O-methylcytidine-3'-phosphate
  modified_base 12: mod_base = OTHER; note = 2'-O-methylguanosine-3'-phosphate
  modified_base 13: mod_base = OTHER; note = 2'-O-methyladenosine-3'-phosphate
  modified_base 14: mod_base = OTHER; note = 2'-deoxy-2'-fluorouridine-3'-phosphate
  modified_base 15: mod_base = OTHER; note = 2'-O-methylguanosine-3'-phosphate
  modified_base 16: mod_base = OTHER; note = 2'-deoxy-2'-fluorocytidine-3'-phosphate
  modified_base 17: mod_base = OTHER; note = 2'-O-methyluridine-3'-phosphate
  modified_base 18: mod_base = OTHER; note = 2'-O-methyluridine-3'-phosphate
  modified_base 19: mod_base = OTHER; note = 2'-O-methyladenosine-3'-phosphate
  modified_base 20: mod_base = OTHER; note = 2'-O-methylcytidine-3'-phosphate
  modified_base 21: mod_base = OTHER; note = 2'-O-methylcytidine-3'-phosphorothioate
  modified_base 22: mod_base = OTHER; note = 2'-O-methyluridine-3'-phosphorothioate
  modified_base 23: mod_base = OTHER; note = 2'-O-methylcytidine
acgacctggtcgatgcttacctc

SEQ ID NO: 1141 - RNA, 23 nt, synthetic construct
  source 1..23: mol_type = other RNA
  modified_base 1: mod_base = OTHER; note = 2'-O-methyladenosine-3'-phosphorothioate
  modified_base 2: mod_base = OTHER; note = 2'-deoxy-2'-fluoroguanosine-3'-phosphorothioate
  modified_base 3: mod_base = OTHER; note = 2'-O-methyluridine-3'-phosphate
  modified_base 4: mod_base = OTHER; note = 2'-O-methylcytidine-3'-phosphate
  modified_base 5: mod_base = OTHER; note = 2'-O-methyluridine-3'-phosphate
  modified_base 6: mod_base = OTHER; note = 2'-deoxy-2'-fluorocytidine-3'-phosphate
  modified_base 7: mod_base = OTHER; note = 2'-O-methylcytidine-3'-phosphate
  modified_base 8: mod_base = OTHER; note = 2'-deoxy-2'-fluoroadenosine-3'-phosphate
  modified_base 9: mod_base = OTHER; note = 2'-deoxy-2'-fluoroguanosine-3'-phosphate
  modified_base 10: mod_base = OTHER; note = 2'-O-methylguanosine-3'-phosphate
  modified_base 11: mod_base = OTHER; note = 2'-O-methylcytidine-3'-phosphate
  modified_base 12: mod_base = OTHER; note = 2'-O-methyluridine-3'-phosphate
  modified_base 13: mod_base = OTHER; note = 2'-O-methylguanosine-3'-phosphate
  modified_base 14: mod_base = OTHER; note = 2'-deoxy-2'-fluorocytidine-3'-phosphate
  modified_base 15: mod_base = OTHER; note = 2'-O-methyladenosine-3'-phosphate
  modified_base 16: mod_base = OTHER; note = 2'-deoxy-2'-fluoroguanosine-3'-phosphate
  modified_base 17: mod_base = OTHER; note = 2'-O-methylguanosine-3'-phosphate
  modified_base 18: mod_base = OTHER; note = 2'-O-methyluridine-3'-phosphate
  modified_base 19: mod_base = OTHER; note = 2'-O-methylcytidine-3'-phosphate
  modified_base 20: mod_base = OTHER; note = 2'-O-methyladenosine-3'-phosphate
  modified_base 21: mod_base = OTHER; note = 2'-O-methylguanosine-3'-phosphorothioate
  modified_base 22: mod_base = OTHER; note = 2'-O-methylcytidine-3'-phosphorothioate
  modified_base 23: mod_base = OTHER; note = 2'-O-methyladenosine
agtctccaggctgcaggtcagca

SEQ ID NO: 1142 - RNA, 23 nt, synthetic construct
  source 1..23: mol_type = other RNA
  modified_base 1: mod_base = OTHER; note = 2'-O-methyladenosine-3'-phosphorothioate
  modified_base 2: mod_base = OTHER; note = 2'-deoxy-2'-fluoroguanosine-3'-phosphorothioate
  modified_base 3: mod_base = OTHER; note = 2'-O-methyluridine-3'-phosphate
  modified_base 4: mod_base = OTHER; note = 2'-O-methylcytidine-3'-phosphate
  modified_base 5: mod_base = OTHER; note = 2'-O-methyluridine-3'-phosphate
  modified_base 6: mod_base = OTHER; note = 2'-deoxy-2'-fluoroguanosine-3'-phosphate
  modified_base 7: mod_base = OTHER; note = 2'-O-methylguanosine-3'-phosphate
  modified_base 8: mod_base = OTHER; note = 2'-deoxy-2'-fluorouridine-3'-phosphate
  modified_base 9: mod_base = OTHER; note = 2'-deoxy-2'-fluorocytidine-3'-phosphate
  modified_base 10: mod_base = OTHER; note = 2'-O-methyluridine-3'-phosphate
  modified_base 11: mod_base = OTHER; note = 2'-O-methyluridine-3'-phosphate
  modified_base 12: mod_base = OTHER; note = 2'-O-methylcytidine-3'-phosphate
  modified_base 13: mod_base = OTHER; note = 2'-O-methylguanosine-3'-phosphate
  modified_base 14: mod_base = OTHER; note = 2'-deoxy-2'-fluorouridine-3'-phosphate
  modified_base 15: mod_base = OTHER; note = 2'-O-methyluridine-3'-phosphate
  modified_base 16: mod_base = OTHER; note = 2'-deoxy-2'-fluorocytidine-3'-phosphate
  modified_base 17: mod_base = OTHER; note = 2'-O-methyluridine-3'-phosphate
  modified_base 18: mod_base = OTHER; note = 2'-O-methyluridine-3'-phosphate
  modified_base 19: mod_base = OTHER; note = 2'-O-methylguanosine-3'-phosphate
  modified_base 20: mod_base = OTHER; note = 2'-O-methylcytidine-3'-phosphate
  modified_base 21: mod_base = OTHER; note = 2'-O-methyladenosine-3'-phosphorothioate
  modified_base 22: mod_base = OTHER; note = 2'-O-methylguanosine-3'-phosphorothioate
  modified_base 23: mod_base = OTHER; note = 2'-O-methylguanosine
agtctggtcttcgttcttgcagg

SEQ ID NO: 1143 - RNA, 23 nt, synthetic construct
  source 1..23: mol_type = other RNA
  modified_base 1: mod_base = OTHER; note = 2'-O-methyladenosine-3'-phosphorothioate
  modified_base 2: mod_base = OTHER; note = 2'-deoxy-2'-fluoroguanosine-3'-phosphorothioate
  modified_base 3: mod_base = OTHER; note = 2'-O-methyluridine-3'-phosphate
  modified_base 4: mod_base = OTHER; note = 2'-O-methyladenosine-3'-phosphate
  modified_base 5: mod_base = OTHER; note = 2'-O-methylguanosine-3'-phosphate
  modified_base 6: mod_base = OTHER; note = 2'-deoxy-2'-fluorouridine-3'-phosphate
  modified_base 7: mod_base = OTHER; note = 2'-O-methyluridine-3'-phosphate
  modified_base 8: mod_base = OTHER; note = 2'-deoxy-2'-fluoroguanosine-3'-phosphate
  modified_base 9: mod_base = OTHER; note = 2'-deoxy-2'-fluoroadenosine-3'-phosphate
  modified_base 10: mod_base = OTHER; note = 2'-O-methyladenosine-3'-phosphate
  modified_base 11: mod_base = OTHER; note = 2'-O-methylguanosine-3'-phosphate
  modified_base 12: mod_base = OTHER; note = 2'-O-methylcytidine-3'-phosphate
  modified_base 13: mod_base = OTHER; note = 2'-O-methyladenosine-3'-phosphate
  modified_base 14: mod_base = OTHER; note = 2'-deoxy-2'-fluorocytidine-3'-phosphate
  modified_base 15: mod_base = OTHER; note = 2'-O-methyladenosine-3'-phosphate
  modified_base 16: mod_base = OTHER; note = 2'-deoxy-2'-fluorouridine-3'-phosphate
  modified_base 17: mod_base = OTHER; note = 2'-O-methylguanosine-3'-phosphate
  modified_base 18: mod_base = OTHER; note = 2'-O-methyluridine-3'-phosphate
  modified_base 19: mod_base = OTHER; note = 2'-O-methyluridine-3'-phosphate
  modified_base 20: mod_base = OTHER; note = 2'-O-methylguanosine-3'-phosphate
  modified_base 21: mod_base = OTHER; note = 2'-O-methyladenosine-3'-phosphorothioate
  modified_base 22: mod_base = OTHER; note = 2'-O-methyladenosine-3'-phosphorothioate
  modified_base 23: mod_base = OTHER; note = 2'-O-methylcytidine
agtagttgaagcacatgttgaac

SEQ ID NO: 1144 - RNA, 23 nt, synthetic construct
  source 1..23: mol_type = other RNA
  modified_base 1: mod_base = OTHER; note = 2'-O-methyladenosine-3'-phosphorothioate
  modified_base 2: mod_base = OTHER; note = 2'-deoxy-2'-fluoroguanosine-3'-phosphorothioate
  modified_base 3: mod_base = OTHER; note = 2'-O-methyluridine-3'-phosphate
  modified_base 4: mod_base = OTHER; note = 2'-O-methylcytidine-3'-phosphate
  modified_base 5: mod_base = OTHER; note = 2'-O-methyladenosine-3'-phosphate
  modified_base 6: mod_base = OTHER; note = 2'-deoxy-2'-fluorocytidine-3'-phosphate
  modified_base 7: mod_base = OTHER; note = 2'-O-methyladenosine-3'-phosphate
  modified_base 8: mod_base = OTHER; note = 2'-deoxy-2'-fluoroguanosine-3'-phosphate
  modified_base 9: mod_base = OTHER; note = 2'-deoxy-2'-fluorocytidine-3'-phosphate
  modified_base 10: mod_base = OTHER; note = 2'-O-methyladenosine-3'-phosphate
  modified_base 11: mod_base = OTHER; note = 2'-O-methyladenosine-3'-phosphate
  modified_base 12: mod_base = OTHER; note = 2'-O-methyladenosine-3'-phosphate
  modified_base 13: mod_base = OTHER; note = 2'-O-methylguanosine-3'-phosphate
  modified_base 14: mod_base = OTHER; note = 2'-deoxy-2'-fluorocytidine-3'-phosphate
  modified_base 15: mod_base = OTHER; note = 2'-O-methyladenosine-3'-phosphate
  modified_base 16: mod_base = OTHER; note = 2'-deoxy-2'-fluorocytidine-3'-phosphate
  modified_base 17: mod_base = OTHER; note = 2'-O-methyladenosine-3'-phosphate
  modified_base 18: mod_base = OTHER; note = 2'-O-methylcytidine-3'-phosphate
  modified_base 19: mod_base = OTHER; note = 2'-O-methylguanosine-3'-phosphate
  modified_base 20: mod_base = OTHER; note = 2'-O-methylcytidine-3'-phosphate
  modified_base 21: mod_base = OTHER; note = 2'-O-methyladenosine-3'-phosphorothioate
  modified_base 22: mod_base = OTHER; note = 2'-O-methylcytidine-3'-phosphorothioate
  modified_base 23: mod_base = OTHER; note = 2'-O-methylguanosine
agtcacagcaaagcacacgcacg

SEQ ID NO: 1145 - RNA, 23 nt, synthetic construct
  source 1..23: mol_type = other RNA
  modified_base 1: mod_base = OTHER; note = 2'-O-methyladenosine-3'-phosphorothioate
  modified_base 2: mod_base = OTHER; note = 2'-deoxy-2'-fluoroguanosine-3'-phosphorothioate
  modified_base 3: mod_base = OTHER; note = 2'-O-methyladenosine-3'-phosphate
  modified_base 4: mod_base = OTHER; note = 2'-O-methylguanosine-3'-phosphate
  modified_base 5: mod_base = OTHER; note = 2'-O-methylcytidine-3'-phosphate
  modified_base 6: mod_base = OTHER; note = 2'-deoxy-2'-fluorouridine-3'-phosphate
  modified_base 7: mod_base = OTHER; note = 2'-O-methylguanosine-3'-phosphate
  modified_base 8: mod_base = OTHER; note = 2'-deoxy-2'-fluorouridine-3'-phosphate
  modified_base 9: mod_base = OTHER; note = 2'-deoxy-2'-fluorouridine-3'-phosphate
  modified_base 10: mod_base = OTHER; note = 2'-O-methylcytidine-3'-phosphate
  modified_base 11: mod_base = OTHER; note = 2'-O-methyluridine-3'-phosphate
  modified_base 12: mod_base = OTHER; note = 2'-O-methylcytidine-3'-phosphate
  modified_base 13: mod_base = OTHER; note = 2'-O-methyladenosine-3'-phosphate
  modified_base 14: mod_base = OTHER; note = 2'-deoxy-2'-fluoroguanosine-3'-phosphate
  modified_base 15: mod_base = OTHER; note = 2'-O-methylguanosine-3'-phosphate
  modified_base 16: mod_base = OTHER; note = 2'-deoxy-2'-fluoroguanosine-3'-phosphate
  modified_base 17: mod_base = OTHER; note = 2'-O-methyluridine-3'-phosphate
  modified_base 18: mod_base = OTHER; note = 2'-O-methylguanosine-3'-phosphate
  modified_base 19: mod_base = OTHER; note = 2'-O-methylguanosine-3'-phosphate
  modified_base 20: mod_base = OTHER; note = 2'-O-methyladenosine-3'-phosphate
  modified_base 21: mod_base = OTHER; note = 2'-O-methylguanosine-3'-phosphorothioate
  modified_base 22: mod_base = OTHER; note = 2'-O-methylguanosine-3'-phosphorothioate
  modified_base 23: mod_base = OTHER; note = 2'-O-methyluridine
agagctgttctcagggtggaggt

SEQ ID NO: 1146 - RNA, 23 nt, synthetic construct
  source 1..23: mol_type = other RNA
  modified_base 1: mod_base = OTHER; note = 2'-O-methyladenosine-3'-phosphorothioate
  modified_base 2: mod_base = OTHER; note = 2'-deoxy-2'-fluorouridine-3'-phosphorothioate
  modified_base 3: mod_base = OTHER; note = 2'-O-methylguanosine-3'-phosphate
  modified_base 4: mod_base = OTHER; note = 2'-O-methylguanosine-3'-phosphate
  modified_base 5: mod_base = OTHER; note = 2'-O-methyluridine-3'-phosphate
  modified_base 6: mod_base = OTHER; note = 2'-deoxy-2'-fluoroguanosine-3'-phosphate
  modified_base 7: mod_base = OTHER; note = 2'-O-methylguanosine-3'-phosphate
  modified_base 8: mod_base = OTHER; note = 2'-deoxy-2'-fluorouridine-3'-phosphate
  modified_base 9: mod_base = OTHER; note = 2'-deoxy-2'-fluorocytidine-3'-phosphate
  modified_base 10: mod_base = OTHER; note = 2'-O-methyladenosine-3'-phosphate
  modified_base 11: mod_base = OTHER; note = 2'-O-methylguanosine-3'-phosphate
  modified_base 12: mod_base = OTHER; note = 2'-O-methylcytidine-3'-phosphate
  modified_base 13: mod_base = OTHER; note = 2'-O-methyladenosine-3'-phosphate
  modified_base 14: mod_base = OTHER; note = 2'-deoxy-2'-fluorocytidine-3'-phosphate
  modified_base 15: mod_base = OTHER; note = 2'-O-methyluridine-3'-phosphate
  modified_base 16: mod_base = OTHER; note = 2'-deoxy-2'-fluorouridine-3'-phosphate
  modified_base 17: mod_base = OTHER; note = 2'-O-methyluridine-3'-phosphate
  modified_base 18: mod_base = OTHER; note = 2'-O-methylguanosine-3'-phosphate
  modified_base 19: mod_base = OTHER; note = 2'-O-methylguanosine-3'-phosphate
  modified_base 20: mod_base = OTHER; note = 2'-O-methylguanosine-3'-phosphate
  modified_base 21: mod_base = OTHER; note = 2'-O-methyladenosine-3'-phosphorothioate
  modified_base 22: mod_base = OTHER; note = 2'-O-methylguanosine-3'-phosphorothioate
  modified_base 23: mod_base = OTHER; note = 2'-O-methylguanosine
atggtggtcagcactttgggagg

SEQ ID NO: 1147 - RNA, 23 nt, synthetic construct
  source 1..23: mol_type = other RNA
  modified_base 1: mod_base = OTHER; note = 2'-O-methyladenosine-3'-phosphorothioate
  modified_base 2: mod_base = OTHER; note = 2'-deoxy-2'-fluoroadenosine-3'-phosphorothioate
  modified_base 3: mod_base = OTHER; note = 2'-O-methylguanosine-3'-phosphate
  modified_base 4: mod_base = OTHER; note = 2'-O-methylguanosine-3'-phosphate
  modified_base 5: mod_base = OTHER; note = 2'-O-methyluridine-3'-phosphate
  modified_base 6: mod_base = OTHER; note = 2'-deoxy-2'-fluoroguanosine-3'-phosphate
  modified_base 7: mod_base = OTHER; note = 2'-O-methylguanosine-3'-phosphate
  modified_base 8: mod_base = OTHER; note = 2'-deoxy-2'-fluorouridine-3'-phosphate
  modified_base 9: mod_base = OTHER; note = 2'-deoxy-2'-fluoroguanosine-3'-phosphate
  modified_base 10: mod_base = OTHER; note = 2'-O-methylcytidine-3'-phosphate
  modified_base 11: mod_base = OTHER; note = 2'-O-methylcytidine-3'-phosphate
  modified_base 12: mod_base = OTHER; note = 2'-O-methylcytidine-3'-phosphate
  modified_base 13: mod_base = OTHER; note = 2'-O-methyladenosine-3'-phosphate
  modified_base 14: mod_base = OTHER; note = 2'-deoxy-2'-fluoroguanosine-3'-phosphate
  modified_base 15: mod_base = OTHER; note = 2'-O-methylguanosine-3'-phosphate
  modified_base 16: mod_base = OTHER; note = 2'-deoxy-2'-fluoroguanosine-3'-phosphate
  modified_base 17: mod_base = OTHER; note = 2'-O-methyladenosine-3'-phosphate
  modified_base 18: mod_base = OTHER; note = 2'-O-methylguanosine-3'-phosphate
  modified_base 19: mod_base = OTHER; note = 2'-O-methylguanosine-3'-phosphate
  modified_base 20: mod_base = OTHER; note = 2'-O-methyladenosine-3'-phosphate
  modified_base 21: mod_base = OTHER; note = 2'-O-methyladenosine-3'-phosphorothioate
  modified_base 22: mod_base = OTHER; note = 2'-O-methylguanosine-3'-phosphorothioate
  modified_base 23: mod_base = OTHER; note = 2'-O-methyladenosine
aaggtggtgcccagggaggaaga

SEQ ID NO: 1148 - RNA, 23 nt, synthetic construct
  source 1..23: mol_type = other RNA
  modified_base 1: mod_base = OTHER; note = 2'-O-methyladenosine-3'-phosphorothioate
  modified_base 2: mod_base = OTHER; note = 2'-deoxy-2'-fluorocytidine-3'-phosphorothioate
  modified_base 3: mod_base = OTHER; note = 2'-O-methylguanosine-3'-phosphate
  modified_base 4: mod_base = OTHER; note = 2'-O-methyluridine-3'-phosphate
  modified_base 5: mod_base = OTHER; note = 2'-O-methylguanosine-3'-phosphate
  modified_base 6: mod_base = OTHER; note = 2'-deoxy-2'-fluoroguanosine-3'-phosphate
  modified_base 7: mod_base = OTHER; note = 2'-O-methyluridine-3'-phosphate
  modified_base 8: mod_base = OTHER; note = 2'-deoxy-2'-fluorouridine-3'-phosphate
  modified_base 9: mod_base = OTHER; note = 2'-deoxy-2'-fluoroguanosine-3'-phosphate
  modified_base 10: mod_base = OTHER; note = 2'-O-methyluridine-3'-phosphate
  modified_base 11: mod_base = OTHER; note = 2'-O-methylguanosine-3'-phosphate
  modified_base 12: mod_base = OTHER; note = 2'-O-methylguanosine-3'-phosphate
  modified_base 13: mod_base = OTHER; note = 2'-O-methyluridine-3'-phosphate
  modified_base 14: mod_base = OTHER; note = 2'-deoxy-2'-fluoroadenosine-3'-phosphate
  modified_base 15: mod_base = OTHER; note = 2'-O-methylguanosine-3'-phosphate
  modified_base 16: mod_base = OTHER; note = 2'-deoxy-2'-fluorouridine-3'-phosphate
  modified_base 17: mod_base = OTHER; note = 2'-O-methyluridine-3'-phosphate
  modified_base 18: mod_base = OTHER; note = 2'-O-methylguanosine-3'-phosphate
  modified_base 19: mod_base = OTHER; note = 2'-O-methylguanosine-3'-phosphate
  modified_base 20: mod_base = OTHER; note = 2'-O-methylcytidine-3'-phosphate
  modified_base 21: mod_base = OTHER; note = 2'-O-methyladenosine-3'-phosphorothioate
  modified_base 22: mod_base = OTHER; note = 2'-O-methylcytidine-3'-phosphorothioate
  modified_base 23: mod_base = OTHER; note = 2'-O-methyluridine
acgtggttgtggtagttggcact

SEQ ID NO: 1149 - RNA, 23 nt, synthetic construct
  source 1..23: mol_type = other RNA
  modified_base 1: mod_base = OTHER; note = 2'-O-methyladenosine-3'-phosphorothioate
  modified_base 2: mod_base = OTHER; note = 2'-deoxy-2'-fluoroadenosine-3'-phosphorothioate
  modified_base 3: mod_base = OTHER; note = 2'-O-methylguanosine-3'-phosphate
  modified_base 4: mod_base = OTHER; note = 2'-O-methylcytidine-3'-phosphate
  modified_base 5: mod_base = OTHER; note = 2'-O-methylcytidine-3'-phosphate
  modified_base 6: mod_base = OTHER; note = 2'-deoxy-2'-fluorouridine-3'-phosphate
  modified_base 7: mod_base = OTHER; note = 2'-O-methylcytidine-3'-phosphate
  modified_base 8: mod_base = OTHER; note = 2'-deoxy-2'-fluorouridine-3'-phosphate
  modified_base 9: mod_base = OTHER; note = 2'-deoxy-2'-fluoroguanosine-3'-phosphate
  modified_base 10: mod_base = OTHER; note = 2'-O-methylguanosine-3'-phosphate
  modified_base 11: mod_base = OTHER; note = 2'-O-methyluridine-3'-phosphate
  modified_base 12: mod_base = OTHER; note = 2'-O-methyluridine-3'-phosphate
  modified_base 13: mod_base = OTHER; note = 2'-O-methylguanosine-3'-phosphate
  modified_base 14: mod_base = OTHER; note = 2'-deoxy-2'-fluorouridine-3'-phosphate
  modified_base 15: mod_base = OTHER; note = 2'-O-methylguanosine-3'-phosphate
  modified_base 16: mod_base = OTHER; note = 2'-deoxy-2'-fluoroguanosine-3'-phosphate
  modified_base 17: mod_base = OTHER; note = 2'-O-methylguanosine-3'-phosphate
  modified_base 18: mod_base = OTHER; note = 2'-O-methyluridine-3'-phosphate
  modified_base 19: mod_base = OTHER; note = 2'-O-methylguanosine-3'-phosphate
  modified_base 20: mod_base = OTHER; note = 2'-O-methyluridine-3'-phosphate
  modified_base 21: mod_base = OTHER; note = 2'-O-methylguanosine-3'-phosphorothioate
  modified_base 22: mod_base = OTHER; note = 2'-O-methylguanosine-3'-phosphorothioate
  modified_base 23: mod_base = OTHER; note = 2'-O-methyluridine
aagcctctggttgtgggtgtggt

SEQ ID NO: 1150 - RNA, 23 nt, synthetic construct
  source 1..23: mol_type = other RNA
  modified_base 1: mod_base = OTHER; note = 2'-O-methyladenosine-3'-phosphorothioate
  modified_base 2: mod_base = OTHER; note = 2'-deoxy-2'-fluoroguanosine-3'-phosphorothioate
  modified_base 3: mod_base = OTHER; note = 2'-O-methylcytidine-3'-phosphate
  modified_base 4: mod_base = OTHER; note = 2'-O-methyluridine-3'-phosphate
  modified_base 5: mod_base = OTHER; note = 2'-O-methyluridine-3'-phosphate
  modified_base 6: mod_base = OTHER; note = 2'-deoxy-2'-fluorouridine-3'-phosphate
  modified_base 7: mod_base = OTHER; note = 2'-O-methylguanosine-3'-phosphate
  modified_base 8: mod_base = OTHER; note = 2'-deoxy-2'-fluorouridine-3'-phosphate
  modified_base 9: mod_base = OTHER; note = 2'-deoxy-2'-fluoroguanosine-3'-phosphate
  modified_base 10: mod_base = OTHER; note = 2'-O-methyladenosine-3'-phosphate
  modified_base 11: mod_base = OTHER; note = 2'-O-methylguanosine-3'-phosphate
  modified_base 12: mod_base = OTHER; note = 2'-O-methylguanosine-3'-phosphate
  modified_base 13: mod_base = OTHER; note = 2'-O-methyladenosine-3'-phosphate
  modified_base 14: mod_base = OTHER; note = 2'-deoxy-2'-fluorouridine-3'-phosphate
  modified_base 15: mod_base = OTHER; note = 2'-O-methylcytidine-3'-phosphate
  modified_base 16: mod_base = OTHER; note = 2'-deoxy-2'-fluorocytidine-3'-phosphate
  modified_base 17: mod_base = OTHER; note = 2'-O-methyladenosine-3'-phosphate
  modified_base 18: mod_base = OTHER; note = 2'-O-methylguanosine-3'-phosphate
  modified_base 19: mod_base = OTHER; note = 2'-O-methylguanosine-3'-phosphate
  modified_base 20: mod_base = OTHER; note = 2'-O-methyluridine-3'-phosphate
  modified_base 21: mod_base = OTHER; note = 2'-O-methylcytidine-3'-phosphorothioate
  modified_base 22: mod_base = OTHER; note = 2'-O-methylguanosine-3'-phosphorothioate
  modified_base 23: mod_base = OTHER; note = 2'-O-methyluridine
agctttgtgaggatccaggtcgt

SEQ ID NO: 1151 - RNA, 23 nt, synthetic construct
  source 1..23: mol_type = other RNA
  modified_base 1: mod_base = OTHER; note = 2'-O-methyladenosine-3'-phosphorothioate
  modified_base 2: mod_base = OTHER; note = 2'-deoxy-2'-fluoroguanosine-3'-phosphorothioate
  modified_base 3: mod_base = OTHER; note = 2'-O-methyladenosine-3'-phosphate
  modified_base 4: mod_base = OTHER; note = 2'-O-methyluridine-3'-phosphate
  modified_base 5: mod_base = OTHER; note = 2'-O-methylguanosine-3'-phosphate
  modified_base 6: mod_base = OTHER; note = 2'-deoxy-2'-fluoroguanosine-3'-phosphate
  modified_base 7: mod_base = OTHER; note = 2'-O-methylguanosine-3'-phosphate
  modified_base 8: mod_base = OTHER; note = 2'-deoxy-2'-fluorouridine-3'-phosphate
  modified_base 9: mod_base = OTHER; note = 2'-deoxy-2'-fluoroguanosine-3'-phosphate
  modified_base 10: mod_base = OTHER; note = 2'-O-methyluridine-3'-phosphate
  modified_base 11: mod_base = OTHER; note = 2'-O-methyladenosine-3'-phosphate
  modified_base 12: mod_base = OTHER; note = 2'-O-methyladenosine-3'-phosphate
  modified_base 13: mod_base = OTHER; note = 2'-O-methylcytidine-3'-phosphate
  modified_base 14: mod_base = OTHER; note = 2'-deoxy-2'-fluoroguanosine-3'-phosphate
  modified_base 15: mod_base = OTHER; note = 2'-O-methylcytidine-3'-phosphate
  modified_base 16: mod_base = OTHER; note = 2'-deoxy-2'-fluorouridine-3'-phosphate
  modified_base 17: mod_base = OTHER; note = 2'-O-methylguanosine-3'-phosphate
  modified_base 18: mod_base = OTHER; note = 2'-O-methylguanosine-3'-phosphate
  modified_base 19: mod_base = OTHER; note = 2'-O-methyluridine-3'-phosphate
  modified_base 20: mod_base = OTHER; note = 2'-O-methyladenosine-3'-phosphate
  modified_base 21: mod_base = OTHER; note = 2'-O-methylguanosine-3'-phosphorothioate
  modified_base 22: mod_base = OTHER; note = 2'-O-methylcytidine-3'-phosphorothioate
  modified_base 23: mod_base = OTHER; note = 2'-O-methyluridine
agatgggtgtaacgctggtagct

SEQ ID NO: 1152 - RNA, 23 nt, synthetic construct
  source 1..23: mol_type = other RNA
  modified_base 1: mod_base = OTHER; note = 2'-O-methyladenosine-3'-phosphorothioate
  modified_base 2: mod_base = OTHER; note = 2'-deoxy-2'-fluoroadenosine-3'-phosphorothioate
  modified_base 3: mod_base = OTHER; note = 2'-O-methylguanosine-3'-phosphate
  modified_base 4: mod_base = OTHER; note = 2'-O-methyluridine-3'-phosphate
  modified_base 5: mod_base = OTHER; note = 2'-O-methylcytidine-3'-phosphate
  modified_base 6: mod_base = OTHER; note = 2'-deoxy-2'-fluoroguanosine-3'-phosphate
  modified_base 7: mod_base = OTHER; note = 2'-O-methyluridine-3'-phosphate
  modified_base 8: mod_base = OTHER; note = 2'-deoxy-2'-fluoroadenosine-3'-phosphate
  modified_base 9: mod_base = OTHER; note = 2'-deoxy-2'-fluoroguanosine-3'-phosphate
  modified_base 10: mod_base = OTHER; note = 2'-O-methyluridine-3'-phosphate
  modified_base 11: mod_base = OTHER; note = 2'-O-methylguanosine-3'-phosphate
  modified_base 12: mod_base = OTHER; note = 2'-O-methylguanosine-3'-phosphate
  modified_base 13: mod_base = OTHER; note = 2'-O-methylcytidine-3'-phosphate
  modified_base 14: mod_base = OTHER; note = 2'-deoxy-2'-fluorouridine-3'-phosphate
  modified_base 15: mod_base = OTHER; note = 2'-O-methylguanosine-3'-phosphate
  modified_base 16: mod_base = OTHER; note = 2'-deoxy-2'-fluorouridine-3'-phosphate
  modified_base 17: mod_base = OTHER; note = 2'-O-methyluridine-3'-phosphate
  modified_base 18: mod_base = OTHER; note = 2'-O-methylguanosine-3'-phosphate
  modified_base 19: mod_base = OTHER; note = 2'-O-methyluridine-3'-phosphate
  modified_base 20: mod_base = OTHER; note = 2'-O-methylguanosine-3'-phosphate
  modified_base 21: mod_base = OTHER; note = 2'-O-methylguanosine-3'-phosphorothioate
  modified_base 22: mod_base = OTHER; note = 2'-O-methyluridine-3'-phosphorothioate
  modified_base 23: mod_base = OTHER; note = 2'-O-methylcytidine
aagtcgtagtggctgttgtggtc

SEQ ID NO: 1153 - RNA, 23 nt, synthetic construct
  source 1..23: mol_type = other RNA
  modified_base 1: mod_base = OTHER; note = 2'-O-methyladenosine-3'-phosphorothioate
  modified_base 2: mod_base = OTHER; note = 2'-deoxy-2'-fluoroadenosine-3'-phosphorothioate
  modified_base 3: mod_base = OTHER; note = 2'-O-methylguanosine-3'-phosphate
  modified_base 4: mod_base = OTHER; note = 2'-O-methylguanosine-3'-phosphate
  modified_base 5: mod_base = OTHER; note = 2'-O-methylguanosine-3'-phosphate
  modified_base 6: mod_base = OTHER; note = 2'-deoxy-2'-fluoroadenosine-3'-phosphate
  modified_base 7: mod_base = OTHER; note = 2'-O-methylguanosine-3'-phosphate
  modified_base 8: mod_base = OTHER; note = 2'-deoxy-2'-fluorouridine-3'-phosphate
  modified_base 9: mod_base = OTHER; note = 2'-deoxy-2'-fluoroguanosine-3'-phosphate
  modified_base 10: mod_base = OTHER; note = 2'-O-methylguanosine-3'-phosphate
  modified_base 11: mod_base = OTHER; note = 2'-O-methylcytidine-3'-phosphate
  modified_base 12: mod_base = OTHER; note = 2'-O-methyluridine-3'-phosphate
  modified_base 13: mod_base = OTHER; note = 2'-O-methyluridine-3'-phosphate
  modified_base 14: mod_base = OTHER; note = 2'-deoxy-2'-fluorouridine-3'-phosphate
  modified_base 15: mod_base = OTHER; note = 2'-O-methylguanosine-3'-phosphate
  modified_base 16: mod_base = OTHER; note = 2'-deoxy-2'-fluoroguanosine-3'-phosphate
  modified_base 17: mod_base = OTHER; note = 2'-O-methyladenosine-3'-phosphate
  modified_base 18: mod_base = OTHER; note = 2'-O-methylguanosine-3'-phosphate
  modified_base 19: mod_base = OTHER; note = 2'-O-methylcytidine-3'-phosphate
  modified_base 20: mod_base = OTHER; note = 2'-O-methyluridine-3'-phosphate
  modified_base 21: mod_base = OTHER; note = 2'-O-methylguanosine-3'-phosphorothioate
  modified_base 22: mod_base = OTHER; note = 2'-O-methylguanosine-3'-phosphorothioate
  modified_base 23: mod_base = OTHER; note = 2'-O-methyluridine
aagggagtggctttggagctggt

SEQ ID NO: 1154 - RNA, 23 nt, synthetic construct
  source 1..23: mol_type = other RNA
  modified_base 1: mod_base = OTHER; note = 2'-O-methyladenosine-3'-phosphorothioate
  modified_base 2: mod_base = OTHER; note = 2'-deoxy-2'-fluorocytidine-3'-phosphorothioate
  modified_base 3: mod_base = OTHER; note = 2'-O-methyluridine-3'-phosphate
  modified_base 4: mod_base = OTHER; note = 2'-O-methyluridine-3'-phosphate
  modified_base 5: mod_base = OTHER; note = 2'-O-methylcytidine-3'-phosphate
  modified_base 6: mod_base = OTHER; note = 2'-deoxy-2'-fluorouridine-3'-phosphate
  modified_base 7: mod_base = OTHER; note = 2'-O-methylcytidine-3'-phosphate
  modified_base 8: mod_base = OTHER; note = 2'-deoxy-2'-fluoroadenosine-3'-phosphate
  modified_base 9: mod_base = OTHER; note = 2'-deoxy-2'-fluoroguanosine-3'-phosphate
  modified_base 10: mod_base = OTHER; note = 2'-O-methyluridine-3'-phosphate
  modified_base 11: mod_base = OTHER; note = 2'-O-methylguanosine-3'-phosphate
  modified_base 12: mod_base = OTHER; note = 2'-O-methylcytidine-3'-phosphate
  modified_base 13: mod_base = OTHER; note = 2'-O-methyluridine-3'-phosphate
  modified_base 14: mod_base = OTHER; note = 2'-deoxy-2'-fluoroguanosine-3'-phosphate
  modified_base 15: mod_base = OTHER; note = 2'-O-methylguanosine-3'-phosphate
  modified_base 16: mod_base = OTHER; note = 2'-deoxy-2'-fluoroadenosine-3'-phosphate
  modified_base 17: mod_base = OTHER; note = 2'-O-methyladenosine-3'-phosphate
  modified_base 18: mod_base = OTHER; note = 2'-O-methylguanosine-3'-phosphate
  modified_base 19: mod_base = OTHER; note = 2'-O-methylguanosine-3'-phosphate
  modified_base 20: mod_base = OTHER; note = 2'-O-methylguanosine-3'-phosphate
  modified_base 21: mod_base = OTHER; note = 2'-O-methylcytidine-3'-phosphorothioate
  modified_base 22: mod_base = OTHER; note = 2'-O-methylguanosine-3'-phosphorothioate
  modified_base 23: mod_base = OTHER; note = 2'-O-methylguanosine
acttctcagtgctggaagggcgg

SEQ ID NO: 1155 - RNA, 23 nt, synthetic construct
  source 1..23: mol_type = other RNA
  modified_base 1: mod_base = OTHER; note = 2'-O-methyladenosine-3'-phosphorothioate
  modified_base 2: mod_base = OTHER; note = 2'-deoxy-2'-fluoroguanosine-3'-phosphorothioate
  modified_base 3: mod_base = OTHER; note = 2'-O-methyluridine-3'-phosphate
  modified_base 4: mod_base = OTHER; note = 2'-O-methylguanosine-3'-phosphate
  modified_base 5: mod_base = OTHER; note = 2'-O-methyluridine-3'-phosphate
  modified_base 6: mod_base = OTHER; note = 2'-deoxy-2'-fluoroguanosine-3'-phosphate
  modified_base 7: mod_base = OTHER; note = 2'-O-methylguanosine-3'-phosphate
  modified_base 8: mod_base = OTHER; note = 2'-deoxy-2'-fluorouridine-3'-phosphate
  modified_base 9: mod_base = OTHER; note = 2'-deoxy-2'-fluoroguanosine-3'-phosphate
  modified_base 10: mod_base = OTHER; note = 2'-O-methylguanosine-3'-phosphate
  modified_base 11: mod_base = OTHER; note = 2'-O-methyluridine-3'-phosphate
  modified_base 12: mod_base = OTHER; note = 2'-O-methylcytidine-3'-phosphate
  modified_base 13: mod_base = OTHER; note = 2'-O-methyluridine-3'-phosphate
  modified_base 14: mod_base = OTHER; note = 2'-deoxy-2'-fluoroguanosine-3'-phosphate
  modified_base 15: mod_base = OTHER; note = 2'-O-methyluridine-3'-phosphate
  modified_base 16: mod_base = OTHER; note = 2'-deoxy-2'-fluoroguanosine-3'-phosphate
  modified_base 17: mod_base = OTHER; note = 2'-O-methyladenosine-3'-phosphate
  modified_base 18: mod_base = OTHER; note = 2'-O-methyluridine-3'-phosphate
  modified_base 19: mod_base = OTHER; note = 2'-O-methyladenosine-3'-phosphate
  modified_base 20: mod_base = OTHER; note = 2'-O-methylguanosine-3'-phosphate
  modified_base 21: mod_base = OTHER; note = 2'-O-methylguanosine-3'-phosphorothioate
  modified_base 22: mod_base = OTHER; note = 2'-O-methylcytidine-3'-phosphorothioate
  modified_base 23: mod_base = OTHER; note = 2'-O-methylguanosine
agtgtggtggtctgtgataggcg

SEQ ID NO: 1156 - RNA, 23 nt, synthetic construct
  source 1..23: mol_type = other RNA
  modified_base 1: mod_base = OTHER; note = 2'-O-methyladenosine-3'-phosphorothioate
  modified_base 2: mod_base = OTHER; note = 2'-deoxy-2'-fluorouridine-3'-phosphorothioate
  modified_base 3: mod_base = OTHER; note = 2'-O-methylguanosine-3'-phosphate
  modified_base 4: mod_base = OTHER; note = 2'-O-methylguanosine-3'-phosphate
  modified_base 5: mod_base = OTHER; note = 2'-O-methylcytidine-3'-phosphate
  modified_base 6: mod_base = OTHER; note = 2'-deoxy-2'-fluorouridine-3'-phosphate
  modified_base 7: mod_base = OTHER; note = 2'-O-methylguanosine-3'-phosphate
  modified_base 8: mod_base = OTHER; note = 2'-deoxy-2'-fluorouridine-3'-phosphate
  modified_base 9: mod_base = OTHER; note = 2'-deoxy-2'-fluoroguanosine-3'-phosphate
  modified_base 10: mod_base = OTHER; note = 2'-O-methylguanosine-3'-phosphate
  modified_base 11: mod_base = OTHER; note = 2'-O-methyladenosine-3'-phosphate
  modified_base 12: mod_base = OTHER; note = 2'-O-methylcytidine-3'-phosphate
  modified_base 13: mod_base = OTHER; note = 2'-O-methyladenosine-3'-phosphate
  modified_base 14: mod_base = OTHER; note = 2'-deoxy-2'-fluorouridine-3'-phosphate
  modified_base 15: mod_base = OTHER; note = 2'-O-methylguanosine-3'-phosphate
  modified_base 16: mod_base = OTHER; note = 2'-deoxy-2'-fluoroguanosine-3'-phosphate
  modified_base 17: mod_base = OTHER; note = 2'-O-methyluridine-3'-phosphate
  modified_base 18: mod_base = OTHER; note = 2'-O-methylguanosine-3'-phosphate
  modified_base 19: mod_base = OTHER; note = 2'-O-methylguanosine-3'-phosphate
  modified_base 20: mod_base = OTHER; note = 2'-O-methylcytidine-3'-phosphate
  modified_base 21: mod_base = OTHER; note = 2'-O-methylcytidine-3'-phosphorothioate
  modified_base 22: mod_base = OTHER; note = 2'-O-methylguanosine-3'-phosphorothioate
  modified_base 23: mod_base = OTHER; note = 2'-O-methyluridine
atggctgtggacatggtggccgt

SEQ ID NO: 1157 - RNA, 23 nt, synthetic construct
  source 1..23: mol_type = other RNA
  modified_base 1: mod_base = OTHER; note = 2'-O-methyladenosine-3'-phosphorothioate
  modified_base 2: mod_base = OTHER; note = 2'-deoxy-2'-fluoroadenosine-3'-phosphorothioate
  modified_base 3: mod_base = OTHER; note = 2'-O-methylguanosine-3'-phosphate
  modified_base 4: mod_base = OTHER; note = 2'-O-methyluridine-3'-phosphate
  modified_base 5: mod_base = OTHER; note = 2'-O-methylcytidine-3'-phosphate
  modified_base 6: mod_base = OTHER; note = 2'-deoxy-2'-fluorouridine-3'-phosphate
  modified_base 7: mod_base = OTHER; note = 2'-O-methylcytidine-3'-phosphate
  modified_base 8: mod_base = OTHER; note = 2'-deoxy-2'-fluorouridine-3'-phosphate
  modified_base 9: mod_base = OTHER; note = 2'-deoxy-2'-fluoroguanosine-3'-phosphate
  modified_base 10: mod_base = OTHER; note = 2'-O-methylguanosine-3'-phosphate
  modified_base 11: mod_base = OTHER; note = 2'-O-methyladenosine-3'-phosphate
  modified_base 12: mod_base = OTHER; note = 2'-O-methylguanosine-3'-phosphate
  modified_base 13: mod_base = OTHER; note = 2'-O-methyluridine-3'-phosphate
  modified_base 14: mod_base = OTHER; note = 2'-deoxy-2'-fluoroguanosine-3'-phosphate
  modified_base 15: mod_base = OTHER; note = 2'-O-methylguanosine-3'-phosphate
  modified_base 16: mod_base = OTHER; note = 2'-deoxy-2'-fluoroadenosine-3'-phosphate
  modified_base 17: mod_base = OTHER; note = 2'-O-methylguanosine-3'-phosphate
  modified_base 18: mod_base = OTHER; note = 2'-O-methylguanosine-3'-phosphate
  modified_base 19: mod_base = OTHER; note = 2'-O-methyladenosine-3'-phosphate
  modified_base 20: mod_base = OTHER; note = 2'-O-methylguanosine-3'-phosphate
  modified_base 21: mod_base = OTHER; note = 2'-O-methylguanosine-3'-phosphorothioate
  modified_base 22: mod_base = OTHER; note = 2'-O-methylguanosine-3'-phosphorothioate
  modified_base 23: mod_base = OTHER; note = 2'-O-methyluridine
aagtctctggagtggaggagggt

SEQ ID NO: 1158 - RNA, 23 nt, synthetic construct
  source 1..23: mol_type = other RNA
  modified_base 1: mod_base = OTHER; note = 2'-O-methyladenosine-3'-phosphorothioate
  modified_base 2: mod_base = OTHER; note = 2'-deoxy-2'-fluoroguanosine-3'-phosphorothioate
  modified_base 3: mod_base = OTHER; note = 2'-O-methyluridine-3'-phosphate
  modified_base 4: mod_base = OTHER; note = 2'-O-methyladenosine-3'-phosphate
  modified_base 5: mod_base = OTHER; note = 2'-O-methyladenosine-3'-phosphate
  modified_base 6: mod_base = OTHER; note = 2'-deoxy-2'-fluoroguanosine-3'-phosphate
  modified_base 7: mod_base = OTHER; note = 2'-O-methylcytidine-3'-phosphate
  modified_base 8: mod_base = OTHER; note = 2'-deoxy-2'-fluoroadenosine-3'-phosphate
  modified_base 9: mod_base = OTHER; note = 2'-deoxy-2'-fluorocytidine-3'-phosphate
  modified_base 10: mod_base = OTHER; note = 2'-O-methyluridine-3'-phosphate
  modified_base 11: mod_base = OTHER; note = 2'-O-methylguanosine-3'-phosphate
  modified_base 12: mod_base = OTHER; note = 2'-O-methyluridine-3'-phosphate
  modified_base 13: mod_base = OTHER; note = 2'-O-methylguanosine-3'-phosphate
  modified_base 14: mod_base = OTHER; note = 2'-deoxy-2'-fluoroguanosine-3'-phosphate
  modified_base 15: mod_base = OTHER; note = 2'-O-methyladenosine-3'-phosphate
  modified_base 16: mod_base = OTHER; note = 2'-deoxy-2'-fluoroguanosine-3'-phosphate
  modified_base 17: mod_base = OTHER; note = 2'-O-methylguanosine-3'-phosphate
  modified_base 18: mod_base = OTHER; note = 2'-O-methyluridine-3'-phosphate
  modified_base 19: mod_base = OTHER; note = 2'-O-methylguanosine-3'-phosphate
  modified_base 20: mod_base = OTHER; note = 2'-O-methyluridine-3'-phosphate
  modified_base 21: mod_base = OTHER; note = 2'-O-methylguanosine-3'-phosphorothioate
  modified_base 22: mod_base = OTHER; note = 2'-O-methylguanosine-3'-phosphorothioate
  modified_base 23: mod_base = OTHER; note = 2'-O-methylguanosine
agtaagcactgtggaggtgtggg

SEQ ID NO: 1159 - RNA, 23 nt, synthetic construct
  source 1..23: mol_type = other RNA
  modified_base 1: mod_base = OTHER; note = 2'-O-methyladenosine-3'-phosphorothioate
  modified_base 2: mod_base = OTHER; note = 2'-deoxy-2'-fluoroguanosine-3'-phosphorothioate
  modified_base 3: mod_base = OTHER; note = 2'-O-methylguanosine-3'-phosphate
  modified_base 4: mod_base = OTHER; note = 2'-O-methyluridine-3'-phosphate
  modified_base 5: mod_base = OTHER; note = 2'-O-methyladenosine-3'-phosphate
  modified_base 6: mod_base = OTHER; note = 2'-deoxy-2'-fluoroguanosine-3'-phosphate
  modified_base 7: mod_base = OTHER; note = 2'-O-methyluridine-3'-phosphate
  modified_base 8: mod_base = OTHER; note = 2'-deoxy-2'-fluoroguanosine-3'-phosphate
  modified_base 9: mod_base = OTHER; note = 2'-deoxy-2'-fluorouridine-3'-phosphate
  modified_base 10: mod_base = OTHER; note = 2'-O-methylguanosine-3'-phosphate
  modified_base 11: mod_base = OTHER; note = 2'-O-methyladenosine-3'-phosphate
  modified_base 12: mod_base = OTHER; note = 2'-O-methylguanosine-3'-phosphate
  modified_base 13: mod_base = OTHER; note = 2'-O-methylcytidine-3'-phosphate
  modified_base 14: mod_base = OTHER; note = 2'-deoxy-2'-fluorouridine-3'-phosphate
  modified_base 15: mod_base = OTHER; note = 2'-O-methylguanosine-3'-phosphate
  modified_base 16: mod_base = OTHER; note = 2'-deoxy-2'-fluorouridine-3'-phosphate
  modified_base 17: mod_base = OTHER; note = 2'-O-methyluridine-3'-phosphate
  modified_base 18: mod_base = OTHER; note = 2'-O-methylcytidine-3'-phosphate
  modified_base 19: mod_base = OTHER; note = 2'-O-methylcytidine-3'-phosphate
  modified_base 20: mod_base = OTHER; note = 2'-O-methyluridine-3'-phosphate
  modified_base 21: mod_base = OTHER; note = 2'-O-methylguanosine-3'-phosphorothioate
  modified_base 22: mod_base = OTHER; note = 2'-O-methylguanosine-3'-phosphorothioate
  modified_base 23: mod_base = OTHER; note = 2'-O-methylguanosine
aggtagtgtgagctgttcctggg

SEQ ID NO: 1160 - RNA, 23 nt, synthetic construct
  source 1..23: mol_type = other RNA
  modified_base 1: mod_base = OTHER; note = 2'-O-methyladenosine-3'-phosphorothioate
  modified_base 2: mod_base = OTHER; note = 2'-deoxy-2'-fluorouridine-3'-phosphorothioate
  modified_base 3: mod_base = OTHER; note = 2'-O-methyluridine-3'-phosphate
  modified_base 4: mod_base = OTHER; note = 2'-O-methylguanosine-3'-phosphate
  modified_base 5: mod_base = OTHER; note = 2'-O-methyluridine-3'-phosphate
  modified_base 6: mod_base = OTHER; note = 2'-deoxy-2'-fluoroguanosine-3'-phosphate
  modified_base 7: mod_base = OTHER; note = 2'-O-methylcytidine-3'-phosphate
  modified_base 8: mod_base = OTHER; note = 2'-deoxy-2'-fluorouridine-3'-phosphate
  modified_base 9: mod_base = OTHER; note = 2'-deoxy-2'-fluoroguanosine-3'-phosphate
  modified_base 10: mod_base = OTHER; note = 2'-O-methyladenosine-3'-phosphate
  modified_base 11: mod_base = OTHER; note = 2'-O-methyluridine-3'-phosphate
  modified_base 12: mod_base = OTHER; note = 2'-O-methylcytidine-3'-phosphate
  modified_base 13: mod_base = OTHER; note = 2'-O-methylcytidine-3'-phosphate
  modified_base 14: mod_base = OTHER; note = 2'-deoxy-2'-fluoroadenosine-3'-phosphate
  modified_base 15: mod_base = OTHER; note = 2'-O-methylcytidine-3'-phosphate
  modified_base 16: mod_base = OTHER; note = 2'-deoxy-2'-fluoroadenosine-3'-phosphate
  modified_base 17: mod_base = OTHER; note = 2'-O-methylcytidine-3'-phosphate
  modified_base 18: mod_base = OTHER; note = 2'-O-methyluridine-3'-phosphate
  modified_base 19: mod_base = OTHER; note = 2'-O-methylguanosine-3'-phosphate
  modified_base 20: mod_base = OTHER; note = 2'-O-methylguanosine-3'-phosphate
  modified_base 21: mod_base = OTHER; note = 2'-O-methyladenosine-3'-phosphorothioate
  modified_base 22: mod_base = OTHER; note = 2'-O-methylguanosine-3'-phosphorothioate
  modified_base 23: mod_base = OTHER; note = 2'-O-methylguanosine
attgtgctgatccacactggagg

SEQ ID NO: 1161 - RNA, 23 nt, synthetic construct
  source 1..23: mol_type = other RNA
  modified_base 1: mod_base = OTHER; note = 2'-O-methyladenosine-3'-phosphorothioate
  modified_base 2: mod_base = OTHER; note = 2'-deoxy-2'-fluoroguanosine-3'-phosphorothioate
  modified_base 3: mod_base = OTHER; note = 2'-O-methyladenosine-3'-phosphate
  modified_base 4: mod_base = OTHER; note = 2'-O-methyluridine-3'-phosphate
  modified_base 5: mod_base = OTHER; note = 2'-O-methylguanosine-3'-phosphate
  modified_base 6: mod_base = OTHER; note = 2'-deoxy-2'-fluoroguanosine-3'-phosphate
  modified_base 7: mod_base = OTHER; note = 2'-O-methylguanosine-3'-phosphate
  modified_base 8: mod_base = OTHER; note = 2'-deoxy-2'-fluoroadenosine-3'-phosphate
  modified_base 9: mod_base = OTHER; note = 2'-deoxy-2'-fluoroguanosine-3'-phosphate
  modified_base 10: mod_base = OTHER; note = 2'-O-methyluridine-3'-phosphate
  modified_base 11: mod_base = OTHER; note = 2'-O-methyluridine-3'-phosphate
  modified_base 12: mod_base = OTHER; note = 2'-O-methylguanosine-3'-phosphate
  modified_base 13: mod_base = OTHER; note = 2'-O-methyluridine-3'-phosphate
  modified_base 14: mod_base = OTHER; note = 2'-deoxy-2'-fluorocytidine-3'-phosphate
  modified_base 15: mod_base = OTHER; note = 2'-O-methylcytidine-3'-phosphate
  modified_base 16: mod_base = OTHER; note = 2'-deoxy-2'-fluorocytidine-3'-phosphate
  modified_base 17: mod_base = OTHER; note = 2'-O-methyladenosine-3'-phosphate
  modified_base 18: mod_base = OTHER; note = 2'-O-methylguanosine-3'-phosphate
  modified_base 19: mod_base = OTHER; note = 2'-O-methylguanosine-3'-phosphate
  modified_base 20: mod_base = OTHER; note = 2'-O-methyladenosine-3'-phosphate
  modified_base 21: mod_base = OTHER; note = 2'-O-methylguanosine-3'-phosphorothioate
  modified_base 22: mod_base = OTHER; note = 2'-O-methyluridine-3'-phosphorothioate
  modified_base 23: mod_base = OTHER; note = 2'-O-methyluridine
agatgggagttgtcccaggagtt

SEQ ID NO: 1162 - RNA, 23 nt, synthetic construct
  source 1..23: mol_type = other RNA
  modified_base 1: mod_base = OTHER; note = 2'-O-methyladenosine-3'-phosphorothioate
  modified_base 2: mod_base = OTHER; note = 2'-deoxy-2'-fluoroadenosine-3'-phosphorothioate
  modified_base 3: mod_base = OTHER; note = 2'-O-methylguanosine-3'-phosphate
  modified_base 4: mod_base = OTHER; note = 2'-O-methylguanosine-3'-phosphate
  modified_base 5: mod_base = OTHER; note = 2'-O-methylguanosine-3'-phosphate
  modified_base 6: mod_base = OTHER; note = 2'-deoxy-2'-fluoroadenosine-3'-phosphate
  modified_base 7: mod_base = OTHER; note = 2'-O-methylguanosine-3'-phosphate
  modified_base 8: mod_base = OTHER; note = 2'-deoxy-2'-fluorouridine-3'-phosphate
  modified_base 9: mod_base = OTHER; note = 2'-deoxy-2'-fluorocytidine-3'-phosphate
  modified_base 10: mod_base = OTHER; note = 2'-O-methyladenosine-3'-phosphate
  modified_base 11: mod_base = OTHER; note = 2'-O-methylcytidine-3'-phosphate
  modified_base 12: mod_base = OTHER; note = 2'-O-methyluridine-3'-phosphate
  modified_base 13: mod_base = OTHER; note = 2'-O-methylguanosine-3'-phosphate
  modified_base 14: mod_base = OTHER; note = 2'-deoxy-2'-fluorouridine-3'-phosphate
  modified_base 15: mod_base = OTHER; note = 2'-O-methylguanosine-3'-phosphate
  modified_base 16: mod_base = OTHER; note = 2'-deoxy-2'-fluorouridine-3'-phosphate
  modified_base 17: mod_base = OTHER; note = 2'-O-methyluridine-3'-phosphate
  modified_base 18: mod_base = OTHER; note = 2'-O-methylguanosine-3'-phosphate
  modified_base 19: mod_base = OTHER; note = 2'-O-methylcytidine-3'-phosphate
  modified_base 20: mod_base = OTHER; note = 2'-O-methyluridine-3'-phosphate
  modified_base 21: mod_base = OTHER; note = 2'-O-methylguanosine-3'-phosphorothioate
  modified_base 22: mod_base = OTHER; note = 2'-O-methylguanosine-3'-phosphorothioate
  modified_base 23: mod_base = OTHER; note = 2'-O-methyluridine
aagggagtcactgtgttgctggt

SEQ ID NO: 1163 - RNA, 23 nt, synthetic construct
  source 1..23: mol_type = other RNA
  modified_base 1: mod_base = OTHER; note = 2'-O-methyladenosine-3'-phosphorothioate
  modified_base 2: mod_base = OTHER; note = 2'-deoxy-2'-fluorouridine-3'-phosphorothioate
  modified_base 3: mod_base = OTHER; note = 2'-O-methylguanosine-3'-phosphate
  modified_base 4: mod_base = OTHER; note = 2'-O-methylguanosine-3'-phosphate
  modified_base 5: mod_base = OTHER; note = 2'-O-methylcytidine-3'-phosphate
  modified_base 6: mod_base = OTHER; note = 2'-deoxy-2'-fluorocytidine-3'-phosphate
  modified_base 7: mod_base = OTHER; note = 2'-O-methyladenosine-3'-phosphate
  modified_base 8: mod_base = OTHER; note = 2'-deoxy-2'-fluorouridine-3'-phosphate
  modified_base 9: mod_base = OTHER; note = 2'-deoxy-2'-fluoroguanosine-3'-phosphate
  modified_base 10: mod_base = OTHER; note = 2'-O-methylguanosine-3'-phosphate
  modified_base 11: mod_base = OTHER; note = 2'-O-methyluridine-3'-phosphate
  modified_base 12: mod_base = OTHER; note = 2'-O-methylguanosine-3'-phosphate
  modified_base 13: mod_base = OTHER; note = 2'-O-methyluridine-3'-phosphate
  modified_base 14: mod_base = OTHER; note = 2'-deoxy-2'-fluorouridine-3'-phosphate
  modified_base 15: mod_base = OTHER; note = 2'-O-methylcytidine-3'-phosphate
  modified_base 16: mod_base = OTHER; note = 2'-deoxy-2'-fluoroguanosine-3'-phosphate
  modified_base 17: mod_base = OTHER; note = 2'-O-methylguanosine-3'-phosphate
  modified_base 18: mod_base = OTHER; note = 2'-O-methylcytidine-3'-phosphate
  modified_base 19: mod_base = OTHER; note = 2'-O-methyladenosine-3'-phosphate
  modified_base 20: mod_base = OTHER; note = 2'-O-methylcytidine-3'-phosphate
  modified_base 21: mod_base = OTHER; note = 2'-O-methyluridine-3'-phosphorothioate
  modified_base 22: mod_base = OTHER; note = 2'-O-methylguanosine-3'-phosphorothioate
  modified_base 23: mod_base = OTHER; note = 2'-O-methylguanosine
atggccatggtgttcggcactgg

SEQ ID NO: 1164 - RNA, 23 nt, synthetic construct
  source 1..23: mol_type = other RNA
  modified_base 1: mod_base = OTHER; note = 2'-O-methyladenosine-3'-phosphorothioate
  modified_base 2: mod_base = OTHER; note = 2'-deoxy-2'-fluorocytidine-3'-phosphorothioate
  modified_base 3: mod_base = OTHER; note = 2'-O-methyluridine-3'-phosphate
  modified_base 4: mod_base = OTHER; note = 2'-O-methyladenosine-3'-phosphate
  modified_base 5: mod_base = OTHER; note = 2'-O-methylguanosine-3'-phosphate
  modified_base 6: mod_base = OTHER; note = 2'-deoxy-2'-fluoroguanosine-3'-phosphate
  modified_base 7: mod_base = OTHER; note = 2'-O-methylguanosine-3'-phosphate
  modified_base 8: mod_base = OTHER; note = 2'-deoxy-2'-fluorouridine-3'-phosphate
  modified_base 9: mod_base = OTHER; note = 2'-deoxy-2'-fluoroguanosine-3'-phosphate
  modified_base 10: mod_base = OTHER; note = 2'-O-methyluridine-3'-phosphate
  modified_base 11: mod_base = OTHER; note = 2'-O-methylguanosine-3'-phosphate
  modified_base 12: mod_base = OTHER; note = 2'-O-methylguanosine-3'-phosphate
  modified_base 13: mod_base = OTHER; note = 2'-O-methylguanosine-3'-phosphate
  modified_base 14: mod_base = OTHER; note = 2'-deoxy-2'-fluoroadenosine-3'-phosphate
  modified_base 15: mod_base = OTHER; note = 2'-O-methyladenosine-3'-phosphate
  modified_base 16: mod_base = OTHER; note = 2'-deoxy-2'-fluoroguanosine-3'-phosphate
  modified_base 17: mod_base = OTHER; note = 2'-O-methyluridine-3'-phosphate
  modified_base 18: mod_base = OTHER; note = 2'-O-methylcytidine-3'-phosphate
  modified_base 19: mod_base = OTHER; note = 2'-O-methyladenosine-3'-phosphate
  modified_base 20: mod_base = OTHER; note = 2'-O-methylcytidine-3'-phosphate
  modified_base 21: mod_base = OTHER; note = 2'-O-methylcytidine-3'-phosphorothioate
  modified_base 22: mod_base = OTHER; note = 2'-O-methylguanosine-3'-phosphorothioate
  modified_base 23: mod_base = OTHER; note = 2'-O-methyluridine
actagggtgtgggaagtcaccgt

SEQ ID NO: 1165 - RNA, 23 nt, synthetic construct
  source 1..23: mol_type = other RNA
  modified_base 1: mod_base = OTHER; note = 2'-O-methyladenosine-3'-phosphorothioate
  modified_base 2: mod_base = OTHER; note = 2'-deoxy-2'-fluoroguanosine-3'-phosphorothioate
  modified_base 3: mod_base = OTHER; note = 2'-O-methylcytidine-3'-phosphate
  modified_base 4: mod_base = OTHER; note = 2'-O-methyluridine-3'-phosphate
  modified_base 5: mod_base = OTHER; note = 2'-O-methylguanosine-3'-phosphate
  modified_base 6: mod_base = OTHER; note = 2'-deoxy-2'-fluoroguanosine-3'-phosphate
  modified_base 7: mod_base = OTHER; note = 2'-O-methyladenosine-3'-phosphate
  modified_base 8: mod_base = OTHER; note = 2'-deoxy-2'-fluoroadenosine-3'-phosphate
  modified_base 9: mod_base = OTHER; note = 2'-deoxy-2'-fluoroadenosine-3'-phosphate
  modified_base 10: mod_base = OTHER; note = 2'-O-methylguanosine-3'-phosphate
  modified_base 11: mod_base = OTHER; note = 2'-O-methylguanosine-3'-phosphate
  modified_base 12: mod_base = OTHER; note = 2'-O-methylguanosine-3'-phosphate
  modified_base 13: mod_base = OTHER; note = 2'-O-methylcytidine-3'-phosphate
  modified_base 14: mod_base = OTHER; note = 2'-deoxy-2'-fluorouridine-3'-phosphate
  modified_base 15: mod_base = OTHER; note = 2'-O-methylguanosine-3'-phosphate
  modified_base 16: mod_base = OTHER; note = 2'-deoxy-2'-fluoroguanosine-3'-phosphate
  modified_base 17: mod_base = OTHER; note = 2'-O-methyladenosine-3'-phosphate
  modified_base 18: mod_base = OTHER; note = 2'-O-methylguanosine-3'-phosphate
  modified_base 19: mod_base = OTHER; note = 2'-O-methyluridine-3'-phosphate
  modified_base 20: mod_base = OTHER; note = 2'-O-methylcytidine-3'-phosphate
  modified_base 21: mod_base = OTHER; note = 2'-O-methylguanosine-3'-phosphorothioate
  modified_base 22: mod_base = OTHER; note = 2'-O-methyladenosine-3'-phosphorothioate
  modified_base 23: mod_base = OTHER; note = 2'-O-methylguanosine
agctggaaagggctggagtcgag

SEQ ID NO: 1166 - RNA, 23 nt, synthetic construct
  source 1..23: mol_type = other RNA
  modified_base 1: mod_base = OTHER; note = 2'-O-methyladenosine-3'-phosphorothioate
  modified_base 2: mod_base = OTHER; note = 2'-deoxy-2'-fluoroadenosine-3'-phosphorothioate
  modified_base 3: mod_base = OTHER; note = 2'-O-methylcytidine-3'-phosphate
  modified_base 4: mod_base = OTHER; note = 2'-O-methyluridine-3'-phosphate
  modified_base 5: mod_base = OTHER; note = 2'-O-methylcytidine-3'-phosphate
  modified_base 6: mod_base = OTHER; note = 2'-deoxy-2'-fluoroguanosine-3'-phosphate
  modified_base 7: mod_base = OTHER; note = 2'-O-methylguanosine-3'-phosphate
  modified_base 8: mod_base = OTHER; note = 2'-deoxy-2'-fluorouridine-3'-phosphate
  modified_base 9: mod_base = OTHER; note = 2'-deoxy-2'-fluoroguanosine-3'-phosphate
  modified_base 10: mod_base = OTHER; note = 2'-O-methylguanosine-3'-phosphate
  modified_base 11: mod_base = OTHER; note = 2'-O-methyluridine-3'-phosphate
  modified_base 12: mod_base = OTHER; note = 2'-O-methyluridine-3'-phosphate
  modified_base 13: mod_base = OTHER; note = 2'-O-methylcytidine-3'-phosphate
  modified_base 14: mod_base = OTHER; note = 2'-deoxy-2'-fluorouridine-3'-phosphate
  modified_base 15: mod_base = OTHER; note = 2'-O-methylguanosine-3'-phosphate
  modified_base 16: mod_base = OTHER; note = 2'-deoxy-2'-fluorocytidine-3'-phosphate
  modified_base 17: mod_base = OTHER; note = 2'-O-methyluridine-3'-phosphate
  modified_base 18: mod_base = OTHER; note = 2'-O-methylguanosine-3'-phosphate
  modified_base 19: mod_base = OTHER; note = 2'-O-methylcytidine-3'-phosphate
  modified_base 20: mod_base = OTHER; note = 2'-O-methyluridine-3'-phosphate
  modified_base 21: mod_base = OTHER; note = 2'-O-methyladenosine-3'-phosphorothioate
  modified_base 22: mod_base = OTHER; note = 2'-O-methylguanosine-3'-phosphorothioate
  modified_base 23: mod_base = OTHER; note = 2'-O-methylguanosine
aactcggtggttctgctgctagg

SEQ ID NO: 1167 - RNA, 23 nt, synthetic construct
  source 1..23: mol_type = other RNA
  modified_base 1: mod_base = OTHER; note = 2'-O-methyladenosine-3'-phosphorothioate
  modified_base 2: mod_base = OTHER; note = 2'-deoxy-2'-fluoroadenosine-3'-phosphorothioate
  modified_base 3: mod_base = OTHER; note = 2'-O-methylguanosine-3'-phosphate
  modified_base 4: mod_base = OTHER; note = 2'-O-methylcytidine-3'-phosphate
  modified_base 5: mod_base = OTHER; note = 2'-O-methyladenosine-3'-phosphate
  modified_base 6: mod_base = OTHER; note = 2'-deoxy-2'-fluorocytidine-3'-phosphate
  modified_base 7: mod_base = OTHER; note = 2'-O-methyluridine-3'-phosphate
  modified_base 8: mod_base = OTHER; note = 2'-deoxy-2'-fluorouridine-3'-phosphate
  modified_base 9: mod_base = OTHER; note = 2'-deoxy-2'-fluorouridine-3'-phosphate
  modified_base 10: mod_base = OTHER; note = 2'-O-methylguanosine-3'-phosphate
  modified_base 11: mod_base = OTHER; note = 2'-O-methylguanosine-3'-phosphate
  modified_base 12: mod_base = OTHER; note = 2'-O-methyluridine-3'-phosphate
  modified_base 13: mod_base = OTHER; note = 2'-O-methyladenosine-3'-phosphate
  modified_base 14: mod_base = OTHER; note = 2'-deoxy-2'-fluoroguanosine-3'-phosphate
  modified_base 15: mod_base = OTHER; note = 2'-O-methyluridine-3'-phosphate
  modified_base 16: mod_base = OTHER; note = 2'-deoxy-2'-fluoroguanosine-3'-phosphate
  modified_base 17: mod_base = OTHER; note = 2'-O-methyluridine-3'-phosphate
  modified_base 18: mod_base = OTHER; note = 2'-O-methylguanosine-3'-phosphate
  modified_base 19: mod_base = OTHER; note = 2'-O-methyladenosine-3'-phosphate
  modified_base 20: mod_base = OTHER; note = 2'-O-methylguanosine-3'-phosphate
  modified_base 21: mod_base = OTHER; note = 2'-O-methylcytidine-3'-phosphorothioate
  modified_base 22: mod_base = OTHER; note = 2'-O-methyluridine-3'-phosphorothioate
  modified_base 23: mod_base = OTHER; note = 2'-O-methylguanosine
aagcactttggtagtgtgagctg

SEQ ID NO: 1168 - RNA, 23 nt, synthetic construct
  source 1..23: mol_type = other RNA
  modified_base 1: mod_base = OTHER; note = 2'-O-methyladenosine-3'-phosphorothioate
  modified_base 2: mod_base = OTHER; note = 2'-deoxy-2'-fluorocytidine-3'-phosphorothioate
  modified_base 3: mod_base = OTHER; note = 2'-O-methyluridine-3'-phosphate
  modified_base 4: mod_base = OTHER; note = 2'-O-methylguanosine-3'-phosphate
  modified_base 5: mod_base = OTHER; note = 2'-O-methyladenosine-3'-phosphate
  modified_base 6: mod_base = OTHER; note = 2'-deoxy-2'-fluorouridine-3'-phosphate
  modified_base 7: mod_base = OTHER; note = 2'-O-methylcytidine-3'-phosphate
  modified_base 8: mod_base = OTHER; note = 2'-deoxy-2'-fluorocytidine-3'-phosphate
  modified_base 9: mod_base = OTHER; note = 2'-deoxy-2'-fluoroadenosine-3'-phosphate
  modified_base 10: mod_base = OTHER; note = 2'-O-methylcytidine-3'-phosphate
  modified_base 11: mod_base = OTHER; note = 2'-O-methyladenosine-3'-phosphate
  modified_base 12: mod_base = OTHER; note = 2'-O-methylcytidine-3'-phosphate
  modified_base 13: mod_base = OTHER; note = 2'-O-methyluridine-3'-phosphate
  modified_base 14: mod_base = OTHER; note = 2'-deoxy-2'-fluoroguanosine-3'-phosphate
  modified_base 15: mod_base = OTHER; note = 2'-O-methylguanosine-3'-phosphate
  modified_base 16: mod_base = OTHER; note = 2'-deoxy-2'-fluoroadenosine-3'-phosphate
  modified_base 17: mod_base = OTHER; note = 2'-O-methyladenosine-3'-phosphate
  modified_base 18: mod_base = OTHER; note = 2'-O-methylguanosine-3'-phosphate
  modified_base 19: mod_base = OTHER; note = 2'-O-methylcytidine-3'-phosphate
  modified_base 20: mod_base = OTHER; note = 2'-O-methylguanosine-3'-phosphate
  modified_base 21: mod_base = OTHER; note = 2'-O-methyluridine-3'-phosphorothioate
  modified_base 22: mod_base = OTHER; note = 2'-O-methylguanosine-3'-phosphorothioate
  modified_base 23: mod_base = OTHER; note = 2'-O-methylcytidine
actgatccacactggaagcgtgc

SEQ ID NO: 1169 - RNA, 23 nt, synthetic construct
  source 1..23: mol_type = other RNA
  modified_base 1: mod_base = OTHER; note = 2'-O-methyladenosine-3'-phosphorothioate
  modified_base 2: mod_base = OTHER; note = 2'-deoxy-2'-fluoroguanosine-3'-phosphorothioate
  modified_base 3: mod_base = OTHER; note = 2'-O-methylguanosine-3'-phosphate
  modified_base 4: mod_base = OTHER; note = 2'-O-methyladenosine-3'-phosphate
  modified_base 5: mod_base = OTHER; note = 2'-O-methyladenosine-3'-phosphate
  modified_base 6: mod_base = OTHER; note = 2'-deoxy-2'-fluorocytidine-3'-phosphate
  modified_base 7: mod_base = OTHER; note = 2'-O-methylcytidine-3'-phosphate
  modified_base 8: mod_base = OTHER; note = 2'-deoxy-2'-fluorouridine-3'-phosphate
  modified_base 9: mod_base = OTHER; note = 2'-deoxy-2'-fluorocytidine-3'-phosphate
  modified_base 10: mod_base = OTHER; note = 2'-O-methyluridine-3'-phosphate
  modified_base 11: mod_base = OTHER; note = 2'-O-methylguanosine-3'-phosphate
  modified_base 12: mod_base = OTHER; note = 2'-O-methylguanosine-3'-phosphate
  modified_base 13: mod_base = OTHER; note = 2'-O-methyluridine-3'-phosphate
  modified_base 14: mod_base = OTHER; note = 2'-deoxy-2'-fluorouridine-3'-phosphate
  modified_base 15: mod_base = OTHER; note = 2'-O-methylguanosine-3'-phosphate
  modified_base 16: mod_base = OTHER; note = 2'-deoxy-2'-fluorouridine-3'-phosphate
  modified_base 17: mod_base = OTHER; note = 2'-O-methylguanosine-3'-phosphate
  modified_base 18: mod_base = OTHER; note = 2'-O-methylguanosine-3'-phosphate
  modified_base 19: mod_base = OTHER; note = 2'-O-methylguanosine-3'-phosphate
  modified_base 20: mod_base = OTHER; note = 2'-O-methyluridine-3'-phosphate
  modified_base 21: mod_base = OTHER; note = 2'-O-methylguanosine-3'-phosphorothioate
  modified_base 22: mod_base = OTHER; note = 2'-O-methyluridine-3'-phosphorothioate
  modified_base 23: mod_base = OTHER; note = 2'-O-methylguanosine
aggaacctctggttgtgggtgtg

SEQ ID NO: 1170 - RNA, 23 nt, synthetic construct
  source 1..23: mol_type = other RNA
  modified_base 1: mod_base = OTHER; note = 2'-O-methyladenosine-3'-phosphorothioate
  modified_base 2: mod_base = OTHER; note = 2'-deoxy-2'-fluoroadenosine-3'-phosphorothioate
  modified_base 3: mod_base = OTHER; note = 2'-O-methylguanosine-3'-phosphate
  modified_base 4: mod_base = OTHER; note = 2'-O-methylcytidine-3'-phosphate
  modified_base 5: mod_base = OTHER; note = 2'-O-methylcytidine-3'-phosphate
  modified_base 6: mod_base = OTHER; note = 2'-deoxy-2'-fluorocytidine-3'-phosphate
  modified_base 7: mod_base = OTHER; note = 2'-O-methyladenosine-3'-phosphate
  modified_base 8: mod_base = OTHER; note = 2'-deoxy-2'-fluorouridine-3'-phosphate
  modified_base 9: mod_base = OTHER; note = 2'-deoxy-2'-fluoroguanosine-3'-phosphate
  modified_base 10: mod_base = OTHER; note = 2'-O-methylguanosine-3'-phosphate
  modified_base 11: mod_base = OTHER; note = 2'-O-methyluridine-3'-phosphate
  modified_base 12: mod_base = OTHER; note = 2'-O-methylcytidine-3'-phosphate
  modified_base 13: mod_base = OTHER; note = 2'-O-methyladenosine-3'-phosphate
  modified_base 14: mod_base = OTHER; note = 2'-deoxy-2'-fluorocytidine-3'-phosphate
  modified_base 15: mod_base = OTHER; note = 2'-O-methylcytidine-3'-phosphate
  modified_base 16: mod_base = OTHER; note = 2'-deoxy-2'-fluoroadenosine-3'-phosphate
  modified_base 17: mod_base = OTHER; note = 2'-O-methylcytidine-3'-phosphate
  modified_base 18: mod_base = OTHER; note = 2'-O-methylcytidine-3'-phosphate
  modified_base 19: mod_base = OTHER; note = 2'-O-methylguanosine-3'-phosphate
  modified_base 20: mod_base = OTHER; note = 2'-O-methyluridine-3'-phosphate
  modified_base 21: mod_base = OTHER; note = 2'-O-methylguanosine-3'-phosphorothioate
  modified_base 22: mod_base = OTHER; note = 2'-O-methylguanosine-3'-phosphorothioate
  modified_base 23: mod_base = OTHER; note = 2'-O-methyluridine
aagcccatggtcaccaccgtggt

SEQ ID NO: 1171 - RNA, 23 nt, synthetic construct
  source 1..23: mol_type = other RNA
  modified_base 1: mod_base = OTHER; note = 2'-O-methyladenosine-3'-phosphorothioate
  modified_base 2: mod_base = OTHER; note = 2'-deoxy-2'-fluoroguanosine-3'-phosphorothioate
  modified_base 3: mod_base = OTHER; note = 2'-O-methyluridine-3'-phosphate
  modified_base 4: mod_base = OTHER; note = 2'-O-methylguanosine-3'-phosphate
  modified_base 5: mod_base = OTHER; note = 2'-O-methylguanosine-3'-phosphate
  modified_base 6: mod_base = OTHER; note = 2'-deoxy-2'-fluorouridine-3'-phosphate
  modified_base 7: mod_base = OTHER; note = 2'-O-methylcytidine-3'-phosphate
  modified_base 8: mod_base = OTHER; note = 2'-deoxy-2'-fluoroadenosine-3'-phosphate
  modified_base 9: mod_base = OTHER; note = 2'-deoxy-2'-fluoroguanosine-3'-phosphate
  modified_base 10: mod_base = OTHER; note = 2'-O-methylcytidine-3'-phosphate
  modified_base 11: mod_base = OTHER; note = 2'-O-methyladenosine-3'-phosphate
  modified_base 12: mod_base = OTHER; note = 2'-O-methylcytidine-3'-phosphate
  modified_base 13: mod_base = OTHER; note = 2'-O-methyluridine-3'-phosphate
  modified_base 14: mod_base = OTHER; note = 2'-deoxy-2'-fluoroguanosine-3'-phosphate
  modified_base 15: mod_base = OTHER; note = 2'-O-methyluridine-3'-phosphate
  modified_base 16: mod_base = OTHER; note = 2'-deoxy-2'-fluoroguanosine-3'-phosphate
  modified_base 17: mod_base = OTHER; note = 2'-O-methylguanosine-3'-phosphate
  modified_base 18: mod_base = OTHER; note = 2'-O-methylcytidine-3'-phosphate
  modified_base 19: mod_base = OTHER; note = 2'-O-methylguanosine-3'-phosphate
  modified_base 20: mod_base = OTHER; note = 2'-O-methylguanosine-3'-phosphate
  modified_base 21: mod_base = OTHER; note = 2'-O-methyluridine-3'-phosphorothioate
  modified_base 22: mod_base = OTHER; note = 2'-O-methylguanosine-3'-phosphorothioate
  modified_base 23: mod_base = OTHER; note = 2'-O-methyluridine
agtggtcagcactgtggcggtgt

SEQ ID NO: 1172 - RNA, 23 nt, synthetic construct
  source 1..23: mol_type = other RNA
  modified_base 1: mod_base = OTHER; note = 2'-O-methyladenosine-3'-phosphorothioate
  modified_base 2: mod_base = OTHER; note = 2'-deoxy-2'-fluoroadenosine-3'-phosphorothioate
  modified_base 3: mod_base = OTHER; note = 2'-O-methylguanosine-3'-phosphate
  modified_base 4: mod_base = OTHER; note = 2'-O-methyluridine-3'-phosphate
  modified_base 5: mod_base = OTHER; note = 2'-O-methylguanosine-3'-phosphate
  modified_base 6: mod_base = OTHER; note = 2'-deoxy-2'-fluoroguanosine-3'-phosphate
  modified_base 7: mod_base = OTHER; note = 2'-O-methyladenosine-3'-phosphate
  modified_base 8: mod_base = OTHER; note = 2'-deoxy-2'-fluorocytidine-3'-phosphate
  modified_base 9: mod_base = OTHER; note = 2'-deoxy-2'-fluorouridine-3'-phosphate
  modified_base 10: mod_base = OTHER; note = 2'-O-methylcytidine-3'-phosphate
  modified_base 11: mod_base = OTHER; note = 2'-O-methyladenosine-3'-phosphate
  modified_base 12: mod_base = OTHER; note = 2'-O-methylguanosine-3'-phosphate
  modified_base 13: mod_base = OTHER; note = 2'-O-methyluridine-3'-phosphate
  modified_base 14: mod_base = OTHER; note = 2'-deoxy-2'-fluorocytidine-3'-phosphate
  modified_base 15: mod_base = OTHER; note = 2'-O-methylguanosine-3'-phosphate
  modified_base 16: mod_base = OTHER; note = 2'-deoxy-2'-fluorouridine-3'-phosphate
  modified_base 17: mod_base = OTHER; note = 2'-O-methyladenosine-3'-phosphate
  modified_base 18: mod_base = OTHER; note = 2'-O-methylguanosine-3'-phosphate
  modified_base 19: mod_base = OTHER; note = 2'-O-methyluridine-3'-phosphate
  modified_base 20: mod_base = OTHER; note = 2'-O-methylguanosine-3'-phosphate
  modified_base 21: mod_base = OTHER; note = 2'-O-methylguanosine-3'-phosphorothioate
  modified_base 22: mod_base = OTHER; note = 2'-O-methylcytidine-3'-phosphorothioate
  modified_base 23: mod_base = OTHER; note = 2'-O-methyluridine
aagtggactcagtcgtagtggct

SEQ ID NO: 1173 - RNA, 23 nt, synthetic construct
  source 1..23: mol_type = other RNA
  modified_base 1: mod_base = OTHER; note = 2'-O-methyladenosine-3'-phosphorothioate
  modified_base 2: mod_base = OTHER; note = 2'-deoxy-2'-fluoroguanosine-3'-phosphorothioate
  modified_base 3: mod_base = OTHER; note = 2'-O-methyladenosine-3'-phosphate
  modified_base 4: mod_base = OTHER; note = 2'-O-methyladenosine-3'-phosphate
  modified_base 5: mod_base = OTHER; note = 2'-O-methylguanosine-3'-phosphate
  modified_base 6: mod_base = OTHER; note = 2'-deoxy-2'-fluoroguanosine-3'-phosphate
  modified_base 7: mod_base = OTHER; note = 2'-O-methylguanosine-3'-phosphate
  modified_base 8: mod_base = OTHER; note = 2'-deoxy-2'-fluoroadenosine-3'-phosphate
  modified_base 9: mod_base = OTHER; note = 2'-deoxy-2'-fluoroguanosine-3'-phosphate
  modified_base 10: mod_base = OTHER; note = 2'-O-methyluridine-3'-phosphate
  modified_base 11: mod_base = OTHER; note = 2'-O-methylguanosine-3'-phosphate
  modified_base 12: mod_base = OTHER; note = 2'-O-methylguanosine-3'-phosphate
  modified_base 13: mod_base = OTHER; note = 2'-O-methylcytidine-3'-phosphate
  modified_base 14: mod_base = OTHER; note = 2'-deoxy-2'-fluorouridine-3'-phosphate
  modified_base 15: mod_base = OTHER; note = 2'-O-methyluridine-3'-phosphate
  modified_base 16: mod_base = OTHER; note = 2'-deoxy-2'-fluorouridine-3'-phosphate
  modified_base 17: mod_base = OTHER; note = 2'-O-methylguanosine-3'-phosphate
  modified_base 18: mod_base = OTHER; note = 2'-O-methylguanosine-3'-phosphate
  modified_base 19: mod_base = OTHER; note = 2'-O-methyladenosine-3'-phosphate
  modified_base 20: mod_base = OTHER; note = 2'-O-methylguanosine-3'-phosphate
  modified_base 21: mod_base = OTHER; note = 2'-O-methylcytidine-3'-phosphorothioate
  modified_base 22: mod_base = OTHER; note = 2'-O-methyluridine-3'-phosphorothioate
  modified_base 23: mod_base = OTHER; note = 2'-O-methylguanosine
agaagggagtggctttggagctg

SEQ ID NO: 1174 - RNA, 23 nt, synthetic construct
  source 1..23: mol_type = other RNA
  modified_base 1: mod_base = OTHER; note = 2'-O-methyladenosine-3'-phosphorothioate
  modified_base 2: mod_base = OTHER; note = 2'-deoxy-2'-fluoroguanosine-3'-phosphorothioate
  modified_base 3: mod_base = OTHER; note = 2'-O-methyladenosine-3'-phosphate
  modified_base 4: mod_base = OTHER; note = 2'-O-methyluridine-3'-phosphate
  modified_base 5: mod_base = OTHER; note = 2'-O-methyladenosine-3'-phosphate
  modified_base 6: mod_base = OTHER; note = 2'-deoxy-2'-fluoroguanosine-3'-phosphate
  modified_base 7: mod_base = OTHER; note = 2'-O-methylguanosine-3'-phosphate
  modified_base 8: mod_base = OTHER; note = 2'-deoxy-2'-fluorouridine-3'-phosphate
  modified_base 9: mod_base = OTHER; note = 2'-deoxy-2'-fluoroguanosine-3'-phosphate
  modified_base 10: mod_base = OTHER; note = 2'-O-methyluridine-3'-phosphate
  modified_base 11: mod_base = OTHER; note = 2'-O-methyluridine-3'-phosphate
  modified_base 12: mod_base = OTHER; note = 2'-O-methylguanosine-3'-phosphate
  modified_base 13: mod_base = OTHER; note = 2'-O-methyluridine-3'-phosphate
  modified_base 14: mod_base = OTHER; note = 2'-deoxy-2'-fluorocytidine-3'-phosphate
  modified_base 15: mod_base = OTHER; note = 2'-O-methylcytidine-3'-phosphate
  modified_base 16: mod_base = OTHER; note = 2'-deoxy-2'-fluorocytidine-3'-phosphate
  modified_base 17: mod_base = OTHER; note = 2'-O-methyluridine-3'-phosphate
  modified_base 18: mod_base = OTHER; note = 2'-O-methylguanosine-3'-phosphate
  modified_base 19: mod_base = OTHER; note = 2'-O-methylguanosine-3'-phosphate
  modified_base 20: mod_base = OTHER; note = 2'-O-methyladenosine-3'-phosphate
  modified_base 21: mod_base = OTHER; note = 2'-O-methylguanosine-3'-phosphorothioate
  modified_base 22: mod_base = OTHER; note = 2'-O-methyluridine-3'-phosphorothioate
  modified_base 23: mod_base = OTHER; note = 2'-O-methyluridine
agataggtgttgtccctggagtt

SEQ ID NO: 1175 - RNA, 23 nt, synthetic construct
  source 1..23: mol_type = other RNA
  modified_base 1: mod_base = OTHER; note = 2'-O-methyladenosine-3'-phosphorothioate
  modified_base 2: mod_base = OTHER; note = 2'-deoxy-2'-fluoroadenosine-3'-phosphorothioate
  modified_base 3: mod_base = OTHER; note = 2'-O-methylguanosine-3'-phosphate
  modified_base 4: mod_base = OTHER; note = 2'-O-methylguanosine-3'-phosphate
  modified_base 5: mod_base = OTHER; note = 2'-O-methylguanosine-3'-phosphate
  modified_base 6: mod_base = OTHER; note = 2'-deoxy-2'-fluoroadenosine-3'-phosphate
  modified_base 7: mod_base = OTHER; note = 2'-O-methylguanosine-3'-phosphate
  modified_base 8: mod_base = OTHER; note = 2'-deoxy-2'-fluorouridine-3'-phosphate
  modified_base 9: mod_base = OTHER; note = 2'-deoxy-2'-fluorocytidine-3'-phosphate
  modified_base 10: mod_base = OTHER; note = 2'-O-methyladenosine-3'-phosphate
  modified_base 11: mod_base = OTHER; note = 2'-O-methylcytidine-3'-phosphate
  modified_base 12: mod_base = OTHER; note = 2'-O-methyluridine-3'-phosphate
  modified_base 13: mod_base = OTHER; note = 2'-O-methylguanosine-3'-phosphate
  modified_base 14: mod_base = OTHER; note = 2'-deoxy-2'-fluorouridine-3'-phosphate
  modified_base 15: mod_base = OTHER; note = 2'-O-methylguanosine-3'-phosphate
  modified_base 16: mod_base = OTHER; note = 2'-deoxy-2'-fluorocytidine-3'-phosphate
  modified_base 17: mod_base = OTHER; note = 2'-O-methyluridine-3'-phosphate
  modified_base 18: mod_base = OTHER; note = 2'-O-methylguanosine-3'-phosphate
  modified_base 19: mod_base = OTHER; note = 2'-O-methylcytidine-3'-phosphate
  modified_base 20: mod_base = OTHER; note = 2'-O-methyluridine-3'-phosphate
  modified_base 21: mod_base = OTHER; note = 2'-O-methylguanosine-3'-phosphorothioate
  modified_base 22: mod_base = OTHER; note = 2'-O-methylguanosine-3'-phosphorothioate
  modified_base 23: mod_base = OTHER; note = 2'-O-methyluridine
aagggagtcactgtgctgctggt

SEQ ID NO: 1176 - RNA, 23 nt, synthetic construct
  source 1..23: mol_type = other RNA
  modified_base 1: mod_base = OTHER; note = 2'-O-methyladenosine-3'-phosphorothioate
  modified_base 2: mod_base = OTHER; note = 2'-deoxy-2'-fluorouridine-3'-phosphorothioate
  modified_base 3: mod_base = OTHER; note = 2'-O-methylguanosine-3'-phosphate
  modified_base 4: mod_base = OTHER; note = 2'-O-methyluridine-3'-phosphate
  modified_base 5: mod_base = OTHER; note = 2'-O-methylguanosine-3'-phosphate
  modified_base 6: mod_base = OTHER; note = 2'-deoxy-2'-fluoroguanosine-3'-phosphate
  modified_base 7: mod_base = OTHER; note = 2'-O-methylguanosine-3'-phosphate
  modified_base 8: mod_base = OTHER; note = 2'-deoxy-2'-fluorouridine-3'-phosphate
  modified_base 9: mod_base = OTHER; note = 2'-deoxy-2'-fluoroguanosine-3'-phosphate
  modified_base 10: mod_base = OTHER; note = 2'-O-methylguanosine-3'-phosphate
  modified_base 11: mod_base = OTHER; note = 2'-O-methyluridine-3'-phosphate
  modified_base 12: mod_base = OTHER; note = 2'-O-methylcytidine-3'-phosphate
  modified_base 13: mod_base = OTHER; note = 2'-O-methylcytidine-3'-phosphate
  modified_base 14: mod_base = OTHER; note = 2'-deoxy-2'-fluorocytidine-3'-phosphate
  modified_base 15: mod_base = OTHER; note = 2'-O-methyluridine-3'-phosphate
  modified_base 16: mod_base = OTHER; note = 2'-deoxy-2'-fluoroadenosine-3'-phosphate
  modified_base 17: mod_base = OTHER; note = 2'-O-methylguanosine-3'-phosphate
  modified_base 18: mod_base = OTHER; note = 2'-O-methylguanosine-3'-phosphate
  modified_base 19: mod_base = OTHER; note = 2'-O-methylguanosine-3'-phosphate
  modified_base 20: mod_base = OTHER; note = 2'-O-methylcytidine-3'-phosphate
  modified_base 21: mod_base = OTHER; note = 2'-O-methyladenosine-3'-phosphorothioate
  modified_base 22: mod_base = OTHER; note = 2'-O-methylguanosine-3'-phosphorothioate
  modified_base 23: mod_base = OTHER; note = 2'-O-methyladenosine
atgtgggtggtccctagggcaga

SEQ ID NO: 1177 - RNA, 23 nt, synthetic construct
  source 1..23: mol_type = other RNA
  modified_base 1: mod_base = OTHER; note = 2'-O-methyladenosine-3'-phosphorothioate
  modified_base 2: mod_base = OTHER; note = 2'-deoxy-2'-fluoroadenosine-3'-phosphorothioate
  modified_base 3: mod_base = OTHER; note = 2'-O-methylcytidine-3'-phosphate
  modified_base 4: mod_base = OTHER; note = 2'-O-methyladenosine-3'-phosphate
  modified_base 5: mod_base = OTHER; note = 2'-O-methylguanosine-3'-phosphate
  modified_base 6: mod_base = OTHER; note = 2'-deoxy-2'-fluoroguanosine-3'-phosphate
  modified_base 7: mod_base = OTHER; note = 2'-O-methylguanosine-3'-phosphate
  modified_base 8: mod_base = OTHER; note = 2'-deoxy-2'-fluoroadenosine-3'-phosphate
  modified_base 9: mod_base = OTHER; note = 2'-deoxy-2'-fluorouridine-3'-phosphate
  modified_base 10: mod_base = OTHER; note = 2'-O-methylcytidine-3'-phosphate
  modified_base 11: mod_base = OTHER; note = 2'-O-methylguanosine-3'-phosphate
  modified_base 12: mod_base = OTHER; note = 2'-O-methylcytidine-3'-phosphate
  modified_base 13: mod_base = OTHER; note = 2'-O-methylcytidine-3'-phosphate
  modified_base 14: mod_base = OTHER; note = 2'-deoxy-2'-fluorocytidine-3'-phosphate
  modified_base 15: mod_base = OTHER; note = 2'-O-methylguanosine-3'-phosphate
  modified_base 16: mod_base = OTHER; note = 2'-deoxy-2'-fluorouridine-3'-phosphate
  modified_base 17: mod_base = OTHER; note = 2'-O-methylguanosine-3'-phosphate
  modified_base 18: mod_base = OTHER; note = 2'-O-methyluridine-3'-phosphate
  modified_base 19: mod_base = OTHER; note = 2'-O-methylguanosine-3'-phosphate
  modified_base 20: mod_base = OTHER; note = 2'-O-methyluridine-3'-phosphate
  modified_base 21: mod_base = OTHER; note = 2'-O-methylguanosine-3'-phosphorothioate
  modified_base 22: mod_base = OTHER; note = 2'-O-methylguanosine-3'-phosphorothioate
  modified_base 23: mod_base = OTHER; note = 2'-O-methyluridine
aacagggatcgcccgtgtgtggt

SEQ ID NO: 1178 - RNA, 23 nt, synthetic construct
  source 1..23: mol_type = other RNA
  modified_base 1: mod_base = OTHER; note = 2'-O-methyladenosine-3'-phosphorothioate
  modified_base 2: mod_base = OTHER; note = 2'-deoxy-2'-fluoroadenosine-3'-phosphorothioate
  modified_base 3: mod_base = OTHER; note = 2'-O-methylguanosine-3'-phosphate
  modified_base 4: mod_base = OTHER; note = 2'-O-methylguanosine-3'-phosphate
  modified_base 5: mod_base = OTHER; note = 2'-O-methyluridine-3'-phosphate
  modified_base 6: mod_base = OTHER; note = 2'-deoxy-2'-fluoroguanosine-3'-phosphate
  modified_base 7: mod_base = OTHER; note = 2'-O-methylguanosine-3'-phosphate
  modified_base 8: mod_base = OTHER; note = 2'-deoxy-2'-fluorocytidine-3'-phosphate
  modified_base 9: mod_base = OTHER; note = 2'-deoxy-2'-fluorocytidine-3'-phosphate
  modified_base 10: mod_base = OTHER; note = 2'-O-methylguanosine-3'-phosphate
  modified_base 11: mod_base = OTHER; note = 2'-O-methyladenosine-3'-phosphate
  modified_base 12: mod_base = OTHER; note = 2'-O-methyladenosine-3'-phosphate
  modified_base 13: mod_base = OTHER; note = 2'-O-methylguanosine-3'-phosphate
  modified_base 14: mod_base = OTHER; note = 2'-deoxy-2'-fluorouridine-3'-phosphate
  modified_base 15: mod_base = OTHER; note = 2'-O-methylcytidine-3'-phosphate
  modified_base 16: mod_base = OTHER; note = 2'-deoxy-2'-fluorocytidine-3'-phosphate
  modified_base 17: mod_base = OTHER; note = 2'-O-methyladenosine-3'-phosphate
  modified_base 18: mod_base = OTHER; note = 2'-O-methylguanosine-3'-phosphate
  modified_base 19: mod_base = OTHER; note = 2'-O-methylguanosine-3'-phosphate
  modified_base 20: mod_base = OTHER; note = 2'-O-methylcytidine-3'-phosphate
  modified_base 21: mod_base = OTHER; note = 2'-O-methyluridine-3'-phosphorothioate
  modified_base 22: mod_base = OTHER; note = 2'-O-methylguanosine-3'-phosphorothioate
  modified_base 23: mod_base = OTHER; note = 2'-O-methyluridine
aaggtggccgaagtccaggctgt

SEQ ID NO: 1179 - RNA, 23 nt, synthetic construct
  source 1..23: mol_type = other RNA
  modified_base 1: mod_base = OTHER; note = 2'-O-methyladenosine-3'-phosphorothioate
  modified_base 2: mod_base = OTHER; note = 2'-deoxy-2'-fluoroguanosine-3'-phosphorothioate
  modified_base 3: mod_base = OTHER; note = 2'-O-methyladenosine-3'-phosphate
  modified_base 4: mod_base = OTHER; note = 2'-O-methyladenosine-3'-phosphate
  modified_base 5: mod_base = OTHER; note = 2'-O-methylguanosine-3'-phosphate
  modified_base 6: mod_base = OTHER; note = 2'-deoxy-2'-fluoroguanosine-3'-phosphate
  modified_base 7: mod_base = OTHER; note = 2'-O-methylcytidine-3'-phosphate
  modified_base 8: mod_base = OTHER; note = 2'-deoxy-2'-fluorouridine-3'-phosphate
  modified_base 9: mod_base = OTHER; note = 2'-deoxy-2'-fluorocytidine-3'-phosphate
  modified_base 10: mod_base = OTHER; note = 2'-O-methyluridine-3'-phosphate
  modified_base 11: mod_base = OTHER; note = 2'-O-methylguanosine-3'-phosphate
  modified_base 12: mod_base = OTHER; note = 2'-O-methyluridine-3'-phosphate
  modified_base 13: mod_base = OTHER; note = 2'-O-methylguanosine-3'-phosphate
  modified_base 14: mod_base = OTHER; note = 2'-deoxy-2'-fluoroadenosine-3'-phosphate
  modified_base 15: mod_base = OTHER; note = 2'-O-methyluridine-3'-phosphate
  modified_base 16: mod_base = OTHER; note = 2'-deoxy-2'-fluoroguanosine-3'-phosphate
  modified_base 17: mod_base = OTHER; note = 2'-O-methyluridine-3'-phosphate
  modified_base 18: mod_base = OTHER; note = 2'-O-methylguanosine-3'-phosphate
  modified_base 19: mod_base = OTHER; note = 2'-O-methylguanosine-3'-phosphate
  modified_base 20: mod_base = OTHER; note = 2'-O-methylguanosine-3'-phosphate
  modified_base 21: mod_base = OTHER; note = 2'-O-methyluridine-3'-phosphorothioate
  modified_base 22: mod_base = OTHER; note = 2'-O-methylguanosine-3'-phosphorothioate
  modified_base 23: mod_base = OTHER; note = 2'-O-methylguanosine
agaaggctctgtgatgtgggtgg

SEQ ID NO: 1180 - RNA, 23 nt, synthetic construct
  source 1..23: mol_type = other RNA
  modified_base 1: mod_base = OTHER; note = 2'-O-methyladenosine-3'-phosphorothioate
  modified_base 2: mod_base = OTHER; note = 2'-deoxy-2'-fluorocytidine-3'-phosphorothioate
  modified_base 3: mod_base = OTHER; note = 2'-O-methyluridine-3'-phosphate
  modified_base 4: mod_base = OTHER; note = 2'-O-methylguanosine-3'-phosphate
  modified_base 5: mod_base = OTHER; note = 2'-O-methylguanosine-3'-phosphate
  modified_base 6: mod_base = OTHER; note = 2'-deoxy-2'-fluoroguanosine-3'-phosphate
  modified_base 7: mod_base = OTHER; note = 2'-O-methyluridine-3'-phosphate
  modified_base 8: mod_base = OTHER; note = 2'-deoxy-2'-fluoroguanosine-3'-phosphate
  modified_base 9: mod_base = OTHER; note = 2'-deoxy-2'-fluoroguanosine-3'-phosphate
  modified_base 10: mod_base = OTHER; note = 2'-O-methyluridine-3'-phosphate
  modified_base 11: mod_base = OTHER; note = 2'-O-methyladenosine-3'-phosphate
  modified_base 12: mod_base = OTHER; note = 2'-O-methylcytidine-3'-phosphate
  modified_base 13: mod_base = OTHER; note = 2'-O-methylcytidine-3'-phosphate
  modified_base 14: mod_base = OTHER; note = 2'-deoxy-2'-fluoroguanosine-3'-phosphate
  modified_base 15: mod_base = OTHER; note = 2'-O-methylguanosine-3'-phosphate
  modified_base 16: mod_base = OTHER; note = 2'-deoxy-2'-fluorouridine-3'-phosphate
  modified_base 17: mod_base = OTHER; note = 2'-O-methylguanosine-3'-phosphate
  modified_base 18: mod_base = OTHER; note = 2'-O-methylguanosine-3'-phosphate
  modified_base 19: mod_base = OTHER; note = 2'-O-methyluridine-3'-phosphate
  modified_base 20: mod_base = OTHER; note = 2'-O-methyluridine-3'-phosphate
  modified_base 21: mod_base = OTHER; note = 2'-O-methylguanosine-3'-phosphorothioate
  modified_base 22: mod_base = OTHER; note = 2'-O-methylcytidine-3'-phosphorothioate
  modified_base 23: mod_base = OTHER; note = 2'-O-methyluridine
actgggtggtaccggtggttgct

SEQ ID NO: 1181 - RNA, 23 nt, synthetic construct
  source 1..23: mol_type = other RNA
  modified_base 1: mod_base = OTHER; note = 2'-O-methyladenosine-3'-phosphorothioate
  modified_base 2: mod_base = OTHER; note = 2'-deoxy-2'-fluoroadenosine-3'-phosphorothioate
  modified_base 3: mod_base = OTHER; note = 2'-O-methylguanosine-3'-phosphate
  modified_base 4: mod_base = OTHER; note = 2'-O-methylguanosine-3'-phosphate
  modified_base 5: mod_base = OTHER; note = 2'-O-methyluridine-3'-phosphate
  modified_base 6: mod_base = OTHER; note = 2'-deoxy-2'-fluoroguanosine-3'-phosphate
  modified_base 7: mod_base = OTHER; note = 2'-O-methylcytidine-3'-phosphate
  modified_base 8: mod_base = OTHER; note = 2'-deoxy-2'-fluoroguanosine-3'-phosphate
  modified_base 9: mod_base = OTHER; note = 2'-deoxy-2'-fluoroguanosine-3'-phosphate
  modified_base 10: mod_base = OTHER; note = 2'-O-methylguanosine-3'-phosphate
  modified_base 11: mod_base = OTHER; note = 2'-O-methyluridine-3'-phosphate
  modified_base 12: mod_base = OTHER; note = 2'-O-methylcytidine-3'-phosphate
  modified_base 13: mod_base = OTHER; note = 2'-O-methyluridine-3'-phosphate
  modified_base 14: mod_base = OTHER; note = 2'-deoxy-2'-fluorouridine-3'-phosphate
  modified_base 15: mod_base = OTHER; note = 2'-O-methylguanosine-3'-phosphate
  modified_base 16: mod_base = OTHER; note = 2'-deoxy-2'-fluorocytidine-3'-phosphate
  modified_base 17: mod_base = OTHER; note = 2'-O-methyluridine-3'-phosphate
  modified_base 18: mod_base = OTHER; note = 2'-O-methylguanosine-3'-phosphate
  modified_base 19: mod_base = OTHER; note = 2'-O-methylguanosine-3'-phosphate
  modified_base 20: mod_base = OTHER; note = 2'-O-methylguanosine-3'-phosphate
  modified_base 21: mod_base = OTHER; note = 2'-O-methyluridine-3'-phosphorothioate
  modified_base 22: mod_base = OTHER; note = 2'-O-methylguanosine-3'-phosphorothioate
  modified_base 23: mod_base = OTHER; note = 2'-O-methyluridine
aaggtgcgggtcttgctgggtgt

SEQ ID NO: 1182 - RNA, 23 nt, synthetic construct
  source 1..23: mol_type = other RNA
  modified_base 1: mod_base = OTHER; note = 2'-O-methyladenosine-3'-phosphorothioate
  modified_base 2: mod_base = OTHER; note = 2'-deoxy-2'-fluoroguanosine-3'-phosphorothioate
  modified_base 3: mod_base = OTHER; note = 2'-O-methylguanosine-3'-phosphate
  modified_base 4: mod_base = OTHER; note = 2'-O-methyluridine-3'-phosphate
  modified_base 5: mod_base = OTHER; note = 2'-O-methyladenosine-3'-phosphate
  modified_base 6: mod_base = OTHER; note = 2'-deoxy-2'-fluoroguanosine-3'-phosphate
  modified_base 7: mod_base = OTHER; note = 2'-O-methylcytidine-3'-phosphate
  modified_base 8: mod_base = OTHER; note = 2'-deoxy-2'-fluorouridine-3'-phosphate
  modified_base 9: mod_base = OTHER; note = 2'-deoxy-2'-fluoroguanosine-3'-phosphate
  modified_base 10: mod_base = OTHER; note = 2'-O-methyluridine-3'-phosphate
  modified_base 11: mod_base = OTHER; note = 2'-O-methyladenosine-3'-phosphate
  modified_base 12: mod_base = OTHER; note = 2'-O-methylguanosine-3'-phosphate
  modified_base 13: mod_base = OTHER; note = 2'-O-methyluridine-3'-phosphate
  modified_base 14: mod_base = OTHER; note = 2'-deoxy-2'-fluorocytidine-3'-phosphate
  modified_base 15: mod_base = OTHER; note = 2'-O-methylcytidine-3'-phosphate
  modified_base 16: mod_base = OTHER; note = 2'-deoxy-2'-fluoroadenosine-3'-phosphate
  modified_base 17: mod_base = OTHER; note = 2'-O-methylguanosine-3'-phosphate
  modified_base 18: mod_base = OTHER; note = 2'-O-methylcytidine-3'-phosphate
  modified_base 19: mod_base = OTHER; note = 2'-O-methylcytidine-3'-phosphate
  modified_base 20: mod_base = OTHER; note = 2'-O-methyladenosine-3'-phosphate
  modified_base 21: mod_base = OTHER; note = 2'-O-methylcytidine-3'-phosphorothioate
  modified_base 22: mod_base = OTHER; note = 2'-O-methyluridine-3'-phosphorothioate
  modified_base 23: mod_base = OTHER; note = 2'-O-methylcytidine
aggtagctgtagtccagccactc

SEQ ID NO: 1183 - RNA, 23 nt, synthetic construct
  source 1..23: mol_type = other RNA
  modified_base 1: mod_base = OTHER; note = 2'-O-methyladenosine-3'-phosphorothioate
  modified_base 2: mod_base = OTHER; note = 2'-deoxy-2'-fluoroguanosine-3'-phosphorothioate
  modified_base 3: mod_base = OTHER; note = 2'-O-methyladenosine-3'-phosphate
  modified_base 4: mod_base = OTHER; note = 2'-O-methyluridine-3'-phosphate
  modified_base 5: mod_base = OTHER; note = 2'-O-methylguanosine-3'-phosphate
  modified_base 6: mod_base = OTHER; note = 2'-deoxy-2'-fluorouridine-3'-phosphate
  modified_base 7: mod_base = OTHER; note = 2'-O-methyluridine-3'-phosphate
  modified_base 8: mod_base = OTHER; note = 2'-deoxy-2'-fluoroguanosine-3'-phosphate
  modified_base 9: mod_base = OTHER; note = 2'-deoxy-2'-fluoroguanosine-3'-phosphate
  modified_base 10: mod_base = OTHER; note = 2'-O-methyladenosine-3'-phosphate
  modified_base 11: mod_base = OTHER; note = 2'-O-methylguanosine-3'-phosphate
  modified_base 12: mod_base = OTHER; note = 2'-O-methyluridine-3'-phosphate
  modified_base 13: mod_base = OTHER; note = 2'-O-methyladenosine-3'-phosphate
  modified_base 14: mod_base = OTHER; note = 2'-deoxy-2'-fluoroguanosine-3'-phosphate
  modified_base 15: mod_base = OTHER; note = 2'-O-methylguanosine-3'-phosphate
  modified_base 16: mod_base = OTHER; note = 2'-deoxy-2'-fluorouridine-3'-phosphate
  modified_base 17: mod_base = OTHER; note = 2'-O-methylguanosine-3'-phosphate
  modified_base 18: mod_base = OTHER; note = 2'-O-methyluridine-3'-phosphate
  modified_base 19: mod_base = OTHER; note = 2'-O-methylcytidine-3'-phosphate
  modified_base 20: mod_base = OTHER; note = 2'-O-methyladenosine-3'-phosphate
  modified_base 21: mod_base = OTHER; note = 2'-O-methyladenosine-3'-phosphorothioate
  modified_base 22: mod_base = OTHER; note = 2'-O-methyladenosine-3'-phosphorothioate
  modified_base 23: mod_base = OTHER; note = 2'-O-methylguanosine
agatgttggagtaggtgtcaaag

SEQ ID NO: 1184 - RNA, 23 nt, synthetic construct
  source 1..23: mol_type = other RNA
  modified_base 1: mod_base = OTHER; note = 2'-O-methyladenosine-3'-phosphorothioate
  modified_base 2: mod_base = OTHER; note = 2'-deoxy-2'-fluorocytidine-3'-phosphorothioate
  modified_base 3: mod_base = OTHER; note = 2'-O-methyladenosine-3'-phosphate
  modified_base 4: mod_base = OTHER; note = 2'-O-methyluridine-3'-phosphate
  modified_base 5: mod_base = OTHER; note = 2'-O-methyluridine-3'-phosphate
  modified_base 6: mod_base = OTHER; note = 2'-deoxy-2'-fluorocytidine-3'-phosphate
  modified_base 7: mod_base = OTHER; note = 2'-O-methylcytidine-3'-phosphate
  modified_base 8: mod_base = OTHER; note = 2'-deoxy-2'-fluoroadenosine-3'-phosphate
  modified_base 9: mod_base = OTHER; note = 2'-deoxy-2'-fluorocytidine-3'-phosphate
  modified_base 10: mod_base = OTHER; note = 2'-O-methylguanosine-3'-phosphate
  modified_base 11: mod_base = OTHER; note = 2'-O-methyladenosine-3'-phosphate
  modified_base 12: mod_base = OTHER; note = 2'-O-methylcytidine-3'-phosphate
  modified_base 13: mod_base = OTHER; note = 2'-O-methylcytidine-3'-phosphate
  modified_base 14: mod_base = OTHER; note = 2'-deoxy-2'-fluorouridine-3'-phosphate
  modified_base 15: mod_base = OTHER; note = 2'-O-methylguanosine-3'-phosphate
  modified_base 16: mod_base = OTHER; note = 2'-deoxy-2'-fluoroguanosine-3'-phosphate
  modified_base 17: mod_base = OTHER; note = 2'-O-methylcytidine-3'-phosphate
  modified_base 18: mod_base = OTHER; note = 2'-O-methylcytidine-3'-phosphate
  modified_base 19: mod_base = OTHER; note = 2'-O-methylcytidine-3'-phosphate
  modified_base 20: mod_base = OTHER; note = 2'-O-methyladenosine-3'-phosphate
  modified_base 21: mod_base = OTHER; note = 2'-O-methyladenosine-3'-phosphorothioate
  modified_base 22: mod_base = OTHER; note = 2'-O-methylcytidine-3'-phosphorothioate
  modified_base 23: mod_base = OTHER; note = 2'-O-methyluridine
acattccacgacctggcccaact

SEQ ID NO: 1185 - RNA, 23 nt, synthetic construct
  source 1..23: mol_type = other RNA
  modified_base 1: mod_base = OTHER; note = 2'-O-methyladenosine-3'-phosphorothioate
  modified_base 2: mod_base = OTHER; note = 2'-deoxy-2'-fluoroadenosine-3'-phosphorothioate
  modified_base 3: mod_base = OTHER; note = 2'-O-methylguanosine-3'-phosphate
  modified_base 4: mod_base = OTHER; note = 2'-O-methyladenosine-3'-phosphate
  modified_base 5: mod_base = OTHER; note = 2'-O-methylcytidine-3'-phosphate
  modified_base 6: mod_base = OTHER; note = 2'-deoxy-2'-fluorocytidine-3'-phosphate
  modified_base 7: mod_base = OTHER; note = 2'-O-methyladenosine-3'-phosphate
  modified_base 8: mod_base = OTHER; note = 2'-deoxy-2'-fluoroguanosine-3'-phosphate
  modified_base 9: mod_base = OTHER; note = 2'-deoxy-2'-fluoroguanosine-3'-phosphate
  modified_base 10: mod_base = OTHER; note = 2'-O-methylcytidine-3'-phosphate
  modified_base 11: mod_base = OTHER; note = 2'-O-methylcytidine-3'-phosphate
  modified_base 12: mod_base = OTHER; note = 2'-O-methyladenosine-3'-phosphate
  modified_base 13: mod_base = OTHER; note = 2'-O-methyladenosine-3'-phosphate
  modified_base 14: mod_base = OTHER; note = 2'-deoxy-2'-fluoroadenosine-3'-phosphate
  modified_base 15: mod_base = OTHER; note = 2'-O-methylguanosine-3'-phosphate
  modified_base 16: mod_base = OTHER; note = 2'-deoxy-2'-fluorouridine-3'-phosphate
  modified_base 17: mod_base = OTHER; note = 2'-O-methylcytidine-3'-phosphate
  modified_base 18: mod_base = OTHER; note = 2'-O-methylcytidine-3'-phosphate
  modified_base 19: mod_base = OTHER; note = 2'-O-methyladenosine-3'-phosphate
  modified_base 20: mod_base = OTHER; note = 2'-O-methylguanosine-3'-phosphate
  modified_base 21: mod_base = OTHER; note = 2'-O-methylguanosine-3'-phosphorothioate
  modified_base 22: mod_base = OTHER; note = 2'-O-methylcytidine-3'-phosphorothioate
  modified_base 23: mod_base = OTHER; note = 2'-O-methyluridine
aagaccaggccaaagtccaggct

SEQ ID NO: 1186 - RNA, 23 nt, synthetic construct
  source 1..23: mol_type = other RNA
  modified_base 1: mod_base = OTHER; note = 2'-O-methyladenosine-3'-phosphorothioate
  modified_base 2: mod_base = OTHER; note = 2'-deoxy-2'-fluorouridine-3'-phosphorothioate
  modified_base 3: mod_base = OTHER; note = 2'-O-methyluridine-3'-phosphate
  modified_base 4: mod_base = OTHER; note = 2'-O-methyluridine-3'-phosphate
  modified_base 5: mod_base = OTHER; note = 2'-O-methylcytidine-3'-phosphate
  modified_base 6: mod_base = OTHER; note = 2'-deoxy-2'-fluoroadenosine-3'-phosphate
  modified_base 7: mod_base = OTHER; note = 2'-O-methyluridine-3'-phosphate
  modified_base 8: mod_base = OTHER; note = 2'-deoxy-2'-fluoroadenosine-3'-phosphate
  modified_base 9: mod_base = OTHER; note = 2'-deoxy-2'-fluoroguanosine-3'-phosphate
  modified_base 10: mod_base = OTHER; note = 2'-O-methyluridine-3'-phosphate
  modified_base 11: mod_base = OTHER; note = 2'-O-methyluridine-3'-phosphate
  modified_base 12: mod_base = OTHER; note = 2'-O-methylguanosine-3'-phosphate
  modified_base 13: mod_base = OTHER; note = 2'-O-methyladenosine-3'-phosphate
  modified_base 14: mod_base = OTHER; note = 2'-deoxy-2'-fluoroadenosine-3'-phosphate
  modified_base 15: mod_base = OTHER; note = 2'-O-methylguanosine-3'-phosphate
  modified_base 16: mod_base = OTHER; note = 2'-deoxy-2'-fluorocytidine-3'-phosphate
  modified_base 17: mod_base = OTHER; note = 2'-O-methyladenosine-3'-phosphate
  modified_base 18: mod_base = OTHER; note = 2'-O-methylcytidine-3'-phosphate
  modified_base 19: mod_base = OTHER; note = 2'-O-methyladenosine-3'-phosphate
  modified_base 20: mod_base = OTHER; note = 2'-O-methyluridine-3'-phosphate
  modified_base 21: mod_base = OTHER; note = 2'-O-methylcytidine-3'-phosphorothioate
  modified_base 22: mod_base = OTHER; note = 2'-O-methyluridine-3'-phosphorothioate
  modified_base 23: mod_base = OTHER; note = 2'-O-methyluridine
atttcatagttgaagcacatctt

SEQ ID NO: 1187 - RNA, 23 nt, synthetic construct
  source 1..23: mol_type = other RNA
  modified_base 1: mod_base = OTHER; note = 2'-O-methyladenosine-3'-phosphorothioate
  modified_base 2: mod_base = OTHER; note = 2'-deoxy-2'-fluorocytidine-3'-phosphorothioate
  modified_base 3: mod_base = OTHER; note = 2'-O-methylguanosine-3'-phosphate
  modified_base 4: mod_base = OTHER; note = 2'-O-methyluridine-3'-phosphate
  modified_base 5: mod_base = OTHER; note = 2'-O-methyladenosine-3'-phosphate
  modified_base 6: mod_base = OTHER; note = 2'-deoxy-2'-fluoroguanosine-3'-phosphate
  modified_base 7: mod_base = OTHER; note = 2'-O-methyluridine-3'-phosphate
  modified_base 8: mod_base = OTHER; note = 2'-deoxy-2'-fluorouridine-3'-phosphate
  modified_base 9: mod_base = OTHER; note = 2'-deoxy-2'-fluoroguanosine-3'-phosphate
  modified_base 10: mod_base = OTHER; note = 2'-O-methylcytidine-3'-phosphate
  modified_base 11: mod_base = OTHER; note = 2'-O-methyladenosine-3'-phosphate
  modified_base 12: mod_base = OTHER; note = 2'-O-methylguanosine-3'-phosphate
  modified_base 13: mod_base = OTHER; note = 2'-O-methylcytidine-3'-phosphate
  modified_base 14: mod_base = OTHER; note = 2'-deoxy-2'-fluoroadenosine-3'-phosphate
  modified_base 15: mod_base = OTHER; note = 2'-O-methylguanosine-3'-phosphate
  modified_base 16: mod_base = OTHER; note = 2'-deoxy-2'-fluoroadenosine-3'-phosphate
  modified_base 17: mod_base = OTHER; note = 2'-O-methyladenosine-3'-phosphate
  modified_base 18: mod_base = OTHER; note = 2'-O-methylcytidine-3'-phosphate
  modified_base 19: mod_base = OTHER; note = 2'-O-methyladenosine-3'-phosphate
  modified_base 20: mod_base = OTHER; note = 2'-O-methylcytidine-3'-phosphate
  modified_base 21: mod_base = OTHER; note = 2'-O-methyladenosine-3'-phosphorothioate
  modified_base 22: mod_base = OTHER; note = 2'-O-methylcytidine-3'-phosphorothioate
  modified_base 23: mod_base = OTHER; note = 2'-O-methylguanosine
acgtagttgcagcagaacacacg

SEQ ID NO: 1188 - RNA, 23 nt, synthetic construct
  source 1..23: mol_type = other RNA
  modified_base 1: mod_base = OTHER; note = 2'-O-methyladenosine-3'-phosphorothioate
  modified_base 2: mod_base = OTHER; note = 2'-deoxy-2'-fluoroadenosine-3'-phosphorothioate
  modified_base 3: mod_base = OTHER; note = 2'-O-methylguanosine-3'-phosphate
  modified_base 4: mod_base = OTHER; note = 2'-O-methylguanosine-3'-phosphate
  modified_base 5: mod_base = OTHER; note = 2'-O-methylguanosine-3'-phosphate
  modified_base 6: mod_base = OTHER; note = 2'-deoxy-2'-fluorocytidine-3'-phosphate
  modified_base 7: mod_base = OTHER; note = 2'-O-methyladenosine-3'-phosphate
  modified_base 8: mod_base = OTHER; note = 2'-deoxy-2'-fluorouridine-3'-phosphate
  modified_base 9: mod_base = OTHER; note = 2'-deoxy-2'-fluoroguanosine-3'-phosphate
  modified_base 10: mod_base = OTHER; note = 2'-O-methylguanosine-3'-phosphate
  modified_base 11: mod_base = OTHER; note = 2'-O-methylcytidine-3'-phosphate
  modified_base 12: mod_base = OTHER; note = 2'-O-methylcytidine-3'-phosphate
  modified_base 13: mod_base = OTHER; note = 2'-O-methylguanosine-3'-phosphate
  modified_base 14: mod_base = OTHER; note = 2'-deoxy-2'-fluorouridine-3'-phosphate
  modified_base 15: mod_base = OTHER; note = 2'-O-methyladenosine-3'-phosphate
  modified_base 16: mod_base = OTHER; note = 2'-deoxy-2'-fluoroguanosine-3'-phosphate
  modified_base 17: mod_base = OTHER; note = 2'-O-methyladenosine-3'-phosphate
  modified_base 18: mod_base = OTHER; note = 2'-O-methylguanosine-3'-phosphate
  modified_base 19: mod_base = OTHER; note = 2'-O-methylcytidine-3'-phosphate
  modified_base 20: mod_base = OTHER; note = 2'-O-methyluridine-3'-phosphate
  modified_base 21: mod_base = OTHER; note = 2'-O-methylguanosine-3'-phosphorothioate
  modified_base 22: mod_base = OTHER; note = 2'-O-methylguanosine-3'-phosphorothioate
  modified_base 23: mod_base = OTHER; note = 2'-O-methyluridine
aagggcatggccgtagagctggt

SEQ ID NO: 1189 - RNA, 23 nt, synthetic construct
  source 1..23: mol_type = other RNA
  modified_base 1: mod_base = OTHER; note = 2'-O-methyladenosine-3'-phosphorothioate
  modified_base 2: mod_base = OTHER; note = 2'-deoxy-2'-fluoroguanosine-3'-phosphorothioate
  modified_base 3: mod_base = OTHER; note = 2'-O-methyluridine-3'-phosphate
  modified_base 4: mod_base = OTHER; note = 2'-O-methylguanosine-3'-phosphate
  modified_base 5: mod_base = OTHER; note = 2'-O-methylguanosine-3'-phosphate
  modified_base 6: mod_base = OTHER; note = 2'-deoxy-2'-fluorouridine-3'-phosphate
  modified_base 7: mod_base = OTHER; note = 2'-O-methylcytidine-3'-phosphate
  modified_base 8: mod_base = OTHER; note = 2'-deoxy-2'-fluoroadenosine-3'-phosphate
  modified_base 9: mod_base = OTHER; note = 2'-deoxy-2'-fluoroguanosine-3'-phosphate
  modified_base 10: mod_base = OTHER; note = 2'-O-methylcytidine-3'-phosphate
  modified_base 11: mod_base = OTHER; note = 2'-O-methyluridine-3'-phosphate
  modified_base 12: mod_base = OTHER; note = 2'-O-methylcytidine-3'-phosphate
  modified_base 13: mod_base = OTHER; note = 2'-O-methyluridine-3'-phosphate
  modified_base 14: mod_base = OTHER; note = 2'-deoxy-2'-fluoroguanosine-3'-phosphate
  modified_base 15: mod_base = OTHER; note = 2'-O-methyluridine-3'-phosphate
  modified_base 16: mod_base = OTHER; note = 2'-deoxy-2'-fluoroguanosine-3'-phosphate
  modified_base 17: mod_base = OTHER; note = 2'-O-methyladenosine-3'-phosphate
  modified_base 18: mod_base = OTHER; note = 2'-O-methylguanosine-3'-phosphate
  modified_base 19: mod_base = OTHER; note = 2'-O-methylguanosine-3'-phosphate
  modified_base 20: mod_base = OTHER; note = 2'-O-methyladenosine-3'-phosphate
  modified_base 21: mod_base = OTHER; note = 2'-O-methyluridine-3'-phosphorothioate
  modified_base 22: mod_base = OTHER; note = 2'-O-methylcytidine-3'-phosphorothioate
  modified_base 23: mod_base = OTHER; note = 2'-O-methylcytidine
agtggtcagctctgtgaggatcc

SEQ ID NO: 1190 - RNA, 23 nt, synthetic construct
  source 1..23: mol_type = other RNA
  modified_base 1: mod_base = OTHER; note = 2'-O-methyladenosine-3'-phosphorothioate
  modified_base 2: mod_base = OTHER; note = 2'-deoxy-2'-fluoroadenosine-3'-phosphorothioate
  modified_base 3: mod_base = OTHER; note = 2'-O-methylcytidine-3'-phosphate
  modified_base 4: mod_base = OTHER; note = 2'-O-methylguanosine-3'-phosphate
  modified_base 5: mod_base = OTHER; note = 2'-O-methylguanosine-3'-phosphate
  modified_base 6: mod_base = OTHER; note = 2'-deoxy-2'-fluorouridine-3'-phosphate
  modified_base 7: mod_base = OTHER; note = 2'-O-methylguanosine-3'-phosphate
  modified_base 8: mod_base = OTHER; note = 2'-deoxy-2'-fluoroguanosine-3'-phosphate
  modified_base 9: mod_base = OTHER; note = 2'-deoxy-2'-fluorocytidine-3'-phosphate
  modified_base 10: mod_base = OTHER; note = 2'-O-methyluridine-3'-phosphate
  modified_base 11: mod_base = OTHER; note = 2'-O-methylguanosine-3'-phosphate
  modified_base 12: mod_base = OTHER; note = 2'-O-methyluridine-3'-phosphate
  modified_base 13: mod_base = OTHER; note = 2'-O-methyladenosine-3'-phosphate
  modified_base 14: mod_base = OTHER; note = 2'-deoxy-2'-fluoroguanosine-3'-phosphate
  modified_base 15: mod_base = OTHER; note = 2'-O-methyluridine-3'-phosphate
  modified_base 16: mod_base = OTHER; note = 2'-deoxy-2'-fluoroguanosine-3'-phosphate
  modified_base 17: mod_base = OTHER; note = 2'-O-methylcytidine-3'-phosphate
  modified_base 18: mod_base = OTHER; note = 2'-O-methyluridine-3'-phosphate
  modified_base 19: mod_base = OTHER; note = 2'-O-methylcytidine-3'-phosphate
  modified_base 20: mod_base = OTHER; note = 2'-O-methylguanosine-3'-phosphate
  modified_base 21: mod_base = OTHER; note = 2'-O-methylguanosine-3'-phosphorothioate
  modified_base 22: mod_base = OTHER; note = 2'-O-methylcytidine-3'-phosphorothioate
  modified_base 23: mod_base = OTHER; note = 2'-O-methyluridine
aacggtggctgtagtgctcggct

SEQ ID NO: 1191 - RNA, 23 nt, synthetic construct
  source 1..23: mol_type = other RNA
  modified_base 1: mod_base = OTHER; note = 2'-O-methyladenosine-3'-phosphorothioate
  modified_base 2: mod_base = OTHER; note = 2'-deoxy-2'-fluoroadenosine-3'-phosphorothioate
  modified_base 3: mod_base = OTHER; note = 2'-O-methylguanosine-3'-phosphate
  modified_base 4: mod_base = OTHER; note = 2'-O-methylcytidine-3'-phosphate
  modified_base 5: mod_base = OTHER; note = 2'-O-methyladenosine-3'-phosphate
  modified_base 6: mod_base = OTHER; note = 2'-deoxy-2'-fluoroguanosine-3'-phosphate
  modified_base 7: mod_base = OTHER; note = 2'-O-methyluridine-3'-phosphate
  modified_base 8: mod_base = OTHER; note = 2'-deoxy-2'-fluorouridine-3'-phosphate
  modified_base 9: mod_base = OTHER; note = 2'-deoxy-2'-fluoroguanosine-3'-phosphate
  modified_base 10: mod_base = OTHER; note = 2'-O-methylcytidine-3'-phosphate
  modified_base 11: mod_base = OTHER; note = 2'-O-methylcytidine-3'-phosphate
  modified_base 12: mod_base = OTHER; note = 2'-O-methyluridine-3'-phosphate
  modified_base 13: mod_base = OTHER; note = 2'-O-methylguanosine-3'-phosphate
  modified_base 14: mod_base = OTHER; note = 2'-deoxy-2'-fluoroguanosine-3'-phosphate
  modified_base 15: mod_base = OTHER; note = 2'-O-methylguanosine-3'-phosphate
  modified_base 16: mod_base = OTHER; note = 2'-deoxy-2'-fluorouridine-3'-phosphate
  modified_base 17: mod_base = OTHER; note = 2'-O-methylguanosine-3'-phosphate
  modified_base 18: mod_base = OTHER; note = 2'-O-methylguanosine-3'-phosphate
  modified_base 19: mod_base = OTHER; note = 2'-O-methyladenosine-3'-phosphate
  modified_base 20: mod_base = OTHER; note = 2'-O-methylguanosine-3'-phosphate
  modified_base 21: mod_base = OTHER; note = 2'-O-methylguanosine-3'-phosphorothioate
  modified_base 22: mod_base = OTHER; note = 2'-O-methyladenosine-3'-phosphorothioate
  modified_base 23: mod_base = OTHER; note = 2'-O-methylguanosine
aagcagttgcctgggtggaggag

SEQ ID NO: 1192 - RNA, 23 nt, synthetic construct
  source 1..23: mol_type = other RNA
  modified_base 1: mod_base = OTHER; note = 2'-O-methyladenosine-3'-phosphorothioate
  modified_base 2: mod_base = OTHER; note = 2'-deoxy-2'-fluorouridine-3'-phosphorothioate
  modified_base 3: mod_base = OTHER; note = 2'-O-methylguanosine-3'-phosphate
  modified_base 4: mod_base = OTHER; note = 2'-O-methyladenosine-3'-phosphate
  modified_base 5: mod_base = OTHER; note = 2'-O-methylcytidine-3'-phosphate
  modified_base 6: mod_base = OTHER; note = 2'-deoxy-2'-fluorouridine-3'-phosphate
  modified_base 7: mod_base = OTHER; note = 2'-O-methylguanosine-3'-phosphate
  modified_base 8: mod_base = OTHER; note = 2'-deoxy-2'-fluorouridine-3'-phosphate
  modified_base 9: mod_base = OTHER; note = 2'-deoxy-2'-fluoroguanosine-3'-phosphate
  modified_base 10: mod_base = OTHER; note = 2'-O-methylguanosine-3'-phosphate
  modified_base 11: mod_base = OTHER; note = 2'-O-methylguanosine-3'-phosphate
  modified_base 12: mod_base = OTHER; note = 2'-O-methyluridine-3'-phosphate
  modified_base 13: mod_base = OTHER; note = 2'-O-methylguanosine-3'-phosphate
  modified_base 14: mod_base = OTHER; note = 2'-deoxy-2'-fluorouridine-3'-phosphate
  modified_base 15: mod_base = OTHER; note = 2'-O-methylcytidine-3'-phosphate
  modified_base 16: mod_base = OTHER; note = 2'-deoxy-2'-fluoroguanosine-3'-phosphate
  modified_base 17: mod_base = OTHER; note = 2'-O-methyluridine-3'-phosphate
  modified_base 18: mod_base = OTHER; note = 2'-O-methylguanosine-3'-phosphate
  modified_base 19: mod_base = OTHER; note = 2'-O-methylguanosine-3'-phosphate
  modified_base 20: mod_base = OTHER; note = 2'-O-methylcytidine-3'-phosphate
  modified_base 21: mod_base = OTHER; note = 2'-O-methylcytidine-3'-phosphorothioate
  modified_base 22: mod_base = OTHER; note = 2'-O-methylguanosine-3'-phosphorothioate
  modified_base 23: mod_base = OTHER; note = 2'-O-methyluridine
atgactgtgggtgtcgtggccgt

SEQ ID NO: 1193 - RNA, 23 nt, synthetic construct
  source 1..23: mol_type = other RNA
  modified_base 1: mod_base = OTHER; note = 2'-O-methyladenosine-3'-phosphorothioate
  modified_base 2: mod_base = OTHER; note = 2'-deoxy-2'-fluorocytidine-3'-phosphorothioate
  modified_base 3: mod_base = OTHER; note = 2'-O-methyluridine-3'-phosphate
  modified_base 4: mod_base = OTHER; note = 2'-O-methylguanosine-3'-phosphate
  modified_base 5: mod_base = OTHER; note = 2'-O-methyluridine-3'-phosphate
  modified_base 6: mod_base = OTHER; note = 2'-deoxy-2'-fluoroadenosine-3'-phosphate
  modified_base 7: mod_base = OTHER; note = 2'-O-methyladenosine-3'-phosphate
  modified_base 8: mod_base = OTHER; note = 2'-deoxy-2'-fluoroadenosine-3'-phosphate
  modified_base 9: mod_base = OTHER; note = 2'-deoxy-2'-fluoroguanosine-3'-phosphate
  modified_base 10: mod_base = OTHER; note = 2'-O-methylcytidine-3'-phosphate
  modified_base 11: mod_base = OTHER; note = 2'-O-methyluridine-3'-phosphate
  modified_base 12: mod_base = OTHER; note = 2'-O-methylguanosine-3'-phosphate
  modified_base 13: mod_base = OTHER; note = 2'-O-methylguanosine-3'-phosphate
  modified_base 14: mod_base = OTHER; note = 2'-deoxy-2'-fluorouridine-3'-phosphate
  modified_base 15: mod_base = OTHER; note = 2'-O-methyladenosine-3'-phosphate
  modified_base 16: mod_base = OTHER; note = 2'-deoxy-2'-fluoroguanosine-3'-phosphate
  modified_base 17: mod_base = OTHER; note = 2'-O-methylcytidine-3'-phosphate
  modified_base 18: mod_base = OTHER; note = 2'-O-methyluridine-3'-phosphate
  modified_base 19: mod_base = OTHER; note = 2'-O-methylguanosine-3'-phosphate
  modified_base 20: mod_base = OTHER; note = 2'-O-methyluridine-3'-phosphate
  modified_base 21: mod_base = OTHER; note = 2'-O-methylguanosine-3'-phosphorothioate
  modified_base 22: mod_base = OTHER; note = 2'-O-methylguanosine-3'-phosphorothioate
  modified_base 23: mod_base = OTHER; note = 2'-O-methylguanosine
actgtaaagctggtagctgtggg

SEQ ID NO: 1194 - RNA, 23 nt, synthetic construct
  source 1..23: mol_type = other RNA
  modified_base 1: mod_base = OTHER; note = 2'-O-methyladenosine-3'-phosphorothioate
  modified_base 2: mod_base = OTHER; note = 2'-deoxy-2'-fluoroguanosine-3'-phosphorothioate
  modified_base 3: mod_base = OTHER; note = 2'-O-methyluridine-3'-phosphate
  modified_base 4: mod_base = OTHER; note = 2'-O-methyladenosine-3'-phosphate
  modified_base 5: mod_base = OTHER; note = 2'-O-methyladenosine-3'-phosphate
  modified_base 6: mod_base = OTHER; note = 2'-deoxy-2'-fluoroguanosine-3'-phosphate
  modified_base 7: mod_base = OTHER; note = 2'-O-methylcytidine-3'-phosphate
  modified_base 8: mod_base = OTHER; note = 2'-deoxy-2'-fluoroadenosine-3'-phosphate
  modified_base 9: mod_base = OTHER; note = 2'-deoxy-2'-fluorocytidine-3'-phosphate
  modified_base 10: mod_base = OTHER; note = 2'-O-methyluridine-3'-phosphate
  modified_base 11: mod_base = OTHER; note = 2'-O-methylguanosine-3'-phosphate
  modified_base 12: mod_base = OTHER; note = 2'-O-methyluridine-3'-phosphate
  modified_base 13: mod_base = OTHER; note = 2'-O-methylguanosine-3'-phosphate
  modified_base 14: mod_base = OTHER; note = 2'-deoxy-2'-fluoroguanosine-3'-phosphate
  modified_base 15: mod_base = OTHER; note = 2'-O-methyladenosine-3'-phosphate
  modified_base 16: mod_base = OTHER; note = 2'-deoxy-2'-fluoroguanosine-3'-phosphate
  modified_base 17: mod_base = OTHER; note = 2'-O-methylguanosine-3'-phosphate
  modified_base 18: mod_base = OTHER; note = 2'-O-methyluridine-3'-phosphate
  modified_base 19: mod_base = OTHER; note = 2'-O-methylguanosine-3'-phosphate
  modified_base 20: mod_base = OTHER; note = 2'-O-methyluridine-3'-phosphate
  modified_base 21: mod_base = OTHER; note = 2'-O-methylguanosine-3'-phosphorothioate
  modified_base 22: mod_base = OTHER; note = 2'-O-methylguanosine-3'-phosphorothioate
  modified_base 23: mod_base = OTHER; note = 2'-O-methyladenosine
agtaagcactgtggaggtgtgga

SEQ ID NO: 1195 - RNA, 23 nt, synthetic construct
  source 1..23: mol_type = other RNA
  modified_base 1: mod_base = OTHER; note = 2'-O-methyladenosine-3'-phosphorothioate
  modified_base 2: mod_base = OTHER; note = 2'-deoxy-2'-fluoroguanosine-3'-phosphorothioate
  modified_base 3: mod_base = OTHER; note = 2'-O-methyluridine-3'-phosphate
  modified_base 4: mod_base = OTHER; note = 2'-O-methylguanosine-3'-phosphate
  modified_base 5: mod_base = OTHER; note = 2'-O-methyladenosine-3'-phosphate
  modified_base 6: mod_base = OTHER; note = 2'-deoxy-2'-fluoroadenosine-3'-phosphate
  modified_base 7: mod_base = OTHER; note = 2'-O-methylguanosine-3'-phosphate
  modified_base 8: mod_base = OTHER; note = 2'-deoxy-2'-fluorocytidine-3'-phosphate
  modified_base 9: mod_base = OTHER; note = 2'-deoxy-2'-fluorocytidine-3'-phosphate
  modified_base 10: mod_base = OTHER; note = 2'-O-methylcytidine-3'-phosphate
  modified_base 11: mod_base = OTHER; note = 2'-O-methylguanosine-3'-phosphate
  modified_base 12: mod_base = OTHER; note = 2'-O-methyluridine-3'-phosphate
  modified_base 13: mod_base = OTHER; note = 2'-O-methylguanosine-3'-phosphate
  modified_base 14: mod_base = OTHER; note = 2'-deoxy-2'-fluoroguanosine-3'-phosphate
  modified_base 15: mod_base = OTHER; note = 2'-O-methyluridine-3'-phosphate
  modified_base 16: mod_base = OTHER; note = 2'-deoxy-2'-fluorouridine-3'-phosphate
  modified_base 17: mod_base = OTHER; note = 2'-O-methylguanosine-3'-phosphate
  modified_base 18: mod_base = OTHER; note = 2'-O-methyluridine-3'-phosphate
  modified_base 19: mod_base = OTHER; note = 2'-O-methylguanosine-3'-phosphate
  modified_base 20: mod_base = OTHER; note = 2'-O-methylguanosine-3'-phosphate
  modified_base 21: mod_base = OTHER; note = 2'-O-methyluridine-3'-phosphorothioate
  modified_base 22: mod_base = OTHER; note = 2'-O-methyladenosine-3'-phosphorothioate
  modified_base 23: mod_base = OTHER; note = 2'-O-methylguanosine
agtgaagcccgtggttgtggtag

SEQ ID NO: 1196 - RNA, 23 nt, synthetic construct
  source 1..23: mol_type = other RNA
  modified_base 1: mod_base = OTHER; note = 2'-O-methyladenosine-3'-phosphorothioate
  modified_base 2: mod_base = OTHER; note = 2'-deoxy-2'-fluorocytidine-3'-phosphorothioate
  modified_base 3: mod_base = OTHER; note = 2'-O-methyladenosine-3'-phosphate
  modified_base 4: mod_base = OTHER; note = 2'-O-methylguanosine-3'-phosphate
  modified_base 5: mod_base = OTHER; note = 2'-O-methyluridine-3'-phosphate
  modified_base 6: mod_base = OTHER; note = 2'-deoxy-2'-fluorouridine-3'-phosphate
  modified_base 7: mod_base = OTHER; note = 2'-O-methylguanosine-3'-phosphate
  modified_base 8: mod_base = OTHER; note = 2'-deoxy-2'-fluorouridine-3'-phosphate
  modified_base 9: mod_base = OTHER; note = 2'-deoxy-2'-fluoroguanosine-3'-phosphate
  modified_base 10: mod_base = OTHER; note = 2'-O-methylguanosine-3'-phosphate
  modified_base 11: mod_base = OTHER; note = 2'-O-methyluridine-3'-phosphate
  modified_base 12: mod_base = OTHER; note = 2'-O-methylguanosine-3'-phosphate
  modified_base 13: mod_base = OTHER; note = 2'-O-methylguanosine-3'-phosphate
  modified_base 14: mod_base = OTHER; note = 2'-deoxy-2'-fluorouridine-3'-phosphate
  modified_base 15: mod_base = OTHER; note = 2'-O-methylguanosine-3'-phosphate
  modified_base 16: mod_base = OTHER; note = 2'-deoxy-2'-fluoroguanosine-3'-phosphate
  modified_base 17: mod_base = OTHER; note = 2'-O-methyluridine-3'-phosphate
  modified_base 18: mod_base = OTHER; note = 2'-O-methylguanosine-3'-phosphate
  modified_base 19: mod_base = OTHER; note = 2'-O-methylguanosine-3'-phosphate
  modified_base 20: mod_base = OTHER; note = 2'-O-methyluridine-3'-phosphate
  modified_base 21: mod_base = OTHER; note = 2'-O-methylcytidine-3'-phosphorothioate
  modified_base 22: mod_base = OTHER; note = 2'-O-methyladenosine-3'-phosphorothioate
  modified_base 23: mod_base = OTHER; note = 2'-O-methylguanosine
acagttgtggtggtggtggtcag

SEQ ID NO: 1197 - RNA, 23 nt, synthetic construct
  source 1..23: mol_type = other RNA
  modified_base 1: mod_base = OTHER; note = 2'-O-methyladenosine-3'-phosphorothioate
  modified_base 2: mod_base = OTHER; note = 2'-deoxy-2'-fluoroguanosine-3'-phosphorothioate
  modified_base 3: mod_base = OTHER; note = 2'-O-methyluridine-3'-phosphate
  modified_base 4: mod_base = OTHER; note = 2'-O-methylguanosine-3'-phosphate
  modified_base 5: mod_base = OTHER; note = 2'-O-methyluridine-3'-phosphate
  modified_base 6: mod_base = OTHER; note = 2'-deoxy-2'-fluorouridine-3'-phosphate
  modified_base 7: mod_base = OTHER; note = 2'-O-methylguanosine-3'-phosphate
  modified_base 8: mod_base = OTHER; note = 2'-deoxy-2'-fluorocytidine-3'-phosphate
  modified_base 9: mod_base = OTHER; note = 2'-deoxy-2'-fluorocytidine-3'-phosphate
  modified_base 10: mod_base = OTHER; note = 2'-O-methyladenosine-3'-phosphate
  modified_base 11: mod_base = OTHER; note = 2'-O-methyluridine-3'-phosphate
  modified_base 12: mod_base = OTHER; note = 2'-O-methyladenosine-3'-phosphate
  modified_base 13: mod_base = OTHER; note = 2'-O-methylguanosine-3'-phosphate
  modified_base 14: mod_base = OTHER; note = 2'-deoxy-2'-fluoroadenosine-3'-phosphate
  modified_base 15: mod_base = OTHER; note = 2'-O-methyladenosine-3'-phosphate
  modified_base 16: mod_base = OTHER; note = 2'-deoxy-2'-fluorocytidine-3'-phosphate
  modified_base 17: mod_base = OTHER; note = 2'-O-methylcytidine-3'-phosphate
  modified_base 18: mod_base = OTHER; note = 2'-O-methyladenosine-3'-phosphate
  modified_base 19: mod_base = OTHER; note = 2'-O-methylguanosine-3'-phosphate
  modified_base 20: mod_base = OTHER; note = 2'-O-methyluridine-3'-phosphate
  modified_base 21: mod_base = OTHER; note = 2'-O-methylguanosine-3'-phosphorothioate
  modified_base 22: mod_base = OTHER; note = 2'-O-methylguanosine-3'-phosphorothioate
  modified_base 23: mod_base = OTHER; note = 2'-O-methylcytidine
agtgttgccatagaaccagtggc

SEQ ID NO: 1198 - RNA, 23 nt, synthetic construct
  source 1..23: mol_type = other RNA
  modified_base 1: mod_base = OTHER; note = 2'-O-methyladenosine-3'-phosphorothioate
  modified_base 2: mod_base = OTHER; note = 2'-deoxy-2'-fluoroadenosine-3'-phosphorothioate
  modified_base 3: mod_base = OTHER; note = 2'-O-methylcytidine-3'-phosphate
  modified_base 4: mod_base = OTHER; note = 2'-O-methyluridine-3'-phosphate
  modified_base 5: mod_base = OTHER; note = 2'-O-methylguanosine-3'-phosphate
  modified_base 6: mod_base = OTHER; note = 2'-deoxy-2'-fluoroguanosine-3'-phosphate
  modified_base 7: mod_base = OTHER; note = 2'-O-methyluridine-3'-phosphate
  modified_base 8: mod_base = OTHER; note = 2'-deoxy-2'-fluorocytidine-3'-phosphate
  modified_base 9: mod_base = OTHER; note = 2'-deoxy-2'-fluorouridine-3'-phosphate
  modified_base 10: mod_base = OTHER; note = 2'-O-methylguanosine-3'-phosphate
  modified_base 11: mod_base = OTHER; note = 2'-O-methyluridine-3'-phosphate
  modified_base 12: mod_base = OTHER; note = 2'-O-methylguanosine-3'-phosphate
  modified_base 13: mod_base = OTHER; note = 2'-O-methyluridine-3'-phosphate
  modified_base 14: mod_base = OTHER; note = 2'-deoxy-2'-fluoroguanosine-3'-phosphate
  modified_base 15: mod_base = OTHER; note = 2'-O-methylcytidine-3'-phosphate
  modified_base 16: mod_base = OTHER; note = 2'-deoxy-2'-fluorouridine-3'-phosphate
  modified_base 17: mod_base = OTHER; note = 2'-O-methyladenosine-3'-phosphate
  modified_base 18: mod_base = OTHER; note = 2'-O-methylguanosine-3'-phosphate
  modified_base 19: mod_base = OTHER; note = 2'-O-methyladenosine-3'-phosphate
  modified_base 20: mod_base = OTHER; note = 2'-O-methylguanosine-3'-phosphate
  modified_base 21: mod_base = OTHER; note = 2'-O-methylguanosine-3'-phosphorothioate
  modified_base 22: mod_base = OTHER; note = 2'-O-methyladenosine-3'-phosphorothioate
  modified_base 23: mod_base = OTHER; note = 2'-O-methylguanosine
aactggtctgtgtgctagaggag

SEQ ID NO: 1199 - RNA, 23 nt, synthetic construct
  source 1..23: mol_type = other RNA
  modified_base 1: mod_base = OTHER; note = 2'-O-methyladenosine-3'-phosphorothioate
  modified_base 2: mod_base = OTHER; note = 2'-deoxy-2'-fluorocytidine-3'-phosphorothioate
  modified_base 3: mod_base = OTHER; note = 2'-O-methylguanosine-3'-phosphate
  modified_base 4: mod_base = OTHER; note = 2'-O-methyluridine-3'-phosphate
  modified_base 5: mod_base = OTHER; note = 2'-O-methylguanosine-3'-phosphate
  modified_base 6: mod_base = OTHER; note = 2'-deoxy-2'-fluoroadenosine-3'-phosphate
  modified_base 7: mod_base = OTHER; note = 2'-O-methyluridine-3'-phosphate
  modified_base 8: mod_base = OTHER; note = 2'-deoxy-2'-fluorocytidine-3'-phosphate
  modified_base 9: mod_base = OTHER; note = 2'-deoxy-2'-fluoroguanosine-3'-phosphate
  modified_base 10: mod_base = OTHER; note = 2'-O-methyluridine-3'-phosphate
  modified_base 11: mod_base = OTHER; note = 2'-O-methyladenosine-3'-phosphate
  modified_base 12: mod_base = OTHER; note = 2'-O-methylguanosine-3'-phosphate
  modified_base 13: mod_base = OTHER; note = 2'-O-methyluridine-3'-phosphate
  modified_base 14: mod_base = OTHER; note = 2'-deoxy-2'-fluoroguanosine-3'-phosphate
  modified_base 15: mod_base = OTHER; note = 2'-O-methylguanosine-3'-phosphate
  modified_base 16: mod_base = OTHER; note = 2'-deoxy-2'-fluorocytidine-3'-phosphate
  modified_base 17: mod_base = OTHER; note = 2'-O-methylcytidine-3'-phosphate
  modified_base 18: mod_base = OTHER; note = 2'-O-methylguanosine-3'-phosphate
  modified_base 19: mod_base = OTHER; note = 2'-O-methyluridine-3'-phosphate
  modified_base 20: mod_base = OTHER; note = 2'-O-methylguanosine-3'-phosphate
  modified_base 21: mod_base = OTHER; note = 2'-O-methylguanosine-3'-phosphorothioate
  modified_base 22: mod_base = OTHER; note = 2'-O-methyluridine-3'-phosphorothioate
  modified_base 23: mod_base = OTHER; note = 2'-O-methylguanosine
acgtgatcgtagtggccgtggtg

SEQ ID NO: 1200 - RNA, 23 nt, synthetic construct
  source 1..23: mol_type = other RNA
  modified_base 1: mod_base = OTHER; note = 2'-O-methyladenosine-3'-phosphorothioate
  modified_base 2: mod_base = OTHER; note = 2'-deoxy-2'-fluoroguanosine-3'-phosphorothioate
  modified_base 3: mod_base = OTHER; note = 2'-O-methyluridine-3'-phosphate
  modified_base 4: mod_base = OTHER; note = 2'-O-methylguanosine-3'-phosphate
  modified_base 5: mod_base = OTHER; note = 2'-O-methyladenosine-3'-phosphate
  modified_base 6: mod_base = OTHER; note = 2'-deoxy-2'-fluoroguanosine-3'-phosphate
  modified_base 7: mod_base = OTHER; note = 2'-O-methylguanosine-3'-phosphate
  modified_base 8: mod_base = OTHER; note = 2'-deoxy-2'-fluoroadenosine-3'-phosphate
  modified_base 9: mod_base = OTHER; note = 2'-deoxy-2'-fluorouridine-3'-phosphate
  modified_base 10: mod_base = OTHER; note = 2'-O-methylcytidine-3'-phosphate
  modified_base 11: mod_base = OTHER; note = 2'-O-methylcytidine-3'-phosphate
  modified_base 12: mod_base = OTHER; note = 2'-O-methyladenosine-3'-phosphate
  modified_base 13: mod_base = OTHER; note = 2'-O-methylguanosine-3'-phosphate
  modified_base 14: mod_base = OTHER; note = 2'-deoxy-2'-fluoroguanosine-3'-phosphate
  modified_base 15: mod_base = OTHER; note = 2'-O-methyluridine-3'-phosphate
  modified_base 16: mod_base = OTHER; note = 2'-deoxy-2'-fluoroguanosine-3'-phosphate
  modified_base 17: mod_base = OTHER; note = 2'-O-methylguanosine-3'-phosphate
  modified_base 18: mod_base = OTHER; note = 2'-O-methyluridine-3'-phosphate
  modified_base 19: mod_base = OTHER; note = 2'-O-methylcytidine-3'-phosphate
  modified_base 20: mod_base = OTHER; note = 2'-O-methylcytidine-3'-phosphate
  modified_base 21: mod_base = OTHER; note = 2'-O-methylcytidine-3'-phosphorothioate
  modified_base 22: mod_base = OTHER; note = 2'-O-methyluridine-3'-phosphorothioate
  modified_base 23: mod_base = OTHER; note = 2'-O-methylguanosine
agtgaggatccaggtggtccctg

SEQ ID NO: 1201 - RNA, 23 nt, synthetic construct
  source 1..23: mol_type = other RNA
  modified_base 1: mod_base = OTHER; note = 2'-O-methyladenosine-3'-phosphorothioate
  modified_base 2: mod_base = OTHER; note = 2'-deoxy-2'-fluoroguanosine-3'-phosphorothioate
  modified_base 3: mod_base = OTHER; note = 2'-O-methylguanosine-3'-phosphate
  modified_base 4: mod_base = OTHER; note = 2'-O-methyluridine-3'-phosphate
  modified_base 5: mod_base = OTHER; note = 2'-O-methyluridine-3'-phosphate
  modified_base 6: mod_base = OTHER; note = 2'-deoxy-2'-fluoroguanosine-3'-phosphate
  modified_base 7: mod_base = OTHER; note = 2'-O-methylcytidine-3'-phosphate
  modified_base 8: mod_base = OTHER; note = 2'-deoxy-2'-fluoroguanosine-3'-phosphate
  modified_base 9: mod_base = OTHER; note = 2'-deoxy-2'-fluoroguanosine-3'-phosphate
  modified_base 10: mod_base = OTHER; note = 2'-O-methyluridine-3'-phosphate
  modified_base 11: mod_base = OTHER; note = 2'-O-methylcytidine-3'-phosphate
  modified_base 12: mod_base = OTHER; note = 2'-O-methylguanosine-3'-phosphate
  modified_base 13: mod_base = OTHER; note = 2'-O-methyluridine-3'-phosphate
  modified_base 14: mod_base = OTHER; note = 2'-deoxy-2'-fluoroadenosine-3'-phosphate
  modified_base 15: mod_base = OTHER; note = 2'-O-methylguanosine-3'-phosphate
  modified_base 16: mod_base = OTHER; note = 2'-deoxy-2'-fluorouridine-3'-phosphate
  modified_base 17: mod_base = OTHER; note = 2'-O-methylguanosine-3'-phosphate
  modified_base 18: mod_base = OTHER; note = 2'-O-methylguanosine-3'-phosphate
  modified_base 19: mod_base = OTHER; note = 2'-O-methylcytidine-3'-phosphate
  modified_base 20: mod_base = OTHER; note = 2'-O-methyluridine-3'-phosphate
  modified_base 21: mod_base = OTHER; note = 2'-O-methylguanosine-3'-phosphorothioate
  modified_base 22: mod_base = OTHER; note = 2'-O-methylcytidine-3'-phosphorothioate
  modified_base 23: mod_base = OTHER; note = 2'-O-methyluridine
aggttgcggtcgtagtggctgct

SEQ ID NO: 1202 - RNA, 23 nt, synthetic construct
  source 1..23: mol_type = other RNA
  modified_base 1: mod_base = OTHER; note = 2'-O-methyladenosine-3'-phosphorothioate
  modified_base 2: mod_base = OTHER; note = 2'-deoxy-2'-fluorouridine-3'-phosphorothioate
  modified_base 3: mod_base = OTHER; note = 2'-O-methylguanosine-3'-phosphate
  modified_base 4: mod_base = OTHER; note = 2'-O-methylcytidine-3'-phosphate
  modified_base 5: mod_base = OTHER; note = 2'-O-methyluridine-3'-phosphate
  modified_base 6: mod_base = OTHER; note = 2'-deoxy-2'-fluoroguanosine-3'-phosphate
  modified_base 7: mod_base = OTHER; note = 2'-O-methylguanosine-3'-phosphate
  modified_base 8: mod_base = OTHER; note = 2'-deoxy-2'-fluorouridine-3'-phosphate
  modified_base 9: mod_base = OTHER; note = 2'-deoxy-2'-fluorocytidine-3'-phosphate
  modified_base 10: mod_base = OTHER; note = 2'-O-methyladenosine-3'-phosphate
  modified_base 11: mod_base = OTHER; note = 2'-O-methylguanosine-3'-phosphate
  modified_base 12: mod_base = OTHER; note = 2'-O-methylcytidine-3'-phosphate
  modified_base 13: mod_base = OTHER; note = 2'-O-methyladenosine-3'-phosphate
  modified_base 14: mod_base = OTHER; note = 2'-deoxy-2'-fluorocytidine-3'-phosphate
  modified_base 15: mod_base = OTHER; note = 2'-O-methyluridine-3'-phosphate
  modified_base 16: mod_base = OTHER; note = 2'-deoxy-2'-fluorouridine-3'-phosphate
  modified_base 17: mod_base = OTHER; note = 2'-O-methyluridine-3'-phosphate
  modified_base 18: mod_base = OTHER; note = 2'-O-methylguanosine-3'-phosphate
  modified_base 19: mod_base = OTHER; note = 2'-O-methylguanosine-3'-phosphate
  modified_base 20: mod_base = OTHER; note = 2'-O-methylguanosine-3'-phosphate
  modified_base 21: mod_base = OTHER; note = 2'-O-methyladenosine-3'-phosphorothioate
  modified_base 22: mod_base = OTHER; note = 2'-O-methylguanosine-3'-phosphorothioate
  modified_base 23: mod_base = OTHER; note = 2'-O-methylguanosine
atgctggtcagcactttgggagg

SEQ ID NO: 1203 - RNA, 23 nt, synthetic construct
  source 1..23: mol_type = other RNA
  modified_base 1: mod_base = OTHER; note = 2'-O-methyladenosine-3'-phosphorothioate
  modified_base 2: mod_base = OTHER; note = 2'-deoxy-2'-fluorouridine-3'-phosphorothioate
  modified_base 3: mod_base = OTHER; note = 2'-O-methylguanosine-3'-phosphate
  modified_base 4: mod_base = OTHER; note = 2'-O-methylguanosine-3'-phosphate
  modified_base 5: mod_base = OTHER; note = 2'-O-methyluridine-3'-phosphate
  modified_base 6: mod_base = OTHER; note = 2'-deoxy-2'-fluorocytidine-3'-phosphate
  modified_base 7: mod_base = OTHER; note = 2'-O-methylcytidine-3'-phosphate
  modified_base 8: mod_base = OTHER; note = 2'-deoxy-2'-fluorocytidine-3'-phosphate
  modified_base 9: mod_base = OTHER; note = 2'-deoxy-2'-fluoroadenosine-3'-phosphate
  modified_base 10: mod_base = OTHER; note = 2'-O-methyladenosine-3'-phosphate
  modified_base 11: mod_base = OTHER; note = 2'-O-methylguanosine-3'-phosphate
  modified_base 12: mod_base = OTHER; note = 2'-O-methylguanosine-3'-phosphate
  modified_base 13: mod_base = OTHER; note = 2'-O-methylguanosine-3'-phosphate
  modified_base 14: mod_base = OTHER; note = 2'-deoxy-2'-fluorouridine-3'-phosphate
  modified_base 15: mod_base = OTHER; note = 2'-O-methylguanosine-3'-phosphate
  modified_base 16: mod_base = OTHER; note = 2'-deoxy-2'-fluoroadenosine-3'-phosphate
  modified_base 17: mod_base = OTHER; note = 2'-O-methyladenosine-3'-phosphate
  modified_base 18: mod_base = OTHER; note = 2'-O-methylguanosine-3'-phosphate
  modified_base 19: mod_base = OTHER; note = 2'-O-methylguanosine-3'-phosphate
  modified_base 20: mod_base = OTHER; note = 2'-O-methyladenosine-3'-phosphate
  modified_base 21: mod_base = OTHER; note = 2'-O-methylguanosine-3'-phosphorothioate
  modified_base 22: mod_base = OTHER; note = 2'-O-methylguanosine-3'-phosphorothioate
  modified_base 23: mod_base = OTHER; note = 2'-O-methylguanosine
atggtcccaagggtgaaggaggg

SEQ ID NO: 1204 - RNA, 23 nt, synthetic construct
  source 1..23: mol_type = other RNA
  modified_base 1: mod_base = OTHER; note = 2'-O-methyladenosine-3'-phosphorothioate
  modified_base 2: mod_base = OTHER; note = 2'-deoxy-2'-fluoroguanosine-3'-phosphorothioate
  modified_base 3: mod_base = OTHER; note = 2'-O-methylguanosine-3'-phosphate
  modified_base 4: mod_base = OTHER; note = 2'-O-methyladenosine-3'-phosphate
  modified_base 5: mod_base = OTHER; note = 2'-O-methylcytidine-3'-phosphate
  modified_base 6: mod_base = OTHER; note = 2'-deoxy-2'-fluoroadenosine-3'-phosphate
  modified_base 7: mod_base = OTHER; note = 2'-O-methyluridine-3'-phosphate
  modified_base 8: mod_base = OTHER; note = 2'-deoxy-2'-fluoroguanosine-3'-phosphate
  modified_base 9: mod_base = OTHER; note = 2'-deoxy-2'-fluoroguanosine-3'-phosphate
  modified_base 10: mod_base = OTHER; note = 2'-O-methyladenosine-3'-phosphate
  modified_base 11: mod_base = OTHER; note = 2'-O-methyladenosine-3'-phosphate
  modified_base 12: mod_base = OTHER; note = 2'-O-methylcytidine-3'-phosphate
  modified_base 13: mod_base = OTHER; note = 2'-O-methyluridine-3'-phosphate
  modified_base 14: mod_base = OTHER; note = 2'-deoxy-2'-fluoroguanosine-3'-phosphate
  modified_base 15: mod_base = OTHER; note = 2'-O-methylguanosine-3'-phosphate
  modified_base 16: mod_base = OTHER; note = 2'-deoxy-2'-fluorouridine-3'-phosphate
  modified_base 17: mod_base = OTHER; note = 2'-O-methylguanosine-3'-phosphate
  modified_base 18: mod_base = OTHER; note = 2'-O-methylguanosine-3'-phosphate
  modified_base 19: mod_base = OTHER; note = 2'-O-methylcytidine-3'-phosphate
  modified_base 20: mod_base = OTHER; note = 2'-O-methylcytidine-3'-phosphate
  modified_base 21: mod_base = OTHER; note = 2'-O-methylcytidine-3'-phosphorothioate
  modified_base 22: mod_base = OTHER; note = 2'-O-methyluridine-3'-phosphorothioate
  modified_base 23: mod_base = OTHER; note = 2'-O-methyluridine
aggacatggaactggtggccctt

SEQ ID NO: 1205 - RNA, 23 nt, synthetic construct
  source 1..23: mol_type = other RNA
  modified_base 1: mod_base = OTHER; note = 2'-O-methyladenosine-3'-phosphorothioate
  modified_base 2: mod_base = OTHER; note = 2'-deoxy-2'-fluorouridine-3'-phosphorothioate
  modified_base 3: mod_base = OTHER; note = 2'-O-methylcytidine-3'-phosphate
  modified_base 4: mod_base = OTHER; note = 2'-O-methyladenosine-3'-phosphate
  modified_base 5: mod_base = OTHER; note = 2'-O-methylcytidine-3'-phosphate
  modified_base 6: mod_base = OTHER; note = 2'-deoxy-2'-fluoroguanosine-3'-phosphate
  modified_base 7: mod_base = OTHER; note = 2'-O-methylguanosine-3'-phosphate
  modified_base 8: mod_base = OTHER; note = 2'-deoxy-2'-fluorouridine-3'-phosphate
  modified_base 9: mod_base = OTHER; note = 2'-deoxy-2'-fluoroguanosine-3'-phosphate
  modified_base 10: mod_base = OTHER; note = 2'-O-methylguanosine-3'-phosphate
  modified_base 11: mod_base = OTHER; note = 2'-O-methylcytidine-3'-phosphate
  modified_base 12: mod_base = OTHER; note = 2'-O-methyluridine-3'-phosphate
  modified_base 13: mod_base = OTHER; note = 2'-O-methylguanosine-3'-phosphate
  modified_base 14: mod_base = OTHER; note = 2'-deoxy-2'-fluorouridine-3'-phosphate
  modified_base 15: mod_base = OTHER; note = 2'-O-methyladenosine-3'-phosphate
  modified_base 16: mod_base = OTHER; note = 2'-deoxy-2'-fluoroguanosine-3'-phosphate
  modified_base 17: mod_base = OTHER; note = 2'-O-methyluridine-3'-phosphate
  modified_base 18: mod_base = OTHER; note = 2'-O-methylguanosine-3'-phosphate
  modified_base 19: mod_base = OTHER; note = 2'-O-methylcytidine-3'-phosphate
  modified_base 20: mod_base = OTHER; note = 2'-O-methyluridine-3'-phosphate
  modified_base 21: mod_base = OTHER; note = 2'-O-methylguanosine-3'-phosphorothioate
  modified_base 22: mod_base = OTHER; note = 2'-O-methylguanosine-3'-phosphorothioate
  modified_base 23: mod_base = OTHER; note = 2'-O-methylguanosine
atcacggtggctgtagtgctggg

SEQ ID NO: 1206 - RNA, 23 nt, synthetic construct
  source 1..23: mol_type = other RNA
  modified_base 1: mod_base = OTHER; note = 2'-O-methyladenosine-3'-phosphorothioate
  modified_base 2: mod_base = OTHER; note = 2'-deoxy-2'-fluorocytidine-3'-phosphorothioate
  modified_base 3: mod_base = OTHER; note = 2'-O-methyluridine-3'-phosphate
  modified_base 4: mod_base = OTHER; note = 2'-O-methylguanosine-3'-phosphate
  modified_base 5: mod_base = OTHER; note = 2'-O-methylguanosine-3'-phosphate
  modified_base 6: mod_base = OTHER; note = 2'-deoxy-2'-fluorouridine-3'-phosphate
  modified_base 7: mod_base = OTHER; note = 2'-O-methylcytidine-3'-phosphate
  modified_base 8: mod_base = OTHER; note = 2'-deoxy-2'-fluoroadenosine-3'-phosphate
  modified_base 9: mod_base = OTHER; note = 2'-deoxy-2'-fluoroguanosine-3'-phosphate
  modified_base 10: mod_base = OTHER; note = 2'-O-methylcytidine-3'-phosphate
  modified_base 11: mod_base = OTHER; note = 2'-O-methyladenosine-3'-phosphate
  modified_base 12: mod_base = OTHER; note = 2'-O-methylcytidine-3'-phosphate
  modified_base 13: mod_base = OTHER; note = 2'-O-methyluridine-3'-phosphate
  modified_base 14: mod_base = OTHER; note = 2'-deoxy-2'-fluorouridine-3'-phosphate
  modified_base 15: mod_base = OTHER; note = 2'-O-methyluridine-3'-phosphate
  modified_base 16: mod_base = OTHER; note = 2'-deoxy-2'-fluoroguanosine-3'-phosphate
  modified_base 17: mod_base = OTHER; note = 2'-O-methyladenosine-3'-phosphate
  modified_base 18: mod_base = OTHER; note = 2'-O-methylguanosine-3'-phosphate
  modified_base 19: mod_base = OTHER; note = 2'-O-methylguanosine-3'-phosphate
  modified_base 20: mod_base = OTHER; note = 2'-O-methylguanosine-3'-phosphate
  modified_base 21: mod_base = OTHER; note = 2'-O-methyluridine-3'-phosphorothioate
  modified_base 22: mod_base = OTHER; note = 2'-O-methylguanosine-3'-phosphorothioate
  modified_base 23: mod_base = OTHER; note = 2'-O-methylcytidine
actggtcagcactttgagggtgc

SEQ ID NO: 1207 - RNA, 23 nt, synthetic construct
  source 1..23: mol_type = other RNA
  modified_base 1: mod_base = OTHER; note = 2'-O-methyladenosine-3'-phosphorothioate
  modified_base 2: mod_base = OTHER; note = 2'-deoxy-2'-fluoroadenosine-3'-phosphorothioate
  modified_base 3: mod_base = OTHER; note = 2'-O-methylguanosine-3'-phosphate
  modified_base 4: mod_base = OTHER; note = 2'-O-methylcytidine-3'-phosphate
  modified_base 5: mod_base = OTHER; note = 2'-O-methyluridine-3'-phosphate
  modified_base 6: mod_base = OTHER; note = 2'-deoxy-2'-fluoroguanosine-3'-phosphate
  modified_base 7: mod_base = OTHER; note = 2'-O-methyladenosine-3'-phosphate
  modified_base 8: mod_base = OTHER; note = 2'-deoxy-2'-fluorouridine-3'-phosphate
  modified_base 9: mod_base = OTHER; note = 2'-deoxy-2'-fluoroguanosine-3'-phosphate
  modified_base 10: mod_base = OTHER; note = 2'-O-methyladenosine-3'-phosphate
  modified_base 11: mod_base = OTHER; note = 2'-O-methylcytidine-3'-phosphate
  modified_base 12: mod_base = OTHER; note = 2'-O-methyluridine-3'-phosphate
  modified_base 13: mod_base = OTHER; note = 2'-O-methylguanosine-3'-phosphate
  modified_base 14: mod_base = OTHER; note = 2'-deoxy-2'-fluorouridine-3'-phosphate
  modified_base 15: mod_base = OTHER; note = 2'-O-methylguanosine-3'-phosphate
  modified_base 16: mod_base = OTHER; note = 2'-deoxy-2'-fluoroguanosine-3'-phosphate
  modified_base 17: mod_base = OTHER; note = 2'-O-methylguanosine-3'-phosphate
  modified_base 18: mod_base = OTHER; note = 2'-O-methyluridine-3'-phosphate
  modified_base 19: mod_base = OTHER; note = 2'-O-methylguanosine-3'-phosphate
  modified_base 20: mod_base = OTHER; note = 2'-O-methyluridine-3'-phosphate
  modified_base 21: mod_base = OTHER; note = 2'-O-methylguanosine-3'-phosphorothioate
  modified_base 22: mod_base = OTHER; note = 2'-O-methylguanosine-3'-phosphorothioate
  modified_base 23: mod_base = OTHER; note = 2'-O-methyluridine
aagctgatgactgtgggtgtggt

SEQ ID NO: 1208 - RNA, 23 nt, synthetic construct
  source 1..23: mol_type = other RNA
  modified_base 1: mod_base = OTHER; note = 2'-O-methyladenosine-3'-phosphorothioate
  modified_base 2: mod_base = OTHER; note = 2'-deoxy-2'-fluoroadenosine-3'-phosphorothioate
  modified_base 3: mod_base = OTHER; note = 2'-O-methyladenosine-3'-phosphate
  modified_base 4: mod_base = OTHER; note = 2'-O-methylcytidine-3'-phosphate
  modified_base 5: mod_base = OTHER; note = 2'-O-methylguanosine-3'-phosphate
  modified_base 6: mod_base = OTHER; note = 2'-deoxy-2'-fluorocytidine-3'-phosphate
  modified_base 7: mod_base = OTHER; note = 2'-O-methyluridine-3'-phosphate
  modified_base 8: mod_base = OTHER; note = 2'-deoxy-2'-fluoroguanosine-3'-phosphate
  modified_base 9: mod_base = OTHER; note = 2'-deoxy-2'-fluoroguanosine-3'-phosphate
  modified_base 10: mod_base = OTHER; note = 2'-O-methyluridine-3'-phosphate
  modified_base 11: mod_base = OTHER; note = 2'-O-methyladenosine-3'-phosphate
  modified_base 12: mod_base = OTHER; note = 2'-O-methylguanosine-3'-phosphate
  modified_base 13: mod_base = OTHER; note = 2'-O-methylcytidine-3'-phosphate
  modified_base 14: mod_base = OTHER; note = 2'-deoxy-2'-fluorouridine-3'-phosphate
  modified_base 15: mod_base = OTHER; note = 2'-O-methylguanosine-3'-phosphate
  modified_base 16: mod_base = OTHER; note = 2'-deoxy-2'-fluorouridine-3'-phosphate
  modified_base 17: mod_base = OTHER; note = 2'-O-methylguanosine-3'-phosphate
  modified_base 18: mod_base = OTHER; note = 2'-O-methylguanosine-3'-phosphate
  modified_base 19: mod_base = OTHER; note = 2'-O-methylguanosine-3'-phosphate
  modified_base 20: mod_base = OTHER; note = 2'-O-methyluridine-3'-phosphate
  modified_base 21: mod_base = OTHER; note = 2'-O-methylguanosine-3'-phosphorothioate
  modified_base 22: mod_base = OTHER; note = 2'-O-methyluridine-3'-phosphorothioate
  modified_base 23: mod_base = OTHER; note = 2'-O-methylguanosine
aaacgctggtagctgtgggtgtg

SEQ ID NO: 1209 - RNA, 23 nt, synthetic construct
  source 1..23: mol_type = other RNA
  modified_base 1: mod_base = OTHER; note = 2'-O-methyladenosine-3'-phosphorothioate
  modified_base 2: mod_base = OTHER; note = 2'-deoxy-2'-fluoroadenosine-3'-phosphorothioate
  modified_base 3: mod_base = OTHER; note = 2'-O-methylcytidine-3'-phosphate
  modified_base 4: mod_base = OTHER; note = 2'-O-methyladenosine-3'-phosphate
  modified_base 5: mod_base = OTHER; note = 2'-O-methylguanosine-3'-phosphate
  modified_base 6: mod_base = OTHER; note = 2'-deoxy-2'-fluorouridine-3'-phosphate
  modified_base 7: mod_base = OTHER; note = 2'-O-methylcytidine-3'-phosphate
  modified_base 8: mod_base = OTHER; note = 2'-deoxy-2'-fluorouridine-3'-phosphate
  modified_base 9: mod_base = OTHER; note = 2'-deoxy-2'-fluorocytidine-3'-phosphate
  modified_base 10: mod_base = OTHER; note = 2'-O-methyluridine-3'-phosphate
  modified_base 11: mod_base = OTHER; note = 2'-O-methylguanosine-3'-phosphate
  modified_base 12: mod_base = OTHER; note = 2'-O-methylguanosine-3'-phosphate
  modified_base 13: mod_base = OTHER; note = 2'-O-methyladenosine-3'-phosphate
  modified_base 14: mod_base = OTHER; note = 2'-deoxy-2'-fluoroguanosine-3'-phosphate
  modified_base 15: mod_base = OTHER; note = 2'-O-methyluridine-3'-phosphate
  modified_base 16: mod_base = OTHER; note = 2'-deoxy-2'-fluoroadenosine-3'-phosphate
  modified_base 17: mod_base = OTHER; note = 2'-O-methylguanosine-3'-phosphate
  modified_base 18: mod_base = OTHER; note = 2'-O-methyladenosine-3'-phosphate
  modified_base 19: mod_base = OTHER; note = 2'-O-methylguanosine-3'-phosphate
  modified_base 20: mod_base = OTHER; note = 2'-O-methylguanosine-3'-phosphate
  modified_base 21: mod_base = OTHER; note = 2'-O-methyladenosine-3'-phosphorothioate
  modified_base 22: mod_base = OTHER; note = 2'-O-methylguanosine-3'-phosphorothioate
  modified_base 23: mod_base = OTHER; note = 2'-O-methylguanosine
aacagtctctggagtagaggagg

SEQ ID NO: 1210 - RNA, 23 nt, synthetic construct
  source 1..23: mol_type = other RNA
  modified_base 1: mod_base = OTHER; note = 2'-O-methyladenosine-3'-phosphorothioate
  modified_base 2: mod_base = OTHER; note = 2'-deoxy-2'-fluoroguanosine-3'-phosphorothioate
  modified_base 3: mod_base = OTHER; note = 2'-O-methyluridine-3'-phosphate
  modified_base 4: mod_base = OTHER; note = 2'-O-methylcytidine-3'-phosphate
  modified_base 5: mod_base = OTHER; note = 2'-O-methylguanosine-3'-phosphate
  modified_base 6: mod_base = OTHER; note = 2'-deoxy-2'-fluorouridine-3'-phosphate
  modified_base 7: mod_base = OTHER; note = 2'-O-methylguanosine-3'-phosphate
  modified_base 8: mod_base = OTHER; note = 2'-deoxy-2'-fluoroguanosine-3'-phosphate
  modified_base 9: mod_base = OTHER; note = 2'-deoxy-2'-fluorouridine-3'-phosphate
  modified_base 10: mod_base = OTHER; note = 2'-O-methylguanosine-3'-phosphate
  modified_base 11: mod_base = OTHER; note = 2'-O-methylguanosine-3'-phosphate
  modified_base 12: mod_base = OTHER; note = 2'-O-methyluridine-3'-phosphate
  modified_base 13: mod_base = OTHER; note = 2'-O-methyladenosine-3'-phosphate
  modified_base 14: mod_base = OTHER; note = 2'-deoxy-2'-fluoroadenosine-3'-phosphate
  modified_base 15: mod_base = OTHER; note = 2'-O-methylguanosine-3'-phosphate
  modified_base 16: mod_base = OTHER; note = 2'-deoxy-2'-fluorocytidine-3'-phosphate
  modified_base 17: mod_base = OTHER; note = 2'-O-methyladenosine-3'-phosphate
  modified_base 18: mod_base = OTHER; note = 2'-O-methylcytidine-3'-phosphate
  modified_base 19: mod_base = OTHER; note = 2'-O-methyluridine-3'-phosphate
  modified_base 20: mod_base = OTHER; note = 2'-O-methylguanosine-3'-phosphate
  modified_base 21: mod_base = OTHER; note = 2'-O-methyluridine-3'-phosphorothioate
  modified_base 22: mod_base = OTHER; note = 2'-O-methylguanosine-3'-phosphorothioate
  modified_base 23: mod_base = OTHER; note = 2'-O-methylguanosine
agtcgtggtggtaagcactgtgg

SEQ ID NO: 1211 - RNA, 23 nt, synthetic construct
  source 1..23: mol_type = other RNA
  modified_base 1: mod_base = OTHER; note = 2'-O-methyladenosine-3'-phosphorothioate
  modified_base 2: mod_base = OTHER; note = 2'-deoxy-2'-fluoroguanosine-3'-phosphorothioate
  modified_base 3: mod_base = OTHER; note = 2'-O-methyluridine-3'-phosphate
  modified_base 4: mod_base = OTHER; note = 2'-O-methylguanosine-3'-phosphate
  modified_base 5: mod_base = OTHER; note = 2'-O-methylguanosine-3'-phosphate
  modified_base 6: mod_base = OTHER; note = 2'-deoxy-2'-fluorocytidine-3'-phosphate
  modified_base 7: mod_base = OTHER; note = 2'-O-methyluridine-3'-phosphate
  modified_base 8: mod_base = OTHER; note = 2'-deoxy-2'-fluoroguanosine-3'-phosphate
  modified_base 9: mod_base = OTHER; note = 2'-deoxy-2'-fluorouridine-3'-phosphate
  modified_base 10: mod_base = OTHER; note = 2'-O-methylguanosine-3'-phosphate
  modified_base 11: mod_base = OTHER; note = 2'-O-methyladenosine-3'-phosphate
  modified_base 12: mod_base = OTHER; note = 2'-O-methyluridine-3'-phosphate
  modified_base 13: mod_base = OTHER; note = 2'-O-methylcytidine-3'-phosphate
  modified_base 14: mod_base = OTHER; note = 2'-deoxy-2'-fluoroguanosine-3'-phosphate
  modified_base 15: mod_base = OTHER; note = 2'-O-methyluridine-3'-phosphate
  modified_base 16: mod_base = OTHER; note = 2'-deoxy-2'-fluoroadenosine-3'-phosphate
  modified_base 17: mod_base = OTHER; note = 2'-O-methylguanosine-3'-phosphate
  modified_base 18: mod_base = OTHER; note = 2'-O-methyluridine-3'-phosphate
  modified_base 19: mod_base = OTHER; note = 2'-O-methylguanosine-3'-phosphate
  modified_base 20: mod_base = OTHER; note = 2'-O-methylguanosine-3'-phosphate
  modified_base 21: mod_base = OTHER; note = 2'-O-methylcytidine-3'-phosphorothioate
  modified_base 22: mod_base = OTHER; note = 2'-O-methylcytidine-3'-phosphorothioate
  modified_base 23: mod_base = OTHER; note = 2'-O-methylguanosine
agtggctgtgatcgtagtggccg

SEQ ID NO: 1212 - RNA, 23 nt, synthetic construct
  source 1..23: mol_type = other RNA
  modified_base 1: mod_base = OTHER; note = 2'-O-methyladenosine-3'-phosphorothioate
  modified_base 2: mod_base = OTHER; note = 2'-deoxy-2'-fluoroguanosine-3'-phosphorothioate
  modified_base 3: mod_base = OTHER; note = 2'-O-methyladenosine-3'-phosphate
  modified_base 4: mod_base = OTHER; note = 2'-O-methyluridine-3'-phosphate
  modified_base 5: mod_base = OTHER; note = 2'-O-methylguanosine-3'-phosphate
  modified_base 6: mod_base = OTHER; note = 2'-deoxy-2'-fluoroguanosine-3'-phosphate
  modified_base 7: mod_base = OTHER; note = 2'-O-methylguanosine-3'-phosphate
  modified_base 8: mod_base = OTHER; note = 2'-deoxy-2'-fluoroadenosine-3'-phosphate
  modified_base 9: mod_base = OTHER; note = 2'-deoxy-2'-fluoroguanosine-3'-phosphate
  modified_base 10: mod_base = OTHER; note = 2'-O-methyluridine-3'-phosphate
  modified_base 11: mod_base = OTHER; note = 2'-O-methyluridine-3'-phosphate
  modified_base 12: mod_base = OTHER; note = 2'-O-methylguanosine-3'-phosphate
  modified_base 13: mod_base = OTHER; note = 2'-O-methyluridine-3'-phosphate
  modified_base 14: mod_base = OTHER; note = 2'-deoxy-2'-fluorocytidine-3'-phosphate
  modified_base 15: mod_base = OTHER; note = 2'-O-methylcytidine-3'-phosphate
  modified_base 16: mod_base = OTHER; note = 2'-deoxy-2'-fluorocytidine-3'-phosphate
  modified_base 17: mod_base = OTHER; note = 2'-O-methyluridine-3'-phosphate
  modified_base 18: mod_base = OTHER; note = 2'-O-methylguanosine-3'-phosphate
  modified_base 19: mod_base = OTHER; note = 2'-O-methylguanosine-3'-phosphate
  modified_base 20: mod_base = OTHER; note = 2'-O-methyladenosine-3'-phosphate
  modified_base 21: mod_base = OTHER; note = 2'-O-methylguanosine-3'-phosphorothioate
  modified_base 22: mod_base = OTHER; note = 2'-O-methyluridine-3'-phosphorothioate
  modified_base 23: mod_base = OTHER; note = 2'-O-methyluridine
agatgggagttgtccctggagtt

SEQ ID NO: 1213 - RNA, 23 nt, synthetic construct
  source 1..23: mol_type = other RNA
  modified_base 1: mod_base = OTHER; note = 2'-O-methyladenosine-3'-phosphorothioate
  modified_base 2: mod_base = OTHER; note = 2'-deoxy-2'-fluoroguanosine-3'-phosphorothioate
  modified_base 3: mod_base = OTHER; note = 2'-O-methylguanosine-3'-phosphate
  modified_base 4: mod_base = OTHER; note = 2'-O-methyluridine-3'-phosphate
  modified_base 5: mod_base = OTHER; note = 2'-O-methyladenosine-3'-phosphate
  modified_base 6: mod_base = OTHER; note = 2'-deoxy-2'-fluorocytidine-3'-phosphate
  modified_base 7: mod_base = OTHER; note = 2'-O-methyluridine-3'-phosphate
  modified_base 8: mod_base = OTHER; note = 2'-deoxy-2'-fluoroguanosine-3'-phosphate
  modified_base 9: mod_base = OTHER; note = 2'-deoxy-2'-fluoroguanosine-3'-phosphate
  modified_base 10: mod_base = OTHER; note = 2'-O-methyluridine-3'-phosphate
  modified_base 11: mod_base = OTHER; note = 2'-O-methylguanosine-3'-phosphate
  modified_base 12: mod_base = OTHER; note = 2'-O-methylguanosine-3'-phosphate
  modified_base 13: mod_base = OTHER; note = 2'-O-methyluridine-3'-phosphate
  modified_base 14: mod_base = OTHER; note = 2'-deoxy-2'-fluorouridine-3'-phosphate
  modified_base 15: mod_base = OTHER; note = 2'-O-methylguanosine-3'-phosphate
  modified_base 16: mod_base = OTHER; note = 2'-deoxy-2'-fluorocytidine-3'-phosphate
  modified_base 17: mod_base = OTHER; note = 2'-O-methyluridine-3'-phosphate
  modified_base 18: mod_base = OTHER; note = 2'-O-methylguanosine-3'-phosphate
  modified_base 19: mod_base = OTHER; note = 2'-O-methylcytidine-3'-phosphate
  modified_base 20: mod_base = OTHER; note = 2'-O-methyluridine-3'-phosphate
  modified_base 21: mod_base = OTHER; note = 2'-O-methylguanosine-3'-phosphorothioate
  modified_base 22: mod_base = OTHER; note = 2'-O-methylguanosine-3'-phosphorothioate
  modified_base 23: mod_base = OTHER; note = 2'-O-methylguanosine
aggtactggtggttgctgctggg

SEQ ID NO: 1214 - RNA, 23 nt, synthetic construct
  source 1..23: mol_type = other RNA
  modified_base 1: mod_base = OTHER; note = 2'-O-methyladenosine-3'-phosphorothioate
  modified_base 2: mod_base = OTHER; note = 2'-deoxy-2'-fluorocytidine-3'-phosphorothioate
  modified_base 3: mod_base = OTHER; note = 2'-O-methyluridine-3'-phosphate
  modified_base 4: mod_base = OTHER; note = 2'-O-methylguanosine-3'-phosphate
  modified_base 5: mod_base = OTHER; note = 2'-O-methyluridine-3'-phosphate
  modified_base 6: mod_base = OTHER; note = 2'-deoxy-2'-fluoroguanosine-3'-phosphate
  modified_base 7: mod_base = OTHER; note = 2'-O-methylguanosine-3'-phosphate
  modified_base 8: mod_base = OTHER; note = 2'-deoxy-2'-fluorocytidine-3'-phosphate
  modified_base 9: mod_base = OTHER; note = 2'-deoxy-2'-fluorouridine-3'-phosphate
  modified_base 10: mod_base = OTHER; note = 2'-O-methylguanosine-3'-phosphate
  modified_base 11: mod_base = OTHER; note = 2'-O-methyluridine-3'-phosphate
  modified_base 12: mod_base = OTHER; note = 2'-O-methylguanosine-3'-phosphate
  modified_base 13: mod_base = OTHER; note = 2'-O-methylguanosine-3'-phosphate
  modified_base 14: mod_base = OTHER; note = 2'-deoxy-2'-fluorouridine-3'-phosphate
  modified_base 15: mod_base = OTHER; note = 2'-O-methylcytidine-3'-phosphate
  modified_base 16: mod_base = OTHER; note = 2'-deoxy-2'-fluorocytidine-3'-phosphate
  modified_base 17: mod_base = OTHER; note = 2'-O-methyluridine-3'-phosphate
  modified_base 18: mod_base = OTHER; note = 2'-O-methylguanosine-3'-phosphate
  modified_base 19: mod_base = OTHER; note = 2'-O-methylguanosine-3'-phosphate
  modified_base 20: mod_base = OTHER; note = 2'-O-methyladenosine-3'-phosphate
  modified_base 21: mod_base = OTHER; note = 2'-O-methylguanosine-3'-phosphorothioate
  modified_base 22: mod_base = OTHER; note = 2'-O-methylguanosine-3'-phosphorothioate
  modified_base 23: mod_base = OTHER; note = 2'-O-methyluridine
actgtggctgtggtcctggaggt

SEQ ID NO: 1215 - RNA, 23 nt, synthetic construct
  source 1..23: mol_type = other RNA
  modified_base 1: mod_base = OTHER; note = 2'-O-methyladenosine-3'-phosphorothioate
  modified_base 2: mod_base = OTHER; note = 2'-deoxy-2'-fluoroadenosine-3'-phosphorothioate
  modified_base 3: mod_base = OTHER; note = 2'-O-methylguanosine-3'-phosphate
  modified_base 4: mod_base = OTHER; note = 2'-O-methyluridine-3'-phosphate
  modified_base 5: mod_base = OTHER; note = 2'-O-methyluridine-3'-phosphate
  modified_base 6: mod_base = OTHER; note = 2'-deoxy-2'-fluoroguanosine-3'-phosphate
  modified_base 7: mod_base = OTHER; note = 2'-O-methyladenosine-3'-phosphate
  modified_base 8: mod_base = OTHER; note = 2'-deoxy-2'-fluoroguanosine-3'-phosphate
  modified_base 9: mod_base = OTHER; note = 2'-deoxy-2'-fluoroguanosine-3'-phosphate
  modified_base 10: mod_base = OTHER; note = 2'-O-methyladenosine-3'-phosphate
  modified_base 11: mod_base = OTHER; note = 2'-O-methylguanosine-3'-phosphate
  modified_base 12: mod_base = OTHER; note = 2'-O-methylguanosine-3'-phosphate
  modified_base 13: mod_base = OTHER; note = 2'-O-methylguanosine-3'-phosphate
  modified_base 14: mod_base = OTHER; note = 2'-deoxy-2'-fluorocytidine-3'-phosphate
  modified_base 15: mod_base = OTHER; note = 2'-O-methylguanosine-3'-phosphate
  modified_base 16: mod_base = OTHER; note = 2'-deoxy-2'-fluorouridine-3'-phosphate
  modified_base 17: mod_base = OTHER; note = 2'-O-methylguanosine-3'-phosphate
  modified_base 18: mod_base = OTHER; note = 2'-O-methylguanosine-3'-phosphate
  modified_base 19: mod_base = OTHER; note = 2'-O-methylcytidine-3'-phosphate
  modified_base 20: mod_base = OTHER; note = 2'-O-methylcytidine-3'-phosphate
  modified_base 21: mod_base = OTHER; note = 2'-O-methylguanosine-3'-phosphorothioate
  modified_base 22: mod_base = OTHER; note = 2'-O-methyluridine-3'-phosphorothioate
  modified_base 23: mod_base = OTHER; note = 2'-O-methyladenosine
aagttgaggagggcgtggccgta

SEQ ID NO: 1216 - RNA, 23 nt, synthetic construct
  source 1..23: mol_type = other RNA
  modified_base 1: mod_base = OTHER; note = 2'-O-methyladenosine-3'-phosphorothioate
  modified_base 2: mod_base = OTHER; note = 2'-deoxy-2'-fluorouridine-3'-phosphorothioate
  modified_base 3: mod_base = OTHER; note = 2'-O-methyluridine-3'-phosphate
  modified_base 4: mod_base = OTHER; note = 2'-O-methylguanosine-3'-phosphate
  modified_base 5: mod_base = OTHER; note = 2'-O-methyluridine-3'-phosphate
  modified_base 6: mod_base = OTHER; note = 2'-deoxy-2'-fluoroguanosine-3'-phosphate
  modified_base 7: mod_base = OTHER; note = 2'-O-methylguanosine-3'-phosphate
  modified_base 8: mod_base = OTHER; note = 2'-deoxy-2'-fluorouridine-3'-phosphate
  modified_base 9: mod_base = OTHER; note = 2'-deoxy-2'-fluorocytidine-3'-phosphate
  modified_base 10: mod_base = OTHER; note = 2'-O-methyladenosine-3'-phosphate
  modified_base 11: mod_base = OTHER; note = 2'-O-methylguanosine-3'-phosphate
  modified_base 12: mod_base = OTHER; note = 2'-O-methylcytidine-3'-phosphate
  modified_base 13: mod_base = OTHER; note = 2'-O-methyluridine-3'-phosphate
  modified_base 14: mod_base = OTHER; note = 2'-deoxy-2'-fluorouridine-3'-phosphate
  modified_base 15: mod_base = OTHER; note = 2'-O-methyluridine-3'-phosphate
  modified_base 16: mod_base = OTHER; note = 2'-deoxy-2'-fluoroguanosine-3'-phosphate
  modified_base 17: mod_base = OTHER; note = 2'-O-methyluridine-3'-phosphate
  modified_base 18: mod_base = OTHER; note = 2'-O-methylguanosine-3'-phosphate
  modified_base 19: mod_base = OTHER; note = 2'-O-methyladenosine-3'-phosphate
  modified_base 20: mod_base = OTHER; note = 2'-O-methylguanosine-3'-phosphate
  modified_base 21: mod_base = OTHER; note = 2'-O-methylguanosine-3'-phosphorothioate
  modified_base 22: mod_base = OTHER; note = 2'-O-methyladenosine-3'-phosphorothioate
  modified_base 23: mod_base = OTHER; note = 2'-O-methyluridine
attgtggtcagctttgtgaggat

SEQ ID NO: 1217 - RNA, 23 nt, synthetic construct
  source 1..23: mol_type = other RNA
  modified_base 1: mod_base = OTHER; note = 2'-O-methyladenosine-3'-phosphorothioate
  modified_base 2: mod_base = OTHER; note = 2'-deoxy-2'-fluoroguanosine-3'-phosphorothioate
  modified_base 3: mod_base = OTHER; note = 2'-O-methylcytidine-3'-phosphate
  modified_base 4: mod_base = OTHER; note = 2'-O-methyladenosine-3'-phosphate
  modified_base 5: mod_base = OTHER; note = 2'-O-methylguanosine-3'-phosphate
  modified_base 6: mod_base = OTHER; note = 2'-deoxy-2'-fluorouridine-3'-phosphate
  modified_base 7: mod_base = OTHER; note = 2'-O-methylcytidine-3'-phosphate
  modified_base 8: mod_base = OTHER; note = 2'-deoxy-2'-fluorouridine-3'-phosphate
  modified_base 9: mod_base = OTHER; note = 2'-deoxy-2'-fluorocytidine-3'-phosphate
  modified_base 10: mod_base = OTHER; note = 2'-O-methyluridine-3'-phosphate
  modified_base 11: mod_base = OTHER; note = 2'-O-methylguanosine-3'-phosphate
  modified_base 12: mod_base = OTHER; note = 2'-O-methylguanosine-3'-phosphate
  modified_base 13: mod_base = OTHER; note = 2'-O-methyladenosine-3'-phosphate
  modified_base 14: mod_base = OTHER; note = 2'-deoxy-2'-fluoroguanosine-3'-phosphate
  modified_base 15: mod_base = OTHER; note = 2'-O-methyluridine-3'-phosphate
  modified_base 16: mod_base = OTHER; note = 2'-deoxy-2'-fluoroguanosine-3'-phosphate
  modified_base 17: mod_base = OTHER; note = 2'-O-methylguanosine-3'-phosphate
  modified_base 18: mod_base = OTHER; note = 2'-O-methyladenosine-3'-phosphate
  modified_base 19: mod_base = OTHER; note = 2'-O-methylguanosine-3'-phosphate
  modified_base 20: mod_base = OTHER; note = 2'-O-methylguanosine-3'-phosphate
  modified_base 21: mod_base = OTHER; note = 2'-O-methyladenosine-3'-phosphorothioate
  modified_base 22: mod_base = OTHER; note = 2'-O-methylguanosine-3'-phosphorothioate
  modified_base 23: mod_base = OTHER; note = 2'-O-methylguanosine
agcagtctctggagtggaggagg

SEQ ID NO: 1218 - RNA, 23 nt, synthetic construct
  source 1..23: mol_type = other RNA
  modified_base 1: mod_base = OTHER; note = 2'-O-methyladenosine-3'-phosphorothioate
  modified_base 2: mod_base = OTHER; note = 2'-deoxy-2'-fluorocytidine-3'-phosphorothioate
  modified_base 3: mod_base = OTHER; note = 2'-O-methylguanosine-3'-phosphate
  modified_base 4: mod_base = OTHER; note = 2'-O-methyluridine-3'-phosphate
  modified_base 5: mod_base = OTHER; note = 2'-O-methylguanosine-3'-phosphate
  modified_base 6: mod_base = OTHER; note = 2'-deoxy-2'-fluoroguanosine-3'-phosphate
  modified_base 7: mod_base = OTHER; note = 2'-O-methyluridine-3'-phosphate
  modified_base 8: mod_base = OTHER; note = 2'-deoxy-2'-fluoroguanosine-3'-phosphate
  modified_base 9: mod_base = OTHER; note = 2'-deoxy-2'-fluoroguanosine-3'-phosphate
  modified_base 10: mod_base = OTHER; note = 2'-O-methyluridine-3'-phosphate
  modified_base 11: mod_base = OTHER; note = 2'-O-methyladenosine-3'-phosphate
  modified_base 12: mod_base = OTHER; note = 2'-O-methyladenosine-3'-phosphate
  modified_base 13: mod_base = OTHER; note = 2'-O-methylguanosine-3'-phosphate
  modified_base 14: mod_base = OTHER; note = 2'-deoxy-2'-fluorocytidine-3'-phosphate
  modified_base 15: mod_base = OTHER; note = 2'-O-methyladenosine-3'-phosphate
  modified_base 16: mod_base = OTHER; note = 2'-deoxy-2'-fluorocytidine-3'-phosphate
  modified_base 17: mod_base = OTHER; note = 2'-O-methyluridine-3'-phosphate
  modified_base 18: mod_base = OTHER; note = 2'-O-methylguanosine-3'-phosphate
  modified_base 19: mod_base = OTHER; note = 2'-O-methyluridine-3'-phosphate
  modified_base 20: mod_base = OTHER; note = 2'-O-methylguanosine-3'-phosphate
  modified_base 21: mod_base = OTHER; note = 2'-O-methylguanosine-3'-phosphorothioate
  modified_base 22: mod_base = OTHER; note = 2'-O-methyladenosine-3'-phosphorothioate
  modified_base 23: mod_base = OTHER; note = 2'-O-methylguanosine
acgtggtggtaagcactgtggag

SEQ ID NO: 1219 - RNA, 23 nt, synthetic construct
  source 1..23: mol_type = other RNA
  modified_base 1: mod_base = OTHER; note = 2'-O-methyladenosine-3'-phosphorothioate
  modified_base 2: mod_base = OTHER; note = 2'-deoxy-2'-fluorocytidine-3'-phosphorothioate
  modified_base 3: mod_base = OTHER; note = 2'-O-methylguanosine-3'-phosphate
  modified_base 4: mod_base = OTHER; note = 2'-O-methyluridine-3'-phosphate
  modified_base 5: mod_base = OTHER; note = 2'-O-methylguanosine-3'-phosphate
  modified_base 6: mod_base = OTHER; note = 2'-deoxy-2'-fluorouridine-3'-phosphate
  modified_base 7: mod_base = OTHER; note = 2'-O-methylguanosine-3'-phosphate
  modified_base 8: mod_base = OTHER; note = 2'-deoxy-2'-fluorouridine-3'-phosphate
  modified_base 9: mod_base = OTHER; note = 2'-deoxy-2'-fluoroguanosine-3'-phosphate
  modified_base 10: mod_base = OTHER; note = 2'-O-methylguanosine-3'-phosphate
  modified_base 11: mod_base = OTHER; note = 2'-O-methyluridine-3'-phosphate
  modified_base 12: mod_base = OTHER; note = 2'-O-methylguanosine-3'-phosphate
  modified_base 13: mod_base = OTHER; note = 2'-O-methylguanosine-3'-phosphate
  modified_base 14: mod_base = OTHER; note = 2'-deoxy-2'-fluorocytidine-3'-phosphate
  modified_base 15: mod_base = OTHER; note = 2'-O-methylcytidine-3'-phosphate
  modified_base 16: mod_base = OTHER; note = 2'-deoxy-2'-fluoroguanosine-3'-phosphate
  modified_base 17: mod_base = OTHER; note = 2'-O-methyluridine-3'-phosphate
  modified_base 18: mod_base = OTHER; note = 2'-O-methylguanosine-3'-phosphate
  modified_base 19: mod_base = OTHER; note = 2'-O-methylguanosine-3'-phosphate
  modified_base 20: mod_base = OTHER; note = 2'-O-methyluridine-3'-phosphate
  modified_base 21: mod_base = OTHER; note = 2'-O-methylguanosine-3'-phosphorothioate
  modified_base 22: mod_base = OTHER; note = 2'-O-methyluridine-3'-phosphorothioate
  modified_base 23: mod_base = OTHER; note = 2'-O-methyluridine
acgtgtgtggtggccgtggtgtt

SEQ ID NO: 1220 - RNA, 23 nt, synthetic construct
  source 1..23: mol_type = other RNA
  modified_base 1: mod_base = OTHER; note = 2'-O-methyladenosine-3'-phosphorothioate
  modified_base 2: mod_base = OTHER; note = 2'-deoxy-2'-fluoroguanosine-3'-phosphorothioate
  modified_base 3: mod_base = OTHER; note = 2'-O-methylguanosine-3'-phosphate
  modified_base 4: mod_base = OTHER; note = 2'-O-methyladenosine-3'-phosphate
  modified_base 5: mod_base = OTHER; note = 2'-O-methylguanosine-3'-phosphate
  modified_base 6: mod_base = OTHER; note = 2'-deoxy-2'-fluorouridine-3'-phosphate
  modified_base 7: mod_base = OTHER; note = 2'-O-methylcytidine-3'-phosphate
  modified_base 8: mod_base = OTHER; note = 2'-deoxy-2'-fluoroguanosine-3'-phosphate
  modified_base 9: mod_base = OTHER; note = 2'-deoxy-2'-fluoroadenosine-3'-phosphate
  modified_base 10: mod_base = OTHER; note = 2'-O-methylguanosine-3'-phosphate
  modified_base 11: mod_base = OTHER; note = 2'-O-methyluridine-3'-phosphate
  modified_base 12: mod_base = OTHER; note = 2'-O-methylguanosine-3'-phosphate
  modified_base 13: mod_base = OTHER; note = 2'-O-methylcytidine-3'-phosphate
  modified_base 14: mod_base = OTHER; note = 2'-deoxy-2'-fluorouridine-3'-phosphate
  modified_base 15: mod_base = OTHER; note = 2'-O-methylguanosine-3'-phosphate
  modified_base 16: mod_base = OTHER; note = 2'-deoxy-2'-fluoroguanosine-3'-phosphate
  modified_base 17: mod_base = OTHER; note = 2'-O-methylguanosine-3'-phosphate
  modified_base 18: mod_base = OTHER; note = 2'-O-methyluridine-3'-phosphate
  modified_base 19: mod_base = OTHER; note = 2'-O-methylguanosine-3'-phosphate
  modified_base 20: mod_base = OTHER; note = 2'-O-methylguanosine-3'-phosphate
  modified_base 21: mod_base = OTHER; note = 2'-O-methyluridine-3'-phosphorothioate
  modified_base 22: mod_base = OTHER; note = 2'-O-methyladenosine-3'-phosphorothioate
  modified_base 23: mod_base = OTHER; note = 2'-O-methylcytidine
aggagtcgagtgctgggtggtac

SEQ ID NO: 1221 - RNA, 23 nt, synthetic construct
  source 1..23: mol_type = other RNA
  modified_base 1: mod_base = OTHER; note = 2'-O-methyladenosine-3'-phosphorothioate
  modified_base 2: mod_base = OTHER; note = 2'-deoxy-2'-fluorouridine-3'-phosphorothioate
  modified_base 3: mod_base = OTHER; note = 2'-O-methylguanosine-3'-phosphate
  modified_base 4: mod_base = OTHER; note = 2'-O-methylcytidine-3'-phosphate
  modified_base 5: mod_base = OTHER; note = 2'-O-methyluridine-3'-phosphate
  modified_base 6: mod_base = OTHER; note = 2'-deoxy-2'-fluoroguanosine-3'-phosphate
  modified_base 7: mod_base = OTHER; note = 2'-O-methylcytidine-3'-phosphate
  modified_base 8: mod_base = OTHER; note = 2'-deoxy-2'-fluorouridine-3'-phosphate
  modified_base 9: mod_base = OTHER; note = 2'-deoxy-2'-fluoroadenosine-3'-phosphate
  modified_base 10: mod_base = OTHER; note = 2'-O-methylguanosine-3'-phosphate
  modified_base 11: mod_base = OTHER; note = 2'-O-methylguanosine-3'-phosphate
  modified_base 12: mod_base = OTHER; note = 2'-O-methylguanosine-3'-phosphate
  modified_base 13: mod_base = OTHER; note = 2'-O-methyluridine-3'-phosphate
  modified_base 14: mod_base = OTHER; note = 2'-deoxy-2'-fluoroguanosine-3'-phosphate
  modified_base 15: mod_base = OTHER; note = 2'-O-methyladenosine-3'-phosphate
  modified_base 16: mod_base = OTHER; note = 2'-deoxy-2'-fluoroguanosine-3'-phosphate
  modified_base 17: mod_base = OTHER; note = 2'-O-methylguanosine-3'-phosphate
  modified_base 18: mod_base = OTHER; note = 2'-O-methylguanosine-3'-phosphate
  modified_base 19: mod_base = OTHER; note = 2'-O-methylcytidine-3'-phosphate
  modified_base 20: mod_base = OTHER; note = 2'-O-methyluridine-3'-phosphate
  modified_base 21: mod_base = OTHER; note = 2'-O-methylguanosine-3'-phosphorothioate
  modified_base 22: mod_base = OTHER; note = 2'-O-methylguanosine-3'-phosphorothioate
  modified_base 23: mod_base = OTHER; note = 2'-O-methyladenosine
atgctgctagggtgagggctgga

SEQ ID NO: 1222 - RNA, 23 nt, synthetic construct
  source 1..23: mol_type = other RNA
  modified_base 1: mod_base = OTHER; note = 2'-O-methyladenosine-3'-phosphorothioate
  modified_base 2: mod_base = OTHER; note = 2'-deoxy-2'-fluoroguanosine-3'-phosphorothioate
  modified_base 3: mod_base = OTHER; note = 2'-O-methyluridine-3'-phosphate
  modified_base 4: mod_base = OTHER; note = 2'-O-methylguanosine-3'-phosphate
  modified_base 5: mod_base = OTHER; note = 2'-O-methylguanosine-3'-phosphate
  modified_base 6: mod_base = OTHER; note = 2'-deoxy-2'-fluorouridine-3'-phosphate
  modified_base 7: mod_base = OTHER; note = 2'-O-methylcytidine-3'-phosphate
  modified_base 8: mod_base = OTHER; note = 2'-deoxy-2'-fluoroadenosine-3'-phosphate
  modified_base 9: mod_base = OTHER; note = 2'-deoxy-2'-fluorocytidine-3'-phosphate
  modified_base 10: mod_base = OTHER; note = 2'-O-methylcytidine-3'-phosphate
  modified_base 11: mod_base = OTHER; note = 2'-O-methyladenosine-3'-phosphate
  modified_base 12: mod_base = OTHER; note = 2'-O-methylcytidine-3'-phosphate
  modified_base 13: mod_base = OTHER; note = 2'-O-methylcytidine-3'-phosphate
  modified_base 14: mod_base = OTHER; note = 2'-deoxy-2'-fluoroguanosine-3'-phosphate
  modified_base 15: mod_base = OTHER; note = 2'-O-methyluridine-3'-phosphate
  modified_base 16: mod_base = OTHER; note = 2'-deoxy-2'-fluoroguanosine-3'-phosphate
  modified_base 17: mod_base = OTHER; note = 2'-O-methylguanosine-3'-phosphate
  modified_base 18: mod_base = OTHER; note = 2'-O-methyluridine-3'-phosphate
  modified_base 19: mod_base = OTHER; note = 2'-O-methyluridine-3'-phosphate
  modified_base 20: mod_base = OTHER; note = 2'-O-methyladenosine-3'-phosphate
  modified_base 21: mod_base = OTHER; note = 2'-O-methyluridine-3'-phosphorothioate
  modified_base 22: mod_base = OTHER; note = 2'-O-methylguanosine-3'-phosphorothioate
  modified_base 23: mod_base = OTHER; note = 2'-O-methylguanosine
agtggtcaccaccgtggttatgg

SEQ ID NO: 1223 - RNA, 23 nt, synthetic construct
  source 1..23: mol_type = other RNA
  modified_base 1: mod_base = OTHER; note = 2'-O-methyladenosine-3'-phosphorothioate
  modified_base 2: mod_base = OTHER; note = 2'-deoxy-2'-fluoroguanosine-3'-phosphorothioate
  modified_base 3: mod_base = OTHER; note = 2'-O-methylguanosine-3'-phosphate
  modified_base 4: mod_base = OTHER; note = 2'-O-methyladenosine-3'-phosphate
  modified_base 5: mod_base = OTHER; note = 2'-O-methyladenosine-3'-phosphate
  modified_base 6: mod_base = OTHER; note = 2'-deoxy-2'-fluoroguanosine-3'-phosphate
  modified_base 7: mod_base = OTHER; note = 2'-O-methyluridine-3'-phosphate
  modified_base 8: mod_base = OTHER; note = 2'-deoxy-2'-fluoroguanosine-3'-phosphate
  modified_base 9: mod_base = OTHER; note = 2'-deoxy-2'-fluoroguanosine-3'-phosphate
  modified_base 10: mod_base = OTHER; note = 2'-O-methylcytidine-3'-phosphate
  modified_base 11: mod_base = OTHER; note = 2'-O-methyluridine-3'-phosphate
  modified_base 12: mod_base = OTHER; note = 2'-O-methyluridine-3'-phosphate
  modified_base 13: mod_base = OTHER; note = 2'-O-methyluridine-3'-phosphate
  modified_base 14: mod_base = OTHER; note = 2'-deoxy-2'-fluoroguanosine-3'-phosphate
  modified_base 15: mod_base = OTHER; note = 2'-O-methylguanosine-3'-phosphate
  modified_base 16: mod_base = OTHER; note = 2'-deoxy-2'-fluoroadenosine-3'-phosphate
  modified_base 17: mod_base = OTHER; note = 2'-O-methyladenosine-3'-phosphate
  modified_base 18: mod_base = OTHER; note = 2'-O-methylcytidine-3'-phosphate
  modified_base 19: mod_base = OTHER; note = 2'-O-methyluridine-3'-phosphate
  modified_base 20: mod_base = OTHER; note = 2'-O-methylguanosine-3'-phosphate
  modified_base 21: mod_base = OTHER; note = 2'-O-methylguanosine-3'-phosphorothioate
  modified_base 22: mod_base = OTHER; note = 2'-O-methyluridine-3'-phosphorothioate
  modified_base 23: mod_base = OTHER; note = 2'-O-methylguanosine
aggaagtggctttggaactggtg

SEQ ID NO: 1224 - RNA, 23 nt, synthetic construct
  source 1..23: mol_type = other RNA
  modified_base 1: mod_base = OTHER; note = 2'-O-methyladenosine-3'-phosphorothioate
  modified_base 2: mod_base = OTHER; note = 2'-deoxy-2'-fluoroguanosine-3'-phosphorothioate
  modified_base 3: mod_base = OTHER; note = 2'-O-methyluridine-3'-phosphate
  modified_base 4: mod_base = OTHER; note = 2'-O-methylguanosine-3'-phosphate
  modified_base 5: mod_base = OTHER; note = 2'-O-methyluridine-3'-phosphate
  modified_base 6: mod_base = OTHER; note = 2'-deoxy-2'-fluoroguanosine-3'-phosphate
  modified_base 7: mod_base = OTHER; note = 2'-O-methylguanosine-3'-phosphate
  modified_base 8: mod_base = OTHER; note = 2'-deoxy-2'-fluorouridine-3'-phosphate
  modified_base 9: mod_base = OTHER; note = 2'-deoxy-2'-fluoroguanosine-3'-phosphate
  modified_base 10: mod_base = OTHER; note = 2'-O-methylguanosine-3'-phosphate
  modified_base 11: mod_base = OTHER; note = 2'-O-methyluridine-3'-phosphate
  modified_base 12: mod_base = OTHER; note = 2'-O-methylcytidine-3'-phosphate
  modified_base 13: mod_base = OTHER; note = 2'-O-methyluridine-3'-phosphate
  modified_base 14: mod_base = OTHER; note = 2'-deoxy-2'-fluoroguanosine-3'-phosphate
  modified_base 15: mod_base = OTHER; note = 2'-O-methyluridine-3'-phosphate
  modified_base 16: mod_base = OTHER; note = 2'-deoxy-2'-fluorouridine-3'-phosphate
  modified_base 17: mod_base = OTHER; note = 2'-O-methylcytidine-3'-phosphate
  modified_base 18: mod_base = OTHER; note = 2'-O-methyluridine-3'-phosphate
  modified_base 19: mod_base = OTHER; note = 2'-O-methylguanosine-3'-phosphate
  modified_base 20: mod_base = OTHER; note = 2'-O-methylguanosine-3'-phosphate
  modified_base 21: mod_base = OTHER; note = 2'-O-methylguanosine-3'-phosphorothioate
  modified_base 22: mod_base = OTHER; note = 2'-O-methyladenosine-3'-phosphorothioate
  modified_base 23: mod_base = OTHER; note = 2'-O-methylguanosine
agtgtggtggtctgttctgggag

SEQ ID NO: 1225 - RNA, 23 nt, synthetic construct
  source 1..23: mol_type = other RNA
  modified_base 1: mod_base = OTHER; note = 2'-O-methyladenosine-3'-phosphorothioate
  modified_base 2: mod_base = OTHER; note = 2'-deoxy-2'-fluorouridine-3'-phosphorothioate
  modified_base 3: mod_base = OTHER; note = 2'-O-methylcytidine-3'-phosphate
  modified_base 4: mod_base = OTHER; note = 2'-O-methylguanosine-3'-phosphate
  modified_base 5: mod_base = OTHER; note = 2'-O-methyluridine-3'-phosphate
  modified_base 6: mod_base = OTHER; note = 2'-deoxy-2'-fluoroguanosine-3'-phosphate
  modified_base 7: mod_base = OTHER; note = 2'-O-methylguanosine-3'-phosphate
  modified_base 8: mod_base = OTHER; note = 2'-deoxy-2'-fluorouridine-3'-phosphate
  modified_base 9: mod_base = OTHER; note = 2'-deoxy-2'-fluorocytidine-3'-phosphate
  modified_base 10: mod_base = OTHER; note = 2'-O-methyladenosine-3'-phosphate
  modified_base 11: mod_base = OTHER; note = 2'-O-methylguanosine-3'-phosphate
  modified_base 12: mod_base = OTHER; note = 2'-O-methylcytidine-3'-phosphate
  modified_base 13: mod_base = OTHER; note = 2'-O-methyladenosine-3'-phosphate
  modified_base 14: mod_base = OTHER; note = 2'-deoxy-2'-fluorocytidine-3'-phosphate
  modified_base 15: mod_base = OTHER; note = 2'-O-methyluridine-3'-phosphate
  modified_base 16: mod_base = OTHER; note = 2'-deoxy-2'-fluoroguanosine-3'-phosphate
  modified_base 17: mod_base = OTHER; note = 2'-O-methyluridine-3'-phosphate
  modified_base 18: mod_base = OTHER; note = 2'-O-methylguanosine-3'-phosphate
  modified_base 19: mod_base = OTHER; note = 2'-O-methylguanosine-3'-phosphate
  modified_base 20: mod_base = OTHER; note = 2'-O-methyladenosine-3'-phosphate
  modified_base 21: mod_base = OTHER; note = 2'-O-methylguanosine-3'-phosphorothioate
  modified_base 22: mod_base = OTHER; note = 2'-O-methylguanosine-3'-phosphorothioate
  modified_base 23: mod_base = OTHER; note = 2'-O-methyluridine
atcgtggtcagcactgtggaggt

SEQ ID NO: 1226 - RNA, 23 nt, synthetic construct
  source 1..23: mol_type = other RNA
  modified_base 1: mod_base = OTHER; note = 2'-O-methyladenosine-3'-phosphorothioate
  modified_base 2: mod_base = OTHER; note = 2'-deoxy-2'-fluoroguanosine-3'-phosphorothioate
  modified_base 3: mod_base = OTHER; note = 2'-O-methylcytidine-3'-phosphate
  modified_base 4: mod_base = OTHER; note = 2'-O-methyluridine-3'-phosphate
  modified_base 5: mod_base = OTHER; note = 2'-O-methylcytidine-3'-phosphate
  modified_base 6: mod_base = OTHER; note = 2'-deoxy-2'-fluorouridine-3'-phosphate
  modified_base 7: mod_base = OTHER; note = 2'-O-methylguanosine-3'-phosphate
  modified_base 8: mod_base = OTHER; note = 2'-deoxy-2'-fluorouridine-3'-phosphate
  modified_base 9: mod_base = OTHER; note = 2'-deoxy-2'-fluoroguanosine-3'-phosphate
  modified_base 10: mod_base = OTHER; note = 2'-O-methyladenosine-3'-phosphate
  modified_base 11: mod_base = OTHER; note = 2'-O-methylguanosine-3'-phosphate
  modified_base 12: mod_base = OTHER; note = 2'-O-methylguanosine-3'-phosphate
  modified_base 13: mod_base = OTHER; note = 2'-O-methyladenosine-3'-phosphate
  modified_base 14: mod_base = OTHER; note = 2'-deoxy-2'-fluorouridine-3'-phosphate
  modified_base 15: mod_base = OTHER; note = 2'-O-methylcytidine-3'-phosphate
  modified_base 16: mod_base = OTHER; note = 2'-deoxy-2'-fluorocytidine-3'-phosphate
  modified_base 17: mod_base = OTHER; note = 2'-O-methyladenosine-3'-phosphate
  modified_base 18: mod_base = OTHER; note = 2'-O-methylguanosine-3'-phosphate
  modified_base 19: mod_base = OTHER; note = 2'-O-methylguanosine-3'-phosphate
  modified_base 20: mod_base = OTHER; note = 2'-O-methyluridine-3'-phosphate
  modified_base 21: mod_base = OTHER; note = 2'-O-methylcytidine-3'-phosphorothioate
  modified_base 22: mod_base = OTHER; note = 2'-O-methylguanosine-3'-phosphorothioate
  modified_base 23: mod_base = OTHER; note = 2'-O-methyluridine
agctctgtgaggatccaggtcgt

SEQ ID NO: 1227 - RNA, 23 nt, synthetic construct
  source 1..23: mol_type = other RNA
  modified_base 1: mod_base = OTHER; note = 2'-O-methyladenosine-3'-phosphorothioate
  modified_base 2: mod_base = OTHER; note = 2'-deoxy-2'-fluorouridine-3'-phosphorothioate
  modified_base 3: mod_base = OTHER; note = 2'-O-methylguanosine-3'-phosphate
  modified_base 4: mod_base = OTHER; note = 2'-O-methylguanosine-3'-phosphate
  modified_base 5: mod_base = OTHER; note = 2'-O-methyladenosine-3'-phosphate
  modified_base 6: mod_base = OTHER; note = 2'-deoxy-2'-fluorocytidine-3'-phosphate
  modified_base 7: mod_base = OTHER; note = 2'-O-methyluridine-3'-phosphate
  modified_base 8: mod_base = OTHER; note = 2'-deoxy-2'-fluoroguanosine-3'-phosphate
  modified_base 9: mod_base = OTHER; note = 2'-deoxy-2'-fluoroguanosine-3'-phosphate
  modified_base 10: mod_base = OTHER; note = 2'-O-methyladenosine-3'-phosphate
  modified_base 11: mod_base = OTHER; note = 2'-O-methylguanosine-3'-phosphate
  modified_base 12: mod_base = OTHER; note = 2'-O-methylguanosine-3'-phosphate
  modified_base 13: mod_base = OTHER; note = 2'-O-methyladenosine-3'-phosphate
  modified_base 14: mod_base = OTHER; note = 2'-deoxy-2'-fluoroguanosine-3'-phosphate
  modified_base 15: mod_base = OTHER; note = 2'-O-methylguanosine-3'-phosphate
  modified_base 16: mod_base = OTHER; note = 2'-deoxy-2'-fluoroguanosine-3'-phosphate
  modified_base 17: mod_base = OTHER; note = 2'-O-methyladenosine-3'-phosphate
  modified_base 18: mod_base = OTHER; note = 2'-O-methylguanosine-3'-phosphate
  modified_base 19: mod_base = OTHER; note = 2'-O-methyluridine-3'-phosphate
  modified_base 20: mod_base = OTHER; note = 2'-O-methylguanosine-3'-phosphate
  modified_base 21: mod_base = OTHER; note = 2'-O-methylguanosine-3'-phosphorothioate
  modified_base 22: mod_base = OTHER; note = 2'-O-methylcytidine-3'-phosphorothioate
  modified_base 23: mod_base = OTHER; note = 2'-O-methyluridine
atggactggaggagggagtggct

SEQ ID NO: 1228 - RNA, 23 nt, synthetic construct
  source 1..23: mol_type = other RNA
  modified_base 1: mod_base = OTHER; note = 2'-O-methyladenosine-3'-phosphorothioate
  modified_base 2: mod_base = OTHER; note = 2'-deoxy-2'-fluorouridine-3'-phosphorothioate
  modified_base 3: mod_base = OTHER; note = 2'-O-methylguanosine-3'-phosphate
  modified_base 4: mod_base = OTHER; note = 2'-O-methyluridine-3'-phosphate
  modified_base 5: mod_base = OTHER; note = 2'-O-methylguanosine-3'-phosphate
  modified_base 6: mod_base = OTHER; note = 2'-deoxy-2'-fluoroguanosine-3'-phosphate
  modified_base 7: mod_base = OTHER; note = 2'-O-methylcytidine-3'-phosphate
  modified_base 8: mod_base = OTHER; note = 2'-deoxy-2'-fluorouridine-3'-phosphate
  modified_base 9: mod_base = OTHER; note = 2'-deoxy-2'-fluoroguanosine-3'-phosphate
  modified_base 10: mod_base = OTHER; note = 2'-O-methyluridine-3'-phosphate
  modified_base 11: mod_base = OTHER; note = 2'-O-methylguanosine-3'-phosphate
  modified_base 12: mod_base = OTHER; note = 2'-O-methylguanosine-3'-phosphate
  modified_base 13: mod_base = OTHER; note = 2'-O-methyladenosine-3'-phosphate
  modified_base 14: mod_base = OTHER; note = 2'-deoxy-2'-fluorocytidine-3'-phosphate
  modified_base 15: mod_base = OTHER; note = 2'-O-methyladenosine-3'-phosphate
  modified_base 16: mod_base = OTHER; note = 2'-deoxy-2'-fluorouridine-3'-phosphate
  modified_base 17: mod_base = OTHER; note = 2'-O-methylguanosine-3'-phosphate
  modified_base 18: mod_base = OTHER; note = 2'-O-methylguanosine-3'-phosphate
  modified_base 19: mod_base = OTHER; note = 2'-O-methyluridine-3'-phosphate
  modified_base 20: mod_base = OTHER; note = 2'-O-methylguanosine-3'-phosphate
  modified_base 21: mod_base = OTHER; note = 2'-O-methylguanosine-3'-phosphorothioate
  modified_base 22: mod_base = OTHER; note = 2'-O-methylcytidine-3'-phosphorothioate
  modified_base 23: mod_base = OTHER; note = 2'-O-methylcytidine
atgtggctgtggacatggtggcc

SEQ ID NO: 1229 - RNA, 23 nt, synthetic construct
  source 1..23: mol_type = other RNA
  modified_base 1: mod_base = OTHER; note = 2'-O-methyladenosine-3'-phosphorothioate
  modified_base 2: mod_base = OTHER; note = 2'-deoxy-2'-fluorocytidine-3'-phosphorothioate
  modified_base 3: mod_base = OTHER; note = 2'-O-methylguanosine-3'-phosphate
  modified_base 4: mod_base = OTHER; note = 2'-O-methyluridine-3'-phosphate
  modified_base 5: mod_base = OTHER; note = 2'-O-methylguanosine-3'-phosphate
  modified_base 6: mod_base = OTHER; note = 2'-deoxy-2'-fluoroguanosine-3'-phosphate
  modified_base 7: mod_base = OTHER; note = 2'-O-methyluridine-3'-phosphate
  modified_base 8: mod_base = OTHER; note = 2'-deoxy-2'-fluorouridine-3'-phosphate
  modified_base 9: mod_base = OTHER; note = 2'-deoxy-2'-fluoroguanosine-3'-phosphate
  modified_base 10: mod_base = OTHER; note = 2'-O-methyluridine-3'-phosphate
  modified_base 11: mod_base = OTHER; note = 2'-O-methylguanosine-3'-phosphate
  modified_base 12: mod_base = OTHER; note = 2'-O-methylguanosine-3'-phosphate
  modified_base 13: mod_base = OTHER; note = 2'-O-methyluridine-3'-phosphate
  modified_base 14: mod_base = OTHER; note = 2'-deoxy-2'-fluoroadenosine-3'-phosphate
  modified_base 15: mod_base = OTHER; note = 2'-O-methylguanosine-3'-phosphate
  modified_base 16: mod_base = OTHER; note = 2'-deoxy-2'-fluorouridine-3'-phosphate
  modified_base 17: mod_base = OTHER; note = 2'-O-methylcytidine-3'-phosphate
  modified_base 18: mod_base = OTHER; note = 2'-O-methylguanosine-3'-phosphate
  modified_base 19: mod_base = OTHER; note = 2'-O-methylguanosine-3'-phosphate
  modified_base 20: mod_base = OTHER; note = 2'-O-methylcytidine-3'-phosphate
  modified_base 21: mod_base = OTHER; note = 2'-O-methyladenosine-3'-phosphorothioate
  modified_base 22: mod_base = OTHER; note = 2'-O-methylcytidine-3'-phosphorothioate
  modified_base 23: mod_base = OTHER; note = 2'-O-methyluridine
acgtggttgtggtagtcggcact

SEQ ID NO: 1230 - RNA, 23 nt, synthetic construct
  source 1..23: mol_type = other RNA
  modified_base 1: mod_base = OTHER; note = 2'-O-methyladenosine-3'-phosphorothioate
  modified_base 2: mod_base = OTHER; note = 2'-deoxy-2'-fluoroadenosine-3'-phosphorothioate
  modified_base 3: mod_base = OTHER; note = 2'-O-methylguanosine-3'-phosphate
  modified_base 4: mod_base = OTHER; note = 2'-O-methylcytidine-3'-phosphate
  modified_base 5: mod_base = OTHER; note = 2'-O-methylcytidine-3'-phosphate
  modified_base 6: mod_base = OTHER; note = 2'-deoxy-2'-fluoroadenosine-3'-phosphate
  modified_base 7: mod_base = OTHER; note = 2'-O-methylcytidine-3'-phosphate
  modified_base 8: mod_base = OTHER; note = 2'-deoxy-2'-fluorouridine-3'-phosphate
  modified_base 9: mod_base = OTHER; note = 2'-deoxy-2'-fluoroguanosine-3'-phosphate
  modified_base 10: mod_base = OTHER; note = 2'-O-methylguanosine-3'-phosphate
  modified_base 11: mod_base = OTHER; note = 2'-O-methyluridine-3'-phosphate
  modified_base 12: mod_base = OTHER; note = 2'-O-methyluridine-3'-phosphate
  modified_base 13: mod_base = OTHER; note = 2'-O-methylguanosine-3'-phosphate
  modified_base 14: mod_base = OTHER; note = 2'-deoxy-2'-fluorouridine-3'-phosphate
  modified_base 15: mod_base = OTHER; note = 2'-O-methylguanosine-3'-phosphate
  modified_base 16: mod_base = OTHER; note = 2'-deoxy-2'-fluoroguanosine-3'-phosphate
  modified_base 17: mod_base = OTHER; note = 2'-O-methylguanosine-3'-phosphate
  modified_base 18: mod_base = OTHER; note = 2'-O-methyluridine-3'-phosphate
  modified_base 19: mod_base = OTHER; note = 2'-O-methylguanosine-3'-phosphate
  modified_base 20: mod_base = OTHER; note = 2'-O-methyluridine-3'-phosphate
  modified_base 21: mod_base = OTHER; note = 2'-O-methylguanosine-3'-phosphorothioate
  modified_base 22: mod_base = OTHER; note = 2'-O-methylguanosine-3'-phosphorothioate
  modified_base 23: mod_base = OTHER; note = 2'-O-methyluridine
aagccactggttgtgggtgtggt

SEQ ID NO: 1231 - RNA, 23 nt, synthetic construct
  source 1..23: mol_type = other RNA
  modified_base 1: mod_base = OTHER; note = 2'-O-methyladenosine-3'-phosphorothioate
  modified_base 2: mod_base = OTHER; note = 2'-deoxy-2'-fluoroadenosine-3'-phosphorothioate
  modified_base 3: mod_base = OTHER; note = 2'-O-methyladenosine-3'-phosphate
  modified_base 4: mod_base = OTHER; note = 2'-O-methylguanosine-3'-phosphate
  modified_base 5: mod_base = OTHER; note = 2'-O-methylguanosine-3'-phosphate
  modified_base 6: mod_base = OTHER; note = 2'-deoxy-2'-fluoroguanosine-3'-phosphate
  modified_base 7: mod_base = OTHER; note = 2'-O-methyluridine-3'-phosphate
  modified_base 8: mod_base = OTHER; note = 2'-deoxy-2'-fluoroguanosine-3'-phosphate
  modified_base 9: mod_base = OTHER; note = 2'-deoxy-2'-fluoroguanosine-3'-phosphate
  modified_base 10: mod_base = OTHER; note = 2'-O-methyluridine-3'-phosphate
  modified_base 11: mod_base = OTHER; note = 2'-O-methyluridine-3'-phosphate
  modified_base 12: mod_base = OTHER; note = 2'-O-methylguanosine-3'-phosphate
  modified_base 13: mod_base = OTHER; note = 2'-O-methylcytidine-3'-phosphate
  modified_base 14: mod_base = OTHER; note = 2'-deoxy-2'-fluoroadenosine-3'-phosphate
  modified_base 15: mod_base = OTHER; note = 2'-O-methylguanosine-3'-phosphate
  modified_base 16: mod_base = OTHER; note = 2'-deoxy-2'-fluorouridine-3'-phosphate
  modified_base 17: mod_base = OTHER; note = 2'-O-methylcytidine-3'-phosphate
  modified_base 18: mod_base = OTHER; note = 2'-O-methylcytidine-3'-phosphate
  modified_base 19: mod_base = OTHER; note = 2'-O-methyluridine-3'-phosphate
  modified_base 20: mod_base = OTHER; note = 2'-O-methyluridine-3'-phosphate
  modified_base 21: mod_base = OTHER; note = 2'-O-methylguanosine-3'-phosphorothioate
  modified_base 22: mod_base = OTHER; note = 2'-O-methylguanosine-3'-phosphorothioate
  modified_base 23: mod_base = OTHER; note = 2'-O-methyladenosine
aaagggtggttgcagtccttgga

SEQ ID NO: 1232 - RNA, 23 nt, synthetic construct
  source 1..23: mol_type = other RNA
  modified_base 1: mod_base = OTHER; note = 2'-O-methyladenosine-3'-phosphorothioate
  modified_base 2: mod_base = OTHER; note = 2'-deoxy-2'-fluoroguanosine-3'-phosphorothioate
  modified_base 3: mod_base = OTHER; note = 2'-O-methyluridine-3'-phosphate
  modified_base 4: mod_base = OTHER; note = 2'-O-methylguanosine-3'-phosphate
  modified_base 5: mod_base = OTHER; note = 2'-O-methylguanosine-3'-phosphate
  modified_base 6: mod_base = OTHER; note = 2'-deoxy-2'-fluorocytidine-3'-phosphate
  modified_base 7: mod_base = OTHER; note = 2'-O-methyluridine-3'-phosphate
  modified_base 8: mod_base = OTHER; note = 2'-deoxy-2'-fluoroguanosine-3'-phosphate
  modified_base 9: mod_base = OTHER; note = 2'-deoxy-2'-fluorouridine-3'-phosphate
  modified_base 10: mod_base = OTHER; note = 2'-O-methylguanosine-3'-phosphate
  modified_base 11: mod_base = OTHER; note = 2'-O-methylcytidine-3'-phosphate
  modified_base 12: mod_base = OTHER; note = 2'-O-methyluridine-3'-phosphate
  modified_base 13: mod_base = OTHER; note = 2'-O-methyluridine-3'-phosphate
  modified_base 14: mod_base = OTHER; note = 2'-deoxy-2'-fluoroguanosine-3'-phosphate
  modified_base 15: mod_base = OTHER; note = 2'-O-methyluridine-3'-phosphate
  modified_base 16: mod_base = OTHER; note = 2'-deoxy-2'-fluorocytidine-3'-phosphate
  modified_base 17: mod_base = OTHER; note = 2'-O-methyladenosine-3'-phosphate
  modified_base 18: mod_base = OTHER; note = 2'-O-methylguanosine-3'-phosphate
  modified_base 19: mod_base = OTHER; note = 2'-O-methylcytidine-3'-phosphate
  modified_base 20: mod_base = OTHER; note = 2'-O-methyladenosine-3'-phosphate
  modified_base 21: mod_base = OTHER; note = 2'-O-methylcytidine-3'-phosphorothioate
  modified_base 22: mod_base = OTHER; note = 2'-O-methyluridine-3'-phosphorothioate
  modified_base 23: mod_base = OTHER; note = 2'-O-methylguanosine
agtggctgtgcttgtcagcactg

SEQ ID NO: 1233 - RNA, 23 nt, synthetic construct
  source 1..23: mol_type = other RNA
  modified_base 1: mod_base = OTHER; note = 2'-O-methyladenosine-3'-phosphorothioate
  modified_base 2: mod_base = OTHER; note = 2'-deoxy-2'-fluoroguanosine-3'-phosphorothioate
  modified_base 3: mod_base = OTHER; note = 2'-O-methyluridine-3'-phosphate
  modified_base 4: mod_base = OTHER; note = 2'-O-methylguanosine-3'-phosphate
  modified_base 5: mod_base = OTHER; note = 2'-O-methyluridine-3'-phosphate
  modified_base 6: mod_base = OTHER; note = 2'-deoxy-2'-fluoroadenosine-3'-phosphate
  modified_base 7: mod_base = OTHER; note = 2'-O-methyladenosine-3'-phosphate
  modified_base 8: mod_base = OTHER; note = 2'-deoxy-2'-fluoroadenosine-3'-phosphate
  modified_base 9: mod_base = OTHER; note = 2'-deoxy-2'-fluoroguanosine-3'-phosphate
  modified_base 10: mod_base = OTHER; note = 2'-O-methylcytidine-3'-phosphate
  modified_base 11: mod_base = OTHER; note = 2'-O-methyluridine-3'-phosphate
  modified_base 12: mod_base = OTHER; note = 2'-O-methylguanosine-3'-phosphate
  modified_base 13: mod_base = OTHER; note = 2'-O-methylguanosine-3'-phosphate
  modified_base 14: mod_base = OTHER; note = 2'-deoxy-2'-fluorouridine-3'-phosphate
  modified_base 15: mod_base = OTHER; note = 2'-O-methyladenosine-3'-phosphate
  modified_base 16: mod_base = OTHER; note = 2'-deoxy-2'-fluoroguanosine-3'-phosphate
  modified_base 17: mod_base = OTHER; note = 2'-O-methylcytidine-3'-phosphate
  modified_base 18: mod_base = OTHER; note = 2'-O-methyluridine-3'-phosphate
  modified_base 19: mod_base = OTHER; note = 2'-O-methylguanosine-3'-phosphate
  modified_base 20: mod_base = OTHER; note = 2'-O-methyluridine-3'-phosphate
  modified_base 21: mod_base = OTHER; note = 2'-O-methylguanosine-3'-phosphorothioate
  modified_base 22: mod_base = OTHER; note = 2'-O-methylguanosine-3'-phosphorothioate
  modified_base 23: mod_base = OTHER; note = 2'-O-methyladenosine
agtgtaaagctggtagctgtgga

SEQ ID NO: 1234 - RNA, 23 nt, synthetic construct
  source 1..23: mol_type = other RNA
  modified_base 1: mod_base = OTHER; note = 2'-O-methyladenosine-3'-phosphorothioate
  modified_base 2: mod_base = OTHER; note = 2'-deoxy-2'-fluoroguanosine-3'-phosphorothioate
  modified_base 3: mod_base = OTHER; note = 2'-O-methyluridine-3'-phosphate
  modified_base 4: mod_base = OTHER; note = 2'-O-methylguanosine-3'-phosphate
  modified_base 5: mod_base = OTHER; note = 2'-O-methylguanosine-3'-phosphate
  modified_base 6: mod_base = OTHER; note = 2'-deoxy-2'-fluoroadenosine-3'-phosphate
  modified_base 7: mod_base = OTHER; note = 2'-O-methyluridine-3'-phosphate
  modified_base 8: mod_base = OTHER; note = 2'-deoxy-2'-fluorouridine-3'-phosphate
  modified_base 9: mod_base = OTHER; note = 2'-deoxy-2'-fluoroguanosine-3'-phosphate
  modified_base 10: mod_base = OTHER; note = 2'-O-methyluridine-3'-phosphate
  modified_base 11: mod_base = OTHER; note = 2'-O-methylguanosine-3'-phosphate
  modified_base 12: mod_base = OTHER; note = 2'-O-methylguanosine-3'-phosphate
  modified_base 13: mod_base = OTHER; note = 2'-O-methyladenosine-3'-phosphate
  modified_base 14: mod_base = OTHER; note = 2'-deoxy-2'-fluorocytidine-3'-phosphate
  modified_base 15: mod_base = OTHER; note = 2'-O-methyladenosine-3'-phosphate
  modified_base 16: mod_base = OTHER; note = 2'-deoxy-2'-fluorouridine-3'-phosphate
  modified_base 17: mod_base = OTHER; note = 2'-O-methylguanosine-3'-phosphate
  modified_base 18: mod_base = OTHER; note = 2'-O-methylguanosine-3'-phosphate
  modified_base 19: mod_base = OTHER; note = 2'-O-methyluridine-3'-phosphate
  modified_base 20: mod_base = OTHER; note = 2'-O-methylguanosine-3'-phosphate
  modified_base 21: mod_base = OTHER; note = 2'-O-methylguanosine-3'-phosphorothioate
  modified_base 22: mod_base = OTHER; note = 2'-O-methylcytidine-3'-phosphorothioate
  modified_base 23: mod_base = OTHER; note = 2'-O-methylcytidine
agtggattgtggacatggtggcc

SEQ ID NO: 1235 - RNA, 23 nt, synthetic construct
  source 1..23: mol_type = other RNA
  modified_base 1: mod_base = OTHER; note = 2'-O-methyladenosine-3'-phosphorothioate
  modified_base 2: mod_base = OTHER; note = 2'-deoxy-2'-fluoroadenosine-3'-phosphorothioate
  modified_base 3: mod_base = OTHER; note = 2'-O-methylguanosine-3'-phosphate
  modified_base 4: mod_base = OTHER; note = 2'-O-methyluridine-3'-phosphate
  modified_base 5: mod_base = OTHER; note = 2'-O-methylguanosine-3'-phosphate
  modified_base 6: mod_base = OTHER; note = 2'-deoxy-2'-fluoroguanosine-3'-phosphate
  modified_base 7: mod_base = OTHER; note = 2'-O-methylcytidine-3'-phosphate
  modified_base 8: mod_base = OTHER; note = 2'-deoxy-2'-fluorouridine-3'-phosphate
  modified_base 9: mod_base = OTHER; note = 2'-deoxy-2'-fluoroguanosine-3'-phosphate
  modified_base 10: mod_base = OTHER; note = 2'-O-methylcytidine-3'-phosphate
  modified_base 11: mod_base = OTHER; note = 2'-O-methyladenosine-3'-phosphate
  modified_base 12: mod_base = OTHER; note = 2'-O-methylguanosine-3'-phosphate
  modified_base 13: mod_base = OTHER; note = 2'-O-methyluridine-3'-phosphate
  modified_base 14: mod_base = OTHER; note = 2'-deoxy-2'-fluorouridine-3'-phosphate
  modified_base 15: mod_base = OTHER; note = 2'-O-methylguanosine-3'-phosphate
  modified_base 16: mod_base = OTHER; note = 2'-deoxy-2'-fluorouridine-3'-phosphate
  modified_base 17: mod_base = OTHER; note = 2'-O-methyladenosine-3'-phosphate
  modified_base 18: mod_base = OTHER; note = 2'-O-methylguanosine-3'-phosphate
  modified_base 19: mod_base = OTHER; note = 2'-O-methyluridine-3'-phosphate
  modified_base 20: mod_base = OTHER; note = 2'-O-methylguanosine-3'-phosphate
  modified_base 21: mod_base = OTHER; note = 2'-O-methylguanosine-3'-phosphorothioate
  modified_base 22: mod_base = OTHER; note = 2'-O-methylcytidine-3'-phosphorothioate
  modified_base 23: mod_base = OTHER; note = 2'-O-methyluridine
aagtggctgcagttgtagtggct

SEQ ID NO: 1236 - RNA, 23 nt, synthetic construct
  source 1..23: mol_type = other RNA
  modified_base 1: mod_base = OTHER; note = 2'-O-methyladenosine-3'-phosphorothioate
  modified_base 2: mod_base = OTHER; note = 2'-deoxy-2'-fluorocytidine-3'-phosphorothioate
  modified_base 3: mod_base = OTHER; note = 2'-O-methyluridine-3'-phosphate
  modified_base 4: mod_base = OTHER; note = 2'-O-methylguanosine-3'-phosphate
  modified_base 5: mod_base = OTHER; note = 2'-O-methyluridine-3'-phosphate
  modified_base 6: mod_base = OTHER; note = 2'-deoxy-2'-fluoroguanosine-3'-phosphate
  modified_base 7: mod_base = OTHER; note = 2'-O-methyladenosine-3'-phosphate
  modified_base 8: mod_base = OTHER; note = 2'-deoxy-2'-fluoroguanosine-3'-phosphate
  modified_base 9: mod_base = OTHER; note = 2'-deoxy-2'-fluoroguanosine-3'-phosphate
  modified_base 10: mod_base = OTHER; note = 2'-O-methyladenosine-3'-phosphate
  modified_base 11: mod_base = OTHER; note = 2'-O-methyluridine-3'-phosphate
  modified_base 12: mod_base = OTHER; note = 2'-O-methylcytidine-3'-phosphate
  modified_base 13: mod_base = OTHER; note = 2'-O-methylcytidine-3'-phosphate
  modified_base 14: mod_base = OTHER; note = 2'-deoxy-2'-fluoroadenosine-3'-phosphate
  modified_base 15: mod_base = OTHER; note = 2'-O-methylguanosine-3'-phosphate
  modified_base 16: mod_base = OTHER; note = 2'-deoxy-2'-fluoroguanosine-3'-phosphate
  modified_base 17: mod_base = OTHER; note = 2'-O-methyluridine-3'-phosphate
  modified_base 18: mod_base = OTHER; note = 2'-O-methylguanosine-3'-phosphate
  modified_base 19: mod_base = OTHER; note = 2'-O-methylguanosine-3'-phosphate
  modified_base 20: mod_base = OTHER; note = 2'-O-methyluridine-3'-phosphate
  modified_base 21: mod_base = OTHER; note = 2'-O-methylcytidine-3'-phosphorothioate
  modified_base 22: mod_base = OTHER; note = 2'-O-methylcytidine-3'-phosphorothioate
  modified_base 23: mod_base = OTHER; note = 2'-O-methylcytidine
actgtgaggatccaggtggtccc

SEQ ID NO: 1237 - RNA, 23 nt, synthetic construct
  source 1..23: mol_type = other RNA
  modified_base 1: mod_base = OTHER; note = 2'-O-methyladenosine-3'-phosphorothioate
  modified_base 2: mod_base = OTHER; note = 2'-deoxy-2'-fluoroadenosine-3'-phosphorothioate
  modified_base 3: mod_base = OTHER; note = 2'-O-methylguanosine-3'-phosphate
  modified_base 4: mod_base = OTHER; note = 2'-O-methyluridine-3'-phosphate
  modified_base 5: mod_base = OTHER; note = 2'-O-methylguanosine-3'-phosphate
  modified_base 6: mod_base = OTHER; note = 2'-deoxy-2'-fluoroguanosine-3'-phosphate
  modified_base 7: mod_base = OTHER; note = 2'-O-methyladenosine-3'-phosphate
  modified_base 8: mod_base = OTHER; note = 2'-deoxy-2'-fluorouridine-3'-phosphate
  modified_base 9: mod_base = OTHER; note = 2'-deoxy-2'-fluoroguanosine-3'-phosphate
  modified_base 10: mod_base = OTHER; note = 2'-O-methylcytidine-3'-phosphate
  modified_base 11: mod_base = OTHER; note = 2'-O-methyladenosine-3'-phosphate
  modified_base 12: mod_base = OTHER; note = 2'-O-methylguanosine-3'-phosphate
  modified_base 13: mod_base = OTHER; note = 2'-O-methyluridine-3'-phosphate
  modified_base 14: mod_base = OTHER; note = 2'-deoxy-2'-fluorocytidine-3'-phosphate
  modified_base 15: mod_base = OTHER; note = 2'-O-methylguanosine-3'-phosphate
  modified_base 16: mod_base = OTHER; note = 2'-deoxy-2'-fluorouridine-3'-phosphate
  modified_base 17: mod_base = OTHER; note = 2'-O-methyladenosine-3'-phosphate
  modified_base 18: mod_base = OTHER; note = 2'-O-methylguanosine-3'-phosphate
  modified_base 19: mod_base = OTHER; note = 2'-O-methyluridine-3'-phosphate
  modified_base 20: mod_base = OTHER; note = 2'-O-methylguanosine-3'-phosphate
  modified_base 21: mod_base = OTHER; note = 2'-O-methylguanosine-3'-phosphorothioate
  modified_base 22: mod_base = OTHER; note = 2'-O-methylcytidine-3'-phosphorothioate
  modified_base 23: mod_base = OTHER; note = 2'-O-methyluridine
aagtggatgcagtcgtagtggct

SEQ ID NO: 1238 - RNA, 23 nt, synthetic construct
  source 1..23: mol_type = other RNA
  modified_base 1: mod_base = OTHER; note = 2'-O-methyladenosine-3'-phosphorothioate
  modified_base 2: mod_base = OTHER; note = 2'-deoxy-2'-fluoroguanosine-3'-phosphorothioate
  modified_base 3: mod_base = OTHER; note = 2'-O-methylcytidine-3'-phosphate
  modified_base 4: mod_base = OTHER; note = 2'-O-methyluridine-3'-phosphate
  modified_base 5: mod_base = OTHER; note = 2'-O-methylguanosine-3'-phosphate
  modified_base 6: mod_base = OTHER; note = 2'-deoxy-2'-fluoroguanosine-3'-phosphate
  modified_base 7: mod_base = OTHER; note = 2'-O-methyluridine-3'-phosphate
  modified_base 8: mod_base = OTHER; note = 2'-deoxy-2'-fluorocytidine-3'-phosphate
  modified_base 9: mod_base = OTHER; note = 2'-deoxy-2'-fluoroadenosine-3'-phosphate
  modified_base 10: mod_base = OTHER; note = 2'-O-methylguanosine-3'-phosphate
  modified_base 11: mod_base = OTHER; note = 2'-O-methylcytidine-3'-phosphate
  modified_base 12: mod_base = OTHER; note = 2'-O-methyladenosine-3'-phosphate
  modified_base 13: mod_base = OTHER; note = 2'-O-methylcytidine-3'-phosphate
  modified_base 14: mod_base = OTHER; note = 2'-deoxy-2'-fluorouridine-3'-phosphate
  modified_base 15: mod_base = OTHER; note = 2'-O-methyluridine-3'-phosphate
  modified_base 16: mod_base = OTHER; note = 2'-deoxy-2'-fluorouridine-3'-phosphate
  modified_base 17: mod_base = OTHER; note = 2'-O-methylguanosine-3'-phosphate
  modified_base 18: mod_base = OTHER; note = 2'-O-methylguanosine-3'-phosphate
  modified_base 19: mod_base = OTHER; note = 2'-O-methylguanosine-3'-phosphate
  modified_base 20: mod_base = OTHER; note = 2'-O-methyladenosine-3'-phosphate
  modified_base 21: mod_base = OTHER; note = 2'-O-methylguanosine-3'-phosphorothioate
  modified_base 22: mod_base = OTHER; note = 2'-O-methylguanosine-3'-phosphorothioate
  modified_base 23: mod_base = OTHER; note = 2'-O-methylguanosine
agctggtcagcactttgggaggg

SEQ ID NO: 1239 - RNA, 23 nt, synthetic construct
  source 1..23: mol_type = other RNA
  modified_base 1: mod_base = OTHER; note = 2'-O-methyladenosine-3'-phosphorothioate
  modified_base 2: mod_base = OTHER; note = 2'-deoxy-2'-fluoroguanosine-3'-phosphorothioate
  modified_base 3: mod_base = OTHER; note = 2'-O-methyluridine-3'-phosphate
  modified_base 4: mod_base = OTHER; note = 2'-O-methylguanosine-3'-phosphate
  modified_base 5: mod_base = OTHER; note = 2'-O-methyluridine-3'-phosphate
  modified_base 6: mod_base = OTHER; note = 2'-deoxy-2'-fluoroadenosine-3'-phosphate
  modified_base 7: mod_base = OTHER; note = 2'-O-methyladenosine-3'-phosphate
  modified_base 8: mod_base = OTHER; note = 2'-deoxy-2'-fluorocytidine-3'-phosphate
  modified_base 9: mod_base = OTHER; note = 2'-deoxy-2'-fluoroguanosine-3'-phosphate
  modified_base 10: mod_base = OTHER; note = 2'-O-methylcytidine-3'-phosphate
  modified_base 11: mod_base = OTHER; note = 2'-O-methyluridine-3'-phosphate
  modified_base 12: mod_base = OTHER; note = 2'-O-methylguanosine-3'-phosphate
  modified_base 13: mod_base = OTHER; note = 2'-O-methylguanosine-3'-phosphate
  modified_base 14: mod_base = OTHER; note = 2'-deoxy-2'-fluorouridine-3'-phosphate
  modified_base 15: mod_base = OTHER; note = 2'-O-methyladenosine-3'-phosphate
  modified_base 16: mod_base = OTHER; note = 2'-deoxy-2'-fluoroguanosine-3'-phosphate
  modified_base 17: mod_base = OTHER; note = 2'-O-methylcytidine-3'-phosphate
  modified_base 18: mod_base = OTHER; note = 2'-O-methyluridine-3'-phosphate
  modified_base 19: mod_base = OTHER; note = 2'-O-methylguanosine-3'-phosphate
  modified_base 20: mod_base = OTHER; note = 2'-O-methyluridine-3'-phosphate
  modified_base 21: mod_base = OTHER; note = 2'-O-methylguanosine-3'-phosphorothioate
  modified_base 22: mod_base = OTHER; note = 2'-O-methylguanosine-3'-phosphorothioate
  modified_base 23: mod_base = OTHER; note = 2'-O-methyladenosine
agtgtaacgctggtagctgtgga

SEQ ID NO: 1240 - RNA, 23 nt, synthetic construct
  source 1..23: mol_type = other RNA
  modified_base 1: mod_base = OTHER; note = 2'-O-methyladenosine-3'-phosphorothioate
  modified_base 2: mod_base = OTHER; note = 2'-deoxy-2'-fluoroguanosine-3'-phosphorothioate
  modified_base 3: mod_base = OTHER; note = 2'-O-methylguanosine-3'-phosphate
  modified_base 4: mod_base = OTHER; note = 2'-O-methyladenosine-3'-phosphate
  modified_base 5: mod_base = OTHER; note = 2'-O-methylcytidine-3'-phosphate
  modified_base 6: mod_base = OTHER; note = 2'-deoxy-2'-fluoroguanosine-3'-phosphate
  modified_base 7: mod_base = OTHER; note = 2'-O-methyluridine-3'-phosphate
  modified_base 8: mod_base = OTHER; note = 2'-deoxy-2'-fluoroguanosine-3'-phosphate
  modified_base 9: mod_base = OTHER; note = 2'-deoxy-2'-fluoroguanosine-3'-phosphate
  modified_base 10: mod_base = OTHER; note = 2'-O-methyladenosine-3'-phosphate
  modified_base 11: mod_base = OTHER; note = 2'-O-methyladenosine-3'-phosphate
  modified_base 12: mod_base = OTHER; note = 2'-O-methylcytidine-3'-phosphate
  modified_base 13: mod_base = OTHER; note = 2'-O-methyluridine-3'-phosphate
  modified_base 14: mod_base = OTHER; note = 2'-deoxy-2'-fluoroguanosine-3'-phosphate
  modified_base 15: mod_base = OTHER; note = 2'-O-methylguanosine-3'-phosphate
  modified_base 16: mod_base = OTHER; note = 2'-deoxy-2'-fluorouridine-3'-phosphate
  modified_base 17: mod_base = OTHER; note = 2'-O-methylguanosine-3'-phosphate
  modified_base 18: mod_base = OTHER; note = 2'-O-methylguanosine-3'-phosphate
  modified_base 19: mod_base = OTHER; note = 2'-O-methylcytidine-3'-phosphate
  modified_base 20: mod_base = OTHER; note = 2'-O-methylcytidine-3'-phosphate
  modified_base 21: mod_base = OTHER; note = 2'-O-methylcytidine-3'-phosphorothioate
  modified_base 22: mod_base = OTHER; note = 2'-O-methyluridine-3'-phosphorothioate
  modified_base 23: mod_base = OTHER; note = 2'-O-methyluridine
aggacgtggaactggtggccctt

SEQ ID NO: 1241 - RNA, 23 nt, synthetic construct
  source 1..23: mol_type = other RNA
  modified_base 1: mod_base = OTHER; note = 2'-O-methyladenosine-3'-phosphorothioate
  modified_base 2: mod_base = OTHER; note = 2'-deoxy-2'-fluorocytidine-3'-phosphorothioate
  modified_base 3: mod_base = OTHER; note = 2'-O-methylguanosine-3'-phosphate
  modified_base 4: mod_base = OTHER; note = 2'-O-methyluridine-3'-phosphate
  modified_base 5: mod_base = OTHER; note = 2'-O-methyladenosine-3'-phosphate
  modified_base 6: mod_base = OTHER; note = 2'-deoxy-2'-fluoroguanosine-3'-phosphate
  modified_base 7: mod_base = OTHER; note = 2'-O-methyluridine-3'-phosphate
  modified_base 8: mod_base = OTHER; note = 2'-deoxy-2'-fluoroguanosine-3'-phosphate
  modified_base 9: mod_base = OTHER; note = 2'-deoxy-2'-fluoroguanosine-3'-phosphate
  modified_base 10: mod_base = OTHER; note = 2'-O-methylcytidine-3'-phosphate
  modified_base 11: mod_base = OTHER; note = 2'-O-methyluridine-3'-phosphate
  modified_base 12: mod_base = OTHER; note = 2'-O-methylguanosine-3'-phosphate
  modified_base 13: mod_base = OTHER; note = 2'-O-methyluridine-3'-phosphate
  modified_base 14: mod_base = OTHER; note = 2'-deoxy-2'-fluorouridine-3'-phosphate
  modified_base 15: mod_base = OTHER; note = 2'-O-methylguanosine-3'-phosphate
  modified_base 16: mod_base = OTHER; note = 2'-deoxy-2'-fluorouridine-3'-phosphate
  modified_base 17: mod_base = OTHER; note = 2'-O-methylguanosine-3'-phosphate
  modified_base 18: mod_base = OTHER; note = 2'-O-methylguanosine-3'-phosphate
  modified_base 19: mod_base = OTHER; note = 2'-O-methyluridine-3'-phosphate
  modified_base 20: mod_base = OTHER; note = 2'-O-methylcytidine-3'-phosphate
  modified_base 21: mod_base = OTHER; note = 2'-O-methyladenosine-3'-phosphorothioate
  modified_base 22: mod_base = OTHER; note = 2'-O-methylguanosine-3'-phosphorothioate
  modified_base 23: mod_base = OTHER; note = 2'-O-methylcytidine
acgtagtggctgttgtggtcagc

SEQ ID NO: 1242 - RNA, 23 nt, synthetic construct
  source 1..23: mol_type = other RNA
  modified_base 1: mod_base = OTHER; note = 2'-O-methyladenosine-3'-phosphorothioate
  modified_base 2: mod_base = OTHER; note = 2'-deoxy-2'-fluorouridine-3'-phosphorothioate
  modified_base 3: mod_base = OTHER; note = 2'-O-methylguanosine-3'-phosphate
  modified_base 4: mod_base = OTHER; note = 2'-O-methyluridine-3'-phosphate
  modified_base 5: mod_base = OTHER; note = 2'-O-methylcytidine-3'-phosphate
  modified_base 6: mod_base = OTHER; note = 2'-deoxy-2'-fluoroguanosine-3'-phosphate
  modified_base 7: mod_base = OTHER; note = 2'-O-methyluridine-3'-phosphate
  modified_base 8: mod_base = OTHER; note = 2'-deoxy-2'-fluoroguanosine-3'-phosphate
  modified_base 9: mod_base = OTHER; note = 2'-deoxy-2'-fluoroguanosine-3'-phosphate
  modified_base 10: mod_base = OTHER; note = 2'-O-methylcytidine-3'-phosphate
  modified_base 11: mod_base = OTHER; note = 2'-O-methylcytidine-3'-phosphate
  modified_base 12: mod_base = OTHER; note = 2'-O-methylguanosine-3'-phosphate
  modified_base 13: mod_base = OTHER; note = 2'-O-methyluridine-3'-phosphate
  modified_base 14: mod_base = OTHER; note = 2'-deoxy-2'-fluoroguanosine-3'-phosphate
  modified_base 15: mod_base = OTHER; note = 2'-O-methylguanosine-3'-phosphate
  modified_base 16: mod_base = OTHER; note = 2'-deoxy-2'-fluorouridine-3'-phosphate
  modified_base 17: mod_base = OTHER; note = 2'-O-methylguanosine-3'-phosphate
  modified_base 18: mod_base = OTHER; note = 2'-O-methylcytidine-3'-phosphate
  modified_base 19: mod_base = OTHER; note = 2'-O-methyluridine-3'-phosphate
  modified_base 20: mod_base = OTHER; note = 2'-O-methylcytidine-3'-phosphate
  modified_base 21: mod_base = OTHER; note = 2'-O-methyladenosine-3'-phosphorothioate
  modified_base 22: mod_base = OTHER; note = 2'-O-methylcytidine-3'-phosphorothioate
  modified_base 23: mod_base = OTHER; note = 2'-O-methyladenosine
atgtcgtggccgtggtgctcaca

SEQ ID NO: 1243 - RNA, 23 nt, synthetic construct
  source 1..23: mol_type = other RNA
  modified_base 1: mod_base = OTHER; note = 2'-O-methyladenosine-3'-phosphorothioate
  modified_base 2: mod_base = OTHER; note = 2'-deoxy-2'-fluoroadenosine-3'-phosphorothioate
  modified_base 3: mod_base = OTHER; note = 2'-O-methylguanosine-3'-phosphate
  modified_base 4: mod_base = OTHER; note = 2'-O-methyluridine-3'-phosphate
  modified_base 5: mod_base = OTHER; note = 2'-O-methyluridine-3'-phosphate
  modified_base 6: mod_base = OTHER; note = 2'-deoxy-2'-fluoroguanosine-3'-phosphate
  modified_base 7: mod_base = OTHER; note = 2'-O-methylcytidine-3'-phosphate
  modified_base 8: mod_base = OTHER; note = 2'-deoxy-2'-fluoroadenosine-3'-phosphate
  modified_base 9: mod_base = OTHER; note = 2'-deoxy-2'-fluoroguanosine-3'-phosphate
  modified_base 10: mod_base = OTHER; note = 2'-O-methyluridine-3'-phosphate
  modified_base 11: mod_base = OTHER; note = 2'-O-methylcytidine-3'-phosphate
  modified_base 12: mod_base = OTHER; note = 2'-O-methylcytidine-3'-phosphate
  modified_base 13: mod_base = OTHER; note = 2'-O-methylcytidine-3'-phosphate
  modified_base 14: mod_base = OTHER; note = 2'-deoxy-2'-fluorouridine-3'-phosphate
  modified_base 15: mod_base = OTHER; note = 2'-O-methylguanosine-3'-phosphate
  modified_base 16: mod_base = OTHER; note = 2'-deoxy-2'-fluoroguanosine-3'-phosphate
  modified_base 17: mod_base = OTHER; note = 2'-O-methyladenosine-3'-phosphate
  modified_base 18: mod_base = OTHER; note = 2'-O-methylcytidine-3'-phosphate
  modified_base 19: mod_base = OTHER; note = 2'-O-methyluridine-3'-phosphate
  modified_base 20: mod_base = OTHER; note = 2'-O-methylguanosine-3'-phosphate
  modified_base 21: mod_base = OTHER; note = 2'-O-methylguanosine-3'-phosphorothioate
  modified_base 22: mod_base = OTHER; note = 2'-O-methyladenosine-3'-phosphorothioate
  modified_base 23: mod_base = OTHER; note = 2'-O-methylguanosine
aagttgcagtccctggactggag

SEQ ID NO: 1244 - RNA, 23 nt, synthetic construct
  source 1..23: mol_type = other RNA
  modified_base 1: mod_base = OTHER; note = 2'-O-methyladenosine-3'-phosphorothioate
  modified_base 2: mod_base = OTHER; note = 2'-deoxy-2'-fluoroguanosine-3'-phosphorothioate
  modified_base 3: mod_base = OTHER; note = 2'-O-methylguanosine-3'-phosphate
  modified_base 4: mod_base = OTHER; note = 2'-O-methylcytidine-3'-phosphate
  modified_base 5: mod_base = OTHER; note = 2'-O-methyluridine-3'-phosphate
  modified_base 6: mod_base = OTHER; note = 2'-deoxy-2'-fluoroguanosine-3'-phosphate
  modified_base 7: mod_base = OTHER; note = 2'-O-methyluridine-3'-phosphate
  modified_base 8: mod_base = OTHER; note = 2'-deoxy-2'-fluoroguanosine-3'-phosphate
  modified_base 9: mod_base = OTHER; note = 2'-deoxy-2'-fluorocytidine-3'-phosphate
  modified_base 10: mod_base = OTHER; note = 2'-O-methyluridine-3'-phosphate
  modified_base 11: mod_base = OTHER; note = 2'-O-methyluridine-3'-phosphate
  modified_base 12: mod_base = OTHER; note = 2'-O-methylcytidine-3'-phosphate
  modified_base 13: mod_base = OTHER; note = 2'-O-methyluridine-3'-phosphate
  modified_base 14: mod_base = OTHER; note = 2'-deoxy-2'-fluorocytidine-3'-phosphate
  modified_base 15: mod_base = OTHER; note = 2'-O-methyladenosine-3'-phosphate
  modified_base 16: mod_base = OTHER; note = 2'-deoxy-2'-fluoroguanosine-3'-phosphate
  modified_base 17: mod_base = OTHER; note = 2'-O-methyluridine-3'-phosphate
  modified_base 18: mod_base = OTHER; note = 2'-O-methylguanosine-3'-phosphate
  modified_base 19: mod_base = OTHER; note = 2'-O-methylcytidine-3'-phosphate
  modified_base 20: mod_base = OTHER; note = 2'-O-methyluridine-3'-phosphate
  modified_base 21: mod_base = OTHER; note = 2'-O-methylguanosine-3'-phosphorothioate
  modified_base 22: mod_base = OTHER; note = 2'-O-methylguanosine-3'-phosphorothioate
  modified_base 23: mod_base = OTHER; note = 2'-O-methyladenosine
aggctgtgcttctcagtgctgga

SEQ ID NO: 1245 - RNA, 23 nt, synthetic construct
  source 1..23: mol_type = other RNA
  modified_base 1: mod_base = OTHER; note = 2'-O-methyladenosine-3'-phosphorothioate
  modified_base 2: mod_base = OTHER; note = 2'-deoxy-2'-fluorocytidine-3'-phosphorothioate
  modified_base 3: mod_base = OTHER; note = 2'-O-methyladenosine-3'-phosphate
  modified_base 4: mod_base = OTHER; note = 2'-O-methylcytidine-3'-phosphate
  modified_base 5: mod_base = OTHER; note = 2'-O-methyluridine-3'-phosphate
  modified_base 6: mod_base = OTHER; note = 2'-deoxy-2'-fluoroguanosine-3'-phosphate
  modified_base 7: mod_base = OTHER; note = 2'-O-methylguanosine-3'-phosphate
  modified_base 8: mod_base = OTHER; note = 2'-deoxy-2'-fluorouridine-3'-phosphate
  modified_base 9: mod_base = OTHER; note = 2'-deoxy-2'-fluorouridine-3'-phosphate
  modified_base 10: mod_base = OTHER; note = 2'-O-methylguanosine-3'-phosphate
  modified_base 11: mod_base = OTHER; note = 2'-O-methyluridine-3'-phosphate
  modified_base 12: mod_base = OTHER; note = 2'-O-methylguanosine-3'-phosphate
  modified_base 13: mod_base = OTHER; note = 2'-O-methylguanosine-3'-phosphate
  modified_base 14: mod_base = OTHER; note = 2'-deoxy-2'-fluoroguanosine-3'-phosphate
  modified_base 15: mod_base = OTHER; note = 2'-O-methyluridine-3'-phosphate
  modified_base 16: mod_base = OTHER; note = 2'-deoxy-2'-fluoroguanosine-3'-phosphate
  modified_base 17: mod_base = OTHER; note = 2'-O-methyluridine-3'-phosphate
  modified_base 18: mod_base = OTHER; note = 2'-O-methylguanosine-3'-phosphate
  modified_base 19: mod_base = OTHER; note = 2'-O-methylguanosine-3'-phosphate
  modified_base 20: mod_base = OTHER; note = 2'-O-methyluridine-3'-phosphate
  modified_base 21: mod_base = OTHER; note = 2'-O-methylguanosine-3'-phosphorothioate
  modified_base 22: mod_base = OTHER; note = 2'-O-methylguanosine-3'-phosphorothioate
  modified_base 23: mod_base = OTHER; note = 2'-O-methyluridine
acactggttgtgggtgtggtggt

SEQ ID NO: 1246 - RNA, 23 nt, synthetic construct
  source 1..23: mol_type = other RNA
  modified_base 1: mod_base = OTHER; note = 2'-O-methyladenosine-3'-phosphorothioate
  modified_base 2: mod_base = OTHER; note = 2'-deoxy-2'-fluorouridine-3'-phosphorothioate
  modified_base 3: mod_base = OTHER; note = 2'-O-methylguanosine-3'-phosphate
  modified_base 4: mod_base = OTHER; note = 2'-O-methylguanosine-3'-phosphate
  modified_base 5: mod_base = OTHER; note = 2'-O-methyluridine-3'-phosphate
  modified_base 6: mod_base = OTHER; note = 2'-deoxy-2'-fluoroguanosine-3'-phosphate
  modified_base 7: mod_base = OTHER; note = 2'-O-methylguanosine-3'-phosphate
  modified_base 8: mod_base = OTHER; note = 2'-deoxy-2'-fluorouridine-3'-phosphate
  modified_base 9: mod_base = OTHER; note = 2'-deoxy-2'-fluorocytidine-3'-phosphate
  modified_base 10: mod_base = OTHER; note = 2'-O-methyladenosine-3'-phosphate
  modified_base 11: mod_base = OTHER; note = 2'-O-methylguanosine-3'-phosphate
  modified_base 12: mod_base = OTHER; note = 2'-O-methylcytidine-3'-phosphate
  modified_base 13: mod_base = OTHER; note = 2'-O-methyladenosine-3'-phosphate
  modified_base 14: mod_base = OTHER; note = 2'-deoxy-2'-fluorocytidine-3'-phosphate
  modified_base 15: mod_base = OTHER; note = 2'-O-methyluridine-3'-phosphate
  modified_base 16: mod_base = OTHER; note = 2'-deoxy-2'-fluorocytidine-3'-phosphate
  modified_base 17: mod_base = OTHER; note = 2'-O-methyluridine-3'-phosphate
  modified_base 18: mod_base = OTHER; note = 2'-O-methylguanosine-3'-phosphate
  modified_base 19: mod_base = OTHER; note = 2'-O-methylguanosine-3'-phosphate
  modified_base 20: mod_base = OTHER; note = 2'-O-methylcytidine-3'-phosphate
  modified_base 21: mod_base = OTHER; note = 2'-O-methylguanosine-3'-phosphorothioate
  modified_base 22: mod_base = OTHER; note = 2'-O-methylguanosine-3'-phosphorothioate
  modified_base 23: mod_base = OTHER; note = 2'-O-methyluridine
atggtggtcagcactctggcggt

SEQ ID NO: 1247 - RNA, 23 nt, synthetic construct
  source 1..23: mol_type = other RNA
  modified_base 1: mod_base = OTHER; note = 2'-O-methyladenosine-3'-phosphorothioate
  modified_base 2: mod_base = OTHER; note = 2'-deoxy-2'-fluoroguanosine-3'-phosphorothioate
  modified_base 3: mod_base = OTHER; note = 2'-O-methylguanosine-3'-phosphate
  modified_base 4: mod_base = OTHER; note = 2'-O-methyluridine-3'-phosphate
  modified_base 5: mod_base = OTHER; note = 2'-O-methylguanosine-3'-phosphate
  modified_base 6: mod_base = OTHER; note = 2'-deoxy-2'-fluoroadenosine-3'-phosphate
  modified_base 7: mod_base = OTHER; note = 2'-O-methyluridine-3'-phosphate
  modified_base 8: mod_base = OTHER; note = 2'-deoxy-2'-fluoroguanosine-3'-phosphate
  modified_base 9: mod_base = OTHER; note = 2'-deoxy-2'-fluoroguanosine-3'-phosphate
  modified_base 10: mod_base = OTHER; note = 2'-O-methylguanosine-3'-phosphate
  modified_base 11: mod_base = OTHER; note = 2'-O-methyluridine-3'-phosphate
  modified_base 12: mod_base = OTHER; note = 2'-O-methylguanosine-3'-phosphate
  modified_base 13: mod_base = OTHER; note = 2'-O-methyluridine-3'-phosphate
  modified_base 14: mod_base = OTHER; note = 2'-deoxy-2'-fluorouridine-3'-phosphate
  modified_base 15: mod_base = OTHER; note = 2'-O-methylguanosine-3'-phosphate
  modified_base 16: mod_base = OTHER; note = 2'-deoxy-2'-fluorouridine-3'-phosphate
  modified_base 17: mod_base = OTHER; note = 2'-O-methylcytidine-3'-phosphate
  modified_base 18: mod_base = OTHER; note = 2'-O-methylcytidine-3'-phosphate
  modified_base 19: mod_base = OTHER; note = 2'-O-methylcytidine-3'-phosphate
  modified_base 20: mod_base = OTHER; note = 2'-O-methyluridine-3'-phosphate
  modified_base 21: mod_base = OTHER; note = 2'-O-methylguanosine-3'-phosphorothioate
  modified_base 22: mod_base = OTHER; note = 2'-O-methylguanosine-3'-phosphorothioate
  modified_base 23: mod_base = OTHER; note = 2'-O-methyladenosine
aggtgatgggtgttgtccctgga

SEQ ID NO: 1248 - RNA, 23 nt, synthetic construct
  source 1..23: mol_type = other RNA
  modified_base 1: mod_base = OTHER; note = 2'-O-methyladenosine-3'-phosphorothioate
  modified_base 2: mod_base = OTHER; note = 2'-deoxy-2'-fluoroadenosine-3'-phosphorothioate
  modified_base 3: mod_base = OTHER; note = 2'-O-methylguanosine-3'-phosphate
  modified_base 4: mod_base = OTHER; note = 2'-O-methylguanosine-3'-phosphate
  modified_base 5: mod_base = OTHER; note = 2'-O-methyladenosine-3'-phosphate
  modified_base 6: mod_base = OTHER; note = 2'-deoxy-2'-fluoroguanosine-3'-phosphate
  modified_base 7: mod_base = OTHER; note = 2'-O-methylguanosine-3'-phosphate
  modified_base 8: mod_base = OTHER; note = 2'-deoxy-2'-fluoroadenosine-3'-phosphate
  modified_base 9: mod_base = OTHER; note = 2'-deoxy-2'-fluoroadenosine-3'-phosphate
  modified_base 10: mod_base = OTHER; note = 2'-O-methylguanosine-3'-phosphate
  modified_base 11: mod_base = OTHER; note = 2'-O-methyluridine-3'-phosphate
  modified_base 12: mod_base = OTHER; note = 2'-O-methylguanosine-3'-phosphate
  modified_base 13: mod_base = OTHER; note = 2'-O-methylguanosine-3'-phosphate
  modified_base 14: mod_base = OTHER; note = 2'-deoxy-2'-fluorocytidine-3'-phosphate
  modified_base 15: mod_base = OTHER; note = 2'-O-methyluridine-3'-phosphate
  modified_base 16: mod_base = OTHER; note = 2'-deoxy-2'-fluorouridine-3'-phosphate
  modified_base 17: mod_base = OTHER; note = 2'-O-methyluridine-3'-phosphate
  modified_base 18: mod_base = OTHER; note = 2'-O-methylguanosine-3'-phosphate
  modified_base 19: mod_base = OTHER; note = 2'-O-methylguanosine-3'-phosphate
  modified_base 20: mod_base = OTHER; note = 2'-O-methyladenosine-3'-phosphate
  modified_base 21: mod_base = OTHER; note = 2'-O-methylguanosine-3'-phosphorothioate
  modified_base 22: mod_base = OTHER; note = 2'-O-methylcytidine-3'-phosphorothioate
  modified_base 23: mod_base = OTHER; note = 2'-O-methyluridine
aaggaggaagtggctttggagct

SEQ ID NO: 1249 - RNA, 23 nt, synthetic construct
  source 1..23: mol_type = other RNA
  modified_base 1: mod_base = OTHER; note = 2'-O-methyladenosine-3'-phosphorothioate
  modified_base 2: mod_base = OTHER; note = 2'-deoxy-2'-fluorouridine-3'-phosphorothioate
  modified_base 3: mod_base = OTHER; note = 2'-O-methylguanosine-3'-phosphate
  modified_base 4: mod_base = OTHER; note = 2'-O-methyluridine-3'-phosphate
  modified_base 5: mod_base = OTHER; note = 2'-O-methylguanosine-3'-phosphate
  modified_base 6: mod_base = OTHER; note = 2'-deoxy-2'-fluoroguanosine-3'-phosphate
  modified_base 7: mod_base = OTHER; note = 2'-O-methylcytidine-3'-phosphate
  modified_base 8: mod_base = OTHER; note = 2'-deoxy-2'-fluorouridine-3'-phosphate
  modified_base 9: mod_base = OTHER; note = 2'-deoxy-2'-fluoroguanosine-3'-phosphate
  modified_base 10: mod_base = OTHER; note = 2'-O-methyluridine-3'-phosphate
  modified_base 11: mod_base = OTHER; note = 2'-O-methylguanosine-3'-phosphate
  modified_base 12: mod_base = OTHER; note = 2'-O-methylcytidine-3'-phosphate
  modified_base 13: mod_base = OTHER; note = 2'-O-methyluridine-3'-phosphate
  modified_base 14: mod_base = OTHER; note = 2'-deoxy-2'-fluorouridine-3'-phosphate
  modified_base 15: mod_base = OTHER; note = 2'-O-methylguanosine-3'-phosphate
  modified_base 16: mod_base = OTHER; note = 2'-deoxy-2'-fluorouridine-3'-phosphate
  modified_base 17: mod_base = OTHER; note = 2'-O-methylcytidine-3'-phosphate
  modified_base 18: mod_base = OTHER; note = 2'-O-methyladenosine-3'-phosphate
  modified_base 19: mod_base = OTHER; note = 2'-O-methylguanosine-3'-phosphate
  modified_base 20: mod_base = OTHER; note = 2'-O-methylcytidine-3'-phosphate
  modified_base 21: mod_base = OTHER; note = 2'-O-methyladenosine-3'-phosphorothioate
  modified_base 22: mod_base = OTHER; note = 2'-O-methylcytidine-3'-phosphorothioate
  modified_base 23: mod_base = OTHER; note = 2'-O-methyluridine
atgtggctgtgcttgtcagcact

SEQ ID NO: 1250 - RNA, 23 nt, synthetic construct
  source 1..23: mol_type = other RNA
  modified_base 1: mod_base = OTHER; note = 2'-O-methyladenosine-3'-phosphorothioate
  modified_base 2: mod_base = OTHER; note = 2'-deoxy-2'-fluoroadenosine-3'-phosphorothioate
  modified_base 3: mod_base = OTHER; note = 2'-O-methylcytidine-3'-phosphate
  modified_base 4: mod_base = OTHER; note = 2'-O-methylguanosine-3'-phosphate
  modified_base 5: mod_base = OTHER; note = 2'-O-methyluridine-3'-phosphate
  modified_base 6: mod_base = OTHER; note = 2'-deoxy-2'-fluoroguanosine-3'-phosphate
  modified_base 7: mod_base = OTHER; note = 2'-O-methylguanosine-3'-phosphate
  modified_base 8: mod_base = OTHER; note = 2'-deoxy-2'-fluorouridine-3'-phosphate
  modified_base 9: mod_base = OTHER; note = 2'-deoxy-2'-fluorocytidine-3'-phosphate
  modified_base 10: mod_base = OTHER; note = 2'-O-methylcytidine-3'-phosphate
  modified_base 11: mod_base = OTHER; note = 2'-O-methyladenosine-3'-phosphate
  modified_base 12: mod_base = OTHER; note = 2'-O-methylcytidine-3'-phosphate
  modified_base 13: mod_base = OTHER; note = 2'-O-methyladenosine-3'-phosphate
  modified_base 14: mod_base = OTHER; note = 2'-deoxy-2'-fluoroguanosine-3'-phosphate
  modified_base 15: mod_base = OTHER; note = 2'-O-methylguanosine-3'-phosphate
  modified_base 16: mod_base = OTHER; note = 2'-deoxy-2'-fluoroguanosine-3'-phosphate
  modified_base 17: mod_base = OTHER; note = 2'-O-methyluridine-3'-phosphate
  modified_base 18: mod_base = OTHER; note = 2'-O-methylguanosine-3'-phosphate
  modified_base 19: mod_base = OTHER; note = 2'-O-methylguanosine-3'-phosphate
  modified_base 20: mod_base = OTHER; note = 2'-O-methyladenosine-3'-phosphate
  modified_base 21: mod_base = OTHER; note = 2'-O-methylguanosine-3'-phosphorothioate
  modified_base 22: mod_base = OTHER; note = 2'-O-methylguanosine-3'-phosphorothioate
  modified_base 23: mod_base = OTHER; note = 2'-O-methyladenosine
aacgtggtccacagggtggagga

SEQ ID NO: 1251 - RNA, 23 nt, synthetic construct
  source 1..23: mol_type = other RNA
  modified_base 1: mod_base = OTHER; note = 2'-O-methyladenosine-3'-phosphorothioate
  modified_base 2: mod_base = OTHER; note = 2'-deoxy-2'-fluoroguanosine-3'-phosphorothioate
  modified_base 3: mod_base = OTHER; note = 2'-O-methyluridine-3'-phosphate
  modified_base 4: mod_base = OTHER; note = 2'-O-methylguanosine-3'-phosphate
  modified_base 5: mod_base = OTHER; note = 2'-O-methyluridine-3'-phosphate
  modified_base 6: mod_base = OTHER; note = 2'-deoxy-2'-fluoroguanosine-3'-phosphate
  modified_base 7: mod_base = OTHER; note = 2'-O-methylguanosine-3'-phosphate
  modified_base 8: mod_base = OTHER; note = 2'-deoxy-2'-fluorouridine-3'-phosphate
  modified_base 9: mod_base = OTHER; note = 2'-deoxy-2'-fluoroguanosine-3'-phosphate
  modified_base 10: mod_base = OTHER; note = 2'-O-methylguanosine-3'-phosphate
  modified_base 11: mod_base = OTHER; note = 2'-O-methyluridine-3'-phosphate
  modified_base 12: mod_base = OTHER; note = 2'-O-methylcytidine-3'-phosphate
  modified_base 13: mod_base = OTHER; note = 2'-O-methyluridine-3'-phosphate
  modified_base 14: mod_base = OTHER; note = 2'-deoxy-2'-fluoroguanosine-3'-phosphate
  modified_base 15: mod_base = OTHER; note = 2'-O-methyluridine-3'-phosphate
  modified_base 16: mod_base = OTHER; note = 2'-deoxy-2'-fluoroguanosine-3'-phosphate
  modified_base 17: mod_base = OTHER; note = 2'-O-methylcytidine-3'-phosphate
  modified_base 18: mod_base = OTHER; note = 2'-O-methyluridine-3'-phosphate
  modified_base 19: mod_base = OTHER; note = 2'-O-methylguanosine-3'-phosphate
  modified_base 20: mod_base = OTHER; note = 2'-O-methylguanosine-3'-phosphate
  modified_base 21: mod_base = OTHER; note = 2'-O-methylguanosine-3'-phosphorothioate
  modified_base 22: mod_base = OTHER; note = 2'-O-methyladenosine-3'-phosphorothioate
  modified_base 23: mod_base = OTHER; note = 2'-O-methylcytidine
agtgtggtggtctgtgctgggac

SEQ ID NO: 1252 - RNA, 23 nt, synthetic construct
  source 1..23: mol_type = other RNA
  modified_base 1: mod_base = OTHER; note = 2'-O-methyladenosine-3'-phosphorothioate
  modified_base 2: mod_base = OTHER; note = 2'-deoxy-2'-fluoroguanosine-3'-phosphorothioate
  modified_base 3: mod_base = OTHER; note = 2'-O-methylguanosine-3'-phosphate
  modified_base 4: mod_base = OTHER; note = 2'-O-methyladenosine-3'-phosphate
  modified_base 5: mod_base = OTHER; note = 2'-O-methyluridine-3'-phosphate
  modified_base 6: mod_base = OTHER; note = 2'-deoxy-2'-fluorouridine-3'-phosphate
  modified_base 7: mod_base = OTHER; note = 2'-O-methylguanosine-3'-phosphate
  modified_base 8: mod_base = OTHER; note = 2'-deoxy-2'-fluorouridine-3'-phosphate
  modified_base 9: mod_base = OTHER; note = 2'-deoxy-2'-fluoroguanosine-3'-phosphate
  modified_base 10: mod_base = OTHER; note = 2'-O-methylguanosine-3'-phosphate
  modified_base 11: mod_base = OTHER; note = 2'-O-methyladenosine-3'-phosphate
  modified_base 12: mod_base = OTHER; note = 2'-O-methylcytidine-3'-phosphate
  modified_base 13: mod_base = OTHER; note = 2'-O-methyladenosine-3'-phosphate
  modified_base 14: mod_base = OTHER; note = 2'-deoxy-2'-fluorouridine-3'-phosphate
  modified_base 15: mod_base = OTHER; note = 2'-O-methylguanosine-3'-phosphate
  modified_base 16: mod_base = OTHER; note = 2'-deoxy-2'-fluoroguanosine-3'-phosphate
  modified_base 17: mod_base = OTHER; note = 2'-O-methyluridine-3'-phosphate
  modified_base 18: mod_base = OTHER; note = 2'-O-methylguanosine-3'-phosphate
  modified_base 19: mod_base = OTHER; note = 2'-O-methylguanosine-3'-phosphate
  modified_base 20: mod_base = OTHER; note = 2'-O-methyladenosine-3'-phosphate
  modified_base 21: mod_base = OTHER; note = 2'-O-methylcytidine-3'-phosphorothioate
  modified_base 22: mod_base = OTHER; note = 2'-O-methyladenosine-3'-phosphorothioate
  modified_base 23: mod_base = OTHER; note = 2'-O-methyluridine
aggattgtggacatggtggacat

SEQ ID NO: 1253 - RNA, 23 nt, synthetic construct
  source 1..23: mol_type = other RNA
  modified_base 1: mod_base = OTHER; note = 2'-O-methyladenosine-3'-phosphorothioate
  modified_base 2: mod_base = OTHER; note = 2'-deoxy-2'-fluoroguanosine-3'-phosphorothioate
  modified_base 3: mod_base = OTHER; note = 2'-O-methylguanosine-3'-phosphate
  modified_base 4: mod_base = OTHER; note = 2'-O-methyluridine-3'-phosphate
  modified_base 5: mod_base = OTHER; note = 2'-O-methylcytidine-3'-phosphate
  modified_base 6: mod_base = OTHER; note = 2'-deoxy-2'-fluorouridine-3'-phosphate
  modified_base 7: mod_base = OTHER; note = 2'-O-methylcytidine-3'-phosphate
  modified_base 8: mod_base = OTHER; note = 2'-deoxy-2'-fluorouridine-3'-phosphate
  modified_base 9: mod_base = OTHER; note = 2'-deoxy-2'-fluoroguanosine-3'-phosphate
  modified_base 10: mod_base = OTHER; note = 2'-O-methylguanosine-3'-phosphate
  modified_base 11: mod_base = OTHER; note = 2'-O-methyladenosine-3'-phosphate
  modified_base 12: mod_base = OTHER; note = 2'-O-methylguanosine-3'-phosphate
  modified_base 13: mod_base = OTHER; note = 2'-O-methyluridine-3'-phosphate
  modified_base 14: mod_base = OTHER; note = 2'-deoxy-2'-fluoroadenosine-3'-phosphate
  modified_base 15: mod_base = OTHER; note = 2'-O-methylguanosine-3'-phosphate
  modified_base 16: mod_base = OTHER; note = 2'-deoxy-2'-fluoroadenosine-3'-phosphate
  modified_base 17: mod_base = OTHER; note = 2'-O-methylguanosine-3'-phosphate
  modified_base 18: mod_base = OTHER; note = 2'-O-methylguanosine-3'-phosphate
  modified_base 19: mod_base = OTHER; note = 2'-O-methyladenosine-3'-phosphate
  modified_base 20: mod_base = OTHER; note = 2'-O-methylguanosine-3'-phosphate
  modified_base 21: mod_base = OTHER; note = 2'-O-methylguanosine-3'-phosphorothioate
  modified_base 22: mod_base = OTHER; note = 2'-O-methyluridine-3'-phosphorothioate
  modified_base 23: mod_base = OTHER; note = 2'-O-methylguanosine
aggtctctggagtagaggaggtg

SEQ ID NO: 1254 - RNA, 23 nt, synthetic construct
  source 1..23: mol_type = other RNA
  modified_base 1: mod_base = OTHER; note = 2'-O-methyladenosine-3'-phosphorothioate
  modified_base 2: mod_base = OTHER; note = 2'-deoxy-2'-fluoroguanosine-3'-phosphorothioate
  modified_base 3: mod_base = OTHER; note = 2'-O-methyluridine-3'-phosphate
  modified_base 4: mod_base = OTHER; note = 2'-O-methylcytidine-3'-phosphate
  modified_base 5: mod_base = OTHER; note = 2'-O-methyladenosine-3'-phosphate
  modified_base 6: mod_base = OTHER; note = 2'-deoxy-2'-fluoroguanosine-3'-phosphate
  modified_base 7: mod_base = OTHER; note = 2'-O-methylcytidine-3'-phosphate
  modified_base 8: mod_base = OTHER; note = 2'-deoxy-2'-fluoroadenosine-3'-phosphate
  modified_base 9: mod_base = OTHER; note = 2'-deoxy-2'-fluorocytidine-3'-phosphate
  modified_base 10: mod_base = OTHER; note = 2'-O-methyluridine-3'-phosphate
  modified_base 11: mod_base = OTHER; note = 2'-O-methylguanosine-3'-phosphate
  modified_base 12: mod_base = OTHER; note = 2'-O-methyluridine-3'-phosphate
  modified_base 13: mod_base = OTHER; note = 2'-O-methylguanosine-3'-phosphate
  modified_base 14: mod_base = OTHER; note = 2'-deoxy-2'-fluoroguanosine-3'-phosphate
  modified_base 15: mod_base = OTHER; note = 2'-O-methyladenosine-3'-phosphate
  modified_base 16: mod_base = OTHER; note = 2'-deoxy-2'-fluoroguanosine-3'-phosphate
  modified_base 17: mod_base = OTHER; note = 2'-O-methylguanosine-3'-phosphate
  modified_base 18: mod_base = OTHER; note = 2'-O-methyluridine-3'-phosphate
  modified_base 19: mod_base = OTHER; note = 2'-O-methylguanosine-3'-phosphate
  modified_base 20: mod_base = OTHER; note = 2'-O-methyluridine-3'-phosphate
  modified_base 21: mod_base = OTHER; note = 2'-O-methylguanosine-3'-phosphorothioate
  modified_base 22: mod_base = OTHER; note = 2'-O-methylguanosine-3'-phosphorothioate
  modified_base 23: mod_base = OTHER; note = 2'-O-methylguanosine
agtcagcactgtggaggtgtggg

SEQ ID NO: 1255 - RNA, 23 nt, synthetic construct
  source 1..23: mol_type = other RNA
  modified_base 1: mod_base = OTHER; note = 2'-O-methyladenosine-3'-phosphorothioate
  modified_base 2: mod_base = OTHER; note = 2'-deoxy-2'-fluorocytidine-3'-phosphorothioate
  modified_base 3: mod_base = OTHER; note = 2'-O-methylcytidine-3'-phosphate
  modified_base 4: mod_base = OTHER; note = 2'-O-methylcytidine-3'-phosphate
  modified_base 5: mod_base = OTHER; note = 2'-O-methyluridine-3'-phosphate
  modified_base 6: mod_base = OTHER; note = 2'-deoxy-2'-fluorouridine-3'-phosphate
  modified_base 7: mod_base = OTHER; note = 2'-O-methylguanosine-3'-phosphate
  modified_base 8: mod_base = OTHER; note = 2'-deoxy-2'-fluorouridine-3'-phosphate
  modified_base 9: mod_base = OTHER; note = 2'-deoxy-2'-fluorocytidine-3'-phosphate
  modified_base 10: mod_base = OTHER; note = 2'-O-methyladenosine-3'-phosphate
  modified_base 11: mod_base = OTHER; note = 2'-O-methyluridine-3'-phosphate
  modified_base 12: mod_base = OTHER; note = 2'-O-methylguanosine-3'-phosphate
  modified_base 13: mod_base = OTHER; note = 2'-O-methylguanosine-3'-phosphate
  modified_base 14: mod_base = OTHER; note = 2'-deoxy-2'-fluorouridine-3'-phosphate
  modified_base 15: mod_base = OTHER; note = 2'-O-methylguanosine-3'-phosphate
  modified_base 16: mod_base = OTHER; note = 2'-deoxy-2'-fluoroguanosine-3'-phosphate
  modified_base 17: mod_base = OTHER; note = 2'-O-methylcytidine-3'-phosphate
  modified_base 18: mod_base = OTHER; note = 2'-O-methyluridine-3'-phosphate
  modified_base 19: mod_base = OTHER; note = 2'-O-methylguanosine-3'-phosphate
  modified_base 20: mod_base = OTHER; note = 2'-O-methyluridine-3'-phosphate
  modified_base 21: mod_base = OTHER; note = 2'-O-methylguanosine-3'-phosphorothioate
  modified_base 22: mod_base = OTHER; note = 2'-O-methylguanosine-3'-phosphorothioate
  modified_base 23: mod_base = OTHER; note = 2'-O-methyluridine
acccttgtcatggtggctgtggt

SEQ ID NO: 1256 - RNA, 23 nt, synthetic construct
  source 1..23: mol_type = other RNA
  modified_base 1: mod_base = OTHER; note = 2'-O-methyladenosine-3'-phosphorothioate
  modified_base 2: mod_base = OTHER; note = 2'-deoxy-2'-fluoroguanosine-3'-phosphorothioate
  modified_base 3: mod_base = OTHER; note = 2'-O-methyladenosine-3'-phosphate
  modified_base 4: mod_base = OTHER; note = 2'-O-methylguanosine-3'-phosphate
  modified_base 5: mod_base = OTHER; note = 2'-O-methylguanosine-3'-phosphate
  modified_base 6: mod_base = OTHER; note = 2'-deoxy-2'-fluoroadenosine-3'-phosphate
  modified_base 7: mod_base = OTHER; note = 2'-O-methylguanosine-3'-phosphate
  modified_base 8: mod_base = OTHER; note = 2'-deoxy-2'-fluoroguanosine-3'-phosphate
  modified_base 9: mod_base = OTHER; note = 2'-deoxy-2'-fluoroguanosine-3'-phosphate
  modified_base 10: mod_base = OTHER; note = 2'-O-methyluridine-3'-phosphate
  modified_base 11: mod_base = OTHER; note = 2'-O-methylguanosine-3'-phosphate
  modified_base 12: mod_base = OTHER; note = 2'-O-methyluridine-3'-phosphate
  modified_base 13: mod_base = OTHER; note = 2'-O-methylguanosine-3'-phosphate
  modified_base 14: mod_base = OTHER; note = 2'-deoxy-2'-fluoroguanosine-3'-phosphate
  modified_base 15: mod_base = OTHER; note = 2'-O-methylcytidine-3'-phosphate
  modified_base 16: mod_base = OTHER; note = 2'-deoxy-2'-fluorocytidine-3'-phosphate
  modified_base 17: mod_base = OTHER; note = 2'-O-methylguanosine-3'-phosphate
  modified_base 18: mod_base = OTHER; note = 2'-O-methyluridine-3'-phosphate
  modified_base 19: mod_base = OTHER; note = 2'-O-methylguanosine-3'-phosphate
  modified_base 20: mod_base = OTHER; note = 2'-O-methylguanosine-3'-phosphate
  modified_base 21: mod_base = OTHER; note = 2'-O-methyladenosine-3'-phosphorothioate
  modified_base 22: mod_base = OTHER; note = 2'-O-methyladenosine-3'-phosphorothioate
  modified_base 23: mod_base = OTHER; note = 2'-O-methyluridine
agaggagggtgtggccgtggaat

SEQ ID NO: 1257 - RNA, 23 nt, synthetic construct
  source 1..23: mol_type = other RNA
  modified_base 1: mod_base = OTHER; note = 2'-O-methyladenosine-3'-phosphorothioate
  modified_base 2: mod_base = OTHER; note = 2'-deoxy-2'-fluoroguanosine-3'-phosphorothioate
  modified_base 3: mod_base = OTHER; note = 2'-O-methylcytidine-3'-phosphate
  modified_base 4: mod_base = OTHER; note = 2'-O-methyluridine-3'-phosphate
  modified_base 5: mod_base = OTHER; note = 2'-O-methylcytidine-3'-phosphate
  modified_base 6: mod_base = OTHER; note = 2'-deoxy-2'-fluoroadenosine-3'-phosphate
  modified_base 7: mod_base = OTHER; note = 2'-O-methylguanosine-3'-phosphate
  modified_base 8: mod_base = OTHER; note = 2'-deoxy-2'-fluorouridine-3'-phosphate
  modified_base 9: mod_base = OTHER; note = 2'-deoxy-2'-fluoroguanosine-3'-phosphate
  modified_base 10: mod_base = OTHER; note = 2'-O-methyladenosine-3'-phosphate
  modified_base 11: mod_base = OTHER; note = 2'-O-methylguanosine-3'-phosphate
  modified_base 12: mod_base = OTHER; note = 2'-O-methylguanosine-3'-phosphate
  modified_base 13: mod_base = OTHER; note = 2'-O-methyladenosine-3'-phosphate
  modified_base 14: mod_base = OTHER; note = 2'-deoxy-2'-fluorouridine-3'-phosphate
  modified_base 15: mod_base = OTHER; note = 2'-O-methylcytidine-3'-phosphate
  modified_base 16: mod_base = OTHER; note = 2'-deoxy-2'-fluorocytidine-3'-phosphate
  modified_base 17: mod_base = OTHER; note = 2'-O-methylguanosine-3'-phosphate
  modified_base 18: mod_base = OTHER; note = 2'-O-methylguanosine-3'-phosphate
  modified_base 19: mod_base = OTHER; note = 2'-O-methylguanosine-3'-phosphate
  modified_base 20: mod_base = OTHER; note = 2'-O-methyluridine-3'-phosphate
  modified_base 21: mod_base = OTHER; note = 2'-O-methylcytidine-3'-phosphorothioate
  modified_base 22: mod_base = OTHER; note = 2'-O-methylguanosine-3'-phosphorothioate
  modified_base 23: mod_base = OTHER; note = 2'-O-methyluridine
agctcagtgaggatccgggtcgt

SEQ ID NO: 1258 - RNA, 23 nt, synthetic construct
  source 1..23: mol_type = other RNA
  modified_base 1: mod_base = OTHER; note = 2'-O-methyladenosine-3'-phosphorothioate
  modified_base 2: mod_base = OTHER; note = 2'-deoxy-2'-fluoroadenosine-3'-phosphorothioate
  modified_base 3: mod_base = OTHER; note = 2'-O-methylguanosine-3'-phosphate
  modified_base 4: mod_base = OTHER; note = 2'-O-methyluridine-3'-phosphate
  modified_base 5: mod_base = OTHER; note = 2'-O-methyluridine-3'-phosphate
  modified_base 6: mod_base = OTHER; note = 2'-deoxy-2'-fluoroguanosine-3'-phosphate
  modified_base 7: mod_base = OTHER; note = 2'-O-methyluridine-3'-phosphate
  modified_base 8: mod_base = OTHER; note = 2'-deoxy-2'-fluoroadenosine-3'-phosphate
  modified_base 9: mod_base = OTHER; note = 2'-deoxy-2'-fluoroguanosine-3'-phosphate
  modified_base 10: mod_base = OTHER; note = 2'-O-methyluridine-3'-phosphate
  modified_base 11: mod_base = OTHER; note = 2'-O-methylguanosine-3'-phosphate
  modified_base 12: mod_base = OTHER; note = 2'-O-methylguanosine-3'-phosphate
  modified_base 13: mod_base = OTHER; note = 2'-O-methylcytidine-3'-phosphate
  modified_base 14: mod_base = OTHER; note = 2'-deoxy-2'-fluorouridine-3'-phosphate
  modified_base 15: mod_base = OTHER; note = 2'-O-methylguanosine-3'-phosphate
  modified_base 16: mod_base = OTHER; note = 2'-deoxy-2'-fluorouridine-3'-phosphate
  modified_base 17: mod_base = OTHER; note = 2'-O-methyluridine-3'-phosphate
  modified_base 18: mod_base = OTHER; note = 2'-O-methylguanosine-3'-phosphate
  modified_base 19: mod_base = OTHER; note = 2'-O-methyluridine-3'-phosphate
  modified_base 20: mod_base = OTHER; note = 2'-O-methylguanosine-3'-phosphate
  modified_base 21: mod_base = OTHER; note = 2'-O-methylguanosine-3'-phosphorothioate
  modified_base 22: mod_base = OTHER; note = 2'-O-methyluridine-3'-phosphorothioate
  modified_base 23: mod_base = OTHER; note = 2'-O-methylcytidine
aagttgtagtggctgttgtggtc

SEQ ID NO: 1259 - RNA, 23 nt, synthetic construct
  source 1..23: mol_type = other RNA
  modified_base 1: mod_base = OTHER; note = 2'-O-methyladenosine-3'-phosphorothioate
  modified_base 2: mod_base = OTHER; note = 2'-deoxy-2'-fluoroadenosine-3'-phosphorothioate
  modified_base 3: mod_base = OTHER; note = 2'-O-methylcytidine-3'-phosphate
  modified_base 4: mod_base = OTHER; note = 2'-O-methyladenosine-3'-phosphate
  modified_base 5: mod_base = OTHER; note = 2'-O-methylguanosine-3'-phosphate
  modified_base 6: mod_base = OTHER; note = 2'-deoxy-2'-fluoroguanosine-3'-phosphate
  modified_base 7: mod_base = OTHER; note = 2'-O-methylguanosine-3'-phosphate
  modified_base 8: mod_base = OTHER; note = 2'-deoxy-2'-fluorouridine-3'-phosphate
  modified_base 9: mod_base = OTHER; note = 2'-deoxy-2'-fluoroguanosine-3'-phosphate
  modified_base 10: mod_base = OTHER; note = 2'-O-methylguanosine-3'-phosphate
  modified_base 11: mod_base = OTHER; note = 2'-O-methylcytidine-3'-phosphate
  modified_base 12: mod_base = OTHER; note = 2'-O-methylcytidine-3'-phosphate
  modified_base 13: mod_base = OTHER; note = 2'-O-methylguanosine-3'-phosphate
  modified_base 14: mod_base = OTHER; note = 2'-deoxy-2'-fluorouridine-3'-phosphate
  modified_base 15: mod_base = OTHER; note = 2'-O-methylguanosine-3'-phosphate
  modified_base 16: mod_base = OTHER; note = 2'-deoxy-2'-fluoroguanosine-3'-phosphate
  modified_base 17: mod_base = OTHER; note = 2'-O-methyladenosine-3'-phosphate
  modified_base 18: mod_base = OTHER; note = 2'-O-methyluridine-3'-phosphate
  modified_base 19: mod_base = OTHER; note = 2'-O-methylcytidine-3'-phosphate
  modified_base 20: mod_base = OTHER; note = 2'-O-methylcytidine-3'-phosphate
  modified_base 21: mod_base = OTHER; note = 2'-O-methyladenosine-3'-phosphorothioate
  modified_base 22: mod_base = OTHER; note = 2'-O-methylguanosine-3'-phosphorothioate
  modified_base 23: mod_base = OTHER; note = 2'-O-methyluridine
aacagggtggccgtggatccagt

SEQ ID NO: 1260 - RNA, 23 nt, synthetic construct
  source 1..23: mol_type = other RNA
  modified_base 1: mod_base = OTHER; note = 2'-O-methyladenosine-3'-phosphorothioate
  modified_base 2: mod_base = OTHER; note = 2'-deoxy-2'-fluoroguanosine-3'-phosphorothioate
  modified_base 3: mod_base = OTHER; note = 2'-O-methylcytidine-3'-phosphate
  modified_base 4: mod_base = OTHER; note = 2'-O-methyluridine-3'-phosphate
  modified_base 5: mod_base = OTHER; note = 2'-O-methylcytidine-3'-phosphate
  modified_base 6: mod_base = OTHER; note = 2'-deoxy-2'-fluorouridine-3'-phosphate
  modified_base 7: mod_base = OTHER; note = 2'-O-methylguanosine-3'-phosphate
  modified_base 8: mod_base = OTHER; note = 2'-deoxy-2'-fluorouridine-3'-phosphate
  modified_base 9: mod_base = OTHER; note = 2'-deoxy-2'-fluoroguanosine-3'-phosphate
  modified_base 10: mod_base = OTHER; note = 2'-O-methyladenosine-3'-phosphate
  modified_base 11: mod_base = OTHER; note = 2'-O-methylguanosine-3'-phosphate
  modified_base 12: mod_base = OTHER; note = 2'-O-methylguanosine-3'-phosphate
  modified_base 13: mod_base = OTHER; note = 2'-O-methyladenosine-3'-phosphate
  modified_base 14: mod_base = OTHER; note = 2'-deoxy-2'-fluorouridine-3'-phosphate
  modified_base 15: mod_base = OTHER; note = 2'-O-methylcytidine-3'-phosphate
  modified_base 16: mod_base = OTHER; note = 2'-deoxy-2'-fluorocytidine-3'-phosphate
  modified_base 17: mod_base = OTHER; note = 2'-O-methyladenosine-3'-phosphate
  modified_base 18: mod_base = OTHER; note = 2'-O-methylguanosine-3'-phosphate
  modified_base 19: mod_base = OTHER; note = 2'-O-methylguanosine-3'-phosphate
  modified_base 20: mod_base = OTHER; note = 2'-O-methyluridine-3'-phosphate
  modified_base 21: mod_base = OTHER; note = 2'-O-methylguanosine-3'-phosphorothioate
  modified_base 22: mod_base = OTHER; note = 2'-O-methylguanosine-3'-phosphorothioate
  modified_base 23: mod_base = OTHER; note = 2'-O-methyluridine
agctctgtgaggatccaggtggt

SEQ ID NO: 1261 - RNA, 23 nt, synthetic construct
  source 1..23: mol_type = other RNA
  modified_base 1: mod_base = OTHER; note = 2'-O-methyladenosine-3'-phosphorothioate
  modified_base 2: mod_base = OTHER; note = 2'-deoxy-2'-fluoroguanosine-3'-phosphorothioate
  modified_base 3: mod_base = OTHER; note = 2'-O-methylcytidine-3'-phosphate
  modified_base 4: mod_base = OTHER; note = 2'-O-methyladenosine-3'-phosphate
  modified_base 5: mod_base = OTHER; note = 2'-O-methylcytidine-3'-phosphate
  modified_base 6: mod_base = OTHER; note = 2'-deoxy-2'-fluorocytidine-3'-phosphate
  modified_base 7: mod_base = OTHER; note = 2'-O-methyladenosine-3'-phosphate
  modified_base 8: mod_base = OTHER; note = 2'-deoxy-2'-fluorouridine-3'-phosphate
  modified_base 9: mod_base = OTHER; note = 2'-deoxy-2'-fluorocytidine-3'-phosphate
  modified_base 10: mod_base = OTHER; note = 2'-O-methyladenosine-3'-phosphate
  modified_base 11: mod_base = OTHER; note = 2'-O-methylcytidine-3'-phosphate
  modified_base 12: mod_base = OTHER; note = 2'-O-methylguanosine-3'-phosphate
  modified_base 13: mod_base = OTHER; note = 2'-O-methylguanosine-3'-phosphate
  modified_base 14: mod_base = OTHER; note = 2'-deoxy-2'-fluorouridine-3'-phosphate
  modified_base 15: mod_base = OTHER; note = 2'-O-methylguanosine-3'-phosphate
  modified_base 16: mod_base = OTHER; note = 2'-deoxy-2'-fluoroguanosine-3'-phosphate
  modified_base 17: mod_base = OTHER; note = 2'-O-methylcytidine-3'-phosphate
  modified_base 18: mod_base = OTHER; note = 2'-O-methyluridine-3'-phosphate
  modified_base 19: mod_base = OTHER; note = 2'-O-methyladenosine-3'-phosphate
  modified_base 20: mod_base = OTHER; note = 2'-O-methyluridine-3'-phosphate
  modified_base 21: mod_base = OTHER; note = 2'-O-methyladenosine-3'-phosphorothioate
  modified_base 22: mod_base = OTHER; note = 2'-O-methylguanosine-3'-phosphorothioate
  modified_base 23: mod_base = OTHER; note = 2'-O-methyluridine
agcaccatcacggtggctatagt

SEQ ID NO: 1262 - RNA, 23 nt, synthetic construct
  source 1..23: mol_type = other RNA
  modified_base 1: mod_base = OTHER; note = 2'-O-methyladenosine-3'-phosphorothioate
  modified_base 2: mod_base = OTHER; note = 2'-deoxy-2'-fluoroguanosine-3'-phosphorothioate
  modified_base 3: mod_base = OTHER; note = 2'-O-methyluridine-3'-phosphate
  modified_base 4: mod_base = OTHER; note = 2'-O-methylguanosine-3'-phosphate
  modified_base 5: mod_base = OTHER; note = 2'-O-methyladenosine-3'-phosphate
  modified_base 6: mod_base = OTHER; note = 2'-deoxy-2'-fluoroguanosine-3'-phosphate
  modified_base 7: mod_base = OTHER; note = 2'-O-methylcytidine-3'-phosphate
  modified_base 8: mod_base = OTHER; note = 2'-deoxy-2'-fluorouridine-3'-phosphate
  modified_base 9: mod_base = OTHER; note = 2'-deoxy-2'-fluoroguanosine-3'-phosphate
  modified_base 10: mod_base = OTHER; note = 2'-O-methyluridine-3'-phosphate
  modified_base 11: mod_base = OTHER; note = 2'-O-methyluridine-3'-phosphate
  modified_base 12: mod_base = OTHER; note = 2'-O-methylcytidine-3'-phosphate
  modified_base 13: mod_base = OTHER; note = 2'-O-methylcytidine-3'-phosphate
  modified_base 14: mod_base = OTHER; note = 2'-deoxy-2'-fluorocytidine-3'-phosphate
  modified_base 15: mod_base = OTHER; note = 2'-O-methyladenosine-3'-phosphate
  modified_base 16: mod_base = OTHER; note = 2'-deoxy-2'-fluoroguanosine-3'-phosphate
  modified_base 17: mod_base = OTHER; note = 2'-O-methyladenosine-3'-phosphate
  modified_base 18: mod_base = OTHER; note = 2'-O-methylguanosine-3'-phosphate
  modified_base 19: mod_base = OTHER; note = 2'-O-methyluridine-3'-phosphate
  modified_base 20: mod_base = OTHER; note = 2'-O-methylguanosine-3'-phosphate
  modified_base 21: mod_base = OTHER; note = 2'-O-methylguanosine-3'-phosphorothioate
  modified_base 22: mod_base = OTHER; note = 2'-O-methyladenosine-3'-phosphorothioate
  modified_base 23: mod_base = OTHER; note = 2'-O-methylguanosine
agtgagctgttcccagagtggag

SEQ ID NO: 1263 - RNA, 23 nt, synthetic construct
  source 1..23: mol_type = other RNA
  modified_base 1: mod_base = OTHER; note = 2'-O-methyladenosine-3'-phosphorothioate
  modified_base 2: mod_base = OTHER; note = 2'-deoxy-2'-fluorocytidine-3'-phosphorothioate
  modified_base 3: mod_base = OTHER; note = 2'-O-methyluridine-3'-phosphate
  modified_base 4: mod_base = OTHER; note = 2'-O-methylguanosine-3'-phosphate
  modified_base 5: mod_base = OTHER; note = 2'-O-methyluridine-3'-phosphate
  modified_base 6: mod_base = OTHER; note = 2'-deoxy-2'-fluoroguanosine-3'-phosphate
  modified_base 7: mod_base = OTHER; note = 2'-O-methylguanosine-3'-phosphate
  modified_base 8: mod_base = OTHER; note = 2'-deoxy-2'-fluoroguanosine-3'-phosphate
  modified_base 9: mod_base = OTHER; note = 2'-deoxy-2'-fluorocytidine-3'-phosphate
  modified_base 10: mod_base = OTHER; note = 2'-O-methyladenosine-3'-phosphate
  modified_base 11: mod_base = OTHER; note = 2'-O-methyluridine-3'-phosphate
  modified_base 12: mod_base = OTHER; note = 2'-O-methyladenosine-3'-phosphate
  modified_base 13: mod_base = OTHER; note = 2'-O-methylguanosine-3'-phosphate
  modified_base 14: mod_base = OTHER; note = 2'-deoxy-2'-fluorouridine-3'-phosphate
  modified_base 15: mod_base = OTHER; note = 2'-O-methylguanosine-3'-phosphate
  modified_base 16: mod_base = OTHER; note = 2'-deoxy-2'-fluoroguanosine-3'-phosphate
  modified_base 17: mod_base = OTHER; note = 2'-O-methylcytidine-3'-phosphate
  modified_base 18: mod_base = OTHER; note = 2'-O-methylcytidine-3'-phosphate
  modified_base 19: mod_base = OTHER; note = 2'-O-methyladenosine-3'-phosphate
  modified_base 20: mod_base = OTHER; note = 2'-O-methyluridine-3'-phosphate
  modified_base 21: mod_base = OTHER; note = 2'-O-methylguanosine-3'-phosphorothioate
  modified_base 22: mod_base = OTHER; note = 2'-O-methylguanosine-3'-phosphorothioate
  modified_base 23: mod_base = OTHER; note = 2'-O-methyluridine
actgtgggcatagtggccatggt

SEQ ID NO: 1264 - RNA, 23 nt, synthetic construct
  source 1..23: mol_type = other RNA
  modified_base 1: mod_base = OTHER; note = 2'-O-methyladenosine-3'-phosphorothioate
  modified_base 2: mod_base = OTHER; note = 2'-deoxy-2'-fluoroadenosine-3'-phosphorothioate
  modified_base 3: mod_base = OTHER; note = 2'-O-methylguanosine-3'-phosphate
  modified_base 4: mod_base = OTHER; note = 2'-O-methylcytidine-3'-phosphate
  modified_base 5: mod_base = OTHER; note = 2'-O-methyluridine-3'-phosphate
  modified_base 6: mod_base = OTHER; note = 2'-deoxy-2'-fluoroguanosine-3'-phosphate
  modified_base 7: mod_base = OTHER; note = 2'-O-methylguanosine-3'-phosphate
  modified_base 8: mod_base = OTHER; note = 2'-deoxy-2'-fluoroguanosine-3'-phosphate
  modified_base 9: mod_base = OTHER; note = 2'-deoxy-2'-fluoroadenosine-3'-phosphate
  modified_base 10: mod_base = OTHER; note = 2'-O-methyladenosine-3'-phosphate
  modified_base 11: mod_base = OTHER; note = 2'-O-methylcytidine-3'-phosphate
  modified_base 12: mod_base = OTHER; note = 2'-O-methylcytidine-3'-phosphate
  modified_base 13: mod_base = OTHER; note = 2'-O-methylguanosine-3'-phosphate
  modified_base 14: mod_base = OTHER; note = 2'-deoxy-2'-fluorouridine-3'-phosphate
  modified_base 15: mod_base = OTHER; note = 2'-O-methylguanosine-3'-phosphate
  modified_base 16: mod_base = OTHER; note = 2'-deoxy-2'-fluoroguanosine-3'-phosphate
  modified_base 17: mod_base = OTHER; note = 2'-O-methyladenosine-3'-phosphate
  modified_base 18: mod_base = OTHER; note = 2'-O-methylguanosine-3'-phosphate
  modified_base 19: mod_base = OTHER; note = 2'-O-methylguanosine-3'-phosphate
  modified_base 20: mod_base = OTHER; note = 2'-O-methylcytidine-3'-phosphate
  modified_base 21: mod_base = OTHER; note = 2'-O-methyladenosine-3'-phosphorothioate
  modified_base 22: mod_base = OTHER; note = 2'-O-methylguanosine-3'-phosphorothioate
  modified_base 23: mod_base = OTHER; note = 2'-O-methyluridine
aagctgggaaccgtggaggcagt

SEQ ID NO: 1265 - RNA, 23 nt, synthetic construct
  source 1..23: mol_type = other RNA
  modified_base 1: mod_base = OTHER; note = 2'-O-methyladenosine-3'-phosphorothioate
  modified_base 2: mod_base = OTHER; note = 2'-deoxy-2'-fluoroadenosine-3'-phosphorothioate
  modified_base 3: mod_base = OTHER; note = 2'-O-methylcytidine-3'-phosphate
  modified_base 4: mod_base = OTHER; note = 2'-O-methyladenosine-3'-phosphate
  modified_base 5: mod_base = OTHER; note = 2'-O-methylcytidine-3'-phosphate
  modified_base 6: mod_base = OTHER; note = 2'-deoxy-2'-fluoroguanosine-3'-phosphate
  modified_base 7: mod_base = OTHER; note = 2'-O-methylcytidine-3'-phosphate
  modified_base 8: mod_base = OTHER; note = 2'-deoxy-2'-fluorouridine-3'-phosphate
  modified_base 9: mod_base = OTHER; note = 2'-deoxy-2'-fluoroguanosine-3'-phosphate
  modified_base 10: mod_base = OTHER; note = 2'-O-methyladenosine-3'-phosphate
  modified_base 11: mod_base = OTHER; note = 2'-O-methyladenosine-3'-phosphate
  modified_base 12: mod_base = OTHER; note = 2'-O-methylguanosine-3'-phosphate
  modified_base 13: mod_base = OTHER; note = 2'-O-methylguanosine-3'-phosphate
  modified_base 14: mod_base = OTHER; note = 2'-deoxy-2'-fluorouridine-3'-phosphate
  modified_base 15: mod_base = OTHER; note = 2'-O-methyluridine-3'-phosphate
  modified_base 16: mod_base = OTHER; note = 2'-deoxy-2'-fluoroguanosine-3'-phosphate
  modified_base 17: mod_base = OTHER; note = 2'-O-methylguanosine-3'-phosphate
  modified_base 18: mod_base = OTHER; note = 2'-O-methylcytidine-3'-phosphate
  modified_base 19: mod_base = OTHER; note = 2'-O-methyladenosine-3'-phosphate
  modified_base 20: mod_base = OTHER; note = 2'-O-methylguanosine-3'-phosphate
  modified_base 21: mod_base = OTHER; note = 2'-O-methylguanosine-3'-phosphorothioate
  modified_base 22: mod_base = OTHER; note = 2'-O-methylcytidine-3'-phosphorothioate
  modified_base 23: mod_base = OTHER; note = 2'-O-methyluridine
aacacgctgaaggttggcaggct

SEQ ID NO: 1266 - RNA, 23 nt, synthetic construct
  source 1..23: mol_type = other RNA
  modified_base 1: mod_base = OTHER; note = 2'-O-methyladenosine-3'-phosphorothioate
  modified_base 2: mod_base = OTHER; note = 2'-deoxy-2'-fluoroguanosine-3'-phosphorothioate
  modified_base 3: mod_base = OTHER; note = 2'-O-methyluridine-3'-phosphate
  modified_base 4: mod_base = OTHER; note = 2'-O-methylguanosine-3'-phosphate
  modified_base 5: mod_base = OTHER; note = 2'-O-methyladenosine-3'-phosphate
  modified_base 6: mod_base = OTHER; note = 2'-deoxy-2'-fluoroguanosine-3'-phosphate
  modified_base 7: mod_base = OTHER; note = 2'-O-methylguanosine-3'-phosphate
  modified_base 8: mod_base = OTHER; note = 2'-deoxy-2'-fluoroadenosine-3'-phosphate
  modified_base 9: mod_base = OTHER; note = 2'-deoxy-2'-fluorocytidine-3'-phosphate
  modified_base 10: mod_base = OTHER; note = 2'-O-methyluridine-3'-phosphate
  modified_base 11: mod_base = OTHER; note = 2'-O-methylguanosine-3'-phosphate
  modified_base 12: mod_base = OTHER; note = 2'-O-methyladenosine-3'-phosphate
  modified_base 13: mod_base = OTHER; note = 2'-O-methylguanosine-3'-phosphate
  modified_base 14: mod_base = OTHER; note = 2'-deoxy-2'-fluoroguanosine-3'-phosphate
  modified_base 15: mod_base = OTHER; note = 2'-O-methyladenosine-3'-phosphate
  modified_base 16: mod_base = OTHER; note = 2'-deoxy-2'-fluoroguanosine-3'-phosphate
  modified_base 17: mod_base = OTHER; note = 2'-O-methylguanosine-3'-phosphate
  modified_base 18: mod_base = OTHER; note = 2'-O-methyladenosine-3'-phosphate
  modified_base 19: mod_base = OTHER; note = 2'-O-methylcytidine-3'-phosphate
  modified_base 20: mod_base = OTHER; note = 2'-O-methyladenosine-3'-phosphate
  modified_base 21: mod_base = OTHER; note = 2'-O-methylcytidine-3'-phosphorothioate
  modified_base 22: mod_base = OTHER; note = 2'-O-methyladenosine-3'-phosphorothioate
  modified_base 23: mod_base = OTHER; note = 2'-O-methylguanosine
agtgaggactgaggaggacacag

SEQ ID NO: 1267 - RNA, 23 nt, synthetic construct
  source 1..23: mol_type = other RNA
  modified_base 1: mod_base = OTHER; note = 2'-O-methyladenosine-3'-phosphorothioate
  modified_base 2: mod_base = OTHER; note = 2'-deoxy-2'-fluoroguanosine-3'-phosphorothioate
  modified_base 3: mod_base = OTHER; note = 2'-O-methyladenosine-3'-phosphate
  modified_base 4: mod_base = OTHER; note = 2'-O-methylguanosine-3'-phosphate
  modified_base 5: mod_base = OTHER; note = 2'-O-methyluridine-3'-phosphate
  modified_base 6: mod_base = OTHER; note = 2'-deoxy-2'-fluoroadenosine-3'-phosphate
  modified_base 7: mod_base = OTHER; note = 2'-O-methylguanosine-3'-phosphate
  modified_base 8: mod_base = OTHER; note = 2'-deoxy-2'-fluoroadenosine-3'-phosphate
  modified_base 9: mod_base = OTHER; note = 2'-deoxy-2'-fluoroguanosine-3'-phosphate
  modified_base 10: mod_base = OTHER; note = 2'-O-methyladenosine-3'-phosphate
  modified_base 11: mod_base = OTHER; note = 2'-O-methyladenosine-3'-phosphate
  modified_base 12: mod_base = OTHER; note = 2'-O-methylguanosine-3'-phosphate
  modified_base 13: mod_base = OTHER; note = 2'-O-methyluridine-3'-phosphate
  modified_base 14: mod_base = OTHER; note = 2'-deoxy-2'-fluoroguanosine-3'-phosphate
  modified_base 15: mod_base = OTHER; note = 2'-O-methylguanosine-3'-phosphate
  modified_base 16: mod_base = OTHER; note = 2'-deoxy-2'-fluoroguanosine-3'-phosphate
  modified_base 17: mod_base = OTHER; note = 2'-O-methyladenosine-3'-phosphate
  modified_base 18: mod_base = OTHER; note = 2'-O-methylguanosine-3'-phosphate
  modified_base 19: mod_base = OTHER; note = 2'-O-methylcytidine-3'-phosphate
  modified_base 20: mod_base = OTHER; note = 2'-O-methyluridine-3'-phosphate
  modified_base 21: mod_base = OTHER; note = 2'-O-methylguanosine-3'-phosphorothioate
  modified_base 22: mod_base = OTHER; note = 2'-O-methylguanosine-3'-phosphorothioate
  modified_base 23: mod_base = OTHER; note = 2'-O-methylguanosine
agagtagagaagtgggagctggg

SEQ ID NO: 1268 - RNA, 23 nt, synthetic construct
  source 1..23: mol_type = other RNA
  modified_base 1: mod_base = OTHER; note = 2'-O-methyladenosine-3'-phosphorothioate
  modified_base 2: mod_base = OTHER; note = 2'-deoxy-2'-fluoroguanosine-3'-phosphorothioate
  modified_base 3: mod_base = OTHER; note = 2'-O-methyladenosine-3'-phosphate
  modified_base 4: mod_base = OTHER; note = 2'-O-methylguanosine-3'-phosphate
  modified_base 5: mod_base = OTHER; note = 2'-O-methyladenosine-3'-phosphate
  modified_base 6: mod_base = OTHER; note = 2'-deoxy-2'-fluoroadenosine-3'-phosphate
  modified_base 7: mod_base = OTHER; note = 2'-O-methyladenosine-3'-phosphate
  modified_base 8: mod_base = OTHER; note = 2'-deoxy-2'-fluoroadenosine-3'-phosphate
  modified_base 9: mod_base = OTHER; note = 2'-deoxy-2'-fluoroadenosine-3'-phosphate
  modified_base 10: mod_base = OTHER; note = 2'-O-methylcytidine-3'-phosphate
  modified_base 11: mod_base = OTHER; note = 2'-O-methyluridine-3'-phosphate
  modified_base 12: mod_base = OTHER; note = 2'-O-methylguanosine-3'-phosphate
  modified_base 13: mod_base = OTHER; note = 2'-O-methyluridine-3'-phosphate
  modified_base 14: mod_base = OTHER; note = 2'-deoxy-2'-fluorocytidine-3'-phosphate
  modified_base 15: mod_base = OTHER; note = 2'-O-methylcytidine-3'-phosphate
  modified_base 16: mod_base = OTHER; note = 2'-deoxy-2'-fluoroadenosine-3'-phosphate
  modified_base 17: mod_base = OTHER; note = 2'-O-methyladenosine-3'-phosphate
  modified_base 18: mod_base = OTHER; note = 2'-O-methyladenosine-3'-phosphate
  modified_base 19: mod_base = OTHER; note = 2'-O-methyluridine-3'-phosphate
  modified_base 20: mod_base = OTHER; note = 2'-O-methylguanosine-3'-phosphate
  modified_base 21: mod_base = OTHER; note = 2'-O-methylcytidine-3'-phosphorothioate
  modified_base 22: mod_base = OTHER; note = 2'-O-methylcytidine-3'-phosphorothioate
  modified_base 23: mod_base = OTHER; note = 2'-O-methylcytidine
agagaaaaactgtccaaatgccc

SEQ ID NO: 1269 - RNA, 23 nt, synthetic construct
  source 1..23: mol_type = other RNA
  modified_base 1: mod_base = OTHER; note = 2'-O-methyladenosine-3'-phosphorothioate
  modified_base 2: mod_base = OTHER; note = 2'-deoxy-2'-fluoroguanosine-3'-phosphorothioate
  modified_base 3: mod_base = OTHER; note = 2'-O-methyluridine-3'-phosphate
  modified_base 4: mod_base = OTHER; note = 2'-O-methylcytidine-3'-phosphate
  modified_base 5: mod_base = OTHER; note = 2'-O-methyluridine-3'-phosphate
  modified_base 6: mod_base = OTHER; note = 2'-deoxy-2'-fluorouridine-3'-phosphate
  modified_base 7: mod_base = OTHER; note = 2'-O-methyladenosine-3'-phosphate
  modified_base 8: mod_base = OTHER; note = 2'-deoxy-2'-fluorouridine-3'-phosphate
  modified_base 9: mod_base = OTHER; note = 2'-deoxy-2'-fluorouridine-3'-phosphate
  modified_base 10: mod_base = OTHER; note = 2'-O-methylguanosine-3'-phosphate
  modified_base 11: mod_base = OTHER; note = 2'-O-methyluridine-3'-phosphate
  modified_base 12: mod_base = OTHER; note = 2'-O-methyladenosine-3'-phosphate
  modified_base 13: mod_base = OTHER; note = 2'-O-methylguanosine-3'-phosphate
  modified_base 14: mod_base = OTHER; note = 2'-deoxy-2'-fluoroadenosine-3'-phosphate
  modified_base 15: mod_base = OTHER; note = 2'-O-methyluridine-3'-phosphate
  modified_base 16: mod_base = OTHER; note = 2'-deoxy-2'-fluoroguanosine-3'-phosphate
  modified_base 17: mod_base = OTHER; note = 2'-O-methyladenosine-3'-phosphate
  modified_base 18: mod_base = OTHER; note = 2'-O-methylcytidine-3'-phosphate
  modified_base 19: mod_base = OTHER; note = 2'-O-methyluridine-3'-phosphate
  modified_base 20: mod_base = OTHER; note = 2'-O-methyluridine-3'-phosphate
  modified_base 21: mod_base = OTHER; note = 2'-O-methylcytidine-3'-phosphorothioate
  modified_base 22: mod_base = OTHER; note = 2'-O-methylcytidine-3'-phosphorothioate
  modified_base 23: mod_base = OTHER; note = 2'-O-methylcytidine
agtcttattgtagatgacttccc

SEQ ID NO: 1270 - RNA, 23 nt, synthetic construct
  source 1..23: mol_type = other RNA
  modified_base 1: mod_base = OTHER; note = 2'-O-methyladenosine-3'-phosphorothioate
  modified_base 2: mod_base = OTHER; note = 2'-deoxy-2'-fluoroadenosine-3'-phosphorothioate
  modified_base 3: mod_base = OTHER; note = 2'-O-methylcytidine-3'-phosphate
  modified_base 4: mod_base = OTHER; note = 2'-O-methyladenosine-3'-phosphate
  modified_base 5: mod_base = OTHER; note = 2'-O-methylcytidine-3'-phosphate
  modified_base 6: mod_base = OTHER; note = 2'-deoxy-2'-fluorouridine-3'-phosphate
  modified_base 7: mod_base = OTHER; note = 2'-O-methylguanosine-3'-phosphate
  modified_base 8: mod_base = OTHER; note = 2'-deoxy-2'-fluorocytidine-3'-phosphate
  modified_base 9: mod_base = OTHER; note = 2'-deoxy-2'-fluoroguanosine-3'-phosphate
  modified_base 10: mod_base = OTHER; note = 2'-O-methyluridine-3'-phosphate
  modified_base 11: mod_base = OTHER; note = 2'-O-methyladenosine-3'-phosphate
  modified_base 12: mod_base = OTHER; note = 2'-O-methylguanosine-3'-phosphate
  modified_base 13: mod_base = OTHER; note = 2'-O-methyladenosine-3'-phosphate
  modified_base 14: mod_base = OTHER; note = 2'-deoxy-2'-fluoroadenosine-3'-phosphate
  modified_base 15: mod_base = OTHER; note = 2'-O-methyladenosine-3'-phosphate
  modified_base 16: mod_base = OTHER; note = 2'-deoxy-2'-fluorouridine-3'-phosphate
  modified_base 17: mod_base = OTHER; note = 2'-O-methylguanosine-3'-phosphate
  modified_base 18: mod_base = OTHER; note = 2'-O-methylguanosine-3'-phosphate
  modified_base 19: mod_base = OTHER; note = 2'-O-methylcytidine-3'-phosphate
  modified_base 20: mod_base = OTHER; note = 2'-O-methyladenosine-3'-phosphate
  modified_base 21: mod_base = OTHER; note = 2'-O-methylguanosine-3'-phosphorothioate
  modified_base 22: mod_base = OTHER; note = 2'-O-methylcytidine-3'-phosphorothioate
  modified_base 23: mod_base = OTHER; note = 2'-O-methylcytidine
aacactgcgtagaaatggcagcc

SEQ ID NO: 1271 - RNA, 23 nt, synthetic construct
  source 1..23: mol_type = other RNA
  modified_base 1: mod_base = OTHER; note = 2'-O-methyladenosine-3'-phosphorothioate
  modified_base 2: mod_base = OTHER; note = 2'-deoxy-2'-fluoroadenosine-3'-phosphorothioate
  modified_base 3: mod_base = OTHER; note = 2'-O-methyladenosine-3'-phosphate
  modified_base 4: mod_base = OTHER; note = 2'-O-methylguanosine-3'-phosphate
  modified_base 5: mod_base = OTHER; note = 2'-O-methylcytidine-3'-phosphate
  modified_base 6: mod_base = OTHER; note = 2'-deoxy-2'-fluoroguanosine-3'-phosphate
  modified_base 7: mod_base = OTHER; note = 2'-O-methylguanosine-3'-phosphate
  modified_base 8: mod_base = OTHER; note = 2'-deoxy-2'-fluorouridine-3'-phosphate
  modified_base 9: mod_base = OTHER; note = 2'-deoxy-2'-fluorocytidine-3'-phosphate
  modified_base 10: mod_base = OTHER; note = 2'-O-methyladenosine-3'-phosphate
  modified_base 11: mod_base = OTHER; note = 2'-O-methyladenosine-3'-phosphate
  modified_base 12: mod_base = OTHER; note = 2'-O-methyluridine-3'-phosphate
  modified_base 13: mod_base = OTHER; note = 2'-O-methylguanosine-3'-phosphate
  modified_base 14: mod_base = OTHER; note = 2'-deoxy-2'-fluorouridine-3'-phosphate
  modified_base 15: mod_base = OTHER; note = 2'-O-methylcytidine-3'-phosphate
  modified_base 16: mod_base = OTHER; note = 2'-deoxy-2'-fluoroadenosine-3'-phosphate
  modified_base 17: mod_base = OTHER; note = 2'-O-methylcytidine-3'-phosphate
  modified_base 18: mod_base = OTHER; note = 2'-O-methyladenosine-3'-phosphate
  modified_base 19: mod_base = OTHER; note = 2'-O-methylguanosine-3'-phosphate
  modified_base 20: mod_base = OTHER; note = 2'-O-methyluridine-3'-phosphate
  modified_base 21: mod_base = OTHER; note = 2'-O-methylguanosine-3'-phosphorothioate
  modified_base 22: mod_base = OTHER; note = 2'-O-methylcytidine-3'-phosphorothioate
  modified_base 23: mod_base = OTHER; note = 2'-O-methyluridine
aaagcggtcaatgtcacagtgct

SEQ ID NO: 1272 - RNA, 23 nt, synthetic construct
  source 1..23: mol_type = other RNA
  modified_base 1: mod_base = OTHER; note = 2'-O-methyladenosine-3'-phosphorothioate
  modified_base 2: mod_base = OTHER; note = 2'-deoxy-2'-fluoroadenosine-3'-phosphorothioate
  modified_base 3: mod_base = OTHER; note = 2'-O-methylguanosine-3'-phosphate
  modified_base 4: mod_base = OTHER; note = 2'-O-methyladenosine-3'-phosphate
  modified_base 5: mod_base = OTHER; note = 2'-O-methylguanosine-3'-phosphate
  modified_base 6: mod_base = OTHER; note = 2'-deoxy-2'-fluoroguanosine-3'-phosphate
  modified_base 7: mod_base = OTHER; note = 2'-O-methylguanosine-3'-phosphate
  modified_base 8: mod_base = OTHER; note = 2'-deoxy-2'-fluoroadenosine-3'-phosphate
  modified_base 9: mod_base = OTHER; note = 2'-deoxy-2'-fluorouridine-3'-phosphate
  modified_base 10: mod_base = OTHER; note = 2'-O-methylguanosine-3'-phosphate
  modified_base 11: mod_base = OTHER; note = 2'-O-methylguanosine-3'-phosphate
  modified_base 12: mod_base = OTHER; note = 2'-O-methylcytidine-3'-phosphate
  modified_base 13: mod_base = OTHER; note = 2'-O-methyladenosine-3'-phosphate
  modified_base 14: mod_base = OTHER; note = 2'-deoxy-2'-fluorouridine-3'-phosphate
  modified_base 15: mod_base = OTHER; note = 2'-O-methyluridine-3'-phosphate
  modified_base 16: mod_base = OTHER; note = 2'-deoxy-2'-fluoroguanosine-3'-phosphate
  modified_base 17: mod_base = OTHER; note = 2'-O-methyluridine-3'-phosphate
  modified_base 18: mod_base = OTHER; note = 2'-O-methylcytidine-3'-phosphate
  modified_base 19: mod_base = OTHER; note = 2'-O-methyladenosine-3'-phosphate
  modified_base 20: mod_base = OTHER; note = 2'-O-methylcytidine-3'-phosphate
  modified_base 21: mod_base = OTHER; note = 2'-O-methyladenosine-3'-phosphorothioate
  modified_base 22: mod_base = OTHER; note = 2'-O-methylguanosine-3'-phosphorothioate
  modified_base 23: mod_base = OTHER; note = 2'-O-methylcytidine
aagagggatggcattgtcacagc

SEQ ID NO: 1273 - RNA, 23 nt, synthetic construct
  source 1..23: mol_type = other RNA
  modified_base 1: mod_base = OTHER; note = 2'-O-methyladenosine-3'-phosphorothioate
  modified_base 2: mod_base = OTHER; note = 2'-deoxy-2'-fluoroadenosine-3'-phosphorothioate
  modified_base 3: mod_base = OTHER; note = 2'-O-methylcytidine-3'-phosphate
  modified_base 4: mod_base = OTHER; note = 2'-O-methylcytidine-3'-phosphate
  modified_base 5: mod_base = OTHER; note = 2'-O-methylguanosine-3'-phosphate
  modified_base 6: mod_base = OTHER; note = 2'-deoxy-2'-fluorouridine-3'-phosphate
  modified_base 7: mod_base = OTHER; note = 2'-O-methylguanosine-3'-phosphate
  modified_base 8: mod_base = OTHER; note = 2'-deoxy-2'-fluorocytidine-3'-phosphate
  modified_base 9: mod_base = OTHER; note = 2'-deoxy-2'-fluoroadenosine-3'-phosphate
  modified_base 10: mod_base = OTHER; note = 2'-O-methylguanosine-3'-phosphate
  modified_base 11: mod_base = OTHER; note = 2'-O-methyluridine-3'-phosphate
  modified_base 12: mod_base = OTHER; note = 2'-O-methyluridine-3'-phosphate
  modified_base 13: mod_base = OTHER; note = 2'-O-methylcytidine-3'-phosphate
  modified_base 14: mod_base = OTHER; note = 2'-deoxy-2'-fluorouridine-3'-phosphate
  modified_base 15: mod_base = OTHER; note = 2'-O-methylcytidine-3'-phosphate
  modified_base 16: mod_base = OTHER; note = 2'-deoxy-2'-fluorocytidine-3'-phosphate
  modified_base 17: mod_base = OTHER; note = 2'-O-methyladenosine-3'-phosphate
  modified_base 18: mod_base = OTHER; note = 2'-O-methylguanosine-3'-phosphate
  modified_base 19: mod_base = OTHER; note = 2'-O-methylguanosine-3'-phosphate
  modified_base 20: mod_base = OTHER; note = 2'-O-methylguanosine-3'-phosphate
  modified_base 21: mod_base = OTHER; note = 2'-O-methyluridine-3'-phosphorothioate
  modified_base 22: mod_base = OTHER; note = 2'-O-methylcytidine-3'-phosphorothioate
  modified_base 23: mod_base = OTHER; note = 2'-O-methylcytidine
aaccgtgcagttctccagggtcc

SEQ ID NO: 1274 - RNA, 23 nt, synthetic construct
  source 1..23: mol_type = other RNA
  modified_base 1: mod_base = OTHER; note = 2'-O-methyladenosine-3'-phosphorothioate
  modified_base 2: mod_base = OTHER; note = 2'-deoxy-2'-fluoroadenosine-3'-phosphorothioate
  modified_base 3: mod_base = OTHER; note = 2'-O-methylcytidine-3'-phosphate
  modified_base 4: mod_base = OTHER; note = 2'-O-methylguanosine-3'-phosphate
  modified_base 5: mod_base = OTHER; note = 2'-O-methyladenosine-3'-phosphate
  modified_base 6: mod_base = OTHER; note = 2'-deoxy-2'-fluorocytidine-3'-phosphate
  modified_base 7: mod_base = OTHER; note = 2'-O-methyladenosine-3'-phosphate
  modified_base 8: mod_base = OTHER; note = 2'-deoxy-2'-fluorocytidine-3'-phosphate
  modified_base 9: mod_base = OTHER; note = 2'-deoxy-2'-fluoroguanosine-3'-phosphate
  modified_base 10: mod_base = OTHER; note = 2'-O-methylguanosine-3'-phosphate
  modified_base 11: mod_base = OTHER; note = 2'-O-methyluridine-3'-phosphate
  modified_base 12: mod_base = OTHER; note = 2'-O-methyluridine-3'-phosphate
  modified_base 13: mod_base = OTHER; note = 2'-O-methylguanosine-3'-phosphate
  modified_base 14: mod_base = OTHER; note = 2'-deoxy-2'-fluorouridine-3'-phosphate
  modified_base 15: mod_base = OTHER; note = 2'-O-methylcytidine-3'-phosphate
  modified_base 16: mod_base = OTHER; note = 2'-deoxy-2'-fluoroadenosine-3'-phosphate
  modified_base 17: mod_base = OTHER; note = 2'-O-methylcytidine-3'-phosphate
  modified_base 18: mod_base = OTHER; note = 2'-O-methylcytidine-3'-phosphate
  modified_base 19: mod_base = OTHER; note = 2'-O-methylcytidine-3'-phosphate
  modified_base 20: mod_base = OTHER; note = 2'-O-methyladenosine-3'-phosphate
  modified_base 21: mod_base = OTHER; note = 2'-O-methylcytidine-3'-phosphorothioate
  modified_base 22: mod_base = OTHER; note = 2'-O-methylguanosine-3'-phosphorothioate
  modified_base 23: mod_base = OTHER; note = 2'-O-methylcytidine
aacgacacggttgtcacccacgc

SEQ ID NO: 1275 - RNA, 23 nt, synthetic construct
  source 1..23: mol_type = other RNA
  modified_base 1: mod_base = OTHER; note = 2'-O-methyladenosine-3'-phosphorothioate
  modified_base 2: mod_base = OTHER; note = 2'-deoxy-2'-fluorouridine-3'-phosphorothioate
  modified_base 3: mod_base = OTHER; note = 2'-O-methyluridine-3'-phosphate
  modified_base 4: mod_base = OTHER; note = 2'-O-methylguanosine-3'-phosphate
  modified_base 5: mod_base = OTHER; note = 2'-O-methylguanosine-3'-phosphate
  modified_base 6: mod_base = OTHER; note = 2'-deoxy-2'-fluorocytidine-3'-phosphate
  modified_base 7: mod_base = OTHER; note = 2'-O-methylcytidine-3'-phosphate
  modified_base 8: mod_base = OTHER; note = 2'-deoxy-2'-fluoroadenosine-3'-phosphate
  modified_base 9: mod_base = OTHER; note = 2'-deoxy-2'-fluorocytidine-3'-phosphate
  modified_base 10: mod_base = OTHER; note = 2'-O-methyladenosine-3'-phosphate
  modified_base 11: mod_base = OTHER; note = 2'-O-methylguanosine-3'-phosphate
  modified_base 12: mod_base = OTHER; note = 2'-O-methylguanosine-3'-phosphate
  modified_base 13: mod_base = OTHER; note = 2'-O-methylcytidine-3'-phosphate
  modified_base 14: mod_base = OTHER; note = 2'-deoxy-2'-fluorouridine-3'-phosphate
  modified_base 15: mod_base = OTHER; note = 2'-O-methyluridine-3'-phosphate
  modified_base 16: mod_base = OTHER; note = 2'-deoxy-2'-fluorouridine-3'-phosphate
  modified_base 17: mod_base = OTHER; note = 2'-O-methylguanosine-3'-phosphate
  modified_base 18: mod_base = OTHER; note = 2'-O-methylguanosine-3'-phosphate
  modified_base 19: mod_base = OTHER; note = 2'-O-methylguanosine-3'-phosphate
  modified_base 20: mod_base = OTHER; note = 2'-O-methyluridine-3'-phosphate
  modified_base 21: mod_base = OTHER; note = 2'-O-methylcytidine-3'-phosphorothioate
  modified_base 22: mod_base = OTHER; note = 2'-O-methylcytidine-3'-phosphorothioate
  modified_base 23: mod_base = OTHER; note = 2'-O-methyladenosine
attggccacaggctttgggtcca

SEQ ID NO: 1276 - RNA, 23 nt, synthetic construct
  source 1..23: mol_type = other RNA
  modified_base 1: mod_base = OTHER; note = 2'-O-methyladenosine-3'-phosphorothioate
  modified_base 2: mod_base = OTHER; note = 2'-deoxy-2'-fluoroguanosine-3'-phosphorothioate
  modified_base 3: mod_base = OTHER; note = 2'-O-methylcytidine-3'-phosphate
  modified_base 4: mod_base = OTHER; note = 2'-O-methyladenosine-3'-phosphate
  modified_base 5: mod_base = OTHER; note = 2'-O-methylguanosine-3'-phosphate
  modified_base 6: mod_base = OTHER; note = 2'-deoxy-2'-fluoroguanosine-3'-phosphate
  modified_base 7: mod_base = OTHER; note = 2'-O-methyluridine-3'-phosphate
  modified_base 8: mod_base = OTHER; note = 2'-deoxy-2'-fluoroguanosine-3'-phosphate
  modified_base 9: mod_base = OTHER; note = 2'-deoxy-2'-fluorocytidine-3'-phosphate
  modified_base 10: mod_base = OTHER; note = 2'-O-methyluridine-3'-phosphate
  modified_base 11: mod_base = OTHER; note = 2'-O-methyluridine-3'-phosphate
  modified_base 12: mod_base = OTHER; note = 2'-O-methylguanosine-3'-phosphate
  modified_base 13: mod_base = OTHER; note = 2'-O-methyluridine-3'-phosphate
  modified_base 14: mod_base = OTHER; note = 2'-deoxy-2'-fluorouridine-3'-phosphate
  modified_base 15: mod_base = OTHER; note = 2'-O-methylcytidine-3'-phosphate
  modified_base 16: mod_base = OTHER; note = 2'-deoxy-2'-fluoroadenosine-3'-phosphate
  modified_base 17: mod_base = OTHER; note = 2'-O-methylcytidine-3'-phosphate
  modified_base 18: mod_base = OTHER; note = 2'-O-methylguanosine-3'-phosphate
  modified_base 19: mod_base = OTHER; note = 2'-O-methylcytidine-3'-phosphate
  modified_base 20: mod_base = OTHER; note = 2'-O-methyladenosine-3'-phosphate
  modified_base 21: mod_base = OTHER; note = 2'-O-methylguanosine-3'-phosphorothioate
  modified_base 22: mod_base = OTHER; note = 2'-O-methylguanosine-3'-phosphorothioate
  modified_base 23: mod_base = OTHER; note = 2'-O-methyluridine
agcaggtgcttgttcacgcaggt

SEQ ID NO: 1277 - RNA, 23 nt, synthetic construct
  source 1..23: mol_type = other RNA
  modified_base 1: mod_base = OTHER; note = 2'-O-methyladenosine-3'-phosphorothioate
  modified_base 2: mod_base = OTHER; note = 2'-deoxy-2'-fluoroguanosine-3'-phosphorothioate
  modified_base 3: mod_base = OTHER; note = 2'-O-methylcytidine-3'-phosphate
  modified_base 4: mod_base = OTHER; note = 2'-O-methyluridine-3'-phosphate
  modified_base 5: mod_base = OTHER; note = 2'-O-methylcytidine-3'-phosphate
  modified_base 6: mod_base = OTHER; note = 2'-deoxy-2'-fluoroguanosine-3'-phosphate
  modified_base 7: mod_base = OTHER; note = 2'-O-methylguanosine-3'-phosphate
  modified_base 8: mod_base = OTHER; note = 2'-deoxy-2'-fluoroguanosine-3'-phosphate
  modified_base 9: mod_base = OTHER; note = 2'-deoxy-2'-fluorouridine-3'-phosphate
  modified_base 10: mod_base = OTHER; note = 2'-O-methylcytidine-3'-phosphate
  modified_base 11: mod_base = OTHER; note = 2'-O-methylcytidine-3'-phosphate
  modified_base 12: mod_base = OTHER; note = 2'-O-methylguanosine-3'-phosphate
  modified_base 13: mod_base = OTHER; note = 2'-O-methyladenosine-3'-phosphate
  modified_base 14: mod_base = OTHER; note = 2'-deoxy-2'-fluorocytidine-3'-phosphate
  modified_base 15: mod_base = OTHER; note = 2'-O-methyladenosine-3'-phosphate
  modified_base 16: mod_base = OTHER; note = 2'-deoxy-2'-fluorocytidine-3'-phosphate
  modified_base 17: mod_base = OTHER; note = 2'-O-methyluridine-3'-phosphate
  modified_base 18: mod_base = OTHER; note = 2'-O-methyluridine-3'-phosphate
  modified_base 19: mod_base = OTHER; note = 2'-O-methyluridine-3'-phosphate
  modified_base 20: mod_base = OTHER; note = 2'-O-methylguanosine-3'-phosphate
  modified_base 21: mod_base = OTHER; note = 2'-O-methyladenosine-3'-phosphorothioate
  modified_base 22: mod_base = OTHER; note = 2'-O-methyluridine-3'-phosphorothioate
  modified_base 23: mod_base = OTHER; note = 2'-O-methylguanosine
agctcgggtccgacactttgatg

SEQ ID NO: 1278 - RNA, 23 nt, synthetic construct
  source 1..23: mol_type = other RNA
  modified_base 1: mod_base = OTHER; note = 2'-O-methyladenosine-3'-phosphorothioate
  modified_base 2: mod_base = OTHER; note = 2'-deoxy-2'-fluoroadenosine-3'-phosphorothioate
  modified_base 3: mod_base = OTHER; note = 2'-O-methylcytidine-3'-phosphate
  modified_base 4: mod_base = OTHER; note = 2'-O-methyluridine-3'-phosphate
  modified_base 5: mod_base = OTHER; note = 2'-O-methylcytidine-3'-phosphate
  modified_base 6: mod_base = OTHER; note = 2'-deoxy-2'-fluoroadenosine-3'-phosphate
  modified_base 7: mod_base = OTHER; note = 2'-O-methyluridine-3'-phosphate
  modified_base 8: mod_base = OTHER; note = 2'-deoxy-2'-fluoroadenosine-3'-phosphate
  modified_base 9: mod_base = OTHER; note = 2'-deoxy-2'-fluoroguanosine-3'-phosphate
  modified_base 10: mod_base = OTHER; note = 2'-O-methyluridine-3'-phosphate
  modified_base 11: mod_base = OTHER; note = 2'-O-methylguanosine-3'-phosphate
  modified_base 12: mod_base = OTHER; note = 2'-O-methylguanosine-3'-phosphate
  modified_base 13: mod_base = OTHER; note = 2'-O-methyladenosine-3'-phosphate
  modified_base 14: mod_base = OTHER; note = 2'-deoxy-2'-fluoroadenosine-3'-phosphate
  modified_base 15: mod_base = OTHER; note = 2'-O-methylguanosine-3'-phosphate
  modified_base 16: mod_base = OTHER; note = 2'-deoxy-2'-fluorouridine-3'-phosphate
  modified_base 17: mod_base = OTHER; note = 2'-O-methylcytidine-3'-phosphate
  modified_base 18: mod_base = OTHER; note = 2'-O-methyladenosine-3'-phosphate
  modified_base 19: mod_base = OTHER; note = 2'-O-methylcytidine-3'-phosphate
  modified_base 20: mod_base = OTHER; note = 2'-O-methyladenosine-3'-phosphate
  modified_base 21: mod_base = OTHER; note = 2'-O-methylguanosine-3'-phosphorothioate
  modified_base 22: mod_base = OTHER; note = 2'-O-methylguanosine-3'-phosphorothioate
  modified_base 23: mod_base = OTHER; note = 2'-O-methylguanosine
aactcatagtggaagtcacaggg

SEQ ID NO: 1279 - RNA, 23 nt, synthetic construct
  source 1..23: mol_type = other RNA
  modified_base 1: mod_base = OTHER; note = 2'-O-methyladenosine-3'-phosphorothioate
  modified_base 2: mod_base = OTHER; note = 2'-deoxy-2'-fluorocytidine-3'-phosphorothioate
  modified_base 3: mod_base = OTHER; note = 2'-O-methylcytidine-3'-phosphate
  modified_base 4: mod_base = OTHER; note = 2'-O-methyladenosine-3'-phosphate
  modified_base 5: mod_base = OTHER; note = 2'-O-methylcytidine-3'-phosphate
  modified_base 6: mod_base = OTHER; note = 2'-deoxy-2'-fluoroadenosine-3'-phosphate
  modified_base 7: mod_base = OTHER; note = 2'-O-methyluridine-3'-phosphate
  modified_base 8: mod_base = OTHER; note = 2'-deoxy-2'-fluoroguanosine-3'-phosphate
  modified_base 9: mod_base = OTHER; note = 2'-deoxy-2'-fluorocytidine-3'-phosphate
  modified_base 10: mod_base = OTHER; note = 2'-O-methyluridine-3'-phosphate
  modified_base 11: mod_base = OTHER; note = 2'-O-methylguanosine-3'-phosphate
  modified_base 12: mod_base = OTHER; note = 2'-O-methylcytidine-3'-phosphate
  modified_base 13: mod_base = OTHER; note = 2'-O-methyladenosine-3'-phosphate
  modified_base 14: mod_base = OTHER; note = 2'-deoxy-2'-fluoroguanosine-3'-phosphate
  modified_base 15: mod_base = OTHER; note = 2'-O-methyladenosine-3'-phosphate
  modified_base 16: mod_base = OTHER; note = 2'-deoxy-2'-fluorouridine-3'-phosphate
  modified_base 17: mod_base = OTHER; note = 2'-O-methylguanosine-3'-phosphate
  modified_base 18: mod_base = OTHER; note = 2'-O-methylcytidine-3'-phosphate
  modified_base 19: mod_base = OTHER; note = 2'-O-methyladenosine-3'-phosphate
  modified_base 20: mod_base = OTHER; note = 2'-O-methylcytidine-3'-phosphate
  modified_base 21: mod_base = OTHER; note = 2'-O-methyluridine-3'-phosphorothioate
  modified_base 22: mod_base = OTHER; note = 2'-O-methylcytidine-3'-phosphorothioate
  modified_base 23: mod_base = OTHER; note = 2'-O-methylguanosine
accacatgctgcagatgcactcg

SEQ ID NO: 1280 - RNA, 23 nt, synthetic construct
  source 1..23: mol_type = other RNA
  modified_base 1: mod_base = OTHER; note = 2'-O-methyladenosine-3'-phosphorothioate
  modified_base 2: mod_base = OTHER; note = 2'-deoxy-2'-fluoroguanosine-3'-phosphorothioate
  modified_base 3: mod_base = OTHER; note = 2'-O-methyluridine-3'-phosphate
  modified_base 4: mod_base = OTHER; note = 2'-O-methylcytidine-3'-phosphate
  modified_base 5: mod_base = OTHER; note = 2'-O-methyladenosine-3'-phosphate
  modified_base 6: mod_base = OTHER; note = 2'-deoxy-2'-fluoroadenosine-3'-phosphate
  modified_base 7: mod_base = OTHER; note = 2'-O-methyladenosine-3'-phosphate
  modified_base 8: mod_base = OTHER; note = 2'-deoxy-2'-fluoroguanosine-3'-phosphate
  modified_base 9: mod_base = OTHER; note = 2'-deoxy-2'-fluoroguanosine-3'-phosphate
  modified_base 10: mod_base = OTHER; note = 2'-O-methyluridine-3'-phosphate
  modified_base 11: mod_base = OTHER; note = 2'-O-methylguanosine-3'-phosphate
  modified_base 12: mod_base = OTHER; note = 2'-O-methylguanosine-3'-phosphate
  modified_base 13: mod_base = OTHER; note = 2'-O-methyladenosine-3'-phosphate
  modified_base 14: mod_base = OTHER; note = 2'-deoxy-2'-fluoroadenosine-3'-phosphate
  modified_base 15: mod_base = OTHER; note = 2'-O-methyluridine-3'-phosphate
  modified_base 16: mod_base = OTHER; note = 2'-deoxy-2'-fluoroadenosine-3'-phosphate
  modified_base 17: mod_base = OTHER; note = 2'-O-methylguanosine-3'-phosphate
  modified_base 18: mod_base = OTHER; note = 2'-O-methyluridine-3'-phosphate
  modified_base 19: mod_base = OTHER; note = 2'-O-methylguanosine-3'-phosphate
  modified_base 20: mod_base = OTHER; note = 2'-O-methylguanosine-3'-phosphate
  modified_base 21: mod_base = OTHER; note = 2'-O-methylguanosine-3'-phosphorothioate
  modified_base 22: mod_base = OTHER; note = 2'-O-methyladenosine-3'-phosphorothioate
  modified_base 23: mod_base = OTHER; note = 2'-O-methylguanosine
agtcaaaggtggaatagtgggag

SEQ ID NO: 1281 - RNA, 23 nt, synthetic construct
  source 1..23: mol_type = other RNA
  modified_base 1: mod_base = OTHER; note = 2'-O-methyladenosine-3'-phosphorothioate
  modified_base 2: mod_base = OTHER; note = 2'-deoxy-2'-fluorouridine-3'-phosphorothioate
  modified_base 3: mod_base = OTHER; note = 2'-O-methylcytidine-3'-phosphate
  modified_base 4: mod_base = OTHER; note = 2'-O-methyluridine-3'-phosphate
  modified_base 5: mod_base = OTHER; note = 2'-O-methylcytidine-3'-phosphate
  modified_base 6: mod_base = OTHER; note = 2'-deoxy-2'-fluorouridine-3'-phosphate
  modified_base 7: mod_base = OTHER; note = 2'-O-methylcytidine-3'-phosphate
  modified_base 8: mod_base = OTHER; note = 2'-deoxy-2'-fluoroadenosine-3'-phosphate
  modified_base 9: mod_base = OTHER; note = 2'-deoxy-2'-fluorouridine-3'-phosphate
  modified_base 10: mod_base = OTHER; note = 2'-O-methylguanosine-3'-phosphate
  modified_base 11: mod_base = OTHER; note = 2'-O-methyladenosine-3'-phosphate
  modified_base 12: mod_base = OTHER; note = 2'-O-methylguanosine-3'-phosphate
  modified_base 13: mod_base = OTHER; note = 2'-O-methylguanosine-3'-phosphate
  modified_base 14: mod_base = OTHER; note = 2'-deoxy-2'-fluoroadenosine-3'-phosphate
  modified_base 15: mod_base = OTHER; note = 2'-O-methylcytidine-3'-phosphate
  modified_base 16: mod_base = OTHER; note = 2'-deoxy-2'-fluoroadenosine-3'-phosphate
  modified_base 17: mod_base = OTHER; note = 2'-O-methyluridine-3'-phosphate
  modified_base 18: mod_base = OTHER; note = 2'-O-methyladenosine-3'-phosphate
  modified_base 19: mod_base = OTHER; note = 2'-O-methylguanosine-3'-phosphate
  modified_base 20: mod_base = OTHER; note = 2'-O-methylguanosine-3'-phosphate
  modified_base 21: mod_base = OTHER; note = 2'-O-methyluridine-3'-phosphorothioate
  modified_base 22: mod_base = OTHER; note = 2'-O-methylguanosine-3'-phosphorothioate
  modified_base 23: mod_base = OTHER; note = 2'-O-methylcytidine
atctctcatgaggacataggtgc

SEQ ID NO: 1282 - RNA, 23 nt, synthetic construct
  source 1..23: mol_type = other RNA
  modified_base 1: mod_base = OTHER; note = 2'-O-methyladenosine-3'-phosphorothioate
  modified_base 2: mod_base = OTHER; note = 2'-deoxy-2'-fluoroguanosine-3'-phosphorothioate
  modified_base 3: mod_base = OTHER; note = 2'-O-methylcytidine-3'-phosphate
  modified_base 4: mod_base = OTHER; note = 2'-O-methyluridine-3'-phosphate
  modified_base 5: mod_base = OTHER; note = 2'-O-methylguanosine-3'-phosphate
  modified_base 6: mod_base = OTHER; note = 2'-deoxy-2'-fluoroadenosine-3'-phosphate
  modified_base 7: mod_base = OTHER; note = 2'-O-methylguanosine-3'-phosphate
  modified_base 8: mod_base = OTHER; note = 2'-deoxy-2'-fluoroadenosine-3'-phosphate
  modified_base 9: mod_base = OTHER; note = 2'-deoxy-2'-fluorouridine-3'-phosphate
  modified_base 10: mod_base = OTHER; note = 2'-O-methyluridine-3'-phosphate
  modified_base 11: mod_base = OTHER; note = 2'-O-methylcytidine-3'-phosphate
  modified_base 12: mod_base = OTHER; note = 2'-O-methylcytidine-3'-phosphate
  modified_base 13: mod_base = OTHER; note = 2'-O-methylcytidine-3'-phosphate
  modified_base 14: mod_base = OTHER; note = 2'-deoxy-2'-fluoroadenosine-3'-phosphate
  modified_base 15: mod_base = OTHER; note = 2'-O-methyladenosine-3'-phosphate
  modified_base 16: mod_base = OTHER; note = 2'-deoxy-2'-fluoroadenosine-3'-phosphate
  modified_base 17: mod_base = OTHER; note = 2'-O-methylguanosine-3'-phosphate
  modified_base 18: mod_base = OTHER; note = 2'-O-methylcytidine-3'-phosphate
  modified_base 19: mod_base = OTHER; note = 2'-O-methylguanosine-3'-phosphate
  modified_base 20: mod_base = OTHER; note = 2'-O-methyluridine-3'-phosphate
  modified_base 21: mod_base = OTHER; note = 2'-O-methylguanosine-3'-phosphorothioate
  modified_base 22: mod_base = OTHER; note = 2'-O-methylcytidine-3'-phosphorothioate
  modified_base 23: mod_base = OTHER; note = 2'-O-methyladenosine
agctgagattcccaaagcgtgca

SEQ ID NO: 1283 - RNA, 23 nt, synthetic construct
  source 1..23: mol_type = other RNA
  modified_base 1: mod_base = OTHER; note = 2'-O-methyladenosine-3'-phosphorothioate
  modified_base 2: mod_base = OTHER; note = 2'-deoxy-2'-fluoroguanosine-3'-phosphorothioate
  modified_base 3: mod_base = OTHER; note = 2'-O-methyluridine-3'-phosphate
  modified_base 4: mod_base = OTHER; note = 2'-O-methylguanosine-3'-phosphate
  modified_base 5: mod_base = OTHER; note = 2'-O-methylcytidine-3'-phosphate
  modified_base 6: mod_base = OTHER; note = 2'-deoxy-2'-fluoroadenosine-3'-phosphate
  modified_base 7: mod_base = OTHER; note = 2'-O-methylguanosine-3'-phosphate
  modified_base 8: mod_base = OTHER; note = 2'-deoxy-2'-fluorouridine-3'-phosphate
  modified_base 9: mod_base = OTHER; note = 2'-deoxy-2'-fluoroadenosine-3'-phosphate
  modified_base 10: mod_base = OTHER; note = 2'-O-methylguanosine-3'-phosphate
  modified_base 11: mod_base = OTHER; note = 2'-O-methyluridine-3'-phosphate
  modified_base 12: mod_base = OTHER; note = 2'-O-methylguanosine-3'-phosphate
  modified_base 13: mod_base = OTHER; note = 2'-O-methylguanosine-3'-phosphate
  modified_base 14: mod_base = OTHER; note = 2'-deoxy-2'-fluorouridine-3'-phosphate
  modified_base 15: mod_base = OTHER; note = 2'-O-methyluridine-3'-phosphate
  modified_base 16: mod_base = OTHER; note = 2'-deoxy-2'-fluoroguanosine-3'-phosphate
  modified_base 17: mod_base = OTHER; note = 2'-O-methyluridine-3'-phosphate
  modified_base 18: mod_base = OTHER; note = 2'-O-methylcytidine-3'-phosphate
  modified_base 19: mod_base = OTHER; note = 2'-O-methylcytidine-3'-phosphate
  modified_base 20: mod_base = OTHER; note = 2'-O-methyladenosine-3'-phosphate
  modified_base 21: mod_base = OTHER; note = 2'-O-methylguanosine-3'-phosphorothioate
  modified_base 22: mod_base = OTHER; note = 2'-O-methylguanosine-3'-phosphorothioate
  modified_base 23: mod_base = OTHER; note = 2'-O-methyluridine
agtgcagtagtggttgtccaggt

SEQ ID NO: 1284 - RNA, 23 nt, synthetic construct
  source 1..23: mol_type = other RNA
  modified_base 1: mod_base = OTHER; note = 2'-O-methyladenosine-3'-phosphorothioate
  modified_base 2: mod_base = OTHER; note = 2'-deoxy-2'-fluoroadenosine-3'-phosphorothioate
  modified_base 3: mod_base = OTHER; note = 2'-O-methylcytidine-3'-phosphate
  modified_base 4: mod_base = OTHER; note = 2'-O-methyluridine-3'-phosphate
  modified_base 5: mod_base = OTHER; note = 2'-O-methyluridine-3'-phosphate
  modified_base 6: mod_base = OTHER; note = 2'-deoxy-2'-fluoroguanosine-3'-phosphate
  modified_base 7: mod_base = OTHER; note = 2'-O-methyluridine-3'-phosphate
  modified_base 8: mod_base = OTHER; note = 2'-deoxy-2'-fluoroadenosine-3'-phosphate
  modified_base 9: mod_base = OTHER; note = 2'-deoxy-2'-fluoroguanosine-3'-phosphate
  modified_base 10: mod_base = OTHER; note = 2'-O-methyluridine-3'-phosphate
  modified_base 11: mod_base = OTHER; note = 2'-O-methylguanosine-3'-phosphate
  modified_base 12: mod_base = OTHER; note = 2'-O-methylguanosine-3'-phosphate
  modified_base 13: mod_base = OTHER; note = 2'-O-methyladenosine-3'-phosphate
  modified_base 14: mod_base = OTHER; note = 2'-deoxy-2'-fluorouridine-3'-phosphate
  modified_base 15: mod_base = OTHER; note = 2'-O-methylguanosine-3'-phosphate
  modified_base 16: mod_base = OTHER; note = 2'-deoxy-2'-fluorocytidine-3'-phosphate
  modified_base 17: mod_base = OTHER; note = 2'-O-methyluridine-3'-phosphate
  modified_base 18: mod_base = OTHER; note = 2'-O-methylguanosine-3'-phosphate
  modified_base 19: mod_base = OTHER; note = 2'-O-methyladenosine-3'-phosphate
  modified_base 20: mod_base = OTHER; note = 2'-O-methylguanosine-3'-phosphate
  modified_base 21: mod_base = OTHER; note = 2'-O-methylguanosine-3'-phosphorothioate
  modified_base 22: mod_base = OTHER; note = 2'-O-methylguanosine-3'-phosphorothioate
  modified_base 23: mod_base = OTHER; note = 2'-O-methylcytidine
aacttgtagtggatgctgagggc

SEQ ID NO: 1285 - RNA, 23 nt, synthetic construct
  source 1..23: mol_type = other RNA
  modified_base 1: mod_base = OTHER; note = 2'-O-methyladenosine-3'-phosphorothioate
  modified_base 2: mod_base = OTHER; note = 2'-deoxy-2'-fluoroadenosine-3'-phosphorothioate
  modified_base 3: mod_base = OTHER; note = 2'-O-methylcytidine-3'-phosphate
  modified_base 4: mod_base = OTHER; note = 2'-O-methylcytidine-3'-phosphate
  modified_base 5: mod_base = OTHER; note = 2'-O-methyladenosine-3'-phosphate
  modified_base 6: mod_base = OTHER; note = 2'-deoxy-2'-fluorouridine-3'-phosphate
  modified_base 7: mod_base = OTHER; note = 2'-O-methylguanosine-3'-phosphate
  modified_base 8: mod_base = OTHER; note = 2'-deoxy-2'-fluoroguanosine-3'-phosphate
  modified_base 9: mod_base = OTHER; note = 2'-deoxy-2'-fluorouridine-3'-phosphate
  modified_base 10: mod_base = OTHER; note = 2'-O-methylguanosine-3'-phosphate
  modified_base 11: mod_base = OTHER; note = 2'-O-methyladenosine-3'-phosphate
  modified_base 12: mod_base = OTHER; note = 2'-O-methylcytidine-3'-phosphate
  modified_base 13: mod_base = OTHER; note = 2'-O-methyladenosine-3'-phosphate
  modified_base 14: mod_base = OTHER; note = 2'-deoxy-2'-fluoroguanosine-3'-phosphate
  modified_base 15: mod_base = OTHER; note = 2'-O-methyluridine-3'-phosphate
  modified_base 16: mod_base = OTHER; note = 2'-deoxy-2'-fluoroguanosine-3'-phosphate
  modified_base 17: mod_base = OTHER; note = 2'-O-methyladenosine-3'-phosphate
  modified_base 18: mod_base = OTHER; note = 2'-O-methylguanosine-3'-phosphate
  modified_base 19: mod_base = OTHER; note = 2'-O-methylguanosine-3'-phosphate
  modified_base 20: mod_base = OTHER; note = 2'-O-methyladenosine-3'-phosphate
  modified_base 21: mod_base = OTHER; note = 2'-O-methylcytidine-3'-phosphorothioate
  modified_base 22: mod_base = OTHER; note = 2'-O-methylguanosine-3'-phosphorothioate
  modified_base 23: mod_base = OTHER; note = 2'-O-methyladenosine
aaccatggtgacagtgaggacga

SEQ ID NO: 1286 - RNA, 23 nt, synthetic construct
  source 1..23: mol_type = other RNA
  modified_base 1: mod_base = OTHER; note = 2'-O-methyladenosine-3'-phosphorothioate
  modified_base 2: mod_base = OTHER; note = 2'-deoxy-2'-fluoroguanosine-3'-phosphorothioate
  modified_base 3: mod_base = OTHER; note = 2'-O-methylguanosine-3'-phosphate
  modified_base 4: mod_base = OTHER; note = 2'-O-methyladenosine-3'-phosphate
  modified_base 5: mod_base = OTHER; note = 2'-O-methyladenosine-3'-phosphate
  modified_base 6: mod_base = OTHER; note = 2'-deoxy-2'-fluorouridine-3'-phosphate
  modified_base 7: mod_base = OTHER; note = 2'-O-methyluridine-3'-phosphate
  modified_base 8: mod_base = OTHER; note = 2'-deoxy-2'-fluorouridine-3'-phosphate
  modified_base 9: mod_base = OTHER; note = 2'-deoxy-2'-fluoroguanosine-3'-phosphate
  modified_base 10: mod_base = OTHER; note = 2'-O-methylguanosine-3'-phosphate
  modified_base 11: mod_base = OTHER; note = 2'-O-methyluridine-3'-phosphate
  modified_base 12: mod_base = OTHER; note = 2'-O-methylcytidine-3'-phosphate
  modified_base 13: mod_base = OTHER; note = 2'-O-methyladenosine-3'-phosphate
  modified_base 14: mod_base = OTHER; note = 2'-deoxy-2'-fluoroadenosine-3'-phosphate
  modified_base 15: mod_base = OTHER; note = 2'-O-methyladenosine-3'-phosphate
  modified_base 16: mod_base = OTHER; note = 2'-deoxy-2'-fluorocytidine-3'-phosphate
  modified_base 17: mod_base = OTHER; note = 2'-O-methyladenosine-3'-phosphate
  modified_base 18: mod_base = OTHER; note = 2'-O-methylguanosine-3'-phosphate
  modified_base 19: mod_base = OTHER; note = 2'-O-methylguanosine-3'-phosphate
  modified_base 20: mod_base = OTHER; note = 2'-O-methyladenosine-3'-phosphate
  modified_base 21: mod_base = OTHER; note = 2'-O-methyluridine-3'-phosphorothioate
  modified_base 22: mod_base = OTHER; note = 2'-O-methylcytidine-3'-phosphorothioate
  modified_base 23: mod_base = OTHER; note = 2'-O-methyladenosine
aggaatttggtcaaacaggatca

SEQ ID NO: 1287 - RNA, 23 nt, synthetic construct
  source 1..23: mol_type = other RNA
  modified_base 1: mod_base = OTHER; note = 2'-O-methyladenosine-3'-phosphorothioate
  modified_base 2: mod_base = OTHER; note = 2'-deoxy-2'-fluorocytidine-3'-phosphorothioate
  modified_base 3: mod_base = OTHER; note = 2'-O-methylcytidine-3'-phosphate
  modified_base 4: mod_base = OTHER; note = 2'-O-methylguanosine-3'-phosphate
  modified_base 5: mod_base = OTHER; note = 2'-O-methyluridine-3'-phosphate
  modified_base 6: mod_base = OTHER; note = 2'-deoxy-2'-fluorouridine-3'-phosphate
  modified_base 7: mod_base = OTHER; note = 2'-O-methylcytidine-3'-phosphate
  modified_base 8: mod_base = OTHER; note = 2'-deoxy-2'-fluorouridine-3'-phosphate
  modified_base 9: mod_base = OTHER; note = 2'-deoxy-2'-fluorouridine-3'-phosphate
  modified_base 10: mod_base = OTHER; note = 2'-O-methylguanosine-3'-phosphate
  modified_base 11: mod_base = OTHER; note = 2'-O-methylcytidine-3'-phosphate
  modified_base 12: mod_base = OTHER; note = 2'-O-methyluridine-3'-phosphate
  modified_base 13: mod_base = OTHER; note = 2'-O-methylguanosine-3'-phosphate
  modified_base 14: mod_base = OTHER; note = 2'-deoxy-2'-fluoroadenosine-3'-phosphate
  modified_base 15: mod_base = OTHER; note = 2'-O-methyladenosine-3'-phosphate
  modified_base 16: mod_base = OTHER; note = 2'-deoxy-2'-fluoroadenosine-3'-phosphate
  modified_base 17: mod_base = OTHER; note = 2'-O-methylcytidine-3'-phosphate
  modified_base 18: mod_base = OTHER; note = 2'-O-methylcytidine-3'-phosphate
  modified_base 19: mod_base = OTHER; note = 2'-O-methylguanosine-3'-phosphate
  modified_base 20: mod_base = OTHER; note = 2'-O-methylcytidine-3'-phosphate
  modified_base 21: mod_base = OTHER; note = 2'-O-methyluridine-3'-phosphorothioate
  modified_base 22: mod_base = OTHER; note = 2'-O-methylguanosine-3'-phosphorothioate
  modified_base 23: mod_base = OTHER; note = 2'-O-methylcytidine
accgttcttgctgaaaccgctgc

SEQ ID NO: 1288 - RNA, 23 nt, synthetic construct
  source 1..23: mol_type = other RNA
  modified_base 1: mod_base = OTHER; note = 2'-O-methyladenosine-3'-phosphorothioate
  modified_base 2: mod_base = OTHER; note = 2'-deoxy-2'-fluoroguanosine-3'-phosphorothioate
  modified_base 3: mod_base = OTHER; note = 2'-O-methylcytidine-3'-phosphate
  modified_base 4: mod_base = OTHER; note = 2'-O-methyladenosine-3'-phosphate
  modified_base 5: mod_base = OTHER; note = 2'-O-methylguanosine-3'-phosphate
  modified_base 6: mod_base = OTHER; note = 2'-deoxy-2'-fluoroguanosine-3'-phosphate
  modified_base 7: mod_base = OTHER; note = 2'-O-methyladenosine-3'-phosphate
  modified_base 8: mod_base = OTHER; note = 2'-deoxy-2'-fluoroadenosine-3'-phosphate
  modified_base 9: mod_base = OTHER; note = 2'-deoxy-2'-fluorouridine-3'-phosphate
  modified_base 10: mod_base = OTHER; note = 2'-O-methylguanosine-3'-phosphate
  modified_base 11: mod_base = OTHER; note = 2'-O-methyluridine-3'-phosphate
  modified_base 12: mod_base = OTHER; note = 2'-O-methylcytidine-3'-phosphate
  modified_base 13: mod_base = OTHER; note = 2'-O-methylcytidine-3'-phosphate
  modified_base 14: mod_base = OTHER; note = 2'-deoxy-2'-fluoroadenosine-3'-phosphate
  modified_base 15: mod_base = OTHER; note = 2'-O-methylcytidine-3'-phosphate
  modified_base 16: mod_base = OTHER; note = 2'-deoxy-2'-fluoroadenosine-3'-phosphate
  modified_base 17: mod_base = OTHER; note = 2'-O-methylcytidine-3'-phosphate
  modified_base 18: mod_base = OTHER; note = 2'-O-methylguanosine-3'-phosphate
  modified_base 19: mod_base = OTHER; note = 2'-O-methylcytidine-3'-phosphate
  modified_base 20: mod_base = OTHER; note = 2'-O-methyladenosine-3'-phosphate
  modified_base 21: mod_base = OTHER; note = 2'-O-methyluridine-3'-phosphorothioate
  modified_base 22: mod_base = OTHER; note = 2'-O-methylguanosine-3'-phosphorothioate
  modified_base 23: mod_base = OTHER; note = 2'-O-methylguanosine
agcaggaatgtccacacgcatgg

SEQ ID NO: 1289 - RNA, 23 nt, synthetic construct
  source 1..23: mol_type = other RNA
  modified_base 1: mod_base = OTHER; note = 2'-O-methyladenosine-3'-phosphorothioate
  modified_base 2: mod_base = OTHER; note = 2'-deoxy-2'-fluorocytidine-3'-phosphorothioate
  modified_base 3: mod_base = OTHER; note = 2'-O-methylcytidine-3'-phosphate
  modified_base 4: mod_base = OTHER; note = 2'-O-methyladenosine-3'-phosphate
  modified_base 5: mod_base = OTHER; note = 2'-O-methyluridine-3'-phosphate
  modified_base 6: mod_base = OTHER; note = 2'-deoxy-2'-fluorouridine-3'-phosphate
  modified_base 7: mod_base = OTHER; note = 2'-O-methylguanosine-3'-phosphate
  modified_base 8: mod_base = OTHER; note = 2'-deoxy-2'-fluoroadenosine-3'-phosphate
  modified_base 9: mod_base = OTHER; note = 2'-deoxy-2'-fluoroadenosine-3'-phosphate
  modified_base 10: mod_base = OTHER; note = 2'-O-methylguanosine-3'-phosphate
  modified_base 11: mod_base = OTHER; note = 2'-O-methylguanosine-3'-phosphate
  modified_base 12: mod_base = OTHER; note = 2'-O-methyluridine-3'-phosphate
  modified_base 13: mod_base = OTHER; note = 2'-O-methylguanosine-3'-phosphate
  modified_base 14: mod_base = OTHER; note = 2'-deoxy-2'-fluoroadenosine-3'-phosphate
  modified_base 15: mod_base = OTHER; note = 2'-O-methylcytidine-3'-phosphate
  modified_base 16: mod_base = OTHER; note = 2'-deoxy-2'-fluoroguanosine-3'-phosphate
  modified_base 17: mod_base = OTHER; note = 2'-O-methylcytidine-3'-phosphate
  modified_base 18: mod_base = OTHER; note = 2'-O-methyluridine-3'-phosphate
  modified_base 19: mod_base = OTHER; note = 2'-O-methylcytidine-3'-phosphate
  modified_base 20: mod_base = OTHER; note = 2'-O-methyladenosine-3'-phosphate
  modified_base 21: mod_base = OTHER; note = 2'-O-methylcytidine-3'-phosphorothioate
  modified_base 22: mod_base = OTHER; note = 2'-O-methylguanosine-3'-phosphorothioate
  modified_base 23: mod_base = OTHER; note = 2'-O-methylcytidine
accattgaaggtgacgctcacgc

SEQ ID NO: 1290 - RNA, 23 nt, synthetic construct
  source 1..23: mol_type = other RNA
  modified_base 1: mod_base = OTHER; note = 2'-O-methyladenosine-3'-phosphorothioate
  modified_base 2: mod_base = OTHER; note = 2'-deoxy-2'-fluoroguanosine-3'-phosphorothioate
  modified_base 3: mod_base = OTHER; note = 2'-O-methyluridine-3'-phosphate
  modified_base 4: mod_base = OTHER; note = 2'-O-methylguanosine-3'-phosphate
  modified_base 5: mod_base = OTHER; note = 2'-O-methyluridine-3'-phosphate
  modified_base 6: mod_base = OTHER; note = 2'-deoxy-2'-fluorouridine-3'-phosphate
  modified_base 7: mod_base = OTHER; note = 2'-O-methylguanosine-3'-phosphate
  modified_base 8: mod_base = OTHER; note = 2'-deoxy-2'-fluorouridine-3'-phosphate
  modified_base 9: mod_base = OTHER; note = 2'-deoxy-2'-fluorouridine-3'-phosphate
  modified_base 10: mod_base = OTHER; note = 2'-O-methylguanosine-3'-phosphate
  modified_base 11: mod_base = OTHER; note = 2'-O-methyluridine-3'-phosphate
  modified_base 12: mod_base = OTHER; note = 2'-O-methylguanosine-3'-phosphate
  modified_base 13: mod_base = OTHER; note = 2'-O-methylguanosine-3'-phosphate
  modified_base 14: mod_base = OTHER; note = 2'-deoxy-2'-fluoroadenosine-3'-phosphate
  modified_base 15: mod_base = OTHER; note = 2'-O-methyladenosine-3'-phosphate
  modified_base 16: mod_base = OTHER; note = 2'-deoxy-2'-fluoroguanosine-3'-phosphate
  modified_base 17: mod_base = OTHER; note = 2'-O-methyladenosine-3'-phosphate
  modified_base 18: mod_base = OTHER; note = 2'-O-methylguanosine-3'-phosphate
  modified_base 19: mod_base = OTHER; note = 2'-O-methylguanosine-3'-phosphate
  modified_base 20: mod_base = OTHER; note = 2'-O-methylcytidine-3'-phosphate
  modified_base 21: mod_base = OTHER; note = 2'-O-methyluridine-3'-phosphorothioate
  modified_base 22: mod_base = OTHER; note = 2'-O-methylguanosine-3'-phosphorothioate
  modified_base 23: mod_base = OTHER; note = 2'-O-methyluridine
agtgttgttgtggaagaggctgt

SEQ ID NO: 1291 - RNA, 23 nt, synthetic construct
  source 1..23: mol_type = other RNA
  modified_base 1: mod_base = OTHER; note = 2'-O-methyladenosine-3'-phosphorothioate
  modified_base 2: mod_base = OTHER; note = 2'-deoxy-2'-fluorouridine-3'-phosphorothioate
  modified_base 3: mod_base = OTHER; note = 2'-O-methylcytidine-3'-phosphate
  modified_base 4: mod_base = OTHER; note = 2'-O-methyluridine-3'-phosphate
  modified_base 5: mod_base = OTHER; note = 2'-O-methylguanosine-3'-phosphate
  modified_base 6: mod_base = OTHER; note = 2'-deoxy-2'-fluoroguanosine-3'-phosphate
  modified_base 7: mod_base = OTHER; note = 2'-O-methyluridine-3'-phosphate
  modified_base 8: mod_base = OTHER; note = 2'-deoxy-2'-fluorouridine-3'-phosphate
  modified_base 9: mod_base = OTHER; note = 2'-deoxy-2'-fluoroguanosine-3'-phosphate
  modified_base 10: mod_base = OTHER; note = 2'-O-methyluridine-3'-phosphate
  modified_base 11: mod_base = OTHER; note = 2'-O-methyluridine-3'-phosphate
  modified_base 12: mod_base = OTHER; note = 2'-O-methylguanosine-3'-phosphate
  modified_base 13: mod_base = OTHER; note = 2'-O-methylguanosine-3'-phosphate
  modified_base 14: mod_base = OTHER; note = 2'-deoxy-2'-fluorouridine-3'-phosphate
  modified_base 15: mod_base = OTHER; note = 2'-O-methylguanosine-3'-phosphate
  modified_base 16: mod_base = OTHER; note = 2'-deoxy-2'-fluorocytidine-3'-phosphate
  modified_base 17: mod_base = OTHER; note = 2'-O-methyladenosine-3'-phosphate
  modified_base 18: mod_base = OTHER; note = 2'-O-methylguanosine-3'-phosphate
  modified_base 19: mod_base = OTHER; note = 2'-O-methylguanosine-3'-phosphate
  modified_base 20: mod_base = OTHER; note = 2'-O-methyluridine-3'-phosphate
  modified_base 21: mod_base = OTHER; note = 2'-O-methylguanosine-3'-phosphorothioate
  modified_base 22: mod_base = OTHER; note = 2'-O-methylcytidine-3'-phosphorothioate
  modified_base 23: mod_base = OTHER; note = 2'-O-methylcytidine
atctggttgttggtgcaggtgcc

SEQ ID NO: 1292 - RNA, 23 nt, synthetic construct
  source 1..23: mol_type = other RNA
  modified_base 1: mod_base = OTHER; note = 2'-O-methyladenosine-3'-phosphorothioate
  modified_base 2: mod_base = OTHER; note = 2'-deoxy-2'-fluoroguanosine-3'-phosphorothioate
  modified_base 3: mod_base = OTHER; note = 2'-O-methyluridine-3'-phosphate
  modified_base 4: mod_base = OTHER; note = 2'-O-methyluridine-3'-phosphate
  modified_base 5: mod_base = OTHER; note = 2'-O-methylcytidine-3'-phosphate
  modified_base 6: mod_base = OTHER; note = 2'-deoxy-2'-fluorocytidine-3'-phosphate
  modified_base 7: mod_base = OTHER; note = 2'-O-methylguanosine-3'-phosphate
  modified_base 8: mod_base = OTHER; note = 2'-deoxy-2'-fluorouridine-3'-phosphate
  modified_base 9: mod_base = OTHER; note = 2'-deoxy-2'-fluorocytidine-3'-phosphate
  modified_base 10: mod_base = OTHER; note = 2'-O-methylcytidine-3'-phosphate
  modified_base 11: mod_base = OTHER; note = 2'-O-methylcytidine-3'-phosphate
  modified_base 12: mod_base = OTHER; note = 2'-O-methylguanosine-3'-phosphate
  modified_base 13: mod_base = OTHER; note = 2'-O-methylcytidine-3'-phosphate
  modified_base 14: mod_base = OTHER; note = 2'-deoxy-2'-fluorouridine-3'-phosphate
  modified_base 15: mod_base = OTHER; note = 2'-O-methylguanosine-3'-phosphate
  modified_base 16: mod_base = OTHER; note = 2'-deoxy-2'-fluoroguanosine-3'-phosphate
  modified_base 17: mod_base = OTHER; note = 2'-O-methyladenosine-3'-phosphate
  modified_base 18: mod_base = OTHER; note = 2'-O-methylguanosine-3'-phosphate
  modified_base 19: mod_base = OTHER; note = 2'-O-methyladenosine-3'-phosphate
  modified_base 20: mod_base = OTHER; note = 2'-O-methylcytidine-3'-phosphate
  modified_base 21: mod_base = OTHER; note = 2'-O-methyladenosine-3'-phosphorothioate
  modified_base 22: mod_base = OTHER; note = 2'-O-methylguanosine-3'-phosphorothioate
  modified_base 23: mod_base = OTHER; note = 2'-O-methyluridine
agttccgtcccgctggagacagt

SEQ ID NO: 1293 - RNA, 23 nt, synthetic construct
  source 1..23: mol_type = other RNA
  modified_base 1: mod_base = OTHER; note = 2'-O-methyladenosine-3'-phosphorothioate
  modified_base 2: mod_base = OTHER; note = 2'-deoxy-2'-fluorocytidine-3'-phosphorothioate
  modified_base 3: mod_base = OTHER; note = 2'-O-methylcytidine-3'-phosphate
  modified_base 4: mod_base = OTHER; note = 2'-O-methyladenosine-3'-phosphate
  modified_base 5: mod_base = OTHER; note = 2'-O-methyluridine-3'-phosphate
  modified_base 6: mod_base = OTHER; note = 2'-deoxy-2'-fluoroguanosine-3'-phosphate
  modified_base 7: mod_base = OTHER; note = 2'-O-methyluridine-3'-phosphate
  modified_base 8: mod_base = OTHER; note = 2'-deoxy-2'-fluorocytidine-3'-phosphate
  modified_base 9: mod_base = OTHER; note = 2'-deoxy-2'-fluorocytidine-3'-phosphate
  modified_base 10: mod_base = OTHER; note = 2'-O-methyluridine-3'-phosphate
  modified_base 11: mod_base = OTHER; note = 2'-O-methyluridine-3'-phosphate
  modified_base 12: mod_base = OTHER; note = 2'-O-methylguanosine-3'-phosphate
  modified_base 13: mod_base = OTHER; note = 2'-O-methylcytidine-3'-phosphate
  modified_base 14: mod_base = OTHER; note = 2'-deoxy-2'-fluoroadenosine-3'-phosphate
  modified_base 15: mod_base = OTHER; note = 2'-O-methyladenosine-3'-phosphate
  modified_base 16: mod_base = OTHER; note = 2'-deoxy-2'-fluorocytidine-3'-phosphate
  modified_base 17: mod_base = OTHER; note = 2'-O-methyluridine-3'-phosphate
  modified_base 18: mod_base = OTHER; note = 2'-O-methylguanosine-3'-phosphate
  modified_base 19: mod_base = OTHER; note = 2'-O-methylguanosine-3'-phosphate
  modified_base 20: mod_base = OTHER; note = 2'-O-methylcytidine-3'-phosphate
  modified_base 21: mod_base = OTHER; note = 2'-O-methylguanosine-3'-phosphorothioate
  modified_base 22: mod_base = OTHER; note = 2'-O-methylguanosine-3'-phosphorothioate
  modified_base 23: mod_base = OTHER; note = 2'-O-methylcytidine
accatgtccttgcaactggcggc

SEQ ID NO: 1294 - RNA, 23 nt, synthetic construct
  source 1..23: mol_type = other RNA
  modified_base 1: mod_base = OTHER; note = 2'-O-methyladenosine-3'-phosphorothioate
  modified_base 2: mod_base = OTHER; note = 2'-deoxy-2'-fluoroadenosine-3'-phosphorothioate
  modified_base 3: mod_base = OTHER; note = 2'-O-methylguanosine-3'-phosphate
  modified_base 4: mod_base = OTHER; note = 2'-O-methylcytidine-3'-phosphate
  modified_base 5: mod_base = OTHER; note = 2'-O-methylcytidine-3'-phosphate
  modified_base 6: mod_base = OTHER; note = 2'-deoxy-2'-fluoroadenosine-3'-phosphate
  modified_base 7: mod_base = OTHER; note = 2'-O-methyluridine-3'-phosphate
  modified_base 8: mod_base = OTHER; note = 2'-deoxy-2'-fluorocytidine-3'-phosphate
  modified_base 9: mod_base = OTHER; note = 2'-deoxy-2'-fluorocytidine-3'-phosphate
  modified_base 10: mod_base = OTHER; note = 2'-O-methyluridine-3'-phosphate
  modified_base 11: mod_base = OTHER; note = 2'-O-methyluridine-3'-phosphate
  modified_base 12: mod_base = OTHER; note = 2'-O-methyluridine-3'-phosphate
  modified_base 13: mod_base = OTHER; note = 2'-O-methylcytidine-3'-phosphate
  modified_base 14: mod_base = OTHER; note = 2'-deoxy-2'-fluorouridine-3'-phosphate
  modified_base 15: mod_base = OTHER; note = 2'-O-methylguanosine-3'-phosphate
  modified_base 16: mod_base = OTHER; note = 2'-deoxy-2'-fluorocytidine-3'-phosphate
  modified_base 17: mod_base = OTHER; note = 2'-O-methyluridine-3'-phosphate
  modified_base 18: mod_base = OTHER; note = 2'-O-methylguanosine-3'-phosphate
  modified_base 19: mod_base = OTHER; note = 2'-O-methyluridine-3'-phosphate
  modified_base 20: mod_base = OTHER; note = 2'-O-methylcytidine-3'-phosphate
  modified_base 21: mod_base = OTHER; note = 2'-O-methylguanosine-3'-phosphorothioate
  modified_base 22: mod_base = OTHER; note = 2'-O-methylguanosine-3'-phosphorothioate
  modified_base 23: mod_base = OTHER; note = 2'-O-methylguanosine
aagccatcctttctgctgtcggg

SEQ ID NO: 1295 - RNA, 23 nt, synthetic construct
  source 1..23: mol_type = other RNA
  modified_base 1: mod_base = OTHER; note = 2'-O-methyladenosine-3'-phosphorothioate
  modified_base 2: mod_base = OTHER; note = 2'-deoxy-2'-fluoroadenosine-3'-phosphorothioate
  modified_base 3: mod_base = OTHER; note = 2'-O-methylguanosine-3'-phosphate
  modified_base 4: mod_base = OTHER; note = 2'-O-methylcytidine-3'-phosphate
  modified_base 5: mod_base = OTHER; note = 2'-O-methyladenosine-3'-phosphate
  modified_base 6: mod_base = OTHER; note = 2'-deoxy-2'-fluorouridine-3'-phosphate
  modified_base 7: mod_base = OTHER; note = 2'-O-methylcytidine-3'-phosphate
  modified_base 8: mod_base = OTHER; note = 2'-deoxy-2'-fluoroadenosine-3'-phosphate
  modified_base 9: mod_base = OTHER; note = 2'-deoxy-2'-fluoroguanosine-3'-phosphate
  modified_base 10: mod_base = OTHER; note = 2'-O-methyladenosine-3'-phosphate
  modified_base 11: mod_base = OTHER; note = 2'-O-methyluridine-3'-phosphate
  modified_base 12: mod_base = OTHER; note = 2'-O-methylcytidine-3'-phosphate
  modified_base 13: mod_base = OTHER; note = 2'-O-methyladenosine-3'-phosphate
  modified_base 14: mod_base = OTHER; note = 2'-deoxy-2'-fluorocytidine-3'-phosphate
  modified_base 15: mod_base = OTHER; note = 2'-O-methyladenosine-3'-phosphate
  modified_base 16: mod_base = OTHER; note = 2'-deoxy-2'-fluoroguanosine-3'-phosphate
  modified_base 17: mod_base = OTHER; note = 2'-O-methyladenosine-3'-phosphate
  modified_base 18: mod_base = OTHER; note = 2'-O-methylguanosine-3'-phosphate
  modified_base 19: mod_base = OTHER; note = 2'-O-methylcytidine-3'-phosphate
  modified_base 20: mod_base = OTHER; note = 2'-O-methylguanosine-3'-phosphate
  modified_base 21: mod_base = OTHER; note = 2'-O-methylguanosine-3'-phosphorothioate
  modified_base 22: mod_base = OTHER; note = 2'-O-methylcytidine-3'-phosphorothioate
  modified_base 23: mod_base = OTHER; note = 2'-O-methyluridine
aagcatcagatcacagagcggct

SEQ ID NO: 1296 - RNA, 23 nt, synthetic construct
  source 1..23: mol_type = other RNA
  modified_base 1: mod_base = OTHER; note = 2'-O-methyladenosine-3'-phosphorothioate
  modified_base 2: mod_base = OTHER; note = 2'-deoxy-2'-fluorouridine-3'-phosphorothioate
  modified_base 3: mod_base = OTHER; note = 2'-O-methylguanosine-3'-phosphate
  modified_base 4: mod_base = OTHER; note = 2'-O-methylguanosine-3'-phosphate
  modified_base 5: mod_base = OTHER; note = 2'-O-methylcytidine-3'-phosphate
  modified_base 6: mod_base = OTHER; note = 2'-deoxy-2'-fluoroadenosine-3'-phosphate
  modified_base 7: mod_base = OTHER; note = 2'-O-methylcytidine-3'-phosphate
  modified_base 8: mod_base = OTHER; note = 2'-deoxy-2'-fluorouridine-3'-phosphate
  modified_base 9: mod_base = OTHER; note = 2'-deoxy-2'-fluorocytidine-3'-phosphate
  modified_base 10: mod_base = OTHER; note = 2'-O-methyladenosine-3'-phosphate
  modified_base 11: mod_base = OTHER; note = 2'-O-methylguanosine-3'-phosphate
  modified_base 12: mod_base = OTHER; note = 2'-O-methylcytidine-3'-phosphate
  modified_base 13: mod_base = OTHER; note = 2'-O-methyladenosine-3'-phosphate
  modified_base 14: mod_base = OTHER; note = 2'-deoxy-2'-fluoroadenosine-3'-phosphate
  modified_base 15: mod_base = OTHER; note = 2'-O-methyladenosine-3'-phosphate
  modified_base 16: mod_base = OTHER; note = 2'-deoxy-2'-fluoroguanosine-3'-phosphate
  modified_base 17: mod_base = OTHER; note = 2'-O-methyladenosine-3'-phosphate
  modified_base 18: mod_base = OTHER; note = 2'-O-methylcytidine-3'-phosphate
  modified_base 19: mod_base = OTHER; note = 2'-O-methylcytidine-3'-phosphate
  modified_base 20: mod_base = OTHER; note = 2'-O-methyluridine-3'-phosphate
  modified_base 21: mod_base = OTHER; note = 2'-O-methylguanosine-3'-phosphorothioate
  modified_base 22: mod_base = OTHER; note = 2'-O-methylguanosine-3'-phosphorothioate
  modified_base 23: mod_base = OTHER; note = 2'-O-methylcytidine
atggcactcagcaaagacctggc

SEQ ID NO: 1297 - RNA, 23 nt, synthetic construct
  source 1..23: mol_type = other RNA
  modified_base 1: mod_base = OTHER; note = 2'-O-methyladenosine-3'-phosphorothioate
  modified_base 2: mod_base = OTHER; note = 2'-deoxy-2'-fluoroadenosine-3'-phosphorothioate
  modified_base 3: mod_base = OTHER; note = 2'-O-methylguanosine-3'-phosphate
  modified_base 4: mod_base = OTHER; note = 2'-O-methyluridine-3'-phosphate
  modified_base 5: mod_base = OTHER; note = 2'-O-methylguanosine-3'-phosphate
  modified_base 6: mod_base = OTHER; note = 2'-deoxy-2'-fluoroguanosine-3'-phosphate
  modified_base 7: mod_base = OTHER; note = 2'-O-methyluridine-3'-phosphate
  modified_base 8: mod_base = OTHER; note = 2'-deoxy-2'-fluorocytidine-3'-phosphate
  modified_base 9: mod_base = OTHER; note = 2'-deoxy-2'-fluoroguanosine-3'-phosphate
  modified_base 10: mod_base = OTHER; note = 2'-O-methylcytidine-3'-phosphate
  modified_base 11: mod_base = OTHER; note = 2'-O-methyluridine-3'-phosphate
  modified_base 12: mod_base = OTHER; note = 2'-O-methylguanosine-3'-phosphate
  modified_base 13: mod_base = OTHER; note = 2'-O-methyladenosine-3'-phosphate
  modified_base 14: mod_base = OTHER; note = 2'-deoxy-2'-fluorouridine-3'-phosphate
  modified_base 15: mod_base = OTHER; note = 2'-O-methylguanosine-3'-phosphate
  modified_base 16: mod_base = OTHER; note = 2'-deoxy-2'-fluorocytidine-3'-phosphate
  modified_base 17: mod_base = OTHER; note = 2'-O-methyladenosine-3'-phosphate
  modified_base 18: mod_base = OTHER; note = 2'-O-methylguanosine-3'-phosphate
  modified_base 19: mod_base = OTHER; note = 2'-O-methylguanosine-3'-phosphate
  modified_base 20: mod_base = OTHER; note = 2'-O-methylcytidine-3'-phosphate
  modified_base 21: mod_base = OTHER; note = 2'-O-methylguanosine-3'-phosphorothioate
  modified_base 22: mod_base = OTHER; note = 2'-O-methyluridine-3'-phosphorothioate
  modified_base 23: mod_base = OTHER; note = 2'-O-methyluridine
aagtggtcgctgatgcaggcgtt

SEQ ID NO: 1298 - RNA, 23 nt, synthetic construct
  source 1..23: mol_type = other RNA
  modified_base 1: mod_base = OTHER; note = 2'-O-methyladenosine-3'-phosphorothioate
  modified_base 2: mod_base = OTHER; note = 2'-deoxy-2'-fluorocytidine-3'-phosphorothioate
  modified_base 3: mod_base = OTHER; note = 2'-O-methyladenosine-3'-phosphate
  modified_base 4: mod_base = OTHER; note = 2'-O-methylguanosine-3'-phosphate
  modified_base 5: mod_base = OTHER; note = 2'-O-methyladenosine-3'-phosphate
  modified_base 6: mod_base = OTHER; note = 2'-deoxy-2'-fluoroguanosine-3'-phosphate
  modified_base 7: mod_base = OTHER; note = 2'-O-methylcytidine-3'-phosphate
  modified_base 8: mod_base = OTHER; note = 2'-deoxy-2'-fluorouridine-3'-phosphate
  modified_base 9: mod_base = OTHER; note = 2'-deoxy-2'-fluorocytidine-3'-phosphate
  modified_base 10: mod_base = OTHER; note = 2'-O-methyluridine-3'-phosphate
  modified_base 11: mod_base = OTHER; note = 2'-O-methylguanosine-3'-phosphate
  modified_base 12: mod_base = OTHER; note = 2'-O-methylcytidine-3'-phosphate
  modified_base 13: mod_base = OTHER; note = 2'-O-methylguanosine-3'-phosphate
  modified_base 14: mod_base = OTHER; note = 2'-deoxy-2'-fluorouridine-3'-phosphate
  modified_base 15: mod_base = OTHER; note = 2'-O-methyladenosine-3'-phosphate
  modified_base 16: mod_base = OTHER; note = 2'-deoxy-2'-fluoroadenosine-3'-phosphate
  modified_base 17: mod_base = OTHER; note = 2'-O-methylguanosine-3'-phosphate
  modified_base 18: mod_base = OTHER; note = 2'-O-methylcytidine-3'-phosphate
  modified_base 19: mod_base = OTHER; note = 2'-O-methylcytidine-3'-phosphate
  modified_base 20: mod_base = OTHER; note = 2'-O-methyluridine-3'-phosphate
  modified_base 21: mod_base = OTHER; note = 2'-O-methylcytidine-3'-phosphorothioate
  modified_base 22: mod_base = OTHER; note = 2'-O-methylcytidine-3'-phosphorothioate
  modified_base 23: mod_base = OTHER; note = 2'-O-methyladenosine
acagagctctgcgtaagcctcca

SEQ ID NO: 1299 - RNA, 23 nt, synthetic construct
  source 1..23: mol_type = other RNA
  modified_base 1: mod_base = OTHER; note = 2'-O-methyladenosine-3'-phosphorothioate
  modified_base 2: mod_base = OTHER; note = 2'-deoxy-2'-fluorocytidine-3'-phosphorothioate
  modified_base 3: mod_base = OTHER; note = 2'-O-methyluridine-3'-phosphate
  modified_base 4: mod_base = OTHER; note = 2'-O-methylcytidine-3'-phosphate
  modified_base 5: mod_base = OTHER; note = 2'-O-methylguanosine-3'-phosphate
  modified_base 6: mod_base = OTHER; note = 2'-deoxy-2'-fluorocytidine-3'-phosphate
  modified_base 7: mod_base = OTHER; note = 2'-O-methylcytidine-3'-phosphate
  modified_base 8: mod_base = OTHER; note = 2'-deoxy-2'-fluoroadenosine-3'-phosphate
  modified_base 9: mod_base = OTHER; note = 2'-deoxy-2'-fluoroguanosine-3'-phosphate
  modified_base 10: mod_base = OTHER; note = 2'-O-methyluridine-3'-phosphate
  modified_base 11: mod_base = OTHER; note = 2'-O-methylcytidine-3'-phosphate
  modified_base 12: mod_base = OTHER; note = 2'-O-methyladenosine-3'-phosphate
  modified_base 13: mod_base = OTHER; note = 2'-O-methylcytidine-3'-phosphate
  modified_base 14: mod_base = OTHER; note = 2'-deoxy-2'-fluorouridine-3'-phosphate
  modified_base 15: mod_base = OTHER; note = 2'-O-methylguanosine-3'-phosphate
  modified_base 16: mod_base = OTHER; note = 2'-deoxy-2'-fluorocytidine-3'-phosphate
  modified_base 17: mod_base = OTHER; note = 2'-O-methyladenosine-3'-phosphate
  modified_base 18: mod_base = OTHER; note = 2'-O-methylcytidine-3'-phosphate
  modified_base 19: mod_base = OTHER; note = 2'-O-methyladenosine-3'-phosphate
  modified_base 20: mod_base = OTHER; note = 2'-O-methylcytidine-3'-phosphate
  modified_base 21: mod_base = OTHER; note = 2'-O-methyluridine-3'-phosphorothioate
  modified_base 22: mod_base = OTHER; note = 2'-O-methylcytidine-3'-phosphorothioate
  modified_base 23: mod_base = OTHER; note = 2'-O-methylcytidine
actcgccagtcactgcacactcc

SEQ ID NO: 1300 - RNA, 23 nt, synthetic construct
  source 1..23: mol_type = other RNA
  modified_base 1: mod_base = OTHER; note = 2'-O-methyladenosine-3'-phosphorothioate
  modified_base 2: mod_base = OTHER; note = 2'-deoxy-2'-fluoroadenosine-3'-phosphorothioate
  modified_base 3: mod_base = OTHER; note = 2'-O-methyluridine-3'-phosphate
  modified_base 4: mod_base = OTHER; note = 2'-O-methylguanosine-3'-phosphate
  modified_base 5: mod_base = OTHER; note = 2'-O-methylguanosine-3'-phosphate
  modified_base 6: mod_base = OTHER; note = 2'-deoxy-2'-fluorocytidine-3'-phosphate
  modified_base 7: mod_base = OTHER; note = 2'-O-methyluridine-3'-phosphate
  modified_base 8: mod_base = OTHER; note = 2'-deoxy-2'-fluorouridine-3'-phosphate
  modified_base 9: mod_base = OTHER; note = 2'-deoxy-2'-fluoroguanosine-3'-phosphate
  modified_base 10: mod_base = OTHER; note = 2'-O-methyluridine-3'-phosphate
  modified_base 11: mod_base = OTHER; note = 2'-O-methyladenosine-3'-phosphate
  modified_base 12: mod_base = OTHER; note = 2'-O-methylcytidine-3'-phosphate
  modified_base 13: mod_base = OTHER; note = 2'-O-methyladenosine-3'-phosphate
  modified_base 14: mod_base = OTHER; note = 2'-deoxy-2'-fluorocytidine-3'-phosphate
  modified_base 15: mod_base = OTHER; note = 2'-O-methyluridine-3'-phosphate
  modified_base 16: mod_base = OTHER; note = 2'-deoxy-2'-fluorouridine-3'-phosphate
  modified_base 17: mod_base = OTHER; note = 2'-O-methyluridine-3'-phosphate
  modified_base 18: mod_base = OTHER; note = 2'-O-methylguanosine-3'-phosphate
  modified_base 19: mod_base = OTHER; note = 2'-O-methylguanosine-3'-phosphate
  modified_base 20: mod_base = OTHER; note = 2'-O-methyluridine-3'-phosphate
  modified_base 21: mod_base = OTHER; note = 2'-O-methylguanosine-3'-phosphorothioate
  modified_base 22: mod_base = OTHER; note = 2'-O-methylguanosine-3'-phosphorothioate
  modified_base 23: mod_base = OTHER; note = 2'-O-methylguanosine
aatggcttgtacactttggtggg

SEQ ID NO: 1301 - RNA, 23 nt, synthetic construct
  source 1..23: mol_type = other RNA
  modified_base 1: mod_base = OTHER; note = 2'-O-methyladenosine-3'-phosphorothioate
  modified_base 2: mod_base = OTHER; note = 2'-deoxy-2'-fluorouridine-3'-phosphorothioate
  modified_base 3: mod_base = OTHER; note = 2'-O-methylcytidine-3'-phosphate
  modified_base 4: mod_base = OTHER; note = 2'-O-methyluridine-3'-phosphate
  modified_base 5: mod_base = OTHER; note = 2'-O-methylguanosine-3'-phosphate
  modified_base 6: mod_base = OTHER; note = 2'-deoxy-2'-fluoroguanosine-3'-phosphate
  modified_base 7: mod_base = OTHER; note = 2'-O-methyluridine-3'-phosphate
  modified_base 8: mod_base = OTHER; note = 2'-deoxy-2'-fluorouridine-3'-phosphate
  modified_base 9: mod_base = OTHER; note = 2'-deoxy-2'-fluorocytidine-3'-phosphate
  modified_base 10: mod_base = OTHER; note = 2'-O-methylcytidine-3'-phosphate
  modified_base 11: mod_base = OTHER; note = 2'-O-methyluridine-3'-phosphate
  modified_base 12: mod_base = OTHER; note = 2'-O-methyladenosine-3'-phosphate
  modified_base 13: mod_base = OTHER; note = 2'-O-methylguanosine-3'-phosphate
  modified_base 14: mod_base = OTHER; note = 2'-deoxy-2'-fluoroadenosine-3'-phosphate
  modified_base 15: mod_base = OTHER; note = 2'-O-methylguanosine-3'-phosphate
  modified_base 16: mod_base = OTHER; note = 2'-deoxy-2'-fluorouridine-3'-phosphate
  modified_base 17: mod_base = OTHER; note = 2'-O-methyluridine-3'-phosphate
  modified_base 18: mod_base = OTHER; note = 2'-O-methylguanosine-3'-phosphate
  modified_base 19: mod_base = OTHER; note = 2'-O-methylcytidine-3'-phosphate
  modified_base 20: mod_base = OTHER; note = 2'-O-methyladenosine-3'-phosphate
  modified_base 21: mod_base = OTHER; note = 2'-O-methylguanosine-3'-phosphorothioate
  modified_base 22: mod_base = OTHER; note = 2'-O-methylguanosine-3'-phosphorothioate
  modified_base 23: mod_base = OTHER; note = 2'-O-methyluridine
atctggttcctagagttgcaggt

SEQ ID NO: 1302 - RNA, 23 nt, synthetic construct
  source 1..23: mol_type = other RNA
  modified_base 1: mod_base = OTHER; note = 2'-O-methyladenosine-3'-phosphorothioate
  modified_base 2: mod_base = OTHER; note = 2'-deoxy-2'-fluoroguanosine-3'-phosphorothioate
  modified_base 3: mod_base = OTHER; note = 2'-O-methylcytidine-3'-phosphate
  modified_base 4: mod_base = OTHER; note = 2'-O-methylguanosine-3'-phosphate
  modified_base 5: mod_base = OTHER; note = 2'-O-methyluridine-3'-phosphate
  modified_base 6: mod_base = OTHER; note = 2'-deoxy-2'-fluorouridine-3'-phosphate
  modified_base 7: mod_base = OTHER; note = 2'-O-methylguanosine-3'-phosphate
  modified_base 8: mod_base = OTHER; note = 2'-deoxy-2'-fluoroadenosine-3'-phosphate
  modified_base 9: mod_base = OTHER; note = 2'-deoxy-2'-fluoroadenosine-3'-phosphate
  modified_base 10: mod_base = OTHER; note = 2'-O-methylguanosine-3'-phosphate
  modified_base 11: mod_base = OTHER; note = 2'-O-methyladenosine-3'-phosphate
  modified_base 12: mod_base = OTHER; note = 2'-O-methylguanosine-3'-phosphate
  modified_base 13: mod_base = OTHER; note = 2'-O-methylguanosine-3'-phosphate
  modified_base 14: mod_base = OTHER; note = 2'-deoxy-2'-fluoroadenosine-3'-phosphate
  modified_base 15: mod_base = OTHER; note = 2'-O-methyluridine-3'-phosphate
  modified_base 16: mod_base = OTHER; note = 2'-deoxy-2'-fluorocytidine-3'-phosphate
  modified_base 17: mod_base = OTHER; note = 2'-O-methyluridine-3'-phosphate
  modified_base 18: mod_base = OTHER; note = 2'-O-methylguanosine-3'-phosphate
  modified_base 19: mod_base = OTHER; note = 2'-O-methylguanosine-3'-phosphate
  modified_base 20: mod_base = OTHER; note = 2'-O-methyluridine-3'-phosphate
  modified_base 21: mod_base = OTHER; note = 2'-O-methylcytidine-3'-phosphorothioate
  modified_base 22: mod_base = OTHER; note = 2'-O-methylcytidine-3'-phosphorothioate
  modified_base 23: mod_base = OTHER; note = 2'-O-methyluridine
agcgttgaagaggatctggtcct

SEQ ID NO: 1303 - RNA, 23 nt, synthetic construct
  source 1..23: mol_type = other RNA
  modified_base 1: mod_base = OTHER; note = 2'-O-methyladenosine-3'-phosphorothioate
  modified_base 2: mod_base = OTHER; note = 2'-deoxy-2'-fluorocytidine-3'-phosphorothioate
  modified_base 3: mod_base = OTHER; note = 2'-O-methylcytidine-3'-phosphate
  modified_base 4: mod_base = OTHER; note = 2'-O-methyluridine-3'-phosphate
  modified_base 5: mod_base = OTHER; note = 2'-O-methylguanosine-3'-phosphate
  modified_base 6: mod_base = OTHER; note = 2'-deoxy-2'-fluorocytidine-3'-phosphate
  modified_base 7: mod_base = OTHER; note = 2'-O-methyladenosine-3'-phosphate
  modified_base 8: mod_base = OTHER; note = 2'-deoxy-2'-fluorocytidine-3'-phosphate
  modified_base 9: mod_base = OTHER; note = 2'-deoxy-2'-fluoroguanosine-3'-phosphate
  modified_base 10: mod_base = OTHER; note = 2'-O-methylcytidine-3'-phosphate
  modified_base 11: mod_base = OTHER; note = 2'-O-methyladenosine-3'-phosphate
  modified_base 12: mod_base = OTHER; note = 2'-O-methylguanosine-3'-phosphate
  modified_base 13: mod_base = OTHER; note = 2'-O-methyladenosine-3'-phosphate
  modified_base 14: mod_base = OTHER; note = 2'-deoxy-2'-fluorouridine-3'-phosphate
  modified_base 15: mod_base = OTHER; note = 2'-O-methylguanosine-3'-phosphate
  modified_base 16: mod_base = OTHER; note = 2'-deoxy-2'-fluorocytidine-3'-phosphate
  modified_base 17: mod_base = OTHER; note = 2'-O-methylcytidine-3'-phosphate
  modified_base 18: mod_base = OTHER; note = 2'-O-methylcytidine-3'-phosphate
  modified_base 19: mod_base = OTHER; note = 2'-O-methyladenosine-3'-phosphate
  modified_base 20: mod_base = OTHER; note = 2'-O-methyluridine-3'-phosphate
  modified_base 21: mod_base = OTHER; note = 2'-O-methylguanosine-3'-phosphorothioate
  modified_base 22: mod_base = OTHER; note = 2'-O-methyluridine-3'-phosphorothioate
  modified_base 23: mod_base = OTHER; note = 2'-O-methylguanosine
acctgcacgcagatgcccatgtg

SEQ ID NO: 1304 - RNA, 23 nt, synthetic construct
  source 1..23: mol_type = other RNA
  modified_base 1: mod_base = OTHER; note = 2'-O-methyladenosine-3'-phosphorothioate
  modified_base 2: mod_base = OTHER; note = 2'-deoxy-2'-fluoroguanosine-3'-phosphorothioate
  modified_base 3: mod_base = OTHER; note = 2'-O-methyladenosine-3'-phosphate
  modified_base 4: mod_base = OTHER; note = 2'-O-methyladenosine-3'-phosphate
  modified_base 5: mod_base = OTHER; note = 2'-O-methyladenosine-3'-phosphate
  modified_base 6: mod_base = OTHER; note = 2'-deoxy-2'-fluorouridine-3'-phosphate
  modified_base 7: mod_base = OTHER; note = 2'-O-methyluridine-3'-phosphate
  modified_base 8: mod_base = OTHER; note = 2'-deoxy-2'-fluorouridine-3'-phosphate
  modified_base 9: mod_base = OTHER; note = 2'-deoxy-2'-fluoroadenosine-3'-phosphate
  modified_base 10: mod_base = OTHER; note = 2'-O-methylguanosine-3'-phosphate
  modified_base 11: mod_base = OTHER; note = 2'-O-methylguanosine-3'-phosphate
  modified_base 12: mod_base = OTHER; note = 2'-O-methyladenosine-3'-phosphate
  modified_base 13: mod_base = OTHER; note = 2'-O-methyladenosine-3'-phosphate
  modified_base 14: mod_base = OTHER; note = 2'-deoxy-2'-fluoroadenosine-3'-phosphate
  modified_base 15: mod_base = OTHER; note = 2'-O-methylcytidine-3'-phosphate
  modified_base 16: mod_base = OTHER; note = 2'-deoxy-2'-fluorocytidine-3'-phosphate
  modified_base 17: mod_base = OTHER; note = 2'-O-methylcytidine-3'-phosphate
  modified_base 18: mod_base = OTHER; note = 2'-O-methyladenosine-3'-phosphate
  modified_base 19: mod_base = OTHER; note = 2'-O-methyluridine-3'-phosphate
  modified_base 20: mod_base = OTHER; note = 2'-O-methylcytidine-3'-phosphate
  modified_base 21: mod_base = OTHER; note = 2'-O-methylguanosine-3'-phosphorothioate
  modified_base 22: mod_base = OTHER; note = 2'-O-methylguanosine-3'-phosphorothioate
  modified_base 23: mod_base = OTHER; note = 2'-O-methylguanosine
agaaatttaggaaacccatcggg

SEQ ID NO: 1305 - RNA, 23 nt, synthetic construct
  source 1..23: mol_type = other RNA
  modified_base 1: mod_base = OTHER; note = 2'-O-methyladenosine-3'-phosphorothioate
  modified_base 2: mod_base = OTHER; note = 2'-deoxy-2'-fluoroadenosine-3'-phosphorothioate
  modified_base 3: mod_base = OTHER; note = 2'-O-methylguanosine-3'-phosphate
  modified_base 4: mod_base = OTHER; note = 2'-O-methylguanosine-3'-phosphate
  modified_base 5: mod_base = OTHER; note = 2'-O-methyladenosine-3'-phosphate
  modified_base 6: mod_base = OTHER; note = 2'-deoxy-2'-fluorocytidine-3'-phosphate
  modified_base 7: mod_base = OTHER; note = 2'-O-methyluridine-3'-phosphate
  modified_base 8: mod_base = OTHER; note = 2'-deoxy-2'-fluoroguanosine-3'-phosphate
  modified_base 9: mod_base = OTHER; note = 2'-deoxy-2'-fluoroguanosine-3'-phosphate
  modified_base 10: mod_base = OTHER; note = 2'-O-methylcytidine-3'-phosphate
  modified_base 11: mod_base = OTHER; note = 2'-O-methyladenosine-3'-phosphate
  modified_base 12: mod_base = OTHER; note = 2'-O-methylguanosine-3'-phosphate
  modified_base 13: mod_base = OTHER; note = 2'-O-methyluridine-3'-phosphate
  modified_base 14: mod_base = OTHER; note = 2'-deoxy-2'-fluorouridine-3'-phosphate
  modified_base 15: mod_base = OTHER; note = 2'-O-methylguanosine-3'-phosphate
  modified_base 16: mod_base = OTHER; note = 2'-deoxy-2'-fluorocytidine-3'-phosphate
  modified_base 17: mod_base = OTHER; note = 2'-O-methyluridine-3'-phosphate
  modified_base 18: mod_base = OTHER; note = 2'-O-methylguanosine-3'-phosphate
  modified_base 19: mod_base = OTHER; note = 2'-O-methyladenosine-3'-phosphate
  modified_base 20: mod_base = OTHER; note = 2'-O-methylcytidine-3'-phosphate
  modified_base 21: mod_base = OTHER; note = 2'-O-methylcytidine-3'-phosphorothioate
  modified_base 22: mod_base = OTHER; note = 2'-O-methylcytidine-3'-phosphorothioate
  modified_base 23: mod_base = OTHER; note = 2'-O-methyladenosine
aaggactggcagttgctgaccca

SEQ ID NO: 1306 - RNA, 23 nt, synthetic construct
  source 1..23: mol_type = other RNA
  modified_base 1: mod_base = OTHER; note = 2'-O-methyladenosine-3'-phosphorothioate
  modified_base 2: mod_base = OTHER; note = 2'-deoxy-2'-fluorouridine-3'-phosphorothioate
  modified_base 3: mod_base = OTHER; note = 2'-O-methylguanosine-3'-phosphate
  modified_base 4: mod_base = OTHER; note = 2'-O-methylcytidine-3'-phosphate
  modified_base 5: mod_base = OTHER; note = 2'-O-methyladenosine-3'-phosphate
  modified_base 6: mod_base = OTHER; note = 2'-deoxy-2'-fluorocytidine-3'-phosphate
  modified_base 7: mod_base = OTHER; note = 2'-O-methylcytidine-3'-phosphate
  modified_base 8: mod_base = OTHER; note = 2'-deoxy-2'-fluoroguanosine-3'-phosphate
  modified_base 9: mod_base = OTHER; note = 2'-deoxy-2'-fluoroadenosine-3'-phosphate
  modified_base 10: mod_base = OTHER; note = 2'-O-methylcytidine-3'-phosphate
  modified_base 11: mod_base = OTHER; note = 2'-O-methyladenosine-3'-phosphate
  modified_base 12: mod_base = OTHER; note = 2'-O-methylcytidine-3'-phosphate
  modified_base 13: mod_base = OTHER; note = 2'-O-methyluridine-3'-phosphate
  modified_base 14: mod_base = OTHER; note = 2'-deoxy-2'-fluoroguanosine-3'-phosphate
  modified_base 15: mod_base = OTHER; note = 2'-O-methyladenosine-3'-phosphate
  modified_base 16: mod_base = OTHER; note = 2'-deoxy-2'-fluoroadenosine-3'-phosphate
  modified_base 17: mod_base = OTHER; note = 2'-O-methylcytidine-3'-phosphate
  modified_base 18: mod_base = OTHER; note = 2'-O-methylcytidine-3'-phosphate
  modified_base 19: mod_base = OTHER; note = 2'-O-methylcytidine-3'-phosphate
  modified_base 20: mod_base = OTHER; note = 2'-O-methyluridine-3'-phosphate
  modified_base 21: mod_base = OTHER; note = 2'-O-methylcytidine-3'-phosphorothioate
  modified_base 22: mod_base = OTHER; note = 2'-O-methylguanosine-3'-phosphorothioate
  modified_base 23: mod_base = OTHER; note = 2'-O-methyluridine
atgcaccgacactgaaccctcgt

SEQ ID NO: 1307 - RNA, 23 nt, synthetic construct
  source 1..23: mol_type = other RNA
  modified_base 1: mod_base = OTHER; note = 2'-O-methyladenosine-3'-phosphorothioate
  modified_base 2: mod_base = OTHER; note = 2'-deoxy-2'-fluoroguanosine-3'-phosphorothioate
  modified_base 3: mod_base = OTHER; note = 2'-O-methylguanosine-3'-phosphate
  modified_base 4: mod_base = OTHER; note = 2'-O-methyluridine-3'-phosphate
  modified_base 5: mod_base = OTHER; note = 2'-O-methylcytidine-3'-phosphate
  modified_base 6: mod_base = OTHER; note = 2'-deoxy-2'-fluoroadenosine-3'-phosphate
  modified_base 7: mod_base = OTHER; note = 2'-O-methylcytidine-3'-phosphate
  modified_base 8: mod_base = OTHER; note = 2'-deoxy-2'-fluoroguanosine-3'-phosphate
  modified_base 9: mod_base = OTHER; note = 2'-deoxy-2'-fluoroguanosine-3'-phosphate
  modified_base 10: mod_base = OTHER; note = 2'-O-methyluridine-3'-phosphate
  modified_base 11: mod_base = OTHER; note = 2'-O-methyluridine-3'-phosphate
  modified_base 12: mod_base = OTHER; note = 2'-O-methyladenosine-3'-phosphate
  modified_base 13: mod_base = OTHER; note = 2'-O-methylcytidine-3'-phosphate
  modified_base 14: mod_base = OTHER; note = 2'-deoxy-2'-fluoroguanosine-3'-phosphate
  modified_base 15: mod_base = OTHER; note = 2'-O-methyladenosine-3'-phosphate
  modified_base 16: mod_base = OTHER; note = 2'-deoxy-2'-fluoroadenosine-3'-phosphate
  modified_base 17: mod_base = OTHER; note = 2'-O-methylguanosine-3'-phosphate
  modified_base 18: mod_base = OTHER; note = 2'-O-methylcytidine-3'-phosphate
  modified_base 19: mod_base = OTHER; note = 2'-O-methylcytidine-3'-phosphate
  modified_base 20: mod_base = OTHER; note = 2'-O-methylguanosine-3'-phosphate
  modified_base 21: mod_base = OTHER; note = 2'-O-methylguanosine-3'-phosphorothioate
  modified_base 22: mod_base = OTHER; note = 2'-O-methylguanosine-3'-phosphorothioate
  modified_base 23: mod_base = OTHER; note = 2'-O-methyladenosine
aggtcacggttacgaagccggga

SEQ ID NO: 1308 - RNA, 23 nt, synthetic construct
  source 1..23: mol_type = other RNA
  modified_base 1: mod_base = OTHER; note = 2'-O-methyladenosine-3'-phosphorothioate
  modified_base 2: mod_base = OTHER; note = 2'-deoxy-2'-fluoroadenosine-3'-phosphorothioate
  modified_base 3: mod_base = OTHER; note = 2'-O-methylguanosine-3'-phosphate
  modified_base 4: mod_base = OTHER; note = 2'-O-methylguanosine-3'-phosphate
  modified_base 5: mod_base = OTHER; note = 2'-O-methyluridine-3'-phosphate
  modified_base 6: mod_base = OTHER; note = 2'-deoxy-2'-fluoroguanosine-3'-phosphate
  modified_base 7: mod_base = OTHER; note = 2'-O-methylguanosine-3'-phosphate
  modified_base 8: mod_base = OTHER; note = 2'-deoxy-2'-fluorouridine-3'-phosphate
  modified_base 9: mod_base = OTHER; note = 2'-deoxy-2'-fluorouridine-3'-phosphate
  modified_base 10: mod_base = OTHER; note = 2'-O-methylguanosine-3'-phosphate
  modified_base 11: mod_base = OTHER; note = 2'-O-methyluridine-3'-phosphate
  modified_base 12: mod_base = OTHER; note = 2'-O-methylguanosine-3'-phosphate
  modified_base 13: mod_base = OTHER; note = 2'-O-methyluridine-3'-phosphate
  modified_base 14: mod_base = OTHER; note = 2'-deoxy-2'-fluorouridine-3'-phosphate
  modified_base 15: mod_base = OTHER; note = 2'-O-methylguanosine-3'-phosphate
  modified_base 16: mod_base = OTHER; note = 2'-deoxy-2'-fluorocytidine-3'-phosphate
  modified_base 17: mod_base = OTHER; note = 2'-O-methyladenosine-3'-phosphate
  modified_base 18: mod_base = OTHER; note = 2'-O-methylcytidine-3'-phosphate
  modified_base 19: mod_base = OTHER; note = 2'-O-methyladenosine-3'-phosphate
  modified_base 20: mod_base = OTHER; note = 2'-O-methylcytidine-3'-phosphate
  modified_base 21: mod_base = OTHER; note = 2'-O-methylguanosine-3'-phosphorothioate
  modified_base 22: mod_base = OTHER; note = 2'-O-methylcytidine-3'-phosphorothioate
  modified_base 23: mod_base = OTHER; note = 2'-O-methyladenosine
aaggtggttgtgttgcacacgca

SEQ ID NO: 1309 - RNA, 23 nt, synthetic construct
  source 1..23: mol_type = other RNA
  modified_base 1: mod_base = OTHER; note = 2'-O-methyladenosine-3'-phosphorothioate
  modified_base 2: mod_base = OTHER; note = 2'-deoxy-2'-fluoroguanosine-3'-phosphorothioate
  modified_base 3: mod_base = OTHER; note = 2'-O-methylguanosine-3'-phosphate
  modified_base 4: mod_base = OTHER; note = 2'-O-methyluridine-3'-phosphate
  modified_base 5: mod_base = OTHER; note = 2'-O-methylguanosine-3'-phosphate
  modified_base 6: mod_base = OTHER; note = 2'-deoxy-2'-fluorocytidine-3'-phosphate
  modified_base 7: mod_base = OTHER; note = 2'-O-methyladenosine-3'-phosphate
  modified_base 8: mod_base = OTHER; note = 2'-deoxy-2'-fluoroguanosine-3'-phosphate
  modified_base 9: mod_base = OTHER; note = 2'-deoxy-2'-fluoroadenosine-3'-phosphate
  modified_base 10: mod_base = OTHER; note = 2'-O-methyluridine-3'-phosphate
  modified_base 11: mod_base = OTHER; note = 2'-O-methylguanosine-3'-phosphate
  modified_base 12: mod_base = OTHER; note = 2'-O-methylguanosine-3'-phosphate
  modified_base 13: mod_base = OTHER; note = 2'-O-methyladenosine-3'-phosphate
  modified_base 14: mod_base = OTHER; note = 2'-deoxy-2'-fluorocytidine-3'-phosphate
  modified_base 15: mod_base = OTHER; note = 2'-O-methyluridine-3'-phosphate
  modified_base 16: mod_base = OTHER; note = 2'-deoxy-2'-fluorocytidine-3'-phosphate
  modified_base 17: mod_base = OTHER; note = 2'-O-methylcytidine-3'-phosphate
  modified_base 18: mod_base = OTHER; note = 2'-O-methyluridine-3'-phosphate
  modified_base 19: mod_base = OTHER; note = 2'-O-methylguanosine-3'-phosphate
  modified_base 20: mod_base = OTHER; note = 2'-O-methylcytidine-3'-phosphate
  modified_base 21: mod_base = OTHER; note = 2'-O-methylcytidine-3'-phosphorothioate
  modified_base 22: mod_base = OTHER; note = 2'-O-methylcytidine-3'-phosphorothioate
  modified_base 23: mod_base = OTHER; note = 2'-O-methyluridine
aggtgcagatggactcctgccct

SEQ ID NO: 1310 - RNA, 23 nt, synthetic construct
  source 1..23: mol_type = other RNA
  modified_base 1: mod_base = OTHER; note = 2'-O-methyladenosine-3'-phosphorothioate
  modified_base 2: mod_base = OTHER; note = 2'-deoxy-2'-fluoroadenosine-3'-phosphorothioate
  modified_base 3: mod_base = OTHER; note = 2'-O-methylguanosine-3'-phosphate
  modified_base 4: mod_base = OTHER; note = 2'-O-methylcytidine-3'-phosphate
  modified_base 5: mod_base = OTHER; note = 2'-O-methylguanosine-3'-phosphate
  modified_base 6: mod_base = OTHER; note = 2'-deoxy-2'-fluoroguanosine-3'-phosphate
  modified_base 7: mod_base = OTHER; note = 2'-O-methyladenosine-3'-phosphate
  modified_base 8: mod_base = OTHER; note = 2'-deoxy-2'-fluoroadenosine-3'-phosphate
  modified_base 9: mod_base = OTHER; note = 2'-deoxy-2'-fluoroguanosine-3'-phosphate
  modified_base 10: mod_base = OTHER; note = 2'-O-methylguanosine-3'-phosphate
  modified_base 11: mod_base = OTHER; note = 2'-O-methyluridine-3'-phosphate
  modified_base 12: mod_base = OTHER; note = 2'-O-methylguanosine-3'-phosphate
  modified_base 13: mod_base = OTHER; note = 2'-O-methylguanosine-3'-phosphate
  modified_base 14: mod_base = OTHER; note = 2'-deoxy-2'-fluoroguanosine-3'-phosphate
  modified_base 15: mod_base = OTHER; note = 2'-O-methyladenosine-3'-phosphate
  modified_base 16: mod_base = OTHER; note = 2'-deoxy-2'-fluorocytidine-3'-phosphate
  modified_base 17: mod_base = OTHER; note = 2'-O-methyladenosine-3'-phosphate
  modified_base 18: mod_base = OTHER; note = 2'-O-methylguanosine-3'-phosphate
  modified_base 19: mod_base = OTHER; note = 2'-O-methylcytidine-3'-phosphate
  modified_base 20: mod_base = OTHER; note = 2'-O-methyladenosine-3'-phosphate
  modified_base 21: mod_base = OTHER; note = 2'-O-methylguanosine-3'-phosphorothioate
  modified_base 22: mod_base = OTHER; note = 2'-O-methyluridine-3'-phosphorothioate
  modified_base 23: mod_base = OTHER; note = 2'-O-methylcytidine
aagcggaaggtgggacagcagtc

SEQ ID NO: 1311 - RNA, 23 nt, synthetic construct
  source 1..23: mol_type = other RNA
  modified_base 1: mod_base = OTHER; note = 2'-O-methyladenosine-3'-phosphorothioate
  modified_base 2: mod_base = OTHER; note = 2'-deoxy-2'-fluorocytidine-3'-phosphorothioate
  modified_base 3: mod_base = OTHER; note = 2'-O-methyladenosine-3'-phosphate
  modified_base 4: mod_base = OTHER; note = 2'-O-methyluridine-3'-phosphate
  modified_base 5: mod_base = OTHER; note = 2'-O-methyluridine-3'-phosphate
  modified_base 6: mod_base = OTHER; note = 2'-deoxy-2'-fluoroguanosine-3'-phosphate
  modified_base 7: mod_base = OTHER; note = 2'-O-methyluridine-3'-phosphate
  modified_base 8: mod_base = OTHER; note = 2'-deoxy-2'-fluoroadenosine-3'-phosphate
  modified_base 9: mod_base = OTHER; note = 2'-deoxy-2'-fluorocytidine-3'-phosphate
  modified_base 10: mod_base = OTHER; note = 2'-O-methylguanosine-3'-phosphate
  modified_base 11: mod_base = OTHER; note = 2'-O-methyladenosine-3'-phosphate
  modified_base 12: mod_base = OTHER; note = 2'-O-methyladenosine-3'-phosphate
  modified_base 13: mod_base = OTHER; note = 2'-O-methylcytidine-3'-phosphate
  modified_base 14: mod_base = OTHER; note = 2'-deoxy-2'-fluoroadenosine-3'-phosphate
  modified_base 15: mod_base = OTHER; note = 2'-O-methylcytidine-3'-phosphate
  modified_base 16: mod_base = OTHER; note = 2'-deoxy-2'-fluoroadenosine-3'-phosphate
  modified_base 17: mod_base = OTHER; note = 2'-O-methylguanosine-3'-phosphate
  modified_base 18: mod_base = OTHER; note = 2'-O-methylcytidine-3'-phosphate
  modified_base 19: mod_base = OTHER; note = 2'-O-methyluridine-3'-phosphate
  modified_base 20: mod_base = OTHER; note = 2'-O-methylguanosine-3'-phosphate
  modified_base 21: mod_base = OTHER; note = 2'-O-methyladenosine-3'-phosphorothioate
  modified_base 22: mod_base = OTHER; note = 2'-O-methylguanosine-3'-phosphorothioate
  modified_base 23: mod_base = OTHER; note = 2'-O-methylguanosine
acattgtacgaacacagctgagg

SEQ ID NO: 1312 - RNA, 23 nt, synthetic construct
  source 1..23: mol_type = other RNA
  modified_base 1: mod_base = OTHER; note = 2'-O-methyladenosine-3'-phosphorothioate
  modified_base 2: mod_base = OTHER; note = 2'-deoxy-2'-fluoroguanosine-3'-phosphorothioate
  modified_base 3: mod_base = OTHER; note = 2'-O-methylcytidine-3'-phosphate
  modified_base 4: mod_base = OTHER; note = 2'-O-methylcytidine-3'-phosphate
  modified_base 5: mod_base = OTHER; note = 2'-O-methyluridine-3'-phosphate
  modified_base 6: mod_base = OTHER; note = 2'-deoxy-2'-fluoroguanosine-3'-phosphate
  modified_base 7: mod_base = OTHER; note = 2'-O-methylguanosine-3'-phosphate
  modified_base 8: mod_base = OTHER; note = 2'-deoxy-2'-fluoroguanosine-3'-phosphate
  modified_base 9: mod_base = OTHER; note = 2'-deoxy-2'-fluoroadenosine-3'-phosphate
  modified_base 10: mod_base = OTHER; note = 2'-O-methyladenosine-3'-phosphate
  modified_base 11: mod_base = OTHER; note = 2'-O-methylguanosine-3'-phosphate
  modified_base 12: mod_base = OTHER; note = 2'-O-methylguanosine-3'-phosphate
  modified_base 13: mod_base = OTHER; note = 2'-O-methyluridine-3'-phosphate
  modified_base 14: mod_base = OTHER; note = 2'-deoxy-2'-fluorouridine-3'-phosphate
  modified_base 15: mod_base = OTHER; note = 2'-O-methylguanosine-3'-phosphate
  modified_base 16: mod_base = OTHER; note = 2'-deoxy-2'-fluorocytidine-3'-phosphate
  modified_base 17: mod_base = OTHER; note = 2'-O-methyladenosine-3'-phosphate
  modified_base 18: mod_base = OTHER; note = 2'-O-methylcytidine-3'-phosphate
  modified_base 19: mod_base = OTHER; note = 2'-O-methylcytidine-3'-phosphate
  modified_base 20: mod_base = OTHER; note = 2'-O-methyladenosine-3'-phosphate
  modified_base 21: mod_base = OTHER; note = 2'-O-methyladenosine-3'-phosphorothioate
  modified_base 22: mod_base = OTHER; note = 2'-O-methylcytidine-3'-phosphorothioate
  modified_base 23: mod_base = OTHER; note = 2'-O-methylcytidine
agcctgggaaggttgcaccaacc

SEQ ID NO: 1313 - RNA, 23 nt, synthetic construct
  source 1..23: mol_type = other RNA
  modified_base 1: mod_base = OTHER; note = 2'-O-methyladenosine-3'-phosphorothioate
  modified_base 2: mod_base = OTHER; note = 2'-deoxy-2'-fluoroadenosine-3'-phosphorothioate
  modified_base 3: mod_base = OTHER; note = 2'-O-methylguanosine-3'-phosphate
  modified_base 4: mod_base = OTHER; note = 2'-O-methylguanosine-3'-phosphate
  modified_base 5: mod_base = OTHER; note = 2'-O-methyluridine-3'-phosphate
  modified_base 6: mod_base = OTHER; note = 2'-deoxy-2'-fluoroadenosine-3'-phosphate
  modified_base 7: mod_base = OTHER; note = 2'-O-methylcytidine-3'-phosphate
  modified_base 8: mod_base = OTHER; note = 2'-deoxy-2'-fluoroadenosine-3'-phosphate
  modified_base 9: mod_base = OTHER; note = 2'-deoxy-2'-fluorocytidine-3'-phosphate
  modified_base 10: mod_base = OTHER; note = 2'-O-methyladenosine-3'-phosphate
  modified_base 11: mod_base = OTHER; note = 2'-O-methyluridine-3'-phosphate
  modified_base 12: mod_base = OTHER; note = 2'-O-methylguanosine-3'-phosphate
  modified_base 13: mod_base = OTHER; note = 2'-O-methyluridine-3'-phosphate
  modified_base 14: mod_base = OTHER; note = 2'-deoxy-2'-fluoroguanosine-3'-phosphate
  modified_base 15: mod_base = OTHER; note = 2'-O-methylguanosine-3'-phosphate
  modified_base 16: mod_base = OTHER; note = 2'-deoxy-2'-fluorocytidine-3'-phosphate
  modified_base 17: mod_base = OTHER; note = 2'-O-methyladenosine-3'-phosphate
  modified_base 18: mod_base = OTHER; note = 2'-O-methylguanosine-3'-phosphate
  modified_base 19: mod_base = OTHER; note = 2'-O-methylguanosine-3'-phosphate
  modified_base 20: mod_base = OTHER; note = 2'-O-methylguanosine-3'-phosphate
  modified_base 21: mod_base = OTHER; note = 2'-O-methyladenosine-3'-phosphorothioate
  modified_base 22: mod_base = OTHER; note = 2'-O-methyladenosine-3'-phosphorothioate
  modified_base 23: mod_base = OTHER; note = 2'-O-methylguanosine
aaggtacacatgtggcagggaag

SEQ ID NO: 1314 - RNA, 23 nt, synthetic construct
  source 1..23: mol_type = other RNA
  modified_base 1: mod_base = OTHER; note = 2'-O-methyladenosine-3'-phosphorothioate
  modified_base 2: mod_base = OTHER; note = 2'-deoxy-2'-fluorocytidine-3'-phosphorothioate
  modified_base 3: mod_base = OTHER; note = 2'-O-methyluridine-3'-phosphate
  modified_base 4: mod_base = OTHER; note = 2'-O-methylguanosine-3'-phosphate
  modified_base 5: mod_base = OTHER; note = 2'-O-methyladenosine-3'-phosphate
  modified_base 6: mod_base = OTHER; note = 2'-deoxy-2'-fluorocytidine-3'-phosphate
  modified_base 7: mod_base = OTHER; note = 2'-O-methyladenosine-3'-phosphate
  modified_base 8: mod_base = OTHER; note = 2'-deoxy-2'-fluorouridine-3'-phosphate
  modified_base 9: mod_base = OTHER; note = 2'-deoxy-2'-fluorouridine-3'-phosphate
  modified_base 10: mod_base = OTHER; note = 2'-O-methylguanosine-3'-phosphate
  modified_base 11: mod_base = OTHER; note = 2'-O-methylcytidine-3'-phosphate
  modified_base 12: mod_base = OTHER; note = 2'-O-methyladenosine-3'-phosphate
  modified_base 13: mod_base = OTHER; note = 2'-O-methylcytidine-3'-phosphate
  modified_base 14: mod_base = OTHER; note = 2'-deoxy-2'-fluorocytidine-3'-phosphate
  modified_base 15: mod_base = OTHER; note = 2'-O-methylguanosine-3'-phosphate
  modified_base 16: mod_base = OTHER; note = 2'-deoxy-2'-fluorouridine-3'-phosphate
  modified_base 17: mod_base = OTHER; note = 2'-O-methyluridine-3'-phosphate
  modified_base 18: mod_base = OTHER; note = 2'-O-methylguanosine-3'-phosphate
  modified_base 19: mod_base = OTHER; note = 2'-O-methylguanosine-3'-phosphate
  modified_base 20: mod_base = OTHER; note = 2'-O-methylguanosine-3'-phosphate
  modified_base 21: mod_base = OTHER; note = 2'-O-methyluridine-3'-phosphorothioate
  modified_base 22: mod_base = OTHER; note = 2'-O-methylcytidine-3'-phosphorothioate
  modified_base 23: mod_base = OTHER; note = 2'-O-methylcytidine
actgacattgcaccgttgggtcc

SEQ ID NO: 1315 - RNA, 23 nt, synthetic construct
  source 1..23: mol_type = other RNA
  modified_base 1: mod_base = OTHER; note = 2'-O-methyladenosine-3'-phosphorothioate
  modified_base 2: mod_base = OTHER; note = 2'-deoxy-2'-fluoroadenosine-3'-phosphorothioate
  modified_base 3: mod_base = OTHER; note = 2'-O-methylcytidine-3'-phosphate
  modified_base 4: mod_base = OTHER; note = 2'-O-methyladenosine-3'-phosphate
  modified_base 5: mod_base = OTHER; note = 2'-O-methylguanosine-3'-phosphate
  modified_base 6: mod_base = OTHER; note = 2'-deoxy-2'-fluoroguanosine-3'-phosphate
  modified_base 7: mod_base = OTHER; note = 2'-O-methyluridine-3'-phosphate
  modified_base 8: mod_base = OTHER; note = 2'-deoxy-2'-fluoroadenosine-3'-phosphate
  modified_base 9: mod_base = OTHER; note = 2'-deoxy-2'-fluoroguanosine-3'-phosphate
  modified_base 10: mod_base = OTHER; note = 2'-O-methyluridine-3'-phosphate
  modified_base 11: mod_base = OTHER; note = 2'-O-methyladenosine-3'-phosphate
  modified_base 12: mod_base = OTHER; note = 2'-O-methyluridine-3'-phosphate
  modified_base 13: mod_base = OTHER; note = 2'-O-methyluridine-3'-phosphate
  modified_base 14: mod_base = OTHER; note = 2'-deoxy-2'-fluoroguanosine-3'-phosphate
  modified_base 15: mod_base = OTHER; note = 2'-O-methyluridine-3'-phosphate
  modified_base 16: mod_base = OTHER; note = 2'-deoxy-2'-fluorouridine-3'-phosphate
  modified_base 17: mod_base = OTHER; note = 2'-O-methylguanosine-3'-phosphate
  modified_base 18: mod_base = OTHER; note = 2'-O-methylcytidine-3'-phosphate
  modified_base 19: mod_base = OTHER; note = 2'-O-methyladenosine-3'-phosphate
  modified_base 20: mod_base = OTHER; note = 2'-O-methylguanosine-3'-phosphate
  modified_base 21: mod_base = OTHER; note = 2'-O-methylguanosine-3'-phosphorothioate
  modified_base 22: mod_base = OTHER; note = 2'-O-methylcytidine-3'-phosphorothioate
  modified_base 23: mod_base = OTHER; note = 2'-O-methyladenosine
aacaggtagtattgttgcaggca

SEQ ID NO: 1316 - RNA, 23 nt, synthetic construct
  source 1..23: mol_type = other RNA
  modified_base 1: mod_base = OTHER; note = 2'-O-methyladenosine-3'-phosphorothioate
  modified_base 2: mod_base = OTHER; note = 2'-deoxy-2'-fluorouridine-3'-phosphorothioate
  modified_base 3: mod_base = OTHER; note = 2'-O-methylcytidine-3'-phosphate
  modified_base 4: mod_base = OTHER; note = 2'-O-methyluridine-3'-phosphate
  modified_base 5: mod_base = OTHER; note = 2'-O-methylcytidine-3'-phosphate
  modified_base 6: mod_base = OTHER; note = 2'-deoxy-2'-fluorouridine-3'-phosphate
  modified_base 7: mod_base = OTHER; note = 2'-O-methyluridine-3'-phosphate
  modified_base 8: mod_base = OTHER; note = 2'-deoxy-2'-fluoroguanosine-3'-phosphate
  modified_base 9: mod_base = OTHER; note = 2'-deoxy-2'-fluorouridine-3'-phosphate
  modified_base 10: mod_base = OTHER; note = 2'-O-methyladenosine-3'-phosphate
  modified_base 11: mod_base = OTHER; note = 2'-O-methylcytidine-3'-phosphate
  modified_base 12: mod_base = OTHER; note = 2'-O-methyluridine-3'-phosphate
  modified_base 13: mod_base = OTHER; note = 2'-O-methylcytidine-3'-phosphate
  modified_base 14: mod_base = OTHER; note = 2'-deoxy-2'-fluoroadenosine-3'-phosphate
  modified_base 15: mod_base = OTHER; note = 2'-O-methyladenosine-3'-phosphate
  modified_base 16: mod_base = OTHER; note = 2'-deoxy-2'-fluoroadenosine-3'-phosphate
  modified_base 17: mod_base = OTHER; note = 2'-O-methylguanosine-3'-phosphate
  modified_base 18: mod_base = OTHER; note = 2'-O-methylcytidine-3'-phosphate
  modified_base 19: mod_base = OTHER; note = 2'-O-methylcytidine-3'-phosphate
  modified_base 20: mod_base = OTHER; note = 2'-O-methylcytidine-3'-phosphate
  modified_base 21: mod_base = OTHER; note = 2'-O-methyluridine-3'-phosphorothioate
  modified_base 22: mod_base = OTHER; note = 2'-O-methylguanosine-3'-phosphorothioate
  modified_base 23: mod_base = OTHER; note = 2'-O-methylguanosine
atctcttgtactcaaagccctgg

SEQ ID NO: 1317 - RNA, 23 nt, synthetic construct
  source 1..23: mol_type = other RNA
  modified_base 1: mod_base = OTHER; note = 2'-O-methyladenosine-3'-phosphorothioate
  modified_base 2: mod_base = OTHER; note = 2'-deoxy-2'-fluoroadenosine-3'-phosphorothioate
  modified_base 3: mod_base = OTHER; note = 2'-O-methylguanosine-3'-phosphate
  modified_base 4: mod_base = OTHER; note = 2'-O-methylguanosine-3'-phosphate
  modified_base 5: mod_base = OTHER; note = 2'-O-methyluridine-3'-phosphate
  modified_base 6: mod_base = OTHER; note = 2'-deoxy-2'-fluorouridine-3'-phosphate
  modified_base 7: mod_base = OTHER; note = 2'-O-methyluridine-3'-phosphate
  modified_base 8: mod_base = OTHER; note = 2'-deoxy-2'-fluorocytidine-3'-phosphate
  modified_base 9: mod_base = OTHER; note = 2'-deoxy-2'-fluoroadenosine-3'-phosphate
  modified_base 10: mod_base = OTHER; note = 2'-O-methyluridine-3'-phosphate
  modified_base 11: mod_base = OTHER; note = 2'-O-methyluridine-3'-phosphate
  modified_base 12: mod_base = OTHER; note = 2'-O-methylcytidine-3'-phosphate
  modified_base 13: mod_base = OTHER; note = 2'-O-methyladenosine-3'-phosphate
  modified_base 14: mod_base = OTHER; note = 2'-deoxy-2'-fluoroguanosine-3'-phosphate
  modified_base 15: mod_base = OTHER; note = 2'-O-methylcytidine-3'-phosphate
  modified_base 16: mod_base = OTHER; note = 2'-deoxy-2'-fluorouridine-3'-phosphate
  modified_base 17: mod_base = OTHER; note = 2'-O-methylguanosine-3'-phosphate
  modified_base 18: mod_base = OTHER; note = 2'-O-methylguanosine-3'-phosphate
  modified_base 19: mod_base = OTHER; note = 2'-O-methyladenosine-3'-phosphate
  modified_base 20: mod_base = OTHER; note = 2'-O-methylcytidine-3'-phosphate
  modified_base 21: mod_base = OTHER; note = 2'-O-methyluridine-3'-phosphorothioate
  modified_base 22: mod_base = OTHER; note = 2'-O-methylguanosine-3'-phosphorothioate
  modified_base 23: mod_base = OTHER; note = 2'-O-methylguanosine
aaggtttcattcagctggactgg

SEQ ID NO: 1318 - RNA, 23 nt, synthetic construct
  source 1..23: mol_type = other RNA
  modified_base 1: mod_base = OTHER; note = 2'-O-methyladenosine-3'-phosphorothioate
  modified_base 2: mod_base = OTHER; note = 2'-deoxy-2'-fluoroadenosine-3'-phosphorothioate
  modified_base 3: mod_base = OTHER; note = 2'-O-methylguanosine-3'-phosphate
  modified_base 4: mod_base = OTHER; note = 2'-O-methyluridine-3'-phosphate
  modified_base 5: mod_base = OTHER; note = 2'-O-methyluridine-3'-phosphate
  modified_base 6: mod_base = OTHER; note = 2'-deoxy-2'-fluoroguanosine-3'-phosphate
  modified_base 7: mod_base = OTHER; note = 2'-O-methyluridine-3'-phosphate
  modified_base 8: mod_base = OTHER; note = 2'-deoxy-2'-fluorocytidine-3'-phosphate
  modified_base 9: mod_base = OTHER; note = 2'-deoxy-2'-fluorocytidine-3'-phosphate
  modified_base 10: mod_base = OTHER; note = 2'-O-methyladenosine-3'-phosphate
  modified_base 11: mod_base = OTHER; note = 2'-O-methylcytidine-3'-phosphate
  modified_base 12: mod_base = OTHER; note = 2'-O-methyladenosine-3'-phosphate
  modified_base 13: mod_base = OTHER; note = 2'-O-methyluridine-3'-phosphate
  modified_base 14: mod_base = OTHER; note = 2'-deoxy-2'-fluoroguanosine-3'-phosphate
  modified_base 15: mod_base = OTHER; note = 2'-O-methylguanosine-3'-phosphate
  modified_base 16: mod_base = OTHER; note = 2'-deoxy-2'-fluorocytidine-3'-phosphate
  modified_base 17: mod_base = OTHER; note = 2'-O-methyluridine-3'-phosphate
  modified_base 18: mod_base = OTHER; note = 2'-O-methylguanosine-3'-phosphate
  modified_base 19: mod_base = OTHER; note = 2'-O-methyluridine-3'-phosphate
  modified_base 20: mod_base = OTHER; note = 2'-O-methyluridine-3'-phosphate
  modified_base 21: mod_base = OTHER; note = 2'-O-methylguanosine-3'-phosphorothioate
  modified_base 22: mod_base = OTHER; note = 2'-O-methyladenosine-3'-phosphorothioate
  modified_base 23: mod_base = OTHER; note = 2'-O-methylcytidine
aagttgtccacatggctgttgac

SEQ ID NO: 1319 - RNA, 23 nt, synthetic construct
  source 1..23: mol_type = other RNA
  modified_base 1: mod_base = OTHER; note = 2'-O-methyladenosine-3'-phosphorothioate
  modified_base 2: mod_base = OTHER; note = 2'-deoxy-2'-fluoroadenosine-3'-phosphorothioate
  modified_base 3: mod_base = OTHER; note = 2'-O-methylguanosine-3'-phosphate
  modified_base 4: mod_base = OTHER; note = 2'-O-methylcytidine-3'-phosphate
  modified_base 5: mod_base = OTHER; note = 2'-O-methylcytidine-3'-phosphate
  modified_base 6: mod_base = OTHER; note = 2'-deoxy-2'-fluorouridine-3'-phosphate
  modified_base 7: mod_base = OTHER; note = 2'-O-methylcytidine-3'-phosphate
  modified_base 8: mod_base = OTHER; note = 2'-deoxy-2'-fluoroadenosine-3'-phosphate
  modified_base 9: mod_base = OTHER; note = 2'-deoxy-2'-fluorocytidine-3'-phosphate
  modified_base 10: mod_base = OTHER; note = 2'-O-methyladenosine-3'-phosphate
  modified_base 11: mod_base = OTHER; note = 2'-O-methylguanosine-3'-phosphate
  modified_base 12: mod_base = OTHER; note = 2'-O-methyladenosine-3'-phosphate
  modified_base 13: mod_base = OTHER; note = 2'-O-methylguanosine-3'-phosphate
  modified_base 14: mod_base = OTHER; note = 2'-deoxy-2'-fluoroguanosine-3'-phosphate
  modified_base 15: mod_base = OTHER; note = 2'-O-methyluridine-3'-phosphate
  modified_base 16: mod_base = OTHER; note = 2'-deoxy-2'-fluoroadenosine-3'-phosphate
  modified_base 17: mod_base = OTHER; note = 2'-O-methylcytidine-3'-phosphate
  modified_base 18: mod_base = OTHER; note = 2'-O-methyladenosine-3'-phosphate
  modified_base 19: mod_base = OTHER; note = 2'-O-methylcytidine-3'-phosphate
  modified_base 20: mod_base = OTHER; note = 2'-O-methylguanosine-3'-phosphate
  modified_base 21: mod_base = OTHER; note = 2'-O-methylguanosine-3'-phosphorothioate
  modified_base 22: mod_base = OTHER; note = 2'-O-methyluridine-3'-phosphorothioate
  modified_base 23: mod_base = OTHER; note = 2'-O-methylguanosine
aagcctcacagaggtacacggtg

SEQ ID NO: 1320 - RNA, 23 nt, synthetic construct
  source 1..23: mol_type = other RNA
  modified_base 1: mod_base = OTHER; note = 2'-O-methyladenosine-3'-phosphorothioate
  modified_base 2: mod_base = OTHER; note = 2'-deoxy-2'-fluoroguanosine-3'-phosphorothioate
  modified_base 3: mod_base = OTHER; note = 2'-O-methyluridine-3'-phosphate
  modified_base 4: mod_base = OTHER; note = 2'-O-methylcytidine-3'-phosphate
  modified_base 5: mod_base = OTHER; note = 2'-O-methyladenosine-3'-phosphate
  modified_base 6: mod_base = OTHER; note = 2'-deoxy-2'-fluoroguanosine-3'-phosphate
  modified_base 7: mod_base = OTHER; note = 2'-O-methylcytidine-3'-phosphate
  modified_base 8: mod_base = OTHER; note = 2'-deoxy-2'-fluoroadenosine-3'-phosphate
  modified_base 9: mod_base = OTHER; note = 2'-deoxy-2'-fluoroadenosine-3'-phosphate
  modified_base 10: mod_base = OTHER; note = 2'-O-methyladenosine-3'-phosphate
  modified_base 11: mod_base = OTHER; note = 2'-O-methyluridine-3'-phosphate
  modified_base 12: mod_base = OTHER; note = 2'-O-methylguanosine-3'-phosphate
  modified_base 13: mod_base = OTHER; note = 2'-O-methylguanosine-3'-phosphate
  modified_base 14: mod_base = OTHER; note = 2'-deoxy-2'-fluoroadenosine-3'-phosphate
  modified_base 15: mod_base = OTHER; note = 2'-O-methylcytidine-3'-phosphate
  modified_base 16: mod_base = OTHER; note = 2'-deoxy-2'-fluorouridine-3'-phosphate
  modified_base 17: mod_base = OTHER; note = 2'-O-methylcytidine-3'-phosphate
  modified_base 18: mod_base = OTHER; note = 2'-O-methylcytidine-3'-phosphate
  modified_base 19: mod_base = OTHER; note = 2'-O-methyladenosine-3'-phosphate
  modified_base 20: mod_base = OTHER; note = 2'-O-methylcytidine-3'-phosphate
  modified_base 21: mod_base = OTHER; note = 2'-O-methylcytidine-3'-phosphorothioate
  modified_base 22: mod_base = OTHER; note = 2'-O-methylcytidine-3'-phosphorothioate
  modified_base 23: mod_base = OTHER; note = 2'-O-methyluridine
agtcagcaaatggactccaccct

SEQ ID NO: 1321 - RNA, 23 nt, synthetic construct
  source 1..23: mol_type = other RNA
  modified_base 1: mod_base = OTHER; note = 2'-O-methyladenosine-3'-phosphorothioate
  modified_base 2: mod_base = OTHER; note = 2'-deoxy-2'-fluoroadenosine-3'-phosphorothioate
  modified_base 3: mod_base = OTHER; note = 2'-O-methylguanosine-3'-phosphate
  modified_base 4: mod_base = OTHER; note = 2'-O-methylcytidine-3'-phosphate
  modified_base 5: mod_base = OTHER; note = 2'-O-methyluridine-3'-phosphate
  modified_base 6: mod_base = OTHER; note = 2'-deoxy-2'-fluoroguanosine-3'-phosphate
  modified_base 7: mod_base = OTHER; note = 2'-O-methylguanosine-3'-phosphate
  modified_base 8: mod_base = OTHER; note = 2'-deoxy-2'-fluoroadenosine-3'-phosphate
  modified_base 9: mod_base = OTHER; note = 2'-deoxy-2'-fluorocytidine-3'-phosphate
  modified_base 10: mod_base = OTHER; note = 2'-O-methyladenosine-3'-phosphate
  modified_base 11: mod_base = OTHER; note = 2'-O-methylcytidine-3'-phosphate
  modified_base 12: mod_base = OTHER; note = 2'-O-methyladenosine-3'-phosphate
  modified_base 13: mod_base = OTHER; note = 2'-O-methyluridine-3'-phosphate
  modified_base 14: mod_base = OTHER; note = 2'-deoxy-2'-fluorocytidine-3'-phosphate
  modified_base 15: mod_base = OTHER; note = 2'-O-methyluridine-3'-phosphate
  modified_base 16: mod_base = OTHER; note = 2'-deoxy-2'-fluoroguanosine-3'-phosphate
  modified_base 17: mod_base = OTHER; note = 2'-O-methylguanosine-3'-phosphate
  modified_base 18: mod_base = OTHER; note = 2'-O-methylguanosine-3'-phosphate
  modified_base 19: mod_base = OTHER; note = 2'-O-methylcytidine-3'-phosphate
  modified_base 20: mod_base = OTHER; note = 2'-O-methyladenosine-3'-phosphate
  modified_base 21: mod_base = OTHER; note = 2'-O-methylguanosine-3'-phosphorothioate
  modified_base 22: mod_base = OTHER; note = 2'-O-methylguanosine-3'-phosphorothioate
  modified_base 23: mod_base = OTHER; note = 2'-O-methyladenosine
aagctggacacatctgggcagga

SEQ ID NO: 1322 - RNA, 23 nt, synthetic construct
  source 1..23: mol_type = other RNA
  modified_base 1: mod_base = OTHER; note = 2'-O-methyladenosine-3'-phosphorothioate
  modified_base 2: mod_base = OTHER; note = 2'-deoxy-2'-fluorocytidine-3'-phosphorothioate
  modified_base 3: mod_base = OTHER; note = 2'-O-methyluridine-3'-phosphate
  modified_base 4: mod_base = OTHER; note = 2'-O-methylcytidine-3'-phosphate
  modified_base 5: mod_base = OTHER; note = 2'-O-methylcytidine-3'-phosphate
  modified_base 6: mod_base = OTHER; note = 2'-deoxy-2'-fluorouridine-3'-phosphate
  modified_base 7: mod_base = OTHER; note = 2'-O-methylcytidine-3'-phosphate
  modified_base 8: mod_base = OTHER; note = 2'-deoxy-2'-fluoroadenosine-3'-phosphate
  modified_base 9: mod_base = OTHER; note = 2'-deoxy-2'-fluorocytidine-3'-phosphate
  modified_base 10: mod_base = OTHER; note = 2'-O-methyladenosine-3'-phosphate
  modified_base 11: mod_base = OTHER; note = 2'-O-methylguanosine-3'-phosphate
  modified_base 12: mod_base = OTHER; note = 2'-O-methylguanosine-3'-phosphate
  modified_base 13: mod_base = OTHER; note = 2'-O-methyladenosine-3'-phosphate
  modified_base 14: mod_base = OTHER; note = 2'-deoxy-2'-fluoroguanosine-3'-phosphate
  modified_base 15: mod_base = OTHER; note = 2'-O-methyluridine-3'-phosphate
  modified_base 16: mod_base = OTHER; note = 2'-deoxy-2'-fluoroadenosine-3'-phosphate
  modified_base 17: mod_base = OTHER; note = 2'-O-methylguanosine-3'-phosphate
  modified_base 18: mod_base = OTHER; note = 2'-O-methylcytidine-3'-phosphate
  modified_base 19: mod_base = OTHER; note = 2'-O-methyladenosine-3'-phosphate
  modified_base 20: mod_base = OTHER; note = 2'-O-methylguanosine-3'-phosphate
  modified_base 21: mod_base = OTHER; note = 2'-O-methylcytidine-3'-phosphorothioate
  modified_base 22: mod_base = OTHER; note = 2'-O-methyladenosine-3'-phosphorothioate
  modified_base 23: mod_base = OTHER; note = 2'-O-methylguanosine
actcctcacaggagtagcagcag

SEQ ID NO: 1323 - RNA, 23 nt, synthetic construct
  source 1..23: mol_type = other RNA
  modified_base 1: mod_base = OTHER; note = 2'-O-methyladenosine-3'-phosphorothioate
  modified_base 2: mod_base = OTHER; note = 2'-deoxy-2'-fluoroguanosine-3'-phosphorothioate
  modified_base 3: mod_base = OTHER; note = 2'-O-methyluridine-3'-phosphate
  modified_base 4: mod_base = OTHER; note = 2'-O-methyluridine-3'-phosphate
  modified_base 5: mod_base = OTHER; note = 2'-O-methylguanosine-3'-phosphate
  modified_base 6: mod_base = OTHER; note = 2'-deoxy-2'-fluoroadenosine-3'-phosphate
  modified_base 7: mod_base = OTHER; note = 2'-O-methyluridine-3'-phosphate
  modified_base 8: mod_base = OTHER; note = 2'-deoxy-2'-fluoroguanosine-3'-phosphate
  modified_base 9: mod_base = OTHER; note = 2'-deoxy-2'-fluorocytidine-3'-phosphate
  modified_base 10: mod_base = OTHER; note = 2'-O-methylguanosine-3'-phosphate
  modified_base 11: mod_base = OTHER; note = 2'-O-methylguanosine-3'-phosphate
  modified_base 12: mod_base = OTHER; note = 2'-O-methyladenosine-3'-phosphate
  modified_base 13: mod_base = OTHER; note = 2'-O-methylcytidine-3'-phosphate
  modified_base 14: mod_base = OTHER; note = 2'-deoxy-2'-fluorouridine-3'-phosphate
  modified_base 15: mod_base = OTHER; note = 2'-O-methyluridine-3'-phosphate
  modified_base 16: mod_base = OTHER; note = 2'-deoxy-2'-fluoroguanosine-3'-phosphate
  modified_base 17: mod_base = OTHER; note = 2'-O-methyladenosine-3'-phosphate
  modified_base 18: mod_base = OTHER; note = 2'-O-methylcytidine-3'-phosphate
  modified_base 19: mod_base = OTHER; note = 2'-O-methyladenosine-3'-phosphate
  modified_base 20: mod_base = OTHER; note = 2'-O-methylguanosine-3'-phosphate
  modified_base 21: mod_base = OTHER; note = 2'-O-methylguanosine-3'-phosphorothioate
  modified_base 22: mod_base = OTHER; note = 2'-O-methyladenosine-3'-phosphorothioate
  modified_base 23: mod_base = OTHER; note = 2'-O-methylguanosine
agttgatgcggacttgacaggag

SEQ ID NO: 1324 - RNA, 23 nt, synthetic construct
  source 1..23: mol_type = other RNA
  modified_base 1: mod_base = OTHER; note = 2'-O-methyladenosine-3'-phosphorothioate
  modified_base 2: mod_base = OTHER; note = 2'-deoxy-2'-fluoroadenosine-3'-phosphorothioate
  modified_base 3: mod_base = OTHER; note = 2'-O-methylguanosine-3'-phosphate
  modified_base 4: mod_base = OTHER; note = 2'-O-methylcytidine-3'-phosphate
  modified_base 5: mod_base = OTHER; note = 2'-O-methylcytidine-3'-phosphate
  modified_base 6: mod_base = OTHER; note = 2'-deoxy-2'-fluorocytidine-3'-phosphate
  modified_base 7: mod_base = OTHER; note = 2'-O-methyluridine-3'-phosphate
  modified_base 8: mod_base = OTHER; note = 2'-deoxy-2'-fluoroguanosine-3'-phosphate
  modified_base 9: mod_base = OTHER; note = 2'-deoxy-2'-fluoroguanosine-3'-phosphate
  modified_base 10: mod_base = OTHER; note = 2'-O-methyluridine-3'-phosphate
  modified_base 11: mod_base = OTHER; note = 2'-O-methylguanosine-3'-phosphate
  modified_base 12: mod_base = OTHER; note = 2'-O-methylcytidine-3'-phosphate
  modified_base 13: mod_base = OTHER; note = 2'-O-methylcytidine-3'-phosphate
  modified_base 14: mod_base = OTHER; note = 2'-deoxy-2'-fluoroadenosine-3'-phosphate
  modified_base 15: mod_base = OTHER; note = 2'-O-methylcytidine-3'-phosphate
  modified_base 16: mod_base = OTHER; note = 2'-deoxy-2'-fluoroadenosine-3'-phosphate
  modified_base 17: mod_base = OTHER; note = 2'-O-methylguanosine-3'-phosphate
  modified_base 18: mod_base = OTHER; note = 2'-O-methylguanosine-3'-phosphate
  modified_base 19: mod_base = OTHER; note = 2'-O-methyladenosine-3'-phosphate
  modified_base 20: mod_base = OTHER; note = 2'-O-methyluridine-3'-phosphate
  modified_base 21: mod_base = OTHER; note = 2'-O-methylguanosine-3'-phosphorothioate
  modified_base 22: mod_base = OTHER; note = 2'-O-methylguanosine-3'-phosphorothioate
  modified_base 23: mod_base = OTHER; note = 2'-O-methyluridine
aagccctggtgccacaggatggt

SEQ ID NO: 1325 - RNA, 23 nt, synthetic construct
  source 1..23: mol_type = other RNA
  modified_base 1: mod_base = OTHER; note = 2'-O-methyladenosine-3'-phosphorothioate
  modified_base 2: mod_base = OTHER; note = 2'-deoxy-2'-fluoroadenosine-3'-phosphorothioate
  modified_base 3: mod_base = OTHER; note = 2'-O-methylguanosine-3'-phosphate
  modified_base 4: mod_base = OTHER; note = 2'-O-methyladenosine-3'-phosphate
  modified_base 5: mod_base = OTHER; note = 2'-O-methyladenosine-3'-phosphate
  modified_base 6: mod_base = OTHER; note = 2'-deoxy-2'-fluoroguanosine-3'-phosphate
  modified_base 7: mod_base = OTHER; note = 2'-O-methylguanosine-3'-phosphate
  modified_base 8: mod_base = OTHER; note = 2'-deoxy-2'-fluorouridine-3'-phosphate
  modified_base 9: mod_base = OTHER; note = 2'-deoxy-2'-fluoroguanosine-3'-phosphate
  modified_base 10: mod_base = OTHER; note = 2'-O-methyladenosine-3'-phosphate
  modified_base 11: mod_base = OTHER; note = 2'-O-methyluridine-3'-phosphate
  modified_base 12: mod_base = OTHER; note = 2'-O-methylguanosine-3'-phosphate
  modified_base 13: mod_base = OTHER; note = 2'-O-methyluridine-3'-phosphate
  modified_base 14: mod_base = OTHER; note = 2'-deoxy-2'-fluorouridine-3'-phosphate
  modified_base 15: mod_base = OTHER; note = 2'-O-methylguanosine-3'-phosphate
  modified_base 16: mod_base = OTHER; note = 2'-deoxy-2'-fluoroadenosine-3'-phosphate
  modified_base 17: mod_base = OTHER; note = 2'-O-methylcytidine-3'-phosphate
  modified_base 18: mod_base = OTHER; note = 2'-O-methylcytidine-3'-phosphate
  modified_base 19: mod_base = OTHER; note = 2'-O-methyluridine-3'-phosphate
  modified_base 20: mod_base = OTHER; note = 2'-O-methylcytidine-3'-phosphate
  modified_base 21: mod_base = OTHER; note = 2'-O-methylguanosine-3'-phosphorothioate
  modified_base 22: mod_base = OTHER; note = 2'-O-methylguanosine-3'-phosphorothioate
  modified_base 23: mod_base = OTHER; note = 2'-O-methyluridine
aagaaggtgatgttgacctcggt

SEQ ID NO: 1326 - RNA, 23 nt, synthetic construct
  source 1..23: mol_type = other RNA
  modified_base 1: mod_base = OTHER; note = 2'-O-methyladenosine-3'-phosphorothioate
  modified_base 2: mod_base = OTHER; note = 2'-deoxy-2'-fluorocytidine-3'-phosphorothioate
  modified_base 3: mod_base = OTHER; note = 2'-O-methyluridine-3'-phosphate
  modified_base 4: mod_base = OTHER; note = 2'-O-methylcytidine-3'-phosphate
  modified_base 5: mod_base = OTHER; note = 2'-O-methyluridine-3'-phosphate
  modified_base 6: mod_base = OTHER; note = 2'-deoxy-2'-fluoroguanosine-3'-phosphate
  modified_base 7: mod_base = OTHER; note = 2'-O-methylcytidine-3'-phosphate
  modified_base 8: mod_base = OTHER; note = 2'-deoxy-2'-fluorouridine-3'-phosphate
  modified_base 9: mod_base = OTHER; note = 2'-deoxy-2'-fluoroguanosine-3'-phosphate
  modified_base 10: mod_base = OTHER; note = 2'-O-methyladenosine-3'-phosphate
  modified_base 11: mod_base = OTHER; note = 2'-O-methylguanosine-3'-phosphate
  modified_base 12: mod_base = OTHER; note = 2'-O-methyluridine-3'-phosphate
  modified_base 13: mod_base = OTHER; note = 2'-O-methyladenosine-3'-phosphate
  modified_base 14: mod_base = OTHER; note = 2'-deoxy-2'-fluorocytidine-3'-phosphate
  modified_base 15: mod_base = OTHER; note = 2'-O-methyluridine-3'-phosphate
  modified_base 16: mod_base = OTHER; note = 2'-deoxy-2'-fluorouridine-3'-phosphate
  modified_base 17: mod_base = OTHER; note = 2'-O-methylguanosine-3'-phosphate
  modified_base 18: mod_base = OTHER; note = 2'-O-methylguanosine-3'-phosphate
  modified_base 19: mod_base = OTHER; note = 2'-O-methyladenosine-3'-phosphate
  modified_base 20: mod_base = OTHER; note = 2'-O-methylcytidine-3'-phosphate
  modified_base 21: mod_base = OTHER; note = 2'-O-methylguanosine-3'-phosphorothioate
  modified_base 22: mod_base = OTHER; note = 2'-O-methylcytidine-3'-phosphorothioate
  modified_base 23: mod_base = OTHER; note = 2'-O-methyluridine
actctgctgagtacttggacgct

SEQ ID NO: 1327 - RNA, 23 nt, synthetic construct
  source 1..23: mol_type = other RNA
  modified_base 1: mod_base = OTHER; note = 2'-O-methyladenosine-3'-phosphorothioate
  modified_base 2: mod_base = OTHER; note = 2'-deoxy-2'-fluoroadenosine-3'-phosphorothioate
  modified_base 3: mod_base = OTHER; note = 2'-O-methylguanosine-3'-phosphate
  modified_base 4: mod_base = OTHER; note = 2'-O-methylguanosine-3'-phosphate
  modified_base 5: mod_base = OTHER; note = 2'-O-methyluridine-3'-phosphate
  modified_base 6: mod_base = OTHER; note = 2'-deoxy-2'-fluoroguanosine-3'-phosphate
  modified_base 7: mod_base = OTHER; note = 2'-O-methylcytidine-3'-phosphate
  modified_base 8: mod_base = OTHER; note = 2'-deoxy-2'-fluoroadenosine-3'-phosphate
  modified_base 9: mod_base = OTHER; note = 2'-deoxy-2'-fluorocytidine-3'-phosphate
  modified_base 10: mod_base = OTHER; note = 2'-O-methyluridine-3'-phosphate
  modified_base 11: mod_base = OTHER; note = 2'-O-methylguanosine-3'-phosphate
  modified_base 12: mod_base = OTHER; note = 2'-O-methylguanosine-3'-phosphate
  modified_base 13: mod_base = OTHER; note = 2'-O-methyluridine-3'-phosphate
  modified_base 14: mod_base = OTHER; note = 2'-deoxy-2'-fluoroguanosine-3'-phosphate
  modified_base 15: mod_base = OTHER; note = 2'-O-methylcytidine-3'-phosphate
  modified_base 16: mod_base = OTHER; note = 2'-deoxy-2'-fluorouridine-3'-phosphate
  modified_base 17: mod_base = OTHER; note = 2'-O-methylguanosine-3'-phosphate
  modified_base 18: mod_base = OTHER; note = 2'-O-methylcytidine-3'-phosphate
  modified_base 19: mod_base = OTHER; note = 2'-O-methyladenosine-3'-phosphate
  modified_base 20: mod_base = OTHER; note = 2'-O-methyluridine-3'-phosphate
  modified_base 21: mod_base = OTHER; note = 2'-O-methylguanosine-3'-phosphorothioate
  modified_base 22: mod_base = OTHER; note = 2'-O-methylguanosine-3'-phosphorothioate
  modified_base 23: mod_base = OTHER; note = 2'-O-methylcytidine
aaggtgcactggtgctgcatggc

SEQ ID NO: 1328 - RNA, 23 nt, synthetic construct
  source 1..23: mol_type = other RNA
  modified_base 1: mod_base = OTHER; note = 2'-O-methyladenosine-3'-phosphorothioate
  modified_base 2: mod_base = OTHER; note = 2'-deoxy-2'-fluoroadenosine-3'-phosphorothioate
  modified_base 3: mod_base = OTHER; note = 2'-O-methylguanosine-3'-phosphate
  modified_base 4: mod_base = OTHER; note = 2'-O-methylcytidine-3'-phosphate
  modified_base 5: mod_base = OTHER; note = 2'-O-methylcytidine-3'-phosphate
  modified_base 6: mod_base = OTHER; note = 2'-deoxy-2'-fluoroguanosine-3'-phosphate
  modified_base 7: mod_base = OTHER; note = 2'-O-methyluridine-3'-phosphate
  modified_base 8: mod_base = OTHER; note = 2'-deoxy-2'-fluorouridine-3'-phosphate
  modified_base 9: mod_base = OTHER; note = 2'-deoxy-2'-fluoroadenosine-3'-phosphate
  modified_base 10: mod_base = OTHER; note = 2'-O-methylguanosine-3'-phosphate
  modified_base 11: mod_base = OTHER; note = 2'-O-methylguanosine-3'-phosphate
  modified_base 12: mod_base = OTHER; note = 2'-O-methyladenosine-3'-phosphate
  modified_base 13: mod_base = OTHER; note = 2'-O-methylcytidine-3'-phosphate
  modified_base 14: mod_base = OTHER; note = 2'-deoxy-2'-fluoroadenosine-3'-phosphate
  modified_base 15: mod_base = OTHER; note = 2'-O-methylguanosine-3'-phosphate
  modified_base 16: mod_base = OTHER; note = 2'-deoxy-2'-fluorouridine-3'-phosphate
  modified_base 17: mod_base = OTHER; note = 2'-O-methylguanosine-3'-phosphate
  modified_base 18: mod_base = OTHER; note = 2'-O-methylcytidine-3'-phosphate
  modified_base 19: mod_base = OTHER; note = 2'-O-methyladenosine-3'-phosphate
  modified_base 20: mod_base = OTHER; note = 2'-O-methyladenosine-3'-phosphate
  modified_base 21: mod_base = OTHER; note = 2'-O-methylguanosine-3'-phosphorothioate
  modified_base 22: mod_base = OTHER; note = 2'-O-methylguanosine-3'-phosphorothioate
  modified_base 23: mod_base = OTHER; note = 2'-O-methylguanosine
aagccgttaggacagtgcaaggg

SEQ ID NO: 1329 - RNA, 23 nt, synthetic construct
  source 1..23: mol_type = other RNA
  modified_base 1: mod_base = OTHER; note = 2'-O-methyladenosine-3'-phosphorothioate
  modified_base 2: mod_base = OTHER; note = 2'-deoxy-2'-fluoroadenosine-3'-phosphorothioate
  modified_base 3: mod_base = OTHER; note = 2'-O-methylcytidine-3'-phosphate
  modified_base 4: mod_base = OTHER; note = 2'-O-methylguanosine-3'-phosphate
  modified_base 5: mod_base = OTHER; note = 2'-O-methyluridine-3'-phosphate
  modified_base 6: mod_base = OTHER; note = 2'-deoxy-2'-fluoroguanosine-3'-phosphate
  modified_base 7: mod_base = OTHER; note = 2'-O-methylguanosine-3'-phosphate
  modified_base 8: mod_base = OTHER; note = 2'-deoxy-2'-fluoroguanosine-3'-phosphate
  modified_base 9: mod_base = OTHER; note = 2'-deoxy-2'-fluorouridine-3'-phosphate
  modified_base 10: mod_base = OTHER; note = 2'-O-methylguanosine-3'-phosphate
  modified_base 11: mod_base = OTHER; note = 2'-O-methyluridine-3'-phosphate
  modified_base 12: mod_base = OTHER; note = 2'-O-methyladenosine-3'-phosphate
  modified_base 13: mod_base = OTHER; note = 2'-O-methylguanosine-3'-phosphate
  modified_base 14: mod_base = OTHER; note = 2'-deoxy-2'-fluoroguanosine-3'-phosphate
  modified_base 15: mod_base = OTHER; note = 2'-O-methyluridine-3'-phosphate
  modified_base 16: mod_base = OTHER; note = 2'-deoxy-2'-fluoroguanosine-3'-phosphate
  modified_base 17: mod_base = OTHER; note = 2'-O-methyluridine-3'-phosphate
  modified_base 18: mod_base = OTHER; note = 2'-O-methylguanosine-3'-phosphate
  modified_base 19: mod_base = OTHER; note = 2'-O-methylcytidine-3'-phosphate
  modified_base 20: mod_base = OTHER; note = 2'-O-methyladenosine-3'-phosphate
  modified_base 21: mod_base = OTHER; note = 2'-O-methylguanosine-3'-phosphorothioate
  modified_base 22: mod_base = OTHER; note = 2'-O-methylguanosine-3'-phosphorothioate
  modified_base 23: mod_base = OTHER; note = 2'-O-methyladenosine
aacgtgggtgtaggtgtgcagga

SEQ ID NO: 1330 - RNA, 23 nt, synthetic construct
  source 1..23: mol_type = other RNA
  modified_base 1: mod_base = OTHER; note = 2'-O-methyladenosine-3'-phosphorothioate
  modified_base 2: mod_base = OTHER; note = 2'-deoxy-2'-fluoroadenosine-3'-phosphorothioate
  modified_base 3: mod_base = OTHER; note = 2'-O-methylguanosine-3'-phosphate
  modified_base 4: mod_base = OTHER; note = 2'-O-methylguanosine-3'-phosphate
  modified_base 5: mod_base = OTHER; note = 2'-O-methylguanosine-3'-phosphate
  modified_base 6: mod_base = OTHER; note = 2'-deoxy-2'-fluoroadenosine-3'-phosphate
  modified_base 7: mod_base = OTHER; note = 2'-O-methylcytidine-3'-phosphate
  modified_base 8: mod_base = OTHER; note = 2'-deoxy-2'-fluoroadenosine-3'-phosphate
  modified_base 9: mod_base = OTHER; note = 2'-deoxy-2'-fluorocytidine-3'-phosphate
  modified_base 10: mod_base = OTHER; note = 2'-O-methyladenosine-3'-phosphate
  modified_base 11: mod_base = OTHER; note = 2'-O-methylguanosine-3'-phosphate
  modified_base 12: mod_base = OTHER; note = 2'-O-methyladenosine-3'-phosphate
  modified_base 13: mod_base = OTHER; note = 2'-O-methyladenosine-3'-phosphate
  modified_base 14: mod_base = OTHER; note = 2'-deoxy-2'-fluoroguanosine-3'-phosphate
  modified_base 15: mod_base = OTHER; note = 2'-O-methylguanosine-3'-phosphate
  modified_base 16: mod_base = OTHER; note = 2'-deoxy-2'-fluoroguanosine-3'-phosphate
  modified_base 17: mod_base = OTHER; note = 2'-O-methylcytidine-3'-phosphate
  modified_base 18: mod_base = OTHER; note = 2'-O-methylguanosine-3'-phosphate
  modified_base 19: mod_base = OTHER; note = 2'-O-methyluridine-3'-phosphate
  modified_base 20: mod_base = OTHER; note = 2'-O-methylguanosine-3'-phosphate
  modified_base 21: mod_base = OTHER; note = 2'-O-methylcytidine-3'-phosphorothioate
  modified_base 22: mod_base = OTHER; note = 2'-O-methyladenosine-3'-phosphorothioate
  modified_base 23: mod_base = OTHER; note = 2'-O-methylguanosine
aagggacacagaagggcgtgcag

SEQ ID NO: 1331 - RNA, 23 nt, synthetic construct
  source 1..23: mol_type = other RNA
  modified_base 1: mod_base = OTHER; note = 2'-O-methyladenosine-3'-phosphorothioate
  modified_base 2: mod_base = OTHER; note = 2'-deoxy-2'-fluoroguanosine-3'-phosphorothioate
  modified_base 3: mod_base = OTHER; note = 2'-O-methyladenosine-3'-phosphate
  modified_base 4: mod_base = OTHER; note = 2'-O-methyladenosine-3'-phosphate
  modified_base 5: mod_base = OTHER; note = 2'-O-methylcytidine-3'-phosphate
  modified_base 6: mod_base = OTHER; note = 2'-deoxy-2'-fluoroguanosine-3'-phosphate
  modified_base 7: mod_base = OTHER; note = 2'-O-methyluridine-3'-phosphate
  modified_base 8: mod_base = OTHER; note = 2'-deoxy-2'-fluorouridine-3'-phosphate
  modified_base 9: mod_base = OTHER; note = 2'-deoxy-2'-fluorocytidine-3'-phosphate
  modified_base 10: mod_base = OTHER; note = 2'-O-methyluridine-3'-phosphate
  modified_base 11: mod_base = OTHER; note = 2'-O-methylcytidine-3'-phosphate
  modified_base 12: mod_base = OTHER; note = 2'-O-methyladenosine-3'-phosphate
  modified_base 13: mod_base = OTHER; note = 2'-O-methylguanosine-3'-phosphate
  modified_base 14: mod_base = OTHER; note = 2'-deoxy-2'-fluoroadenosine-3'-phosphate
  modified_base 15: mod_base = OTHER; note = 2'-O-methylcytidine-3'-phosphate
  modified_base 16: mod_base = OTHER; note = 2'-deoxy-2'-fluoroadenosine-3'-phosphate
  modified_base 17: mod_base = OTHER; note = 2'-O-methylguanosine-3'-phosphate
  modified_base 18: mod_base = OTHER; note = 2'-O-methylcytidine-3'-phosphate
  modified_base 19: mod_base = OTHER; note = 2'-O-methyladenosine-3'-phosphate
  modified_base 20: mod_base = OTHER; note = 2'-O-methylguanosine-3'-phosphate
  modified_base 21: mod_base = OTHER; note = 2'-O-methyluridine-3'-phosphorothioate
  modified_base 22: mod_base = OTHER; note = 2'-O-methylguanosine-3'-phosphorothioate
  modified_base 23: mod_base = OTHER; note = 2'-O-methylguanosine
agaacgttctcagacagcagtgg

SEQ ID NO: 1332 - RNA, 23 nt, synthetic construct
  source 1..23: mol_type = other RNA
  modified_base 1: mod_base = OTHER; note = 2'-O-methyladenosine-3'-phosphorothioate
  modified_base 2: mod_base = OTHER; note = 2'-deoxy-2'-fluorocytidine-3'-phosphorothioate
  modified_base 3: mod_base = OTHER; note = 2'-O-methyluridine-3'-phosphate
  modified_base 4: mod_base = OTHER; note = 2'-O-methylcytidine-3'-phosphate
  modified_base 5: mod_base = OTHER; note = 2'-O-methylcytidine-3'-phosphate
  modified_base 6: mod_base = OTHER; note = 2'-deoxy-2'-fluoroadenosine-3'-phosphate
  modified_base 7: mod_base = OTHER; note = 2'-O-methylguanosine-3'-phosphate
  modified_base 8: mod_base = OTHER; note = 2'-deoxy-2'-fluoroguanosine-3'-phosphate
  modified_base 9: mod_base = OTHER; note = 2'-deoxy-2'-fluorouridine-3'-phosphate
  modified_base 10: mod_base = OTHER; note = 2'-O-methylguanosine-3'-phosphate
  modified_base 11: mod_base = OTHER; note = 2'-O-methylguanosine-3'-phosphate
  modified_base 12: mod_base = OTHER; note = 2'-O-methyladenosine-3'-phosphate
  modified_base 13: mod_base = OTHER; note = 2'-O-methylcytidine-3'-phosphate
  modified_base 14: mod_base = OTHER; note = 2'-deoxy-2'-fluoroadenosine-3'-phosphate
  modified_base 15: mod_base = OTHER; note = 2'-O-methylguanosine-3'-phosphate
  modified_base 16: mod_base = OTHER; note = 2'-deoxy-2'-fluoroadenosine-3'-phosphate
  modified_base 17: mod_base = OTHER; note = 2'-O-methylguanosine-3'-phosphate
  modified_base 18: mod_base = OTHER; note = 2'-O-methylcytidine-3'-phosphate
  modified_base 19: mod_base = OTHER; note = 2'-O-methyladenosine-3'-phosphate
  modified_base 20: mod_base = OTHER; note = 2'-O-methyluridine-3'-phosphate
  modified_base 21: mod_base = OTHER; note = 2'-O-methylguanosine-3'-phosphorothioate
  modified_base 22: mod_base = OTHER; note = 2'-O-methylguanosine-3'-phosphorothioate
  modified_base 23: mod_base = OTHER; note = 2'-O-methylguanosine
actccaggtggacagagcatggg

SEQ ID NO: 1333 - RNA, 23 nt, synthetic construct
  source 1..23: mol_type = other RNA
  modified_base 1: mod_base = OTHER; note = 2'-O-methyladenosine-3'-phosphorothioate
  modified_base 2: mod_base = OTHER; note = 2'-deoxy-2'-fluorouridine-3'-phosphorothioate
  modified_base 3: mod_base = OTHER; note = 2'-O-methyluridine-3'-phosphate
  modified_base 4: mod_base = OTHER; note = 2'-O-methyluridine-3'-phosphate
  modified_base 5: mod_base = OTHER; note = 2'-O-methyluridine-3'-phosphate
  modified_base 6: mod_base = OTHER; note = 2'-deoxy-2'-fluorocytidine-3'-phosphate
  modified_base 7: mod_base = OTHER; note = 2'-O-methyladenosine-3'-phosphate
  modified_base 8: mod_base = OTHER; note = 2'-deoxy-2'-fluorouridine-3'-phosphate
  modified_base 9: mod_base = OTHER; note = 2'-deoxy-2'-fluoroguanosine-3'-phosphate
  modified_base 10: mod_base = OTHER; note = 2'-O-methyladenosine-3'-phosphate
  modified_base 11: mod_base = OTHER; note = 2'-O-methyluridine-3'-phosphate
  modified_base 12: mod_base = OTHER; note = 2'-O-methylcytidine-3'-phosphate
  modified_base 13: mod_base = OTHER; note = 2'-O-methyladenosine-3'-phosphate
  modified_base 14: mod_base = OTHER; note = 2'-deoxy-2'-fluoroguanosine-3'-phosphate
  modified_base 15: mod_base = OTHER; note = 2'-O-methyladenosine-3'-phosphate
  modified_base 16: mod_base = OTHER; note = 2'-deoxy-2'-fluorocytidine-3'-phosphate
  modified_base 17: mod_base = OTHER; note = 2'-O-methyladenosine-3'-phosphate
  modified_base 18: mod_base = OTHER; note = 2'-O-methyladenosine-3'-phosphate
  modified_base 19: mod_base = OTHER; note = 2'-O-methyluridine-3'-phosphate
  modified_base 20: mod_base = OTHER; note = 2'-O-methylguanosine-3'-phosphate
  modified_base 21: mod_base = OTHER; note = 2'-O-methylcytidine-3'-phosphorothioate
  modified_base 22: mod_base = OTHER; note = 2'-O-methyladenosine-3'-phosphorothioate
  modified_base 23: mod_base = OTHER; note = 2'-O-methylcytidine
attttcatgatcagacaatgcac

SEQ ID NO: 1334 - RNA, 23 nt, synthetic construct
  source 1..23: mol_type = other RNA
  modified_base 1: mod_base = OTHER; note = 2'-O-methyladenosine-3'-phosphorothioate
  modified_base 2: mod_base = OTHER; note = 2'-deoxy-2'-fluorouridine-3'-phosphorothioate
  modified_base 3: mod_base = OTHER; note = 2'-O-methyladenosine-3'-phosphate
  modified_base 4: mod_base = OTHER; note = 2'-O-methylguanosine-3'-phosphate
  modified_base 5: mod_base = OTHER; note = 2'-O-methylguanosine-3'-phosphate
  modified_base 6: mod_base = OTHER; note = 2'-deoxy-2'-fluoroadenosine-3'-phosphate
  modified_base 7: mod_base = OTHER; note = 2'-O-methylcytidine-3'-phosphate
  modified_base 8: mod_base = OTHER; note = 2'-deoxy-2'-fluorouridine-3'-phosphate
  modified_base 9: mod_base = OTHER; note = 2'-deoxy-2'-fluorocytidine-3'-phosphate
  modified_base 10: mod_base = OTHER; note = 2'-O-methylcytidine-3'-phosphate
  modified_base 11: mod_base = OTHER; note = 2'-O-methyluridine-3'-phosphate
  modified_base 12: mod_base = OTHER; note = 2'-O-methylguanosine-3'-phosphate
  modified_base 13: mod_base = OTHER; note = 2'-O-methyladenosine-3'-phosphate
  modified_base 14: mod_base = OTHER; note = 2'-deoxy-2'-fluoroguanosine-3'-phosphate
  modified_base 15: mod_base = OTHER; note = 2'-O-methyluridine-3'-phosphate
  modified_base 16: mod_base = OTHER; note = 2'-deoxy-2'-fluoroguanosine-3'-phosphate
  modified_base 17: mod_base = OTHER; note = 2'-O-methylguanosine-3'-phosphate
  modified_base 18: mod_base = OTHER; note = 2'-O-methylcytidine-3'-phosphate
  modified_base 19: mod_base = OTHER; note = 2'-O-methylguanosine-3'-phosphate
  modified_base 20: mod_base = OTHER; note = 2'-O-methylcytidine-3'-phosphate
  modified_base 21: mod_base = OTHER; note = 2'-O-methylcytidine-3'-phosphorothioate
  modified_base 22: mod_base = OTHER; note = 2'-O-methylcytidine-3'-phosphorothioate
  modified_base 23: mod_base = OTHER; note = 2'-O-methyluridine
ataggactcctgagtggcgccct

SEQ ID NO: 1335 - RNA, 23 nt, synthetic construct
  source 1..23: mol_type = other RNA
  modified_base 1: mod_base = OTHER; note = 2'-O-methyladenosine-3'-phosphorothioate
  modified_base 2: mod_base = OTHER; note = 2'-deoxy-2'-fluoroguanosine-3'-phosphorothioate
  modified_base 3: mod_base = OTHER; note = 2'-O-methyluridine-3'-phosphate
  modified_base 4: mod_base = OTHER; note = 2'-O-methylcytidine-3'-phosphate
  modified_base 5: mod_base = OTHER; note = 2'-O-methylcytidine-3'-phosphate
  modified_base 6: mod_base = OTHER; note = 2'-deoxy-2'-fluorocytidine-3'-phosphate
  modified_base 7: mod_base = OTHER; note = 2'-O-methyladenosine-3'-phosphate
  modified_base 8: mod_base = OTHER; note = 2'-deoxy-2'-fluoroguanosine-3'-phosphate
  modified_base 9: mod_base = OTHER; note = 2'-deoxy-2'-fluorouridine-3'-phosphate
  modified_base 10: mod_base = OTHER; note = 2'-O-methylguanosine-3'-phosphate
  modified_base 11: mod_base = OTHER; note = 2'-O-methyladenosine-3'-phosphate
  modified_base 12: mod_base = OTHER; note = 2'-O-methylcytidine-3'-phosphate
  modified_base 13: mod_base = OTHER; note = 2'-O-methyladenosine-3'-phosphate
  modified_base 14: mod_base = OTHER; note = 2'-deoxy-2'-fluorouridine-3'-phosphate
  modified_base 15: mod_base = OTHER; note = 2'-O-methylcytidine-3'-phosphate
  modified_base 16: mod_base = OTHER; note = 2'-deoxy-2'-fluoroadenosine-3'-phosphate
  modified_base 17: mod_base = OTHER; note = 2'-O-methylguanosine-3'-phosphate
  modified_base 18: mod_base = OTHER; note = 2'-O-methylguanosine-3'-phosphate
  modified_base 19: mod_base = OTHER; note = 2'-O-methylguanosine-3'-phosphate
  modified_base 20: mod_base = OTHER; note = 2'-O-methyladenosine-3'-phosphate
  modified_base 21: mod_base = OTHER; note = 2'-O-methylguanosine-3'-phosphorothioate
  modified_base 22: mod_base = OTHER; note = 2'-O-methylguanosine-3'-phosphorothioate
  modified_base 23: mod_base = OTHER; note = 2'-O-methylguanosine
agtcccagtgacatcagggaggg

SEQ ID NO: 1336 - RNA, 23 nt, synthetic construct
  source 1..23: mol_type = other RNA
  modified_base 1: mod_base = OTHER; note = 2'-O-methyladenosine-3'-phosphorothioate
  modified_base 2: mod_base = OTHER; note = 2'-deoxy-2'-fluoroadenosine-3'-phosphorothioate
  modified_base 3: mod_base = OTHER; note = 2'-O-methylcytidine-3'-phosphate
  modified_base 4: mod_base = OTHER; note = 2'-O-methyladenosine-3'-phosphate
  modified_base 5: mod_base = OTHER; note = 2'-O-methyluridine-3'-phosphate
  modified_base 6: mod_base = OTHER; note = 2'-deoxy-2'-fluoroguanosine-3'-phosphate
  modified_base 7: mod_base = OTHER; note = 2'-O-methylcytidine-3'-phosphate
  modified_base 8: mod_base = OTHER; note = 2'-deoxy-2'-fluorouridine-3'-phosphate
  modified_base 9: mod_base = OTHER; note = 2'-deoxy-2'-fluorouridine-3'-phosphate
  modified_base 10: mod_base = OTHER; note = 2'-O-methyladenosine-3'-phosphate
  modified_base 11: mod_base = OTHER; note = 2'-O-methylguanosine-3'-phosphate
  modified_base 12: mod_base = OTHER; note = 2'-O-methyluridine-3'-phosphate
  modified_base 13: mod_base = OTHER; note = 2'-O-methyluridine-3'-phosphate
  modified_base 14: mod_base = OTHER; note = 2'-deoxy-2'-fluorouridine-3'-phosphate
  modified_base 15: mod_base = OTHER; note = 2'-O-methylguanosine-3'-phosphate
  modified_base 16: mod_base = OTHER; note = 2'-deoxy-2'-fluorouridine-3'-phosphate
  modified_base 17: mod_base = OTHER; note = 2'-O-methyluridine-3'-phosphate
  modified_base 18: mod_base = OTHER; note = 2'-O-methylcytidine-3'-phosphate
  modified_base 19: mod_base = OTHER; note = 2'-O-methylcytidine-3'-phosphate
  modified_base 20: mod_base = OTHER; note = 2'-O-methyladenosine-3'-phosphate
  modified_base 21: mod_base = OTHER; note = 2'-O-methylguanosine-3'-phosphorothioate
  modified_base 22: mod_base = OTHER; note = 2'-O-methylguanosine-3'-phosphorothioate
  modified_base 23: mod_base = OTHER; note = 2'-O-methylguanosine
aacatgcttagtttgttccaggg

SEQ ID NO: 1337 - RNA, 23 nt, synthetic construct
  source 1..23: mol_type = other RNA
  modified_base 1: mod_base = OTHER; note = 2'-O-methyladenosine-3'-phosphorothioate
  modified_base 2: mod_base = OTHER; note = 2'-deoxy-2'-fluoroguanosine-3'-phosphorothioate
  modified_base 3: mod_base = OTHER; note = 2'-O-methyluridine-3'-phosphate
  modified_base 4: mod_base = OTHER; note = 2'-O-methylguanosine-3'-phosphate
  modified_base 5: mod_base = OTHER; note = 2'-O-methylguanosine-3'-phosphate
  modified_base 6: mod_base = OTHER; note = 2'-deoxy-2'-fluorocytidine-3'-phosphate
  modified_base 7: mod_base = OTHER; note = 2'-O-methylcytidine-3'-phosphate
  modified_base 8: mod_base = OTHER; note = 2'-deoxy-2'-fluoroadenosine-3'-phosphate
  modified_base 9: mod_base = OTHER; note = 2'-deoxy-2'-fluoroguanosine-3'-phosphate
  modified_base 10: mod_base = OTHER; note = 2'-O-methylcytidine-3'-phosphate
  modified_base 11: mod_base = OTHER; note = 2'-O-methyluridine-3'-phosphate
  modified_base 12: mod_base = OTHER; note = 2'-O-methylguanosine-3'-phosphate
  modified_base 13: mod_base = OTHER; note = 2'-O-methylguanosine-3'-phosphate
  modified_base 14: mod_base = OTHER; note = 2'-deoxy-2'-fluoroadenosine-3'-phosphate
  modified_base 15: mod_base = OTHER; note = 2'-O-methyladenosine-3'-phosphate
  modified_base 16: mod_base = OTHER; note = 2'-deoxy-2'-fluorouridine-3'-phosphate
  modified_base 17: mod_base = OTHER; note = 2'-O-methylcytidine-3'-phosphate
  modified_base 18: mod_base = OTHER; note = 2'-O-methylcytidine-3'-phosphate
  modified_base 19: mod_base = OTHER; note = 2'-O-methylguanosine-3'-phosphate
  modified_base 20: mod_base = OTHER; note = 2'-O-methyluridine-3'-phosphate
  modified_base 21: mod_base = OTHER; note = 2'-O-methylguanosine-3'-phosphorothioate
  modified_base 22: mod_base = OTHER; note = 2'-O-methylcytidine-3'-phosphorothioate
  modified_base 23: mod_base = OTHER; note = 2'-O-methyluridine
agtggccagctggaatccgtgct

SEQ ID NO: 1338 - RNA, 23 nt, synthetic construct
  source 1..23: mol_type = other RNA
  modified_base 1: mod_base = OTHER; note = 2'-O-methyladenosine-3'-phosphorothioate
  modified_base 2: mod_base = OTHER; note = 2'-deoxy-2'-fluorocytidine-3'-phosphorothioate
  modified_base 3: mod_base = OTHER; note = 2'-O-methyluridine-3'-phosphate
  modified_base 4: mod_base = OTHER; note = 2'-O-methyluridine-3'-phosphate
  modified_base 5: mod_base = OTHER; note = 2'-O-methylguanosine-3'-phosphate
  modified_base 6: mod_base = OTHER; note = 2'-deoxy-2'-fluorocytidine-3'-phosphate
  modified_base 7: mod_base = OTHER; note = 2'-O-methylcytidine-3'-phosphate
  modified_base 8: mod_base = OTHER; note = 2'-deoxy-2'-fluorouridine-3'-phosphate
  modified_base 9: mod_base = OTHER; note = 2'-deoxy-2'-fluoroguanosine-3'-phosphate
  modified_base 10: mod_base = OTHER; note = 2'-O-methylguanosine-3'-phosphate
  modified_base 11: mod_base = OTHER; note = 2'-O-methyladenosine-3'-phosphate
  modified_base 12: mod_base = OTHER; note = 2'-O-methylcytidine-3'-phosphate
  modified_base 13: mod_base = OTHER; note = 2'-O-methylcytidine-3'-phosphate
  modified_base 14: mod_base = OTHER; note = 2'-deoxy-2'-fluoroadenosine-3'-phosphate
  modified_base 15: mod_base = OTHER; note = 2'-O-methylguanosine-3'-phosphate
  modified_base 16: mod_base = OTHER; note = 2'-deoxy-2'-fluorocytidine-3'-phosphate
  modified_base 17: mod_base = OTHER; note = 2'-O-methylcytidine-3'-phosphate
  modified_base 18: mod_base = OTHER; note = 2'-O-methyluridine-3'-phosphate
  modified_base 19: mod_base = OTHER; note = 2'-O-methylguanosine-3'-phosphate
  modified_base 20: mod_base = OTHER; note = 2'-O-methyluridine-3'-phosphate
  modified_base 21: mod_base = OTHER; note = 2'-O-methylcytidine-3'-phosphorothioate
  modified_base 22: mod_base = OTHER; note = 2'-O-methyluridine-3'-phosphorothioate
  modified_base 23: mod_base = OTHER; note = 2'-O-methylguanosine
acttgcctggaccagcctgtctg

SEQ ID NO: 1339 - RNA, 23 nt, synthetic construct
  source 1..23: mol_type = other RNA
  modified_base 1: mod_base = OTHER; note = 2'-O-methyladenosine-3'-phosphorothioate
  modified_base 2: mod_base = OTHER; note = 2'-deoxy-2'-fluorocytidine-3'-phosphorothioate
  modified_base 3: mod_base = OTHER; note = 2'-O-methyluridine-3'-phosphate
  modified_base 4: mod_base = OTHER; note = 2'-O-methylguanosine-3'-phosphate
  modified_base 5: mod_base = OTHER; note = 2'-O-methyluridine-3'-phosphate
  modified_base 6: mod_base = OTHER; note = 2'-deoxy-2'-fluorocytidine-3'-phosphate
  modified_base 7: mod_base = OTHER; note = 2'-O-methylguanosine-3'-phosphate
  modified_base 8: mod_base = OTHER; note = 2'-deoxy-2'-fluorocytidine-3'-phosphate
  modified_base 9: mod_base = OTHER; note = 2'-deoxy-2'-fluoroadenosine-3'-phosphate
  modified_base 10: mod_base = OTHER; note = 2'-O-methylguanosine-3'-phosphate
  modified_base 11: mod_base = OTHER; note = 2'-O-methylcytidine-3'-phosphate
  modified_base 12: mod_base = OTHER; note = 2'-O-methyluridine-3'-phosphate
  modified_base 13: mod_base = OTHER; note = 2'-O-methyluridine-3'-phosphate
  modified_base 14: mod_base = OTHER; note = 2'-deoxy-2'-fluorocytidine-3'-phosphate
  modified_base 15: mod_base = OTHER; note = 2'-O-methylcytidine-3'-phosphate
  modified_base 16: mod_base = OTHER; note = 2'-deoxy-2'-fluorouridine-3'-phosphate
  modified_base 17: mod_base = OTHER; note = 2'-O-methylguanosine-3'-phosphate
  modified_base 18: mod_base = OTHER; note = 2'-O-methylguanosine-3'-phosphate
  modified_base 19: mod_base = OTHER; note = 2'-O-methylcytidine-3'-phosphate
  modified_base 20: mod_base = OTHER; note = 2'-O-methyladenosine-3'-phosphate
  modified_base 21: mod_base = OTHER; note = 2'-O-methylguanosine-3'-phosphorothioate
  modified_base 22: mod_base = OTHER; note = 2'-O-methylcytidine-3'-phosphorothioate
  modified_base 23: mod_base = OTHER; note = 2'-O-methyladenosine
actgtcgcagcttcctggcagca

SEQ ID NO: 1340 - RNA, 23 nt, synthetic construct
  source 1..23: mol_type = other RNA
  modified_base 1: mod_base = OTHER; note = 2'-O-methyladenosine-3'-phosphorothioate
  modified_base 2: mod_base = OTHER; note = 2'-deoxy-2'-fluorocytidine-3'-phosphorothioate
  modified_base 3: mod_base = OTHER; note = 2'-O-methylcytidine-3'-phosphate
  modified_base 4: mod_base = OTHER; note = 2'-O-methyluridine-3'-phosphate
  modified_base 5: mod_base = OTHER; note = 2'-O-methylguanosine-3'-phosphate
  modified_base 6: mod_base = OTHER; note = 2'-deoxy-2'-fluoroadenosine-3'-phosphate
  modified_base 7: mod_base = OTHER; note = 2'-O-methylguanosine-3'-phosphate
  modified_base 8: mod_base = OTHER; note = 2'-deoxy-2'-fluorouridine-3'-phosphate
  modified_base 9: mod_base = OTHER; note = 2'-deoxy-2'-fluorouridine-3'-phosphate
  modified_base 10: mod_base = OTHER; note = 2'-O-methyladenosine-3'-phosphate
  modified_base 11: mod_base = OTHER; note = 2'-O-methylcytidine-3'-phosphate
  modified_base 12: mod_base = OTHER; note = 2'-O-methylcytidine-3'-phosphate
  modified_base 13: mod_base = OTHER; note = 2'-O-methylcytidine-3'-phosphate
  modified_base 14: mod_base = OTHER; note = 2'-deoxy-2'-fluorouridine-3'-phosphate
  modified_base 15: mod_base = OTHER; note = 2'-O-methylguanosine-3'-phosphate
  modified_base 16: mod_base = OTHER; note = 2'-deoxy-2'-fluorocytidine-3'-phosphate
  modified_base 17: mod_base = OTHER; note = 2'-O-methyladenosine-3'-phosphate
  modified_base 18: mod_base = OTHER; note = 2'-O-methylguanosine-3'-phosphate
  modified_base 19: mod_base = OTHER; note = 2'-O-methylcytidine-3'-phosphate
  modified_base 20: mod_base = OTHER; note = 2'-O-methyladenosine-3'-phosphate
  modified_base 21: mod_base = OTHER; note = 2'-O-methylguanosine-3'-phosphorothioate
  modified_base 22: mod_base = OTHER; note = 2'-O-methylguanosine-3'-phosphorothioate
  modified_base 23: mod_base = OTHER; note = 2'-O-methylcytidine
acctgagttaccctgcagcaggc

SEQ ID NO: 1341 - RNA, 23 nt, synthetic construct
  source 1..23: mol_type = other RNA
  modified_base 1: mod_base = OTHER; note = 2'-O-methyladenosine-3'-phosphorothioate
  modified_base 2: mod_base = OTHER; note = 2'-deoxy-2'-fluorocytidine-3'-phosphorothioate
  modified_base 3: mod_base = OTHER; note = 2'-O-methyluridine-3'-phosphate
  modified_base 4: mod_base = OTHER; note = 2'-O-methylcytidine-3'-phosphate
  modified_base 5: mod_base = OTHER; note = 2'-O-methyluridine-3'-phosphate
  modified_base 6: mod_base = OTHER; note = 2'-deoxy-2'-fluorocytidine-3'-phosphate
  modified_base 7: mod_base = OTHER; note = 2'-O-methyluridine-3'-phosphate
  modified_base 8: mod_base = OTHER; note = 2'-deoxy-2'-fluoroguanosine-3'-phosphate
  modified_base 9: mod_base = OTHER; note = 2'-deoxy-2'-fluoroadenosine-3'-phosphate
  modified_base 10: mod_base = OTHER; note = 2'-O-methylcytidine-3'-phosphate
  modified_base 11: mod_base = OTHER; note = 2'-O-methylcytidine-3'-phosphate
  modified_base 12: mod_base = OTHER; note = 2'-O-methyluridine-3'-phosphate
  modified_base 13: mod_base = OTHER; note = 2'-O-methylguanosine-3'-phosphate
  modified_base 14: mod_base = OTHER; note = 2'-deoxy-2'-fluoroguanosine-3'-phosphate
  modified_base 15: mod_base = OTHER; note = 2'-O-methylcytidine-3'-phosphate
  modified_base 16: mod_base = OTHER; note = 2'-deoxy-2'-fluorocytidine-3'-phosphate
  modified_base 17: mod_base = OTHER; note = 2'-O-methylguanosine-3'-phosphate
  modified_base 18: mod_base = OTHER; note = 2'-O-methyluridine-3'-phosphate
  modified_base 19: mod_base = OTHER; note = 2'-O-methyluridine-3'-phosphate
  modified_base 20: mod_base = OTHER; note = 2'-O-methylguanosine-3'-phosphate
  modified_base 21: mod_base = OTHER; note = 2'-O-methylcytidine-3'-phosphorothioate
  modified_base 22: mod_base = OTHER; note = 2'-O-methylguanosine-3'-phosphorothioate
  modified_base 23: mod_base = OTHER; note = 2'-O-methyladenosine
actctctgacctggccgttgcga

SEQ ID NO: 1342 - RNA, 23 nt, synthetic construct
  source 1..23: mol_type = other RNA
  modified_base 1: mod_base = OTHER; note = 2'-O-methyladenosine-3'-phosphorothioate
  modified_base 2: mod_base = OTHER; note = 2'-deoxy-2'-fluoroguanosine-3'-phosphorothioate
  modified_base 3: mod_base = OTHER; note = 2'-O-methylguanosine-3'-phosphate
  modified_base 4: mod_base = OTHER; note = 2'-O-methyluridine-3'-phosphate
  modified_base 5: mod_base = OTHER; note = 2'-O-methyluridine-3'-phosphate
  modified_base 6: mod_base = OTHER; note = 2'-deoxy-2'-fluorouridine-3'-phosphate
  modified_base 7: mod_base = OTHER; note = 2'-O-methyladenosine-3'-phosphate
  modified_base 8: mod_base = OTHER; note = 2'-deoxy-2'-fluorouridine-3'-phosphate
  modified_base 9: mod_base = OTHER; note = 2'-deoxy-2'-fluorouridine-3'-phosphate
  modified_base 10: mod_base = OTHER; note = 2'-O-methyluridine-3'-phosphate
  modified_base 11: mod_base = OTHER; note = 2'-O-methylguanosine-3'-phosphate
  modified_base 12: mod_base = OTHER; note = 2'-O-methylcytidine-3'-phosphate
  modified_base 13: mod_base = OTHER; note = 2'-O-methyladenosine-3'-phosphate
  modified_base 14: mod_base = OTHER; note = 2'-deoxy-2'-fluoroadenosine-3'-phosphate
  modified_base 15: mod_base = OTHER; note = 2'-O-methyladenosine-3'-phosphate
  modified_base 16: mod_base = OTHER; note = 2'-deoxy-2'-fluoroadenosine-3'-phosphate
  modified_base 17: mod_base = OTHER; note = 2'-O-methylcytidine-3'-phosphate
  modified_base 18: mod_base = OTHER; note = 2'-O-methyluridine-3'-phosphate
  modified_base 19: mod_base = OTHER; note = 2'-O-methylguanosine-3'-phosphate
  modified_base 20: mod_base = OTHER; note = 2'-O-methylguanosine-3'-phosphate
  modified_base 21: mod_base = OTHER; note = 2'-O-methylguanosine-3'-phosphorothioate
  modified_base 22: mod_base = OTHER; note = 2'-O-methylcytidine-3'-phosphorothioate
  modified_base 23: mod_base = OTHER; note = 2'-O-methyluridine
aggtttatttgcaaaactgggct

SEQ ID NO: 1343 - RNA, 23 nt, synthetic construct
  source 1..23: mol_type = other RNA
tgttggctctggcggccatgctc

SEQ ID NO: 1344 - RNA, 23 nt, synthetic construct
  source 1..23: mol_type = other RNA
agccgagctgggagaatgcaggg

SEQ ID NO: 1345 - RNA, 23 nt, synthetic construct
  source 1..23: mol_type = other RNA
cggcgcgtgagctttgttccacc

SEQ ID NO: 1346 - RNA, 23 nt, synthetic construct
  source 1..23: mol_type = other RNA
aatgggcgggtgtgcagcacctg

SEQ ID NO: 1347 - RNA, 23 nt, synthetic construct
  source 1..23: mol_type = other RNA
ttccactacaagaccttcgacgg

SEQ ID NO: 1348 - RNA, 23 nt, synthetic construct
  source 1..23: mol_type = other RNA
ggcctttgcaactacgtgttctc

SEQ ID NO: 1349 - RNA, 23 nt, synthetic construct
  source 1..23: mol_type = other RNA
acgaggacttcaacgtccagcta

SEQ ID NO: 1350 - RNA, 23 nt, synthetic construct
  source 1..23: mol_type = other RNA
ggtcacccgtgttgtcatcaagg

SEQ ID NO: 1351 - RNA, 23 nt, synthetic construct
  source 1..23: mol_type = other RNA
acggctccgtcctcatcaatggg

SEQ ID NO: 1352 - RNA, 23 nt, synthetic construct
  source 1..23: mol_type = other RNA
gagctgccttacagccgcactgg

SEQ ID NO: 1353 - RNA, 23 nt, synthetic construct
  source 1..23: mol_type = other RNA
gggactacatcaaggtcagcatc

SEQ ID NO: 1354 - RNA, 23 nt, synthetic construct
  source 1..23: mol_type = other RNA
gtgctgacattcctgtggaacgg

SEQ ID NO: 1355 - RNA, 23 nt, synthetic construct
  source 1..23: mol_type = other RNA
tggagctggatcccaaatacgcc

SEQ ID NO: 1356 - RNA, 23 nt, synthetic construct
  source 1..23: mol_type = other RNA
accagacctgtggcctgtgtggg

SEQ ID NO: 1357 - RNA, 23 nt, synthetic construct
  source 1..23: mol_type = other RNA
cggccttcaacgagttctatgcc

SEQ ID NO: 1358 - RNA, 23 nt, synthetic construct
  source 1..23: mol_type = other RNA
gggaacctgcagaagttggatgg

SEQ ID NO: 1359 - RNA, 23 nt, synthetic construct
  source 1..23: mol_type = other RNA
actgcacggacgaggagggcatc

SEQ ID NO: 1360 - RNA, 23 nt, synthetic construct
  source 1..23: mol_type = other RNA
tggtggacagcactgcgtacctg

SEQ ID NO: 1361 - RNA, 23 nt, synthetic construct
  source 1..23: mol_type = other RNA
gtgccacctttgtggaatactca

SEQ ID NO: 1362 - RNA, 23 nt, synthetic construct
  source 1..23: mol_type = other RNA
aactggaggtgccctgagctctg

SEQ ID NO: 1363 - RNA, 23 nt, synthetic construct
  source 1..23: mol_type = other RNA
ccctcaacatgcagcaccaggag

SEQ ID NO: 1364 - RNA, 23 nt, synthetic construct
  source 1..23: mol_type = other RNA
tcaccctgcacggacacctgctc

SEQ ID NO: 1365 - RNA, 23 nt, synthetic construct
  source 1..23: mol_type = other RNA
gaggaccactgtgtggacggctg

SEQ ID NO: 1366 - RNA, 23 nt, synthetic construct
  source 1..23: mol_type = other RNA
gtgctggatgacatcacgcactc

SEQ ID NO: 1367 - RNA, 23 nt, synthetic construct
  source 1..23: mol_type = other RNA
ggcacctccttcaacaccacctg

SEQ ID NO: 1368 - RNA, 23 nt, synthetic construct
  source 1..23: mol_type = other RNA
ggctatggcagtgccaggacctg

SEQ ID NO: 1369 - RNA, 23 nt, synthetic construct
  source 1..23: mol_type = other RNA
cacctatgatgagaaactctacg

SEQ ID NO: 1370 - RNA, 23 nt, synthetic construct
  source 1..23: mol_type = other RNA
gctacgttctgtccaagaaatgt

SEQ ID NO: 1371 - RNA, 23 nt, synthetic construct
  source 1..23: mol_type = other RNA
ccgacagcagcttcaccgtgctg

SEQ ID NO: 1372 - RNA, 23 nt, synthetic construct
  source 1..23: mol_type = other RNA
acaacgagaactgcctgaaagcg

SEQ ID NO: 1373 - RNA, 23 nt, synthetic construct
  source 1..23: mol_type = other RNA
gttcctcaactccatctacacgc

SEQ ID NO: 1374 - RNA, 23 nt, synthetic construct
  source 1..23: mol_type = other RNA
cagccaacatcaccctgttcaca

SEQ ID NO: 1375 - RNA, 23 nt, synthetic construct
  source 1..23: mol_type = other RNA
cctcgagcttcttcatcgtggtg

SEQ ID NO: 1376 - RNA, 23 nt, synthetic construct
  source 1..23: mol_type = other RNA
tgcagctgctggtgcagctggtg

SEQ ID NO: 1377 - RNA, 23 nt, synthetic construct
  source 1..23: mol_type = other RNA
cactcatgcaggtgtttgtcagg

SEQ ID NO: 1378 - RNA, 23 nt, synthetic construct
  source 1..23: mol_type = other RNA
gtgtgggaacttcaaccagaacc

SEQ ID NO: 1379 - RNA, 23 nt, synthetic construct
  source 1..23: mol_type = other RNA
gctgacgacttcacggccctcag

SEQ ID NO: 1380 - RNA, 23 nt, synthetic construct
  source 1..23: mol_type = other RNA
gcagccttcgccaacacctggaa

SEQ ID NO: 1381 - RNA, 23 nt, synthetic construct
  source 1..23: mol_type = other RNA
tgccaggaacagctttgaggacc

SEQ ID NO: 1382 - RNA, 23 nt, synthetic construct
  source 1..23: mol_type = other RNA
gtgtggagaatgagaactacgcc

SEQ ID NO: 1383 - RNA, 23 nt, synthetic construct
  source 1..23: mol_type = other RNA
gatcccaacagtgccttctcgcg

SEQ ID NO: 1384 - RNA, 23 nt, synthetic construct
  source 1..23: mol_type = other RNA
cccttccactcgaactgcatgtt

SEQ ID NO: 1385 - RNA, 23 nt, synthetic construct
  source 1..23: mol_type = other RNA
gacacctgcaactgtgagcggag

SEQ ID NO: 1386 - RNA, 23 nt, synthetic construct
  source 1..23: mol_type = other RNA
gtcctcctatgtgcacgcctgtg

SEQ ID NO: 1387 - RNA, 23 nt, synthetic construct
  source 1..23: mol_type = other RNA
aagggcgtacagctcagcgactg

SEQ ID NO: 1388 - RNA, 23 nt, synthetic construct
  source 1..23: mol_type = other RNA
gcaccaagtacatgcagaactgc

SEQ ID NO: 1389 - RNA, 23 nt, synthetic construct
  source 1..23: mol_type = other RNA
ccaagtcccagcgctacgcctac

SEQ ID NO: 1390 - RNA, 23 nt, synthetic construct
  source 1..23: mol_type = other RNA
gtggatgcctgccagcccacttg

SEQ ID NO: 1391 - RNA, 23 nt, synthetic construct
  source 1..23: mol_type = other RNA
cgtcacctgcagcgtttccttcg

SEQ ID NO: 1392 - RNA, 23 nt, synthetic construct
  source 1..23: mol_type = other RNA
gcgggcaccttcctcaatgacgc

SEQ ID NO: 1393 - RNA, 23 nt, synthetic construct
  source 1..23: mol_type = other RNA
tgctggctcctggagaggtggtg

SEQ ID NO: 1394 - RNA, 23 nt, synthetic construct
  source 1..23: mol_type = other RNA
cgccgtgtgttcatgtacgggtg

SEQ ID NO: 1395 - RNA, 23 nt, synthetic construct
  source 1..23: mol_type = other RNA
agcctctctgcagaaaagcacag

SEQ ID NO: 1396 - RNA, 23 nt, synthetic construct
  source 1..23: mol_type = other RNA
tacctggactgcagcaacagctc

SEQ ID NO: 1397 - RNA, 23 nt, synthetic construct
  source 1..23: mol_type = other RNA
gggctgtttcagcacacactgcg

SEQ ID NO: 1398 - RNA, 23 nt, synthetic construct
  source 1..23: mol_type = other RNA
ggctgcattgccgaggaggactg

SEQ ID NO: 1399 - RNA, 23 nt, synthetic construct
  source 1..23: mol_type = other RNA
gccacctacaagcctggagagac

SEQ ID NO: 1400 - RNA, 23 nt, synthetic construct
  source 1..23: mol_type = other RNA
gtcgactgcaacacctgcacctg

SEQ ID NO: 1401 - RNA, 23 nt, synthetic construct
  source 1..23: mol_type = other RNA
aggaaccggaggtgggagtgcag

SEQ ID NO: 1402 - RNA, 23 nt, synthetic construct
  source 1..23: mol_type = other RNA
gatggccacttcatcacctttga

SEQ ID NO: 1403 - RNA, 23 nt, synthetic construct
  source 1..23: mol_type = other RNA
ggcgatcgctacagctttgaagg

SEQ ID NO: 1404 - RNA, 23 nt, synthetic construct
  source 1..23: mol_type = other RNA
cagctgcgagtacatcttggccc

SEQ ID NO: 1405 - RNA, 23 nt, synthetic construct
  source 1..23: mol_type = other RNA
cttccgcatcgtcaccgagaaca

SEQ ID NO: 1406 - RNA, 23 nt, synthetic construct
  source 1..23: mol_type = other RNA
ccaaggccatcaagctcttcgtg

SEQ ID NO: 1407 - RNA, 23 nt, synthetic construct
  source 1..23: mol_type = other RNA
gagagctacgagctgatcctcca

SEQ ID NO: 1408 - RNA, 23 nt, synthetic construct
  source 1..23: mol_type = other RNA
gggacctttaaggcggtggcgag

SEQ ID NO: 1409 - RNA, 23 nt, synthetic construct
  source 1..23: mol_type = other RNA
cccaccctacaagatacgctaca

SEQ ID NO: 1410 - RNA, 23 nt, synthetic construct
  source 1..23: mol_type = other RNA
ggatcttcctggtcatcgagacc

SEQ ID NO: 1411 - RNA, 23 nt, synthetic construct
  source 1..23: mol_type = other RNA
accagcgtgttcatccgactgca

SEQ ID NO: 1412 - RNA, 23 nt, synthetic construct
  source 1..23: mol_type = other RNA
caggactacaagggcagggtctg

SEQ ID NO: 1413 - RNA, 23 nt, synthetic construct
  source 1..23: mol_type = other RNA
acgacaatgccatcaatgacttt

SEQ ID NO: 1414 - RNA, 23 nt, synthetic construct
  source 1..23: mol_type = other RNA
acgcactggagtttgggaacagc

SEQ ID NO: 1415 - RNA, 23 nt, synthetic construct
  source 1..23: mol_type = other RNA
cccagaagcagtgcagcatcctc

SEQ ID NO: 1416 - RNA, 23 nt, synthetic construct
  source 1..23: mol_type = other RNA
tcccaggttgactccaccaagta

SEQ ID NO: 1417 - RNA, 23 nt, synthetic construct
  source 1..23: mol_type = other RNA
tacgaggcctgcgtgaacgacgc

SEQ ID NO: 1418 - RNA, 23 nt, synthetic construct
  source 1..23: mol_type = other RNA
cgactgcgagtgtttctgcacgg

SEQ ID NO: 1419 - RNA, 23 nt, synthetic construct
  source 1..23: mol_type = other RNA
cctgtgtgtgtcctggcggactc

SEQ ID NO: 1420 - RNA, 23 nt, synthetic construct
  source 1..23: mol_type = other RNA
cttgttctgtgacttctacaacc

SEQ ID NO: 1421 - RNA, 23 nt, synthetic construct
  source 1..23: mol_type = other RNA
ggctgtgagtggcactaccagcc

SEQ ID NO: 1422 - RNA, 23 nt, synthetic construct
  source 1..23: mol_type = other RNA
aggctgctacccgaagtgcccac

SEQ ID NO: 1423 - RNA, 23 nt, synthetic construct
  source 1..23: mol_type = other RNA
ccagcccttcttcaatgaggacc

SEQ ID NO: 1424 - RNA, 23 nt, synthetic construct
  source 1..23: mol_type = other RNA
tgaagtgcgtggcccagtgtggc

SEQ ID NO: 1425 - RNA, 23 nt, synthetic construct
  source 1..23: mol_type = other RNA
tgctacgacaaggacggaaacta

SEQ ID NO: 1426 - RNA, 23 nt, synthetic construct
  source 1..23: mol_type = other RNA
ctatgacgtcggtgcaagggtcc

SEQ ID NO: 1427 - RNA, 23 nt, synthetic construct
  source 1..23: mol_type = other RNA
tgccagagctgtaactgcacacc

SEQ ID NO: 1428 - RNA, 23 nt, synthetic construct
  source 1..23: mol_type = other RNA
tccagtgcgctcacagccttgag

SEQ ID NO: 1429 - RNA, 23 nt, synthetic construct
  source 1..23: mol_type = other RNA
cctgcacctatgaggacaggacc

SEQ ID NO: 1430 - RNA, 23 nt, synthetic construct
  source 1..23: mol_type = other RNA
accaggacgtcatctacaacacc

SEQ ID NO: 1431 - RNA, 23 nt, synthetic construct
  source 1..23: mol_type = other RNA
ggcgcctgcttgatcgccatctg

SEQ ID NO: 1432 - RNA, 23 nt, synthetic construct
  source 1..23: mol_type = other RNA
gcaccatcatcaggaaggctgtg

SEQ ID NO: 1433 - RNA, 23 nt, synthetic construct
  source 1..23: mol_type = other RNA
agccacaacgccattcaccttca

SEQ ID NO: 1434 - RNA, 23 nt, synthetic construct
  source 1..23: mol_type = other RNA
tctccaccgtgtgtgtccgcgag

SEQ ID NO: 1435 - RNA, 23 nt, synthetic construct
  source 1..23: mol_type = other RNA
tggtccagctggtacaatgggca

SEQ ID NO: 1436 - RNA, 23 nt, synthetic construct
  source 1..23: mol_type = other RNA
gagactttgagacgtttgaaaac

SEQ ID NO: 1437 - RNA, 23 nt, synthetic construct
  source 1..23: mol_type = other RNA
agagagggtaccaggtatgccct

SEQ ID NO: 1438 - RNA, 23 nt, synthetic construct
  source 1..23: mol_type = other RNA
gtgctggctgacatcgagtgccg

SEQ ID NO: 1439 - RNA, 23 nt, synthetic construct
  source 1..23: mol_type = other RNA
agcttcccgacatgccgctggag

SEQ ID NO: 1440 - RNA, 23 nt, synthetic construct
  source 1..23: mol_type = other RNA
agcaggtggactgtgaccgcatg

SEQ ID NO: 1441 - RNA, 23 nt, synthetic construct
  source 1..23: mol_type = other RNA
tgcgccaacagccaacagagtcc

SEQ ID NO: 1442 - RNA, 23 nt, synthetic construct
  source 1..23: mol_type = other RNA
cgctctgtcacgactacgagctg

SEQ ID NO: 1443 - RNA, 23 nt, synthetic construct
  source 1..23: mol_type = other RNA
gttctctgctgcgaatacgtgcc

SEQ ID NO: 1444 - RNA, 23 nt, synthetic construct
  source 1..23: mol_type = other RNA
agcacggagcctgctgtgcctac

SEQ ID NO: 1445 - RNA, 23 nt, synthetic construct
  source 1..23: mol_type = other RNA
ccagaccacagcaaccgaaaaga

SEQ ID NO: 1446 - RNA, 23 nt, synthetic construct
  source 1..23: mol_type = other RNA
acctcgcagactgggtccagctc

SEQ ID NO: 1447 - RNA, 23 nt, synthetic construct
  source 1..23: mol_type = other RNA
cagtggacagagtggtttgatga

SEQ ID NO: 1448 - RNA, 23 nt, synthetic construct
  source 1..23: mol_type = other RNA
cccaagtctgaacaacttggagg

SEQ ID NO: 1449 - RNA, 23 nt, synthetic construct
  source 1..23: mol_type = other RNA
cgttgagtcctacgataagatca

SEQ ID NO: 1450 - RNA, 23 nt, synthetic construct
  source 1..23: mol_type = other RNA
cagcagcctaaggacatagagtg

SEQ ID NO: 1451 - RNA, 23 nt, synthetic construct
  source 1..23: mol_type = other RNA
aactggaccctggcacaggtggg

SEQ ID NO: 1452 - RNA, 23 nt, synthetic construct
  source 1..23: mol_type = other RNA
gtgcactgtgacgtccacttcgg

SEQ ID NO: 1453 - RNA, 23 nt, synthetic construct
  source 1..23: mol_type = other RNA
gtgtgcaggaactgggagcagga

SEQ ID NO: 1454 - RNA, 23 nt, synthetic construct
  source 1..23: mol_type = other RNA
ttcaagatgtgctacaactacag

SEQ ID NO: 1455 - RNA, 23 nt, synthetic construct
  source 1..23: mol_type = other RNA
ctctgctgcagtgacgaccactg

SEQ ID NO: 1456 - RNA, 23 nt, synthetic construct
  source 1..23: mol_type = other RNA
accgaccacagagctggagacgg

SEQ ID NO: 1457 - RNA, 23 nt, synthetic construct
  source 1..23: mol_type = other RNA
ccacccaggccctgttctcaacg

SEQ ID NO: 1458 - RNA, 23 nt, synthetic construct
  source 1..23: mol_type = other RNA
ccctctcagaaggactgacatcc

SEQ ID NO: 1459 - RNA, 23 nt, synthetic construct
  source 1..23: mol_type = other RNA
cccagatacacaagcacccttgg

SEQ ID NO: 1460 - RNA, 23 nt, synthetic construct
  source 1..23: mol_type = other RNA
aggctccacagaacccactgtcc

SEQ ID NO: 1461 - RNA, 23 nt, synthetic construct
  source 1..23: mol_type = other RNA
tccacccttccaacacgctcagc

SEQ ID NO: 1462 - RNA, 23 nt, synthetic construct
  source 1..23: mol_type = other RNA
cccaacaacaatggcaacctcca

SEQ ID NO: 1463 - RNA, 23 nt, synthetic construct
  source 1..23: mol_type = other RNA
gcaccgcttccaaagagccgctg

SEQ ID NO: 1464 - RNA, 23 nt, synthetic construct
  source 1..23: mol_type = other RNA
cgccaacactcacgagcgagctg

SEQ ID NO: 1465 - RNA, 23 nt, synthetic construct
  source 1..23: mol_type = other RNA
tccacctctcaggccgagaccag

SEQ ID NO: 1466 - RNA, 23 nt, synthetic construct
  source 1..23: mol_type = other RNA
gcccaggacagagacgacaatga

SEQ ID NO: 1467 - RNA, 23 nt, synthetic construct
  source 1..23: mol_type = other RNA
cccttgactaacaccaccaccag

SEQ ID NO: 1468 - RNA, 23 nt, synthetic construct
  source 1..23: mol_type = other RNA
cgctgtcaaccgaagtgtgagtg

SEQ ID NO: 1469 - RNA, 23 nt, synthetic construct
  source 1..23: mol_type = other RNA
gacgtggacttcccaacctcagg

SEQ ID NO: 1470 - RNA, 23 nt, synthetic construct
  source 1..23: mol_type = other RNA
ggacatggaaacttttgaaaaca

SEQ ID NO: 1471 - RNA, 23 nt, synthetic construct
  source 1..23: mol_type = other RNA
gggcaccaaagagcatagagtgc

SEQ ID NO: 1472 - RNA, 23 nt, synthetic construct
  source 1..23: mol_type = other RNA
gaggtaagcatcgaccaggtcgg

SEQ ID NO: 1473 - RNA, 23 nt, synthetic construct
  source 1..23: mol_type = other RNA
tgctgacctgcagcctggagacg

SEQ ID NO: 1474 - RNA, 23 nt, synthetic construct
  source 1..23: mol_type = other RNA
cctgcaagaacgaagaccagaca

SEQ ID NO: 1475 - RNA, 23 nt, synthetic construct
  source 1..23: mol_type = other RNA
gttcaacatgtgcttcaactaca

SEQ ID NO: 1476 - RNA, 23 nt, synthetic construct
  source 1..23: mol_type = other RNA
cgtgcgtgtgctttgctgtgacg

SEQ ID NO: 1477 - RNA, 23 nt, synthetic construct
  source 1..23: mol_type = other RNA
acctccaccctgagaacagctcc

SEQ ID NO: 1478 - RNA, 23 nt, synthetic construct
  source 1..23: mol_type = other RNA
cctcccaaagtgctgaccaccac

SEQ ID NO: 1479 - RNA, 23 nt, synthetic construct
  source 1..23: mol_type = other RNA
tcttcctccctgggcaccacctg

SEQ ID NO: 1480 - RNA, 23 nt, synthetic construct
  source 1..23: mol_type = other RNA
agtgccaactaccacaaccacgg

SEQ ID NO: 1481 - RNA, 23 nt, synthetic construct
  source 1..23: mol_type = other RNA
accacacccacaaccagaggctc

SEQ ID NO: 1482 - RNA, 23 nt, synthetic construct
  source 1..23: mol_type = other RNA
acgacctggatcctcacaaagcc

SEQ ID NO: 1483 - RNA, 23 nt, synthetic construct
  source 1..23: mol_type = other RNA
agctaccagcgttacacccatcc

SEQ ID NO: 1484 - RNA, 23 nt, synthetic construct
  source 1..23: mol_type = other RNA
gaccacaacagccactacgactg

SEQ ID NO: 1485 - RNA, 23 nt, synthetic construct
  source 1..23: mol_type = other RNA
accagctccaaagccactccctc

SEQ ID NO: 1486 - RNA, 23 nt, synthetic construct
  source 1..23: mol_type = other RNA
ccgcccttccagcactgagaagc

SEQ ID NO: 1487 - RNA, 23 nt, synthetic construct
  source 1..23: mol_type = other RNA
cgcctatcacagaccaccacacc

SEQ ID NO: 1488 - RNA, 23 nt, synthetic construct
  source 1..23: mol_type = other RNA
acggccaccatgtccacagccac

SEQ ID NO: 1489 - RNA, 23 nt, synthetic construct
  source 1..23: mol_type = other RNA
accctcctccactccagagactg

SEQ ID NO: 1490 - RNA, 23 nt, synthetic construct
  source 1..23: mol_type = other RNA
cccacacctccacagtgcttacc

SEQ ID NO: 1491 - RNA, 23 nt, synthetic construct
  source 1..23: mol_type = other RNA
cccaggaacagctcacactacca

SEQ ID NO: 1492 - RNA, 23 nt, synthetic construct
  source 1..23: mol_type = other RNA
cctccagtgtggatcagcacaac

SEQ ID NO: 1493 - RNA, 23 nt, synthetic construct
  source 1..23: mol_type = other RNA
aactcctgggacaactcccatcc

SEQ ID NO: 1494 - RNA, 23 nt, synthetic construct
  source 1..23: mol_type = other RNA
accagcaacacagtgactccctc

SEQ ID NO: 1495 - RNA, 23 nt, synthetic construct
  source 1..23: mol_type = other RNA
ccagtgccgaacaccatggccac

SEQ ID NO: 1496 - RNA, 23 nt, synthetic construct
  source 1..23: mol_type = other RNA
acggtgacttcccacaccctagc

SEQ ID NO: 1497 - RNA, 23 nt, synthetic construct
  source 1..23: mol_type = other RNA
ctcgactccagccctttccagcc

SEQ ID NO: 1498 - RNA, 23 nt, synthetic construct
  source 1..23: mol_type = other RNA
cctagcagcagaaccaccgagtc

SEQ ID NO: 1499 - RNA, 23 nt, synthetic construct
  source 1..23: mol_type = other RNA
cagctcacactaccaaagtgctg

SEQ ID NO: 1500 - RNA, 23 nt, synthetic construct
  source 1..23: mol_type = other RNA
gcacgcttccagtgtggatcagc

SEQ ID NO: 1501 - RNA, 23 nt, synthetic construct
  source 1..23: mol_type = other RNA
cacacccacaaccagaggttcca

SEQ ID NO: 1502 - RNA, 23 nt, synthetic construct
  source 1..23: mol_type = other RNA
accacggtggtgaccatgggctg

SEQ ID NO: 1503 - RNA, 23 nt, synthetic construct
  source 1..23: mol_type = other RNA
acaccgccacagtgctgaccacc

SEQ ID NO: 1504 - RNA, 23 nt, synthetic construct
  source 1..23: mol_type = other RNA
agccactacgactgagtccactg

SEQ ID NO: 1505 - RNA, 23 nt, synthetic construct
  source 1..23: mol_type = other RNA
cagctccaaagccactcccttct

SEQ ID NO: 1506 - RNA, 23 nt, synthetic construct
  source 1..23: mol_type = other RNA
aactccagggacaacacctatcc

SEQ ID NO: 1507 - RNA, 23 nt, synthetic construct
  source 1..23: mol_type = other RNA
accagcagcacagtgactccctc

SEQ ID NO: 1508 - RNA, 23 nt, synthetic construct
  source 1..23: mol_type = other RNA
tctgccctagggaccacccacac

SEQ ID NO: 1509 - RNA, 23 nt, synthetic construct
  source 1..23: mol_type = other RNA
accacacacgggcgatccctgtc

SEQ ID NO: 1510 - RNA, 23 nt, synthetic construct
  source 1..23: mol_type = other RNA
acagcctggacttcggccacctc

SEQ ID NO: 1511 - RNA, 23 nt, synthetic construct
  source 1..23: mol_type = other RNA
ccacccacatcacagagccttcc

SEQ ID NO: 1512 - RNA, 23 nt, synthetic construct
  source 1..23: mol_type = other RNA
agcaaccaccggtaccacccagc

SEQ ID NO: 1513 - RNA, 23 nt, synthetic construct
  source 1..23: mol_type = other RNA
acacccagcaagacccgcacctc

SEQ ID NO: 1514 - RNA, 23 nt, synthetic construct
  source 1..23: mol_type = other RNA
gagtggctggactacagctaccc

SEQ ID NO: 1515 - RNA, 23 nt, synthetic construct
  source 1..23: mol_type = other RNA
ctttgacacctactccaacatcc

SEQ ID NO: 1516 - RNA, 23 nt, synthetic construct
  source 1..23: mol_type = other RNA
agttgggccaggtcgtggaatgc

SEQ ID NO: 1517 - RNA, 23 nt, synthetic construct
  source 1..23: mol_type = other RNA
agcctggactttggcctggtctg

SEQ ID NO: 1518 - RNA, 23 nt, synthetic construct
  source 1..23: mol_type = other RNA
aagatgtgcttcaactatgaaat

SEQ ID NO: 1519 - RNA, 23 nt, synthetic construct
  source 1..23: mol_type = other RNA
cgtgtgttctgctgcaactacgg

SEQ ID NO: 1520 - RNA, 23 nt, synthetic construct
  source 1..23: mol_type = other RNA
accagctctacggccatgccctc

SEQ ID NO: 1521 - RNA, 23 nt, synthetic construct
  source 1..23: mol_type = other RNA
ggatcctcacagagctgaccaca

SEQ ID NO: 1522 - RNA, 23 nt, synthetic construct
  source 1..23: mol_type = other RNA
agccgagcactacagccaccgtg

SEQ ID NO: 1523 - RNA, 23 nt, synthetic construct
  source 1..23: mol_type = other RNA
ctcctccacccaggcaactgctg

SEQ ID NO: 1524 - RNA, 23 nt, synthetic construct
  source 1..23: mol_type = other RNA
acggccacgacacccacagtcac

SEQ ID NO: 1525 - RNA, 23 nt, synthetic construct
  source 1..23: mol_type = other RNA
cccacagctaccagctttacagc

SEQ ID NO: 1526 - RNA, 23 nt, synthetic construct
  source 1..23: mol_type = other RNA
tccacacctccacagtgcttacc

SEQ ID NO: 1527 - RNA, 23 nt, synthetic construct
  source 1..23: mol_type = other RNA
ctaccacaaccacgggcttcaca

SEQ ID NO: 1528 - RNA, 23 nt, synthetic construct
  source 1..23: mol_type = other RNA
ctgaccaccaccaccacaactgt

SEQ ID NO: 1529 - RNA, 23 nt, synthetic construct
  source 1..23: mol_type = other RNA
gccactggttctatggcaacacc

SEQ ID NO: 1530 - RNA, 23 nt, synthetic construct
  source 1..23: mol_type = other RNA
ctcctctagcacacagaccagtg

SEQ ID NO: 1531 - RNA, 23 nt, synthetic construct
  source 1..23: mol_type = other RNA
caccacggccactacgatcacgg

SEQ ID NO: 1532 - RNA, 23 nt, synthetic construct
  source 1..23: mol_type = other RNA
cagggaccacctggatcctcaca

SEQ ID NO: 1533 - RNA, 23 nt, synthetic construct
  source 1..23: mol_type = other RNA
agcagccactacgaccgcaacca

SEQ ID NO: 1534 - RNA, 23 nt, synthetic construct
  source 1..23: mol_type = other RNA
cctcccaaagtgctgaccagcac

SEQ ID NO: 1535 - RNA, 23 nt, synthetic construct
  source 1..23: mol_type = other RNA
ccctccttcacccttgggaccac

SEQ ID NO: 1536 - RNA, 23 nt, synthetic construct
  source 1..23: mol_type = other RNA
aagggccaccagttccatgtcca

SEQ ID NO: 1537 - RNA, 23 nt, synthetic construct
  source 1..23: mol_type = other RNA
cccagcactacagccaccgtgac

SEQ ID NO: 1538 - RNA, 23 nt, synthetic construct
  source 1..23: mol_type = other RNA
gcaccctcaaagtgctgaccagc

SEQ ID NO: 1539 - RNA, 23 nt, synthetic construct
  source 1..23: mol_type = other RNA
accacacccacagtcatcagctc

SEQ ID NO: 1540 - RNA, 23 nt, synthetic construct
  source 1..23: mol_type = other RNA
cacacccacagctaccagcgtta

SEQ ID NO: 1541 - RNA, 23 nt, synthetic construct
  source 1..23: mol_type = other RNA
cctcctctactccagagactgtc

SEQ ID NO: 1542 - RNA, 23 nt, synthetic construct
  source 1..23: mol_type = other RNA
ccacagtgcttaccaccacgacc

SEQ ID NO: 1543 - RNA, 23 nt, synthetic construct
  source 1..23: mol_type = other RNA
cggccactacgatcacagccacc

SEQ ID NO: 1544 - RNA, 23 nt, synthetic construct
  source 1..23: mol_type = other RNA
aactccagggacaactcccatcc

SEQ ID NO: 1545 - RNA, 23 nt, synthetic construct
  source 1..23: mol_type = other RNA
cccagcagcaaccaccagtacca

SEQ ID NO: 1546 - RNA, 23 nt, synthetic construct
  source 1..23: mol_type = other RNA
acctccaggaccacagccacagc

SEQ ID NO: 1547 - RNA, 23 nt, synthetic construct
  source 1..23: mol_type = other RNA
tacggccacgccctcctcaactc

SEQ ID NO: 1548 - RNA, 23 nt, synthetic construct
  source 1..23: mol_type = other RNA
atcctcacaaagctgaccacaac

SEQ ID NO: 1549 - RNA, 23 nt, synthetic construct
  source 1..23: mol_type = other RNA
cctcctccactccagagactgcc

SEQ ID NO: 1550 - RNA, 23 nt, synthetic construct
  source 1..23: mol_type = other RNA
ctccacagtgcttaccaccacgg

SEQ ID NO: 1551 - RNA, 23 nt, synthetic construct
  source 1..23: mol_type = other RNA
aacaccacggccaccacacacgg

SEQ ID NO: 1552 - RNA, 23 nt, synthetic construct
  source 1..23: mol_type = other RNA
gtaccacccagcactcgactcca

SEQ ID NO: 1553 - RNA, 23 nt, synthetic construct
  source 1..23: mol_type = other RNA
tccagccctcaccctagcagcag

SEQ ID NO: 1554 - RNA, 23 nt, synthetic construct
  source 1..23: mol_type = other RNA
ccataaccacggtggtgaccacg

SEQ ID NO: 1555 - RNA, 23 nt, synthetic construct
  source 1..23: mol_type = other RNA
caccagttccaaagccacttcct

SEQ ID NO: 1556 - RNA, 23 nt, synthetic construct
  source 1..23: mol_type = other RNA
ctcccagaacagaccaccacacc

SEQ ID NO: 1557 - RNA, 23 nt, synthetic construct
  source 1..23: mol_type = other RNA
acctccacagtgctgaccacgaa

SEQ ID NO: 1558 - RNA, 23 nt, synthetic construct
  source 1..23: mol_type = other RNA
acgacctggatcctcacagagct

SEQ ID NO: 1559 - RNA, 23 nt, synthetic construct
  source 1..23: mol_type = other RNA
agccactccctcctccagtccag

SEQ ID NO: 1560 - RNA, 23 nt, synthetic construct
  source 1..23: mol_type = other RNA
ggccaccatgtccacagccacac

SEQ ID NO: 1561 - RNA, 23 nt, synthetic construct
  source 1..23: mol_type = other RNA
agtgccgactaccacaaccacgg

SEQ ID NO: 1562 - RNA, 23 nt, synthetic construct
  source 1..23: mol_type = other RNA
accacacccacaaccagtggctc

SEQ ID NO: 1563 - RNA, 23 nt, synthetic construct
  source 1..23: mol_type = other RNA
tccaaggactgcaaccacccttc

SEQ ID NO: 1564 - RNA, 23 nt, synthetic construct
  source 1..23: mol_type = other RNA
cagtgctgacaagcacagccacc

SEQ ID NO: 1565 - RNA, 23 nt, synthetic construct
  source 1..23: mol_type = other RNA
tccacagctaccagctttacacc

SEQ ID NO: 1566 - RNA, 23 nt, synthetic construct
  source 1..23: mol_type = other RNA
ggccaccatgtccacaatccacc

SEQ ID NO: 1567 - RNA, 23 nt, synthetic construct
  source 1..23: mol_type = other RNA
agccactacaactgcagccactg

SEQ ID NO: 1568 - RNA, 23 nt, synthetic construct
  source 1..23: mol_type = other RNA
gggaccacctggatcctcacaga

SEQ ID NO: 1569 - RNA, 23 nt, synthetic construct
  source 1..23: mol_type = other RNA
agccactacgactgcatccactg

SEQ ID NO: 1570 - RNA, 23 nt, synthetic construct
  source 1..23: mol_type = other RNA
ccctcccaaagtgctgaccagca

SEQ ID NO: 1571 - RNA, 23 nt, synthetic construct
  source 1..23: mol_type = other RNA
tccacagctaccagcgttacacc

SEQ ID NO: 1572 - RNA, 23 nt, synthetic construct
  source 1..23: mol_type = other RNA
aagggccaccagttccacgtcca

SEQ ID NO: 1573 - RNA, 23 nt, synthetic construct
  source 1..23: mol_type = other RNA
gctgaccacaacagccactacga

SEQ ID NO: 1574 - RNA, 23 nt, synthetic construct
  source 1..23: mol_type = other RNA
tgtgagcaccacggccacgacac

SEQ ID NO: 1575 - RNA, 23 nt, synthetic construct
  source 1..23: mol_type = other RNA
ctccagtccagggactgcaactg

SEQ ID NO: 1576 - RNA, 23 nt, synthetic construct
  source 1..23: mol_type = other RNA
tccagcactgagaagcacagcca

SEQ ID NO: 1577 - RNA, 23 nt, synthetic construct
  source 1..23: mol_type = other RNA
accaccacacccacaaccagtgg

SEQ ID NO: 1578 - RNA, 23 nt, synthetic construct
  source 1..23: mol_type = other RNA
accgccagagtgctgaccaccac

SEQ ID NO: 1579 - RNA, 23 nt, synthetic construct
  source 1..23: mol_type = other RNA
tccagggacaacacccatcaccc

SEQ ID NO: 1580 - RNA, 23 nt, synthetic construct
  source 1..23: mol_type = other RNA
agctccaaagccacttcctcctc

SEQ ID NO: 1581 - RNA, 23 nt, synthetic construct
  source 1..23: mol_type = other RNA
agtgctgacaagcacagccacaa

SEQ ID NO: 1582 - RNA, 23 nt, synthetic construct
  source 1..23: mol_type = other RNA
tcctccaccctgtggaccacgtg

SEQ ID NO: 1583 - RNA, 23 nt, synthetic construct
  source 1..23: mol_type = other RNA
gtcccagcacagaccaccacacc

SEQ ID NO: 1584 - RNA, 23 nt, synthetic construct
  source 1..23: mol_type = other RNA
atgtccaccatgtccacaatcca

SEQ ID NO: 1585 - RNA, 23 nt, synthetic construct
  source 1..23: mol_type = other RNA
cacctcctctactccagagacca

SEQ ID NO: 1586 - RNA, 23 nt, synthetic construct
  source 1..23: mol_type = other RNA
cccacacctccacagtgctgacc

SEQ ID NO: 1587 - RNA, 23 nt, synthetic construct
  source 1..23: mol_type = other RNA
accacagccaccatgacaagggc

SEQ ID NO: 1588 - RNA, 23 nt, synthetic construct
  source 1..23: mol_type = other RNA
attccacggccacaccctcctcc

SEQ ID NO: 1589 - RNA, 23 nt, synthetic construct
  source 1..23: mol_type = other RNA
acgacccggatcctcactgagct

SEQ ID NO: 1590 - RNA, 23 nt, synthetic construct
  source 1..23: mol_type = other RNA
gaccacaacagccactacaactg

SEQ ID NO: 1591 - RNA, 23 nt, synthetic construct
  source 1..23: mol_type = other RNA
actggatccacggccaccctgtc

SEQ ID NO: 1592 - RNA, 23 nt, synthetic construct
  source 1..23: mol_type = other RNA
accacctggatcctcacagagcc

SEQ ID NO: 1593 - RNA, 23 nt, synthetic construct
  source 1..23: mol_type = other RNA
actatagccaccgtgatggtgcc

SEQ ID NO: 1594 - RNA, 23 nt, synthetic construct
  source 1..23: mol_type = other RNA
ctccactctgggaacagctcaca

SEQ ID NO: 1595 - RNA, 23 nt, synthetic construct
  source 1..23: mol_type = other RNA
accatggccactatgcccacagc

SEQ ID NO: 1596 - RNA, 23 nt, synthetic construct
  source 1..23: mol_type = other RNA
actgcctccacggttcccagctc

SEQ ID NO: 1597 - RNA, 23 nt, synthetic construct
  source 1..23: mol_type = other RNA
agcctgccaaccttcagcgtgtc

SEQ ID NO: 1598 - RNA, 23 nt, synthetic construct
  source 1..23: mol_type = other RNA
ctgtgtcctcctcagtcctcacc

SEQ ID NO: 1599 - RNA, 23 nt, synthetic construct
  source 1..23: mol_type = other RNA
cccagctcccacttctctactcc

SEQ ID NO: 1600 - RNA, 23 nt, synthetic construct
  source 1..23: mol_type = other RNA
gggcatttggacagtttttctcg

SEQ ID NO: 1601 - RNA, 23 nt, synthetic construct
  source 1..23: mol_type = other RNA
gggaagtcatctacaataagacc

SEQ ID NO: 1602 - RNA, 23 nt, synthetic construct
  source 1..23: mol_type = other RNA
ggctgccatttctacgcagtgtg

SEQ ID NO: 1603 - RNA, 23 nt, synthetic construct
  source 1..23: mol_type = other RNA
agcactgtgacattgaccgcttc

SEQ ID NO: 1604 - RNA, 23 nt, synthetic construct
  source 1..23: mol_type = other RNA
gctgtgacaatgccatccctctc

SEQ ID NO: 1605 - RNA, 23 nt, synthetic construct
  source 1..23: mol_type = other RNA
ggaccctggagaactgcacggtg

SEQ ID NO: 1606 - RNA, 23 nt, synthetic construct
  source 1..23: mol_type = other RNA
gcgtgggtgacaaccgtgtcgtc

SEQ ID NO: 1607 - RNA, 23 nt, synthetic construct
  source 1..23: mol_type = other RNA
tggacccaaagcctgtggccaac

SEQ ID NO: 1608 - RNA, 23 nt, synthetic construct
  source 1..23: mol_type = other RNA
acctgcgtgaacaagcacctgcc

SEQ ID NO: 1609 - RNA, 23 nt, synthetic construct
  source 1..23: mol_type = other RNA
catcaaagtgtcggacccgagcc

SEQ ID NO: 1610 - RNA, 23 nt, synthetic construct
  source 1..23: mol_type = other RNA
ccctgtgacttccactatgagtg

SEQ ID NO: 1611 - RNA, 23 nt, synthetic construct
  source 1..23: mol_type = other RNA
cgagtgcatctgcagcatgtggg

SEQ ID NO: 1612 - RNA, 23 nt, synthetic construct
  source 1..23: mol_type = other RNA
ctcccactattccacctttgacg

SEQ ID NO: 1613 - RNA, 23 nt, synthetic construct
  source 1..23: mol_type = other RNA
gcacctatgtcctcatgagagag

SEQ ID NO: 1614 - RNA, 23 nt, synthetic construct
  source 1..23: mol_type = other RNA
tgcacgctttgggaatctcagcc

SEQ ID NO: 1615 - RNA, 23 nt, synthetic construct
  source 1..23: mol_type = other RNA
acctggacaaccactactgcacg

SEQ ID NO: 1616 - RNA, 23 nt, synthetic construct
  source 1..23: mol_type = other RNA
gccctcagcatccactacaagtc

SEQ ID NO: 1617 - RNA, 23 nt, synthetic construct
  source 1..23: mol_type = other RNA
tcgtcctcactgtcaccatggtg

SEQ ID NO: 1618 - RNA, 23 nt, synthetic construct
  source 1..23: mol_type = other RNA
tgatcctgtttgaccaaattccg

SEQ ID NO: 1619 - RNA, 23 nt, synthetic construct
  source 1..23: mol_type = other RNA
gcagcggtttcagcaagaacggc

SEQ ID NO: 1620 - RNA, 23 nt, synthetic construct
  source 1..23: mol_type = other RNA
ccatgcgtgtggacattcctgcc

SEQ ID NO: 1621 - RNA, 23 nt, synthetic construct
  source 1..23: mol_type = other RNA
gcgtgagcgtcaccttcaatggc

SEQ ID NO: 1622 - RNA, 23 nt, synthetic construct
  source 1..23: mol_type = other RNA
acagcctcttccacaacaacacc

SEQ ID NO: 1623 - RNA, 23 nt, synthetic construct
  source 1..23: mol_type = other RNA
ggcacctgcaccaacaaccagag

SEQ ID NO: 1624 - RNA, 23 nt, synthetic construct
  source 1..23: mol_type = other RNA
actgtctccagcgggacggaacc

SEQ ID NO: 1625 - RNA, 23 nt, synthetic construct
  source 1..23: mol_type = other RNA
gccgccagttgcaaggacatggc

SEQ ID NO: 1626 - RNA, 23 nt, synthetic construct
  source 1..23: mol_type = other RNA
cccgacagcagaaaggatggctg

SEQ ID NO: 1627 - RNA, 23 nt, synthetic construct
  source 1..23: mol_type = other RNA
agccgctctgtgatctgatgctg

SEQ ID NO: 1628 - RNA, 23 nt, synthetic construct
  source 1..23: mol_type = other RNA
gccaggtctttgctgagtgccac

SEQ ID NO: 1629 - RNA, 23 nt, synthetic construct
  source 1..23: mol_type = other RNA
aacgcctgcatcagcgaccactg

SEQ ID NO: 1630 - RNA, 23 nt, synthetic construct
  source 1..23: mol_type = other RNA
tggaggcttacgcagagctctgc

SEQ ID NO: 1631 - RNA, 23 nt, synthetic construct
  source 1..23: mol_type = other RNA
ggagtgtgcagtgactggcgagg

SEQ ID NO: 1632 - RNA, 23 nt, synthetic construct
  source 1..23: mol_type = other RNA
cccaccaaagtgtacaagccatg

SEQ ID NO: 1633 - RNA, 23 nt, synthetic construct
  source 1..23: mol_type = other RNA
acctgcaactctaggaaccagag

SEQ ID NO: 1634 - RNA, 23 nt, synthetic construct
  source 1..23: mol_type = other RNA
aggaccagatcctcttcaacgca

SEQ ID NO: 1635 - RNA, 23 nt, synthetic construct
  source 1..23: mol_type = other RNA
cacatgggcatctgcgtgcaggc

SEQ ID NO: 1636 - RNA, 23 nt, synthetic construct
  source 1..23: mol_type = other RNA
cccgatgggtttcctaaatttcc

SEQ ID NO: 1637 - RNA, 23 nt, synthetic construct
  source 1..23: mol_type = other RNA
tgggtcagcaactgccagtcctg

SEQ ID NO: 1638 - RNA, 23 nt, synthetic construct
  source 1..23: mol_type = other RNA
acgagggttcagtgtcggtgcag

SEQ ID NO: 1639 - RNA, 23 nt, synthetic construct
  source 1..23: mol_type = other RNA
tcccggcttcgtaaccgtgacca

SEQ ID NO: 1640 - RNA, 23 nt, synthetic construct
  source 1..23: mol_type = other RNA
tgcgtgtgcaacacaaccacctg

SEQ ID NO: 1641 - RNA, 23 nt, synthetic construct
  source 1..23: mol_type = other RNA
agggcaggagtccatctgcaccc

SEQ ID NO: 1642 - RNA, 23 nt, synthetic construct
  source 1..23: mol_type = other RNA
gactgctgtcccaccttccgctg

SEQ ID NO: 1643 - RNA, 23 nt, synthetic construct
  source 1..23: mol_type = other RNA
cctcagctgtgttcgtacaatgg

SEQ ID NO: 1644 - RNA, 23 nt, synthetic construct
  source 1..23: mol_type = other RNA
ggttggtgcaaccttcccaggcg

SEQ ID NO: 1645 - RNA, 23 nt, synthetic construct
  source 1..23: mol_type = other RNA
cttccctgccacatgtgtacctg

SEQ ID NO: 1646 - RNA, 23 nt, synthetic construct
  source 1..23: mol_type = other RNA
ggacccaacggtgcaatgtcagg

SEQ ID NO: 1647 - RNA, 23 nt, synthetic construct
  source 1..23: mol_type = other RNA
tgcctgcaacaatactacctgtc

SEQ ID NO: 1648 - RNA, 23 nt, synthetic construct
  source 1..23: mol_type = other RNA
ccagggctttgagtacaagagag

SEQ ID NO: 1649 - RNA, 23 nt, synthetic construct
  source 1..23: mol_type = other RNA
ccagtccagctgaatgaaacctg

SEQ ID NO: 1650 - RNA, 23 nt, synthetic construct
  source 1..23: mol_type = other RNA
gtcaacagccatgtggacaactg

SEQ ID NO: 1651 - RNA, 23 nt, synthetic construct
  source 1..23: mol_type = other RNA
caccgtgtacctctgtgaggctg

SEQ ID NO: 1652 - RNA, 23 nt, synthetic construct
  source 1..23: mol_type = other RNA
agggtggagtccatttgctgacc

SEQ ID NO: 1653 - RNA, 23 nt, synthetic construct
  source 1..23: mol_type = other RNA
tcctgcccagatgtgtccagctg

SEQ ID NO: 1654 - RNA, 23 nt, synthetic construct
  source 1..23: mol_type = other RNA
ctgctgctactcctgtgaggagg

SEQ ID NO: 1655 - RNA, 23 nt, synthetic construct
  source 1..23: mol_type = other RNA
ctcctgtcaagtccgcatcaaca

SEQ ID NO: 1656 - RNA, 23 nt, synthetic construct
  source 1..23: mol_type = other RNA
accatcctgtggcaccagggctg

SEQ ID NO: 1657 - RNA, 23 nt, synthetic construct
  source 1..23: mol_type = other RNA
accgaggtcaacatcaccttctg

SEQ ID NO: 1658 - RNA, 23 nt, synthetic construct
  source 1..23: mol_type = other RNA
agcgtccaagtactcagcagagg

SEQ ID NO: 1659 - RNA, 23 nt, synthetic construct
  source 1..23: mol_type = other RNA
gccatgcagcaccagtgcacctg

SEQ ID NO: 1660 - RNA, 23 nt, synthetic construct
  source 1..23: mol_type = other RNA
cccttgcactgtcctaacggctc

SEQ ID NO: 1661 - RNA, 23 nt, synthetic construct
  source 1..23: mol_type = other RNA
tcctgcacacctacacccacgtg

SEQ ID NO: 1662 - RNA, 23 nt, synthetic construct
  source 1..23: mol_type = other RNA
ctgcacgcccttctgtgtccctg

SEQ ID NO: 1663 - RNA, 23 nt, synthetic construct
  source 1..23: mol_type = other RNA
ccactgctgtctgagaacgttct

SEQ ID NO: 1664 - RNA, 23 nt, synthetic construct
  source 1..23: mol_type = other RNA
cccatgctctgtccacctggagc

SEQ ID NO: 1665 - RNA, 23 nt, synthetic construct
  source 1..23: mol_type = other RNA
gtgcattgtctgatcatgaaaac

SEQ ID NO: 1666 - RNA, 23 nt, synthetic construct
  source 1..23: mol_type = other RNA
agggcgccactcaggagtcctac

SEQ ID NO: 1667 - RNA, 23 nt, synthetic construct
  source 1..23: mol_type = other RNA
ccctccctgatgtcactgggacg

SEQ ID NO: 1668 - RNA, 23 nt, synthetic construct
  source 1..23: mol_type = other RNA
ccctggaacaaactaagcatgtg

SEQ ID NO: 1669 - RNA, 23 nt, synthetic construct
  source 1..23: mol_type = other RNA
agcacggattccagctggccacg

SEQ ID NO: 1670 - RNA, 23 nt, synthetic construct
  source 1..23: mol_type = other RNA
cagacaggctggtccaggcaagg

SEQ ID NO: 1671 - RNA, 23 nt, synthetic construct
  source 1..23: mol_type = other RNA
tgctgccaggaagctgcgacagg

SEQ ID NO: 1672 - RNA, 23 nt, synthetic construct
  source 1..23: mol_type = other RNA
gcctgctgcagggtaactcaggg

SEQ ID NO: 1673 - RNA, 23 nt, synthetic construct
  source 1..23: mol_type = other RNA
tcgcaacggccaggtcagagagg

SEQ ID NO: 1674 - RNA, 23 nt, synthetic construct
  source 1..23: mol_type = other RNA
agcccagttttgcaaataaaccc

SEQ ID NO: 1675 - RNA, 21 nt, synthetic construct
  source 1..21: mol_type = other RNA
ttggctctggcggccatgcta

SEQ ID NO: 1676 - RNA, 21 nt, synthetic construct
  source 1..21: mol_type = other RNA
ctgggagaatgcagggcacaa

SEQ ID NO: 1677 - RNA, 21 nt, synthetic construct
  source 1..21: mol_type = other RNA
gcgcgtgagctttgttccaca

SEQ ID NO: 1678 - RNA, 21 nt, synthetic construct
  source 1..21: mol_type = other RNA
tgggcgggtgtgcagcaccta

SEQ ID NO: 1679 - RNA, 21 nt, synthetic construct
  source 1..21: mol_type = other RNA
ccactacaagaccttcgacga

SEQ ID NO: 1680 - RNA, 21 nt, synthetic construct
  source 1..21: mol_type = other RNA
cctttgcaactacgtgttcta

SEQ ID NO: 1681 - RNA, 21 nt, synthetic construct
  source 1..21: mol_type = other RNA
gaggacttcaacgtccagcta

SEQ ID NO: 1682 - RNA, 21 nt, synthetic construct
  source 1..21: mol_type = other RNA
acccgtgttgtcatcaaggca

SEQ ID NO: 1683 - RNA, 21 nt, synthetic construct
  source 1..21: mol_type = other RNA
ggctccgtcctcatcaatgga

SEQ ID NO: 1684 - RNA, 21 nt, synthetic construct
  source 1..21: mol_type = other RNA
gctgccttacagccgcactga

SEQ ID NO: 1685 - RNA, 21 nt, synthetic construct
  source 1..21: mol_type = other RNA
gactacatcaaggtcagcata

SEQ ID NO: 1686 - RNA, 21 nt, synthetic construct
  source 1..21: mol_type = other RNA
gctgacattcctgtggaacga

SEQ ID NO: 1687 - RNA, 21 nt, synthetic construct
  source 1..21: mol_type = other RNA
ctggatcccaaatacgccaaa

SEQ ID NO: 1688 - RNA, 21 nt, synthetic construct
  source 1..21: mol_type = other RNA
gccttcaacgagttctatgca

SEQ ID NO: 1689 - RNA, 21 nt, synthetic construct
  source 1..21: mol_type = other RNA
aacctgcagaagttggatgga

SEQ ID NO: 1690 - RNA, 21 nt, synthetic construct
  source 1..21: mol_type = other RNA
tgcacggacgaggagggcata

SEQ ID NO: 1691 - RNA, 21 nt, synthetic construct
  source 1..21: mol_type = other RNA
tttgcggagtgccacgcacta

SEQ ID NO: 1692 - RNA, 21 nt, synthetic construct
  source 1..21: mol_type = other RNA
gacagcactgcgtacctggca

SEQ ID NO: 1693 - RNA, 21 nt, synthetic construct
  source 1..21: mol_type = other RNA
gccacctttgtggaatactca

SEQ ID NO: 1694 - RNA, 21 nt, synthetic construct
  source 1..21: mol_type = other RNA
ctggaggtgccctgagctcta

SEQ ID NO: 1695 - RNA, 21 nt, synthetic construct
  source 1..21: mol_type = other RNA
ctcaacatgcagcaccaggaa

SEQ ID NO: 1696 - RNA, 21 nt, synthetic construct
  source 1..21: mol_type = other RNA
accctgcacggacacctgcta

SEQ ID NO: 1697 - RNA, 21 nt, synthetic construct
  source 1..21: mol_type = other RNA
ggaccactgtgtggacggcta

SEQ ID NO: 1698 - RNA, 21 nt, synthetic construct
  source 1..21: mol_type = other RNA
gctggatgacatcacgcacta

SEQ ID NO: 1699 - RNA, 21 nt, synthetic construct
  source 1..21: mol_type = other RNA
ctccttcaacaccacctgcaa

SEQ ID NO: 1700 - RNA, 21 nt, synthetic construct
  source 1..21: mol_type = other RNA
ctatggcagtgccaggaccta

SEQ ID NO: 1701 - RNA, 21 nt, synthetic construct
  source 1..21: mol_type = other RNA
acctatgatgagaaactctaa

SEQ ID NO: 1702 - RNA, 21 nt, synthetic construct
  source 1..21: mol_type = other RNA
agctacgttctgtccaagaaa

SEQ ID NO: 1703 - RNA, 21 nt, synthetic construct
  source 1..21: mol_type = other RNA
gacagcagcttcaccgtgcta

SEQ ID NO: 1704 - RNA, 21 nt, synthetic construct
  source 1..21: mol_type = other RNA
ggacaacgagaactgcctgaa

SEQ ID NO: 1705 - RNA, 21 nt, synthetic construct
  source 1..21: mol_type = other RNA
tcctcaactccatctacacga

SEQ ID NO: 1706 - RNA, 21 nt, synthetic construct
  source 1..21: mol_type = other RNA
gccaacatcaccctgttcaca

SEQ ID NO: 1707 - RNA, 21 nt, synthetic construct
  source 1..21: mol_type = other RNA
tcgagcttcttcatcgtggta

SEQ ID NO: 1708 - RNA, 21 nt, synthetic construct
  source 1..21: mol_type = other RNA
gccactcatgcaggtgtttga

SEQ ID NO: 1709 - RNA, 21 nt, synthetic construct
  source 1..21: mol_type = other RNA
gggaacttcaaccagaaccaa

SEQ ID NO: 1710 - RNA, 21 nt, synthetic construct
  source 1..21: mol_type = other RNA
tgacgacttcacggccctcaa

SEQ ID NO: 1711 - RNA, 21 nt, synthetic construct
  source 1..21: mol_type = other RNA
agccttcgccaacacctggaa

SEQ ID NO: 1712 - RNA, 21 nt, synthetic construct
  source 1..21: mol_type = other RNA
ccaggaacagctttgaggaca

SEQ ID NO: 1713 - RNA, 21 nt, synthetic construct
  source 1..21: mol_type = other RNA
gtggagaatgagaactacgca

SEQ ID NO: 1714 - RNA, 21 nt, synthetic construct
  source 1..21: mol_type = other RNA
caacagtgccttctcgcgcta

SEQ ID NO: 1715 - RNA, 21 nt, synthetic construct
  source 1..21: mol_type = other RNA
cttccactcgaactgcatgta

SEQ ID NO: 1716 - RNA, 21 nt, synthetic construct
  source 1..21: mol_type = other RNA
cacctgcaactgtgagcggaa

SEQ ID NO: 1717 - RNA, 21 nt, synthetic construct
  source 1..21: mol_type = other RNA
cctcctatgtgcacgcctgta

SEQ ID NO: 1718 - RNA, 21 nt, synthetic construct
  source 1..21: mol_type = other RNA
ggcgtacagctcagcgactga

SEQ ID NO: 1719 - RNA, 21 nt, synthetic construct
  source 1..21: mol_type = other RNA
accaagtacatgcagaactga

SEQ ID NO: 1720 - RNA, 21 nt, synthetic construct
  source 1..21: mol_type = other RNA
tacgcctacgtggtggatgca

SEQ ID NO: 1721 - RNA, 21 nt, synthetic construct
  source 1..21: mol_type = other RNA
gcagcgtttccttcgtgccta

SEQ ID NO: 1722 - RNA, 21 nt, synthetic construct
  source 1..21: mol_type = other RNA
gcaccttcctcaatgacgcga

SEQ ID NO: 1723 - RNA, 21 nt, synthetic construct
  source 1..21: mol_type = other RNA
ctggagaggtggtgcacgaca

SEQ ID NO: 1724 - RNA, 21 nt, synthetic construct
  source 1..21: mol_type = other RNA
ccgtgtgttcatgtacgggta

SEQ ID NO: 1725 - RNA, 21 nt, synthetic construct
  source 1..21: mol_type = other RNA
cctctctgcagaaaagcacaa

SEQ ID NO: 1726 - RNA, 21 nt, synthetic construct
  source 1..21: mol_type = other RNA
ggactgcagcaacagctcgga

SEQ ID NO: 1727 - RNA, 21 nt, synthetic construct
  source 1..21: mol_type = other RNA
ctgtttcagcacacactgcga

SEQ ID NO: 1728 - RNA, 21 nt, synthetic construct
  source 1..21: mol_type = other RNA
ctgcattgccgaggaggacta

SEQ ID NO: 1729 - RNA, 21 nt, synthetic construct
  source 1..21: mol_type = other RNA
cacctacaagcctggagagaa

SEQ ID NO: 1730 - RNA, 21 nt, synthetic construct
  source 1..21: mol_type = other RNA
cgactgcaacacctgcaccta

SEQ ID NO: 1731 - RNA, 21 nt, synthetic construct
  source 1..21: mol_type = other RNA
gaaccggaggtgggagtgcaa

SEQ ID NO: 1732 - RNA, 21 nt, synthetic construct
  source 1..21: mol_type = other RNA
tggccacttcatcacctttga

SEQ ID NO: 1733 - RNA, 21 nt, synthetic construct
  source 1..21: mol_type = other RNA
cgatcgctacagctttgaaga

SEQ ID NO: 1734 - RNA, 21 nt, synthetic construct
  source 1..21: mol_type = other RNA
gctgcgagtacatcttggcca

SEQ ID NO: 1735 - RNA, 21 nt, synthetic construct
  source 1..21: mol_type = other RNA
cttccgcatcgtcaccgagaa

SEQ ID NO: 1736 - RNA, 21 nt, synthetic construct
  source 1..21: mol_type = other RNA
gccatcaagctcttcgtggaa

SEQ ID NO: 1737 - RNA, 21 nt, synthetic construct
  source 1..21: mol_type = other RNA
tacgagctgatcctccaagaa

SEQ ID NO: 1738 - RNA, 21 nt, synthetic construct
  source 1..21: mol_type = other RNA
gacctttaaggcggtggcgaa

SEQ ID NO: 1739 - RNA, 21 nt, synthetic construct
  source 1..21: mol_type = other RNA
accctacaagatacgctacaa

SEQ ID NO: 1740 - RNA, 21 nt, synthetic construct
  source 1..21: mol_type = other RNA
ttcctggtcatcgagacccaa

SEQ ID NO: 1741 - RNA, 21 nt, synthetic construct
  source 1..21: mol_type = other RNA
ccagcgtgttcatccgactga

SEQ ID NO: 1742 - RNA, 21 nt, synthetic construct
  source 1..21: mol_type = other RNA
caggactacaagggcagggta

SEQ ID NO: 1743 - RNA, 21 nt, synthetic construct
  source 1..21: mol_type = other RNA
gggaacttcgacgacaatgca

SEQ ID NO: 1744 - RNA, 21 nt, synthetic construct
  source 1..21: mol_type = other RNA
caatgactttgccacgcgtaa

SEQ ID NO: 1745 - RNA, 21 nt, synthetic construct
  source 1..21: mol_type = other RNA
gcactggagtttgggaacaga

SEQ ID NO: 1746 - RNA, 21 nt, synthetic construct
  source 1..21: mol_type = other RNA
ggcccagaagcagtgcagcaa

SEQ ID NO: 1747 - RNA, 21 nt, synthetic construct
  source 1..21: mol_type = other RNA
ccaggttgactccaccaagta

SEQ ID NO: 1748 - RNA, 21 nt, synthetic construct
  source 1..21: mol_type = other RNA
cgaggcctgcgtgaacgacga

SEQ ID NO: 1749 - RNA, 21 nt, synthetic construct
  source 1..21: mol_type = other RNA
actgcgagtgtttctgcacga

SEQ ID NO: 1750 - RNA, 21 nt, synthetic construct
  source 1..21: mol_type = other RNA
tgtgtgtgtcctggcggacta

SEQ ID NO: 1751 - RNA, 21 nt, synthetic construct
  source 1..21: mol_type = other RNA
tgttctgtgacttctacaaca

SEQ ID NO: 1752 - RNA, 21 nt, synthetic construct
  source 1..21: mol_type = other RNA
tgtgagtggcactaccagcca

SEQ ID NO: 1753 - RNA, 21 nt, synthetic construct
  source 1..21: mol_type = other RNA
gctgctacccgaagtgcccaa

SEQ ID NO: 1754 - RNA, 21 nt, synthetic construct
  source 1..21: mol_type = other RNA
agcccttcttcaatgaggaca

SEQ ID NO: 1755 - RNA, 21 nt, synthetic construct
  source 1..21: mol_type = other RNA
aagtgcgtggcccagtgtgga

SEQ ID NO: 1756 - RNA, 21 nt, synthetic construct
  source 1..21: mol_type = other RNA
ctacgacaaggacggaaacta

SEQ ID NO: 1757 - RNA, 21 nt, synthetic construct
  source 1..21: mol_type = other RNA
tgacgtcggtgcaagggtcca

SEQ ID NO: 1758 - RNA, 21 nt, synthetic construct
  source 1..21: mol_type = other RNA
ccagagctgtaactgcacaca

SEQ ID NO: 1759 - RNA, 21 nt, synthetic construct
  source 1..21: mol_type = other RNA
cagtgcgctcacagccttgaa

SEQ ID NO: 1760 - RNA, 21 nt, synthetic construct
  source 1..21: mol_type = other RNA
ctgcacctatgaggacaggaa

SEQ ID NO: 1761 - RNA, 21 nt, synthetic construct
  source 1..21: mol_type = other RNA
caggacgtcatctacaacaca

SEQ ID NO: 1762 - RNA, 21 nt, synthetic construct
  source 1..21: mol_type = other RNA
cgcctgcttgatcgccatcta

SEQ ID NO: 1763 - RNA, 21 nt, synthetic construct
  source 1..21: mol_type = other RNA
accatcatcaggaaggctgta

SEQ ID NO: 1764 - RNA, 21 nt, synthetic construct
  source 1..21: mol_type = other RNA
cacaacgccattcaccttcaa

SEQ ID NO: 1765 - RNA, 21 nt, synthetic construct
  source 1..21: mol_type = other RNA
tccaccgtgtgtgtccgcgaa

SEQ ID NO: 1766 - RNA, 21 nt, synthetic construct
  source 1..21: mol_type = other RNA
tccagctggtacaatgggcaa

SEQ ID NO: 1767 - RNA, 21 nt, synthetic construct
  source 1..21: mol_type = other RNA
cggagactttgagacgtttga

SEQ ID NO: 1768 - RNA, 21 nt, synthetic construct
  source 1..21: mol_type = other RNA
gagggtaccaggtatgcccta

SEQ ID NO: 1769 - RNA, 21 nt, synthetic construct
  source 1..21: mol_type = other RNA
ctggctgacatcgagtgccga

SEQ ID NO: 1770 - RNA, 21 nt, synthetic construct
  source 1..21: mol_type = other RNA
cttcccgacatgccgctggaa

SEQ ID NO: 1771 - RNA, 21 nt, synthetic construct
  source 1..21: mol_type = other RNA
caggtggactgtgaccgcata

SEQ ID NO: 1772 - RNA, 21 nt, synthetic construct
  source 1..21: mol_type = other RNA
cgccaacagccaacagagtca

SEQ ID NO: 1773 - RNA, 21 nt, synthetic construct
  source 1..21: mol_type = other RNA
tctgtcacgactacgagctga

SEQ ID NO: 1774 - RNA, 21 nt, synthetic construct
  source 1..21: mol_type = other RNA
tctctgctgcgaatacgtgca

SEQ ID NO: 1775 - RNA, 21 nt, synthetic construct
  source 1..21: mol_type = other RNA
cacggagcctgctgtgcctaa

SEQ ID NO: 1776 - RNA, 21 nt, synthetic construct
  source 1..21: mol_type = other RNA
agaccacagcaaccgaaaaga

SEQ ID NO: 1777 - RNA, 21 nt, synthetic construct
  source 1..21: mol_type = other RNA
cacctcgcagactgggtccaa

SEQ ID NO: 1778 - RNA, 21 nt, synthetic construct
  source 1..21: mol_type = other RNA
acagagtggtttgatgaggaa

SEQ ID NO: 1779 - RNA, 21 nt, synthetic construct
  source 1..21: mol_type = other RNA
gacgttgagtcctacgataaa

SEQ ID NO: 1780 - RNA, 21 nt, synthetic construct
  source 1..21: mol_type = other RNA
ggccgctggagggcacttata

SEQ ID NO: 1781 - RNA, 21 nt, synthetic construct
  source 1..21: mol_type = other RNA
cagcctaaggacatagagtga

SEQ ID NO: 1782 - RNA, 21 nt, synthetic construct
  source 1..21: mol_type = other RNA
aactggaccctggcacaggta

SEQ ID NO: 1783 - RNA, 21 nt, synthetic construct
  source 1..21: mol_type = other RNA
gtgcactgtgacgtccactta

SEQ ID NO: 1784 - RNA, 21 nt, synthetic construct
  source 1..21: mol_type = other RNA
gtgcaggaactgggagcagga

SEQ ID NO: 1785 - RNA, 21 nt, synthetic construct
  source 1..21: mol_type = other RNA
cgtcttcaagatgtgctacaa

SEQ ID NO: 1786 - RNA, 21 nt, synthetic construct
  source 1..21: mol_type = other RNA
ctgctgcagtgacgaccacta

SEQ ID NO: 1787 - RNA, 21 nt, synthetic construct
  source 1..21: mol_type = other RNA
cgaccacagagctggagacga

SEQ ID NO: 1788 - RNA, 21 nt, synthetic construct
  source 1..21: mol_type = other RNA
gccctgttctcaacgccgcaa

SEQ ID NO: 1789 - RNA, 21 nt, synthetic construct
  source 1..21: mol_type = other RNA
cctctcagaaggactgacata

SEQ ID NO: 1790 - RNA, 21 nt, synthetic construct
  source 1..21: mol_type = other RNA
cagatacacaagcacccttga

SEQ ID NO: 1791 - RNA, 21 nt, synthetic construct
  source 1..21: mol_type = other RNA
gctccacagaacccactgtca

SEQ ID NO: 1792 - RNA, 21 nt, synthetic construct
  source 1..21: mol_type = other RNA
cacccttccaacacgctcaga

SEQ ID NO: 1793 - RNA, 21 nt, synthetic construct
  source 1..21: mol_type = other RNA
caacaacaatggcaacctcca

SEQ ID NO: 1794 - RNA, 21 nt, synthetic construct
  source 1..21: mol_type = other RNA
cgcttccaaagagccgctgaa

SEQ ID NO: 1795 - RNA, 21 nt, synthetic construct
  source 1..21: mol_type = other RNA
gcgccaacactcacgagcgaa

SEQ ID NO: 1796 - RNA, 21 nt, synthetic construct
  source 1..21: mol_type = other RNA
gtccacctctcaggccgagaa

SEQ ID NO: 1797 - RNA, 21 nt, synthetic construct
  source 1..21: mol_type = other RNA
caggacagagacgacaatgaa

SEQ ID NO: 1798 - RNA, 21 nt, synthetic construct
  source 1..21: mol_type = other RNA
cttgactaacaccaccaccaa

SEQ ID NO: 1799 - RNA, 21 nt, synthetic construct
  source 1..21: mol_type = other RNA
ctgtcaaccgaagtgtgagta

SEQ ID NO: 1800 - RNA, 21 nt, synthetic construct
  source 1..21: mol_type = other RNA
agagtggtttgacgtggacta

SEQ ID NO: 1801 - RNA, 21 nt, synthetic construct
  source 1..21: mol_type = other RNA
ggaaacttttgaaaacatcaa

SEQ ID NO: 1802 - RNA, 21 nt, synthetic construct
  source 1..21: mol_type = other RNA
gcaccaaagagcatagagtga

SEQ ID NO: 1803 - RNA, 21 nt, synthetic construct
  source 1..21: mol_type = other RNA
cgaggtaagcatcgaccagga

SEQ ID NO: 1804 - RNA, 21 nt, synthetic construct
  source 1..21: mol_type = other RNA
ctgacctgcagcctggagaca

SEQ ID NO: 1805 - RNA, 21 nt, synthetic construct
  source 1..21: mol_type = other RNA
ctgcaagaacgaagaccagaa

SEQ ID NO: 1806 - RNA, 21 nt, synthetic construct
  source 1..21: mol_type = other RNA
tgcttcaactacaacgtgcga

SEQ ID NO: 1807 - RNA, 21 nt, synthetic construct
  source 1..21: mol_type = other RNA
ttgctgtgacgactacagcca

SEQ ID NO: 1808 - RNA, 21 nt, synthetic construct
  source 1..21: mol_type = other RNA
gacgacctggatcctcacaaa

SEQ ID NO: 1809 - RNA, 21 nt, synthetic construct
  source 1..21: mol_type = other RNA
cgaccacaacagccactacga

SEQ ID NO: 1810 - RNA, 21 nt, synthetic construct
  source 1..21: mol_type = other RNA
tccaccctgagaacagctcca

SEQ ID NO: 1811 - RNA, 21 nt, synthetic construct
  source 1..21: mol_type = other RNA
tcccaaagtgctgaccaccaa

SEQ ID NO: 1812 - RNA, 21 nt, synthetic construct
  source 1..21: mol_type = other RNA
cagctccaaagccactcccta

SEQ ID NO: 1813 - RNA, 21 nt, synthetic construct
  source 1..21: mol_type = other RNA
ccagtccagggactgcaacca

SEQ ID NO: 1814 - RNA, 21 nt, synthetic construct
  source 1..21: mol_type = other RNA
agcactgagaagcacagccaa

SEQ ID NO: 1815 - RNA, 21 nt, synthetic construct
  source 1..21: mol_type = other RNA
ctaccagcgttacacccatca

SEQ ID NO: 1816 - RNA, 21 nt, synthetic construct
  source 1..21: mol_type = other RNA
ttcctccctgggcaccaccta

SEQ ID NO: 1817 - RNA, 21 nt, synthetic construct
  source 1..21: mol_type = other RNA
cctatcacagaccaccacaca

SEQ ID NO: 1818 - RNA, 21 nt, synthetic construct
  source 1..21: mol_type = other RNA
ccaccatgtccacagccacaa

SEQ ID NO: 1819 - RNA, 21 nt, synthetic construct
  source 1..21: mol_type = other RNA
tcctccactccagagactgca

SEQ ID NO: 1820 - RNA, 21 nt, synthetic construct
  source 1..21: mol_type = other RNA
ctccacagtgcttaccgccaa

SEQ ID NO: 1821 - RNA, 21 nt, synthetic construct
  source 1..21: mol_type = other RNA
caggaacagctcacactacca

SEQ ID NO: 1822 - RNA, 21 nt, synthetic construct
  source 1..21: mol_type = other RNA
tgccaactaccacaaccacga

SEQ ID NO: 1823 - RNA, 21 nt, synthetic construct
  source 1..21: mol_type = other RNA
tccagtgtggatcagcacaaa

SEQ ID NO: 1824 - RNA, 21 nt, synthetic construct
  source 1..21: mol_type = other RNA
acccacaaccagaggctccaa

SEQ ID NO: 1825 - RNA, 21 nt, synthetic construct
  source 1..21: mol_type = other RNA
cgccacagtgctgaccaccaa

SEQ ID NO: 1826 - RNA, 21 nt, synthetic construct
  source 1..21: mol_type = other RNA
gccactggttctatggcaaca

SEQ ID NO: 1827 - RNA, 21 nt, synthetic construct
  source 1..21: mol_type = other RNA
ctcctctagcacacagaccaa

SEQ ID NO: 1828 - RNA, 21 nt, synthetic construct
  source 1..21: mol_type = other RNA
ggccactacgatcacggccaa

SEQ ID NO: 1829 - RNA, 21 nt, synthetic construct
  source 1..21: mol_type = other RNA
ctcctcaactcctgggacaaa

SEQ ID NO: 1830 - RNA, 21 nt, synthetic construct
  source 1..21: mol_type = other RNA
cagcaacacagtgactcccta

SEQ ID NO: 1831 - RNA, 21 nt, synthetic construct
  source 1..21: mol_type = other RNA
tgccctagggaccacccacaa

SEQ ID NO: 1832 - RNA, 21 nt, synthetic construct
  source 1..21: mol_type = other RNA
agtgccgaacaccatggccaa

SEQ ID NO: 1833 - RNA, 21 nt, synthetic construct
  source 1..21: mol_type = other RNA
agcctggacttcggccaccta

SEQ ID NO: 1834 - RNA, 21 nt, synthetic construct
  source 1..21: mol_type = other RNA
acccacatcacagagccttca

SEQ ID NO: 1835 - RNA, 21 nt, synthetic construct
  source 1..21: mol_type = other RNA
ggtgacttcccacaccctaga

SEQ ID NO: 1836 - RNA, 21 nt, synthetic construct
  source 1..21: mol_type = other RNA
caaccaccggtaccacccaga

SEQ ID NO: 1837 - RNA, 21 nt, synthetic construct
  source 1..21: mol_type = other RNA
cgactccagccctttccagca

SEQ ID NO: 1838 - RNA, 21 nt, synthetic construct
  source 1..21: mol_type = other RNA
tagcagcagaaccaccgagta

SEQ ID NO: 1839 - RNA, 21 nt, synthetic construct
  source 1..21: mol_type = other RNA
acccagcaagacccgcaccta

SEQ ID NO: 1840 - RNA, 21 nt, synthetic construct
  source 1..21: mol_type = other RNA
cggtggtgaccatgggctgta

SEQ ID NO: 1841 - RNA, 21 nt, synthetic construct
  source 1..21: mol_type = other RNA
gtggctggactacagctacca

SEQ ID NO: 1842 - RNA, 21 nt, synthetic construct
  source 1..21: mol_type = other RNA
ttgacacctactccaacatca

SEQ ID NO: 1843 - RNA, 21 nt, synthetic construct
  source 1..21: mol_type = other RNA
ttgggccaggtcgtggaatga

SEQ ID NO: 1844 - RNA, 21 nt, synthetic construct
  source 1..21: mol_type = other RNA
cctggactttggcctggtcta

SEQ ID NO: 1845 - RNA, 21 nt, synthetic construct
  source 1..21: mol_type = other RNA
atgtgcttcaactatgaaata

SEQ ID NO: 1846 - RNA, 21 nt, synthetic construct
  source 1..21: mol_type = other RNA
tgtgttctgctgcaactacga

SEQ ID NO: 1847 - RNA, 21 nt, synthetic construct
  source 1..21: mol_type = other RNA
cagctctacggccatgcccta

SEQ ID NO: 1848 - RNA, 21 nt, synthetic construct
  source 1..21: mol_type = other RNA
atcctcacagagctgaccaca

SEQ ID NO: 1849 - RNA, 21 nt, synthetic construct
  source 1..21: mol_type = other RNA
ccactacgactgagtccacta

SEQ ID NO: 1850 - RNA, 21 nt, synthetic construct
  source 1..21: mol_type = other RNA
gaccacctggatcctcacaga

SEQ ID NO: 1851 - RNA, 21 nt, synthetic construct
  source 1..21: mol_type = other RNA
gagcactacagccaccgtgaa

SEQ ID NO: 1852 - RNA, 21 nt, synthetic construct
  source 1..21: mol_type = other RNA
cctccacccaggcaactgcta

SEQ ID NO: 1853 - RNA, 21 nt, synthetic construct
  source 1..21: mol_type = other RNA
ggccacgacacccacagtcaa

SEQ ID NO: 1854 - RNA, 21 nt, synthetic construct
  source 1..21: mol_type = other RNA
gctccaaagccactcccttca

SEQ ID NO: 1855 - RNA, 21 nt, synthetic construct
  source 1..21: mol_type = other RNA
acagctaccagctttacagca

SEQ ID NO: 1856 - RNA, 21 nt, synthetic construct
  source 1..21: mol_type = other RNA
tcctccactccagagactgta

SEQ ID NO: 1857 - RNA, 21 nt, synthetic construct
  source 1..21: mol_type = other RNA
ccacagtgcttaccaccacga

SEQ ID NO: 1858 - RNA, 21 nt, synthetic construct
  source 1..21: mol_type = other RNA
gctcacactaccaaagtgcta

SEQ ID NO: 1859 - RNA, 21 nt, synthetic construct
  source 1..21: mol_type = other RNA
taccacaaccacgggcttcaa

SEQ ID NO: 1860 - RNA, 21 nt, synthetic construct
  source 1..21: mol_type = other RNA
cacgcttccagtgtggatcaa

SEQ ID NO: 1861 - RNA, 21 nt, synthetic construct
  source 1..21: mol_type = other RNA
acccacaaccagaggttccaa

SEQ ID NO: 1862 - RNA, 21 nt, synthetic construct
  source 1..21: mol_type = other RNA
tgaccaccaccaccacaacta

SEQ ID NO: 1863 - RNA, 21 nt, synthetic construct
  source 1..21: mol_type = other RNA
ctcctcaactccagggacaaa

SEQ ID NO: 1864 - RNA, 21 nt, synthetic construct
  source 1..21: mol_type = other RNA
cagcagcacagtgactcccta

SEQ ID NO: 1865 - RNA, 21 nt, synthetic construct
  source 1..21: mol_type = other RNA
cacacacgggcgatccctgta

SEQ ID NO: 1866 - RNA, 21 nt, synthetic construct
  source 1..21: mol_type = other RNA
ccacccagcactcgactccaa

SEQ ID NO: 1867 - RNA, 21 nt, synthetic construct
  source 1..21: mol_type = other RNA
cagccctcaccctagcagcaa

SEQ ID NO: 1868 - RNA, 21 nt, synthetic construct
  source 1..21: mol_type = other RNA
ctggatcctcacagagcagaa

SEQ ID NO: 1869 - RNA, 21 nt, synthetic construct
  source 1..21: mol_type = other RNA
cagccactacgaccgcaacca

SEQ ID NO: 1870 - RNA, 21 nt, synthetic construct
  source 1..21: mol_type = other RNA
tcccaaagtgctgaccagcaa

SEQ ID NO: 1871 - RNA, 21 nt, synthetic construct
  source 1..21: mol_type = other RNA
cagttccaaagccacttccta

SEQ ID NO: 1872 - RNA, 21 nt, synthetic construct
  source 1..21: mol_type = other RNA
caaggactgcaaccaccctta

SEQ ID NO: 1873 - RNA, 21 nt, synthetic construct
  source 1..21: mol_type = other RNA
gtgctgacaagcacagccaca

SEQ ID NO: 1874 - RNA, 21 nt, synthetic construct
  source 1..21: mol_type = other RNA
cacagctaccagctttacaca

SEQ ID NO: 1875 - RNA, 21 nt, synthetic construct
  source 1..21: mol_type = other RNA
ctccttcacccttgggaccaa

SEQ ID NO: 1876 - RNA, 21 nt, synthetic construct
  source 1..21: mol_type = other RNA
cccagaacagaccaccacaca

SEQ ID NO: 1877 - RNA, 21 nt, synthetic construct
  source 1..21: mol_type = other RNA
caccatgtccacaatccacca

SEQ ID NO: 1878 - RNA, 21 nt, synthetic construct
  source 1..21: mol_type = other RNA
ctccacagtgctgaccacgaa

SEQ ID NO: 1879 - RNA, 21 nt, synthetic construct
  source 1..21: mol_type = other RNA
ggccaccagttccatgtccaa

SEQ ID NO: 1880 - RNA, 21 nt, synthetic construct
  source 1..21: mol_type = other RNA
ccactacaactgcagccacta

SEQ ID NO: 1881 - RNA, 21 nt, synthetic construct
  source 1..21: mol_type = other RNA
cagcactacagccaccgtgaa

SEQ ID NO: 1882 - RNA, 21 nt, synthetic construct
  source 1..21: mol_type = other RNA
accctcaaagtgctgaccaga

SEQ ID NO: 1883 - RNA, 21 nt, synthetic construct
  source 1..21: mol_type = other RNA
acccacagtcatcagctccaa

SEQ ID NO: 1884 - RNA, 21 nt, synthetic construct
  source 1..21: mol_type = other RNA
ccactccctcctccagtccaa

SEQ ID NO: 1885 - RNA, 21 nt, synthetic construct
  source 1..21: mol_type = other RNA
ctaccagcgttacagccatca

SEQ ID NO: 1886 - RNA, 21 nt, synthetic construct
  source 1..21: mol_type = other RNA
cctctactccagagactgtca

SEQ ID NO: 1887 - RNA, 21 nt, synthetic construct
  source 1..21: mol_type = other RNA
agctcacactaccaaagtgca

SEQ ID NO: 1888 - RNA, 21 nt, synthetic construct
  source 1..21: mol_type = other RNA
ctaccacaaccacgggcttca

SEQ ID NO: 1889 - RNA, 21 nt, synthetic construct
  source 1..21: mol_type = other RNA
ggccactacgatcacagccaa

SEQ ID NO: 1890 - RNA, 21 nt, synthetic construct
  source 1..21: mol_type = other RNA
caccacggccaccacacacga

SEQ ID NO: 1891 - RNA, 21 nt, synthetic construct
  source 1..21: mol_type = other RNA
cagcagcaaccaccagtacca

SEQ ID NO: 1892 - RNA, 21 nt, synthetic construct
  source 1..21: mol_type = other RNA
cctccaggaccacagccacaa

SEQ ID NO: 1893 - RNA, 21 nt, synthetic construct
  source 1..21: mol_type = other RNA
accacggtggtgaccacggga

SEQ ID NO: 1894 - RNA, 21 nt, synthetic construct
  source 1..21: mol_type = other RNA
cggccacgccctcctcaacta

SEQ ID NO: 1895 - RNA, 21 nt, synthetic construct
  source 1..21: mol_type = other RNA
ctggatcctcacaaagctgaa

SEQ ID NO: 1896 - RNA, 21 nt, synthetic construct
  source 1..21: mol_type = other RNA
acccacaaccagtggctccaa

SEQ ID NO: 1897 - RNA, 21 nt, synthetic construct
  source 1..21: mol_type = other RNA
gacgacctggatcctcacaga

SEQ ID NO: 1898 - RNA, 21 nt, synthetic construct
  source 1..21: mol_type = other RNA
tgaccacaacagccactacga

SEQ ID NO: 1899 - RNA, 21 nt, synthetic construct
  source 1..21: mol_type = other RNA
atccactggatccacggccaa

SEQ ID NO: 1900 - RNA, 21 nt, synthetic construct
  source 1..21: mol_type = other RNA
ctcccaaagtgctgaccagca

SEQ ID NO: 1901 - RNA, 21 nt, synthetic construct
  source 1..21: mol_type = other RNA
ccaccaaatccacagctacca

SEQ ID NO: 1902 - RNA, 21 nt, synthetic construct
  source 1..21: mol_type = other RNA
ggccaccagttccacgtccaa

SEQ ID NO: 1903 - RNA, 21 nt, synthetic construct
  source 1..21: mol_type = other RNA
tgagcaccacggccacgacaa

SEQ ID NO: 1904 - RNA, 21 nt, synthetic construct
  source 1..21: mol_type = other RNA
ccagggactgcaactgcccta

SEQ ID NO: 1905 - RNA, 21 nt, synthetic construct
  source 1..21: mol_type = other RNA
cgccagagtgctgaccaccaa

SEQ ID NO: 1906 - RNA, 21 nt, synthetic construct
  source 1..21: mol_type = other RNA
cagggacaacacccatcacca

SEQ ID NO: 1907 - RNA, 21 nt, synthetic construct
  source 1..21: mol_type = other RNA
ctccaaagccacttcctccta

SEQ ID NO: 1908 - RNA, 21 nt, synthetic construct
  source 1..21: mol_type = other RNA
tgctgacaagcacagccacaa

SEQ ID NO: 1909 - RNA, 21 nt, synthetic construct
  source 1..21: mol_type = other RNA
ctccaccctgtggaccacgta

SEQ ID NO: 1910 - RNA, 21 nt, synthetic construct
  source 1..21: mol_type = other RNA
cccagcacagaccaccacaca

SEQ ID NO: 1911 - RNA, 21 nt, synthetic construct
  source 1..21: mol_type = other RNA
gtccaccatgtccacaatcca

SEQ ID NO: 1912 - RNA, 21 nt, synthetic construct
  source 1..21: mol_type = other RNA
ctcctctactccagagaccaa

SEQ ID NO: 1913 - RNA, 21 nt, synthetic construct
  source 1..21: mol_type = other RNA
ctccacagtgctgaccaccaa

SEQ ID NO: 1914 - RNA, 21 nt, synthetic construct
  source 1..21: mol_type = other RNA
ggccaccaattccacggccaa

SEQ ID NO: 1915 - RNA, 21 nt, synthetic construct
  source 1..21: mol_type = other RNA
tgaccacaacagccactacaa

SEQ ID NO: 1916 - RNA, 21 nt, synthetic construct
  source 1..21: mol_type = other RNA
tggatccacggccaccctgta

SEQ ID NO: 1917 - RNA, 21 nt, synthetic construct
  source 1..21: mol_type = other RNA
gagcactatagccaccgtgaa

SEQ ID NO: 1918 - RNA, 21 nt, synthetic construct
  source 1..21: mol_type = other RNA
ccactctgggaacagctcaca

SEQ ID NO: 1919 - RNA, 21 nt, synthetic construct
  source 1..21: mol_type = other RNA
catggccactatgcccacaga

SEQ ID NO: 1920 - RNA, 21 nt, synthetic construct
  source 1..21: mol_type = other RNA
tgcctccacggttcccagcta

SEQ ID NO: 1921 - RNA, 21 nt, synthetic construct
  source 1..21: mol_type = other RNA
gccaaccttcagcgtgtccaa

SEQ ID NO: 1922 - RNA, 21 nt, synthetic construct
  source 1..21: mol_type = other RNA
tcctcctcagtcctcaccaca

SEQ ID NO: 1923 - RNA, 21 nt, synthetic construct
  source 1..21: mol_type = other RNA
tcccacttctctactccctga

SEQ ID NO: 1924 - RNA, 21 nt, synthetic construct
  source 1..21: mol_type = other RNA
gcatttggacagtttttctca

SEQ ID NO: 1925 - RNA, 21 nt, synthetic construct
  source 1..21: mol_type = other RNA
gaagtcatctacaataagaca

SEQ ID NO: 1926 - RNA, 21 nt, synthetic construct
  source 1..21: mol_type = other RNA
ctgccatttctacgcagtgta

SEQ ID NO: 1927 - RNA, 21 nt, synthetic construct
  source 1..21: mol_type = other RNA
cactgtgacattgaccgctta

SEQ ID NO: 1928 - RNA, 21 nt, synthetic construct
  source 1..21: mol_type = other RNA
tgtgacaatgccatccctcta

SEQ ID NO: 1929 - RNA, 21 nt, synthetic construct
  source 1..21: mol_type = other RNA
accctggagaactgcacggta

SEQ ID NO: 1930 - RNA, 21 nt, synthetic construct
  source 1..21: mol_type = other RNA
gtgggtgacaaccgtgtcgta

SEQ ID NO: 1931 - RNA, 21 nt, synthetic construct
  source 1..21: mol_type = other RNA
gacccaaagcctgtggccaaa

SEQ ID NO: 1932 - RNA, 21 nt, synthetic construct
  source 1..21: mol_type = other RNA
ctgcgtgaacaagcacctgca

SEQ ID NO: 1933 - RNA, 21 nt, synthetic construct
  source 1..21: mol_type = other RNA
tcaaagtgtcggacccgagca

SEQ ID NO: 1934 - RNA, 21 nt, synthetic construct
  source 1..21: mol_type = other RNA
cctgtgacttccactatgaga

SEQ ID NO: 1935 - RNA, 21 nt, synthetic construct
  source 1..21: mol_type = other RNA
gagtgcatctgcagcatgtga

SEQ ID NO: 1936 - RNA, 21 nt, synthetic construct
  source 1..21: mol_type = other RNA
cccactattccacctttgaca

SEQ ID NO: 1937 - RNA, 21 nt, synthetic construct
  source 1..21: mol_type = other RNA
acctatgtcctcatgagagaa

SEQ ID NO: 1938 - RNA, 21 nt, synthetic construct
  source 1..21: mol_type = other RNA
cacgctttgggaatctcagca

SEQ ID NO: 1939 - RNA, 21 nt, synthetic construct
  source 1..21: mol_type = other RNA
ctggacaaccactactgcaca

SEQ ID NO: 1940 - RNA, 21 nt, synthetic construct
  source 1..21: mol_type = other RNA
ctcagcatccactacaagtca

SEQ ID NO: 1941 - RNA, 21 nt, synthetic construct
  source 1..21: mol_type = other RNA
gtcctcactgtcaccatggta

SEQ ID NO: 1942 - RNA, 21 nt, synthetic construct
  source 1..21: mol_type = other RNA
cctgatcctgtttgaccaaaa

SEQ ID NO: 1943 - RNA, 21 nt, synthetic construct
  source 1..21: mol_type = other RNA
agcggtttcagcaagaacgga

SEQ ID NO: 1944 - RNA, 21 nt, synthetic construct
  source 1..21: mol_type = other RNA
cgtgtggacattcctgcccta

SEQ ID NO: 1945 - RNA, 21 nt, synthetic construct
  source 1..21: mol_type = other RNA
gtgagcgtcaccttcaatgga

SEQ ID NO: 1946 - RNA, 21 nt, synthetic construct
  source 1..21: mol_type = other RNA
agcctcttccacaacaacaca

SEQ ID NO: 1947 - RNA, 21 nt, synthetic construct
  source 1..21: mol_type = other RNA
tgcaccaacaaccagagggaa

SEQ ID NO: 1948 - RNA, 21 nt, synthetic construct
  source 1..21: mol_type = other RNA
tgtctccagcgggacggaaca

SEQ ID NO: 1949 - RNA, 21 nt, synthetic construct
  source 1..21: mol_type = other RNA
cgccagttgcaaggacatgga

SEQ ID NO: 1950 - RNA, 21 nt, synthetic construct
  source 1..21: mol_type = other RNA
cgacagcagaaaggatggcta

SEQ ID NO: 1951 - RNA, 21 nt, synthetic construct
  source 1..21: mol_type = other RNA
ccgctctgtgatctgatgcta

SEQ ID NO: 1952 - RNA, 21 nt, synthetic construct
  source 1..21: mol_type = other RNA
caggtctttgctgagtgccaa

SEQ ID NO: 1953 - RNA, 21 nt, synthetic construct
  source 1..21: mol_type = other RNA
gggcccattcttcaacgccta

SEQ ID NO: 1954 - RNA, 21 nt, synthetic construct
  source 1..21: mol_type = other RNA
gaggcttacgcagagctctga

SEQ ID NO: 1955 - RNA, 21 nt, synthetic construct
  source 1..21: mol_type = other RNA
agtgtgcagtgactggcgaga

SEQ ID NO: 1956 - RNA, 21 nt, synthetic construct
  source 1..21: mol_type = other RNA
ccaccaaagtgtacaagccaa

SEQ ID NO: 1957 - RNA, 21 nt, synthetic construct
  source 1..21: mol_type = other RNA
ctgcaactctaggaaccagaa

SEQ ID NO: 1958 - RNA, 21 nt, synthetic construct
  source 1..21: mol_type = other RNA
cagatcctcttcaacgcacaa

SEQ ID NO: 1959 - RNA, 21 nt, synthetic construct
  source 1..21: mol_type = other RNA
gggcatctgcgtgcaggccta

SEQ ID NO: 1960 - RNA, 21 nt, synthetic construct
  source 1..21: mol_type = other RNA
cgatgggtttcctaaatttca

SEQ ID NO: 1961 - RNA, 21 nt, synthetic construct
  source 1..21: mol_type = other RNA
ggtcagcaactgccagtccta

SEQ ID NO: 1962 - RNA, 21 nt, synthetic construct
  source 1..21: mol_type = other RNA
gagggttcagtgtcggtgcaa

SEQ ID NO: 1963 - RNA, 21 nt, synthetic construct
  source 1..21: mol_type = other RNA
cggcttcgtaaccgtgaccaa

SEQ ID NO: 1964 - RNA, 21 nt, synthetic construct
  source 1..21: mol_type = other RNA
cgtgtgcaacacaaccaccta

SEQ ID NO: 1965 - RNA, 21 nt, synthetic construct
  source 1..21: mol_type = other RNA
caggagtccatctgcacccaa

SEQ ID NO: 1966 - RNA, 21 nt, synthetic construct
  source 1..21: mol_type = other RNA
ctgtcccaccttccgctgcaa

SEQ ID NO: 1967 - RNA, 21 nt, synthetic construct
  source 1..21: mol_type = other RNA
tcagctgtgttcgtacaatga

SEQ ID NO: 1968 - RNA, 21 nt, synthetic construct
  source 1..21: mol_type = other RNA
ttggtgcaaccttcccaggca

SEQ ID NO: 1969 - RNA, 21 nt, synthetic construct
  source 1..21: mol_type = other RNA
tccctgccacatgtgtaccta

SEQ ID NO: 1970 - RNA, 21 nt, synthetic construct
  source 1..21: mol_type = other RNA
acggtgcaatgtcaggaggaa

SEQ ID NO: 1971 - RNA, 21 nt, synthetic construct
  source 1..21: mol_type = other RNA
ctgcaacaatactacctgtca

SEQ ID NO: 1972 - RNA, 21 nt, synthetic construct
  source 1..21: mol_type = other RNA
gggctttgagtacaagagaga

SEQ ID NO: 1973 - RNA, 21 nt, synthetic construct
  source 1..21: mol_type = other RNA
gtccagctgaatgaaacctga

SEQ ID NO: 1974 - RNA, 21 nt, synthetic construct
  source 1..21: mol_type = other RNA
caacagccatgtggacaacta

SEQ ID NO: 1975 - RNA, 21 nt, synthetic construct
  source 1..21: mol_type = other RNA
ccgtgtacctctgtgaggcta

SEQ ID NO: 1976 - RNA, 21 nt, synthetic construct
  source 1..21: mol_type = other RNA
ggtggagtccatttgctgaca

SEQ ID NO: 1977 - RNA, 21 nt, synthetic construct
  source 1..21: mol_type = other RNA
ctgcccagatgtgtccagcta

SEQ ID NO: 1978 - RNA, 21 nt, synthetic construct
  source 1..21: mol_type = other RNA
gctgctactcctgtgaggaga

SEQ ID NO: 1979 - RNA, 21 nt, synthetic construct
  source 1..21: mol_type = other RNA
tcctgtcaagtccgcatcaaa

SEQ ID NO: 1980 - RNA, 21 nt, synthetic construct
  source 1..21: mol_type = other RNA
gaccatcctgtggcaccagga

SEQ ID NO: 1981 - RNA, 21 nt, synthetic construct
  source 1..21: mol_type = other RNA
ggtcaacatcaccttctgcga

SEQ ID NO: 1982 - RNA, 21 nt, synthetic construct
  source 1..21: mol_type = other RNA
cgtccaagtactcagcagaga

SEQ ID NO: 1983 - RNA, 21 nt, synthetic construct
  source 1..21: mol_type = other RNA
atgcagcaccagtgcacctga

SEQ ID NO: 1984 - RNA, 21 nt, synthetic construct
  source 1..21: mol_type = other RNA
gcccttgcactgtcctaacga

SEQ ID NO: 1985 - RNA, 21 nt, synthetic construct
  source 1..21: mol_type = other RNA
ctgcacacctacacccacgta

SEQ ID NO: 1986 - RNA, 21 nt, synthetic construct
  source 1..21: mol_type = other RNA
gcacgcccttctgtgtcccta

SEQ ID NO: 1987 - RNA, 21 nt, synthetic construct
  source 1..21: mol_type = other RNA
actgctgtctgagaacgttca

SEQ ID NO: 1988 - RNA, 21 nt, synthetic construct
  source 1..21: mol_type = other RNA
catgctctgtccacctggaga

SEQ ID NO: 1989 - RNA, 21 nt, synthetic construct
  source 1..21: mol_type = other RNA
gcattgtctgatcatgaaaaa

SEQ ID NO: 1990 - RNA, 21 nt, synthetic construct
  source 1..21: mol_type = other RNA
ggcgccactcaggagtcctaa

SEQ ID NO: 1991 - RNA, 21 nt, synthetic construct
  source 1..21: mol_type = other RNA
ctccctgatgtcactgggaca

SEQ ID NO: 1992 - RNA, 21 nt, synthetic construct
  source 1..21: mol_type = other RNA
ctggaacaaactaagcatgta

SEQ ID NO: 1993 - RNA, 21 nt, synthetic construct
  source 1..21: mol_type = other RNA
gcacggattccagctggccaa

SEQ ID NO: 1994 - RNA, 21 nt, synthetic construct
  source 1..21: mol_type = other RNA
gacaggctggtccaggcaaga

SEQ ID NO: 1995 - RNA, 21 nt, synthetic construct
  source 1..21: mol_type = other RNA
gctgccaggaagctgcgacaa

SEQ ID NO: 1996 - RNA, 21 nt, synthetic construct
  source 1..21: mol_type = other RNA
gcagggtaactcagggctgaa

SEQ ID NO: 1997 - RNA, 21 nt, synthetic construct
  source 1..21: mol_type = other RNA
gcaacggccaggtcagagaga

SEQ ID NO: 1998 - RNA, 21 nt, synthetic construct
  source 1..21: mol_type = other RNA
agcccagttttgcaaataaaa

SEQ ID NO: 1999 - RNA, 23 nt, synthetic construct
  source 1..23: mol_type = other RNA
tagcatggccgccagagccaaca

SEQ ID NO: 2000 - RNA, 23 nt, synthetic construct
  source 1..23: mol_type = other RNA
ttgtgccctgcattctcccagct

SEQ ID NO: 2001 - RNA, 23 nt, synthetic construct
  source 1..23: mol_type = other RNA
tgtggaacaaagctcacgcgccg

SEQ ID NO: 2002 - RNA, 23 nt, synthetic construct
  source 1..23: mol_type = other RNA
taggtgctgcacacccgcccatt

SEQ ID NO: 2003 - RNA, 23 nt, synthetic construct
  source 1..23: mol_type = other RNA
tcgtcgaaggtcttgtagtggaa

SEQ ID NO: 2004 - RNA, 23 nt, synthetic construct
  source 1..23: mol_type = other RNA
tagaacacgtagttgcaaaggcc

SEQ ID NO: 2005 - RNA, 23 nt, synthetic construct
  source 1..23: mol_type = other RNA
tagctggacgttgaagtcctcgt

SEQ ID NO: 2006 - RNA, 23 nt, synthetic construct
  source 1..23: mol_type = other RNA
tgccttgatgacaacacgggtga

SEQ ID NO: 2007 - RNA, 23 nt, synthetic construct
  source 1..23: mol_type = other RNA
tccattgatgaggacggagccgt

SEQ ID NO: 2008 - RNA, 23 nt, synthetic construct
  source 1..23: mol_type = other RNA
tcagtgcggctgtaaggcagctc

SEQ ID NO: 2009 - RNA, 23 nt, synthetic construct
  source 1..23: mol_type = other RNA
tatgctgaccttgatgtagtccc

SEQ ID NO: 2010 - RNA, 23 nt, synthetic construct
  source 1..23: mol_type = other RNA
tcgttccacaggaatgtcagcac

SEQ ID NO: 2011 - RNA, 23 nt, synthetic construct
  source 1..23: mol_type = other RNA
tttggcgtatttgggatccagct

SEQ ID NO: 2012 - RNA, 23 nt, synthetic construct
  source 1..23: mol_type = other RNA
tgcatagaactcgttgaaggccg

SEQ ID NO: 2013 - RNA, 23 nt, synthetic construct
  source 1..23: mol_type = other RNA
tccatccaacttctgcaggttcc

SEQ ID NO: 2014 - RNA, 23 nt, synthetic construct
  source 1..23: mol_type = other RNA
tatgccctcctcgtccgtgcagt

SEQ ID NO: 2015 - RNA, 23 nt, synthetic construct
  source 1..23: mol_type = other RNA
tagtgcgtggcactccgcaaagg

SEQ ID NO: 2016 - RNA, 23 nt, synthetic construct
  source 1..23: mol_type = other RNA
tgccaggtacgcagtgctgtcca

SEQ ID NO: 2017 - RNA, 23 nt, synthetic construct
  source 1..23: mol_type = other RNA
tgagtattccacaaaggtggcac

SEQ ID NO: 2018 - RNA, 23 nt, synthetic construct
  source 1..23: mol_type = other RNA
tagagctcagggcacctccagtt

SEQ ID NO: 2019 - RNA, 23 nt, synthetic construct
  source 1..23: mol_type = other RNA
ttcctggtgctgcatgttgaggg

SEQ ID NO: 2020 - RNA, 23 nt, synthetic construct
  source 1..23: mol_type = other RNA
tagcaggtgtccgtgcagggtga

SEQ ID NO: 2021 - RNA, 23 nt, synthetic construct
  source 1..23: mol_type = other RNA
tagccgtccacacagtggtcctc

SEQ ID NO: 2022 - RNA, 23 nt, synthetic construct
  source 1..23: mol_type = other RNA
tagtgcgtgatgtcatccagcac

SEQ ID NO: 2023 - RNA, 23 nt, synthetic construct
  source 1..23: mol_type = other RNA
ttgcaggtggtgttgaaggaggt

SEQ ID NO: 2024 - RNA, 23 nt, synthetic construct
  source 1..23: mol_type = other RNA
taggtcctggcactgccatagcc

SEQ ID NO: 2025 - RNA, 23 nt, synthetic construct
  source 1..23: mol_type = other RNA
ttagagtttctcatcataggtgg

SEQ ID NO: 2026 - RNA, 23 nt, synthetic construct
  source 1..23: mol_type = other RNA
tttcttggacagaacgtagctgc

SEQ ID NO: 2027 - RNA, 23 nt, synthetic construct
  source 1..23: mol_type = other RNA
tagcacggtgaagctgctgtcgg

SEQ ID NO: 2028 - RNA, 23 nt, synthetic construct
  source 1..23: mol_type = other RNA
ttcaggcagttctcgttgtccgt

SEQ ID NO: 2029 - RNA, 23 nt, synthetic construct
  source 1..23: mol_type = other RNA
tcgtgtagatggagttgaggaac

SEQ ID NO: 2030 - RNA, 23 nt, synthetic construct
  source 1..23: mol_type = other RNA
tgtgaacagggtgatgttggctg

SEQ ID NO: 2031 - RNA, 23 nt, synthetic construct
  source 1..23: mol_type = other RNA
taccacgatgaagaagctcgagg

SEQ ID NO: 2032 - RNA, 23 nt, synthetic construct
  source 1..23: mol_type = other RNA
tcaaacacctgcatgagtggcac

SEQ ID NO: 2033 - RNA, 23 nt, synthetic construct
  source 1..23: mol_type = other RNA
ttggttctggttgaagttcccac

SEQ ID NO: 2034 - RNA, 23 nt, synthetic construct
  source 1..23: mol_type = other RNA
ttgagggccgtgaagtcgtcagc

SEQ ID NO: 2035 - RNA, 23 nt, synthetic construct
  source 1..23: mol_type = other RNA
ttccaggtgttggcgaaggctgc

SEQ ID NO: 2036 - RNA, 23 nt, synthetic construct
  source 1..23: mol_type = other RNA
tgtcctcaaagctgttcctggca

SEQ ID NO: 2037 - RNA, 23 nt, synthetic construct
  source 1..23: mol_type = other RNA
tgcgtagttctcattctccacac

SEQ ID NO: 2038 - RNA, 23 nt, synthetic construct
  source 1..23: mol_type = other RNA
tagcgcgagaaggcactgttggg

SEQ ID NO: 2039 - RNA, 23 nt, synthetic construct
  source 1..23: mol_type = other RNA
tacatgcagttcgagtggaaggg

SEQ ID NO: 2040 - RNA, 23 nt, synthetic construct
  source 1..23: mol_type = other RNA
ttccgctcacagttgcaggtgtc

SEQ ID NO: 2041 - RNA, 23 nt, synthetic construct
  source 1..23: mol_type = other RNA
tacaggcgtgcacataggaggac

SEQ ID NO: 2042 - RNA, 23 nt, synthetic construct
  source 1..23: mol_type = other RNA
tcagtcgctgagctgtacgccct

SEQ ID NO: 2043 - RNA, 23 nt, synthetic construct
  source 1..23: mol_type = other RNA
tcagttctgcatgtacttggtgc

SEQ ID NO: 2044 - RNA, 23 nt, synthetic construct
  source 1..23: mol_type = other RNA
tgcatccaccacgtaggcgtagc

SEQ ID NO: 2045 - RNA, 23 nt, synthetic construct
  source 1..23: mol_type = other RNA
taggcacgaaggaaacgctgcag

SEQ ID NO: 2046 - RNA, 23 nt, synthetic construct
  source 1..23: mol_type = other RNA
tcgcgtcattgaggaaggtgccc

SEQ ID NO: 2047 - RNA, 23 nt, synthetic construct
  source 1..23: mol_type = other RNA
tgtcgtgcaccacctctccagga

SEQ ID NO: 2048 - RNA, 23 nt, synthetic construct
  source 1..23: mol_type = other RNA
tacccgtacatgaacacacggcg

SEQ ID NO: 2049 - RNA, 23 nt, synthetic construct
  source 1..23: mol_type = other RNA
ttgtgcttttctgcagagaggct

SEQ ID NO: 2050 - RNA, 23 nt, synthetic construct
  source 1..23: mol_type = other RNA
tccgagctgttgctgcagtccag

SEQ ID NO: 2051 - RNA, 23 nt, synthetic construct
  source 1..23: mol_type = other RNA
tcgcagtgtgtgctgaaacagcc

SEQ ID NO: 2052 - RNA, 23 nt, synthetic construct
  source 1..23: mol_type = other RNA
tagtcctcctcggcaatgcagcc

SEQ ID NO: 2053 - RNA, 23 nt, synthetic construct
  source 1..23: mol_type = other RNA
ttctctccaggcttgtaggtggc

SEQ ID NO: 2054 - RNA, 23 nt, synthetic construct
  source 1..23: mol_type = other RNA
taggtgcaggtgttgcagtcgac

SEQ ID NO: 2055 - RNA, 23 nt, synthetic construct
  source 1..23: mol_type = other RNA
ttgcactcccacctccggttcct

SEQ ID NO: 2056 - RNA, 23 nt, synthetic construct
  source 1..23: mol_type = other RNA
tcaaaggtgatgaagtggccatc

SEQ ID NO: 2057 - RNA, 23 nt, synthetic construct
  source 1..23: mol_type = other RNA
tcttcaaagctgtagcgatcgcc

SEQ ID NO: 2058 - RNA, 23 nt, synthetic construct
  source 1..23: mol_type = other RNA
tggccaagatgtactcgcagctg

SEQ ID NO: 2059 - RNA, 23 nt, synthetic construct
  source 1..23: mol_type = other RNA
ttctcggtgacgatgcggaaggt

SEQ ID NO: 2060 - RNA, 23 nt, synthetic construct
  source 1..23: mol_type = other RNA
ttccacgaagagcttgatggcct

SEQ ID NO: 2061 - RNA, 23 nt, synthetic construct
  source 1..23: mol_type = other RNA
ttcttggaggatcagctcgtagc

SEQ ID NO: 2062 - RNA, 23 nt, synthetic construct
  source 1..23: mol_type = other RNA
ttcgccaccgccttaaaggtccc

SEQ ID NO: 2063 - RNA, 23 nt, synthetic construct
  source 1..23: mol_type = other RNA
ttgtagcgtatcttgtagggtgg

SEQ ID NO: 2064 - RNA, 23 nt, synthetic construct
  source 1..23: mol_type = other RNA
ttgggtctcgatgaccaggaaga

SEQ ID NO: 2065 - RNA, 23 nt, synthetic construct
  source 1..23: mol_type = other RNA
tcagtcggatgaacacgctggtc

SEQ ID NO: 2066 - RNA, 23 nt, synthetic construct
  source 1..23: mol_type = other RNA
taccctgcccttgtagtcctggt

SEQ ID NO: 2067 - RNA, 23 nt, synthetic construct
  source 1..23: mol_type = other RNA
tgcattgtcgtcgaagttcccgc

SEQ ID NO: 2068 - RNA, 23 nt, synthetic construct
  source 1..23: mol_type = other RNA
ttacgcgtggcaaagtcattgat

SEQ ID NO: 2069 - RNA, 23 nt, synthetic construct
  source 1..23: mol_type = other RNA
tctgttcccaaactccagtgcgt

SEQ ID NO: 2070 - RNA, 23 nt, synthetic construct
  source 1..23: mol_type = other RNA
ttgctgcactgcttctgggccca

SEQ ID NO: 2071 - RNA, 23 nt, synthetic construct
  source 1..23: mol_type = other RNA
tacttggtggagtcaacctggga

SEQ ID NO: 2072 - RNA, 23 nt, synthetic construct
  source 1..23: mol_type = other RNA
tcgtcgttcacgcaggcctcgta

SEQ ID NO: 2073 - RNA, 23 nt, synthetic construct
  source 1..23: mol_type = other RNA
tcgtgcagaaacactcgcagtcg

SEQ ID NO: 2074 - RNA, 23 nt, synthetic construct
  source 1..23: mol_type = other RNA
tagtccgccaggacacacacagg

SEQ ID NO: 2075 - RNA, 23 nt, synthetic construct
  source 1..23: mol_type = other RNA
tgttgtagaagtcacagaacaag

SEQ ID NO: 2076 - RNA, 23 nt, synthetic construct
  source 1..23: mol_type = other RNA
tggctggtagtgccactcacagc

SEQ ID NO: 2077 - RNA, 23 nt, synthetic construct
  source 1..23: mol_type = other RNA
ttgggcacttcgggtagcagcct

SEQ ID NO: 2078 - RNA, 23 nt, synthetic construct
  source 1..23: mol_type = other RNA
tgtcctcattgaagaagggctgg

SEQ ID NO: 2079 - RNA, 23 nt, synthetic construct
  source 1..23: mol_type = other RNA
tccacactgggccacgcacttca

SEQ ID NO: 2080 - RNA, 23 nt, synthetic construct
  source 1..23: mol_type = other RNA
tagtttccgtccttgtcgtagca

SEQ ID NO: 2081 - RNA, 23 nt, synthetic construct
  source 1..23: mol_type = other RNA
tggacccttgcaccgacgtcata

SEQ ID NO: 2082 - RNA, 23 nt, synthetic construct
  source 1..23: mol_type = other RNA
tgtgtgcagttacagctctggca

SEQ ID NO: 2083 - RNA, 23 nt, synthetic construct
  source 1..23: mol_type = other RNA
ttcaaggctgtgagcgcactgga

SEQ ID NO: 2084 - RNA, 23 nt, synthetic construct
  source 1..23: mol_type = other RNA
ttcctgtcctcataggtgcaggt

SEQ ID NO: 2085 - RNA, 23 nt, synthetic construct
  source 1..23: mol_type = other RNA
tgtgttgtagatgacgtcctggt

SEQ ID NO: 2086 - RNA, 23 nt, synthetic construct
  source 1..23: mol_type = other RNA
tagatggcgatcaagcaggcgcc

SEQ ID NO: 2087 - RNA, 23 nt, synthetic construct
  source 1..23: mol_type = other RNA
tacagccttcctgatgatggtgc

SEQ ID NO: 2088 - RNA, 23 nt, synthetic construct
  source 1..23: mol_type = other RNA
ttgaaggtgaatggcgttgtggc

SEQ ID NO: 2089 - RNA, 23 nt, synthetic construct
  source 1..23: mol_type = other RNA
ttcgcggacacacacggtggaga

SEQ ID NO: 2090 - RNA, 23 nt, synthetic construct
  source 1..23: mol_type = other RNA
ttgcccattgtaccagctggacc

SEQ ID NO: 2091 - RNA, 23 nt, synthetic construct
  source 1..23: mol_type = other RNA
tcaaacgtctcaaagtctccgcc

SEQ ID NO: 2092 - RNA, 23 nt, synthetic construct
  source 1..23: mol_type = other RNA
tagggcatacctggtaccctctc

SEQ ID NO: 2093 - RNA, 23 nt, synthetic construct
  source 1..23: mol_type = other RNA
tcggcactcgatgtcagccagca

SEQ ID NO: 2094 - RNA, 23 nt, synthetic construct
  source 1..23: mol_type = other RNA
ttccagcggcatgtcgggaagct

SEQ ID NO: 2095 - RNA, 23 nt, synthetic construct
  source 1..23: mol_type = other RNA
tatgcggtcacagtccacctgct

SEQ ID NO: 2096 - RNA, 23 nt, synthetic construct
  source 1..23: mol_type = other RNA
tgactctgttggctgttggcgca

SEQ ID NO: 2097 - RNA, 23 nt, synthetic construct
  source 1..23: mol_type = other RNA
tcagctcgtagtcgtgacagagc

SEQ ID NO: 2098 - RNA, 23 nt, synthetic construct
  source 1..23: mol_type = other RNA
tgcacgtattcgcagcagagaac

SEQ ID NO: 2099 - RNA, 23 nt, synthetic construct
  source 1..23: mol_type = other RNA
ttaggcacagcaggctccgtgct

SEQ ID NO: 2100 - RNA, 23 nt, synthetic construct
  source 1..23: mol_type = other RNA
tcttttcggttgctgtggtctgg

SEQ ID NO: 2101 - RNA, 23 nt, synthetic construct
  source 1..23: mol_type = other RNA
ttggacccagtctgcgaggtgag

SEQ ID NO: 2102 - RNA, 23 nt, synthetic construct
  source 1..23: mol_type = other RNA
ttcctcatcaaaccactctgtcc

SEQ ID NO: 2103 - RNA, 23 nt, synthetic construct
  source 1..23: mol_type = other RNA
tttatcgtaggactcaacgtccc

SEQ ID NO: 2104 - RNA, 23 nt, synthetic construct
  source 1..23: mol_type = other RNA
tataagtgccctccagcggccct

SEQ ID NO: 2105 - RNA, 23 nt, synthetic construct
  source 1..23: mol_type = other RNA
tcactctatgtccttaggctgct

SEQ ID NO: 2106 - RNA, 23 nt, synthetic construct
  source 1..23: mol_type = other RNA
tacctgtgccagggtccagttgg

SEQ ID NO: 2107 - RNA, 23 nt, synthetic construct
  source 1..23: mol_type = other RNA
taagtggacgtcacagtgcacct

SEQ ID NO: 2108 - RNA, 23 nt, synthetic construct
  source 1..23: mol_type = other RNA
tcctgctcccagttcctgcacac

SEQ ID NO: 2109 - RNA, 23 nt, synthetic construct
  source 1..23: mol_type = other RNA
ttgtagcacatcttgaagacgcc

SEQ ID NO: 2110 - RNA, 23 nt, synthetic construct
  source 1..23: mol_type = other RNA
tagtggtcgtcactgcagcagag

SEQ ID NO: 2111 - RNA, 23 nt, synthetic construct
  source 1..23: mol_type = other RNA
tcgtctccagctctgtggtcggt

SEQ ID NO: 2112 - RNA, 23 nt, synthetic construct
  source 1..23: mol_type = other RNA
ttgcggcgttgagaacagggcct

SEQ ID NO: 2113 - RNA, 23 nt, synthetic construct
  source 1..23: mol_type = other RNA
tatgtcagtccttctgagagggt

SEQ ID NO: 2114 - RNA, 23 nt, synthetic construct
  source 1..23: mol_type = other RNA
tcaagggtgcttgtgtatctggg

SEQ ID NO: 2115 - RNA, 23 nt, synthetic construct
  source 1..23: mol_type = other RNA
tgacagtgggttctgtggagcct

SEQ ID NO: 2116 - RNA, 23 nt, synthetic construct
  source 1..23: mol_type = other RNA
tctgagcgtgttggaagggtgga

SEQ ID NO: 2117 - RNA, 23 nt, synthetic construct
  source 1..23: mol_type = other RNA
tggaggttgccattgttgttggg

SEQ ID NO: 2118 - RNA, 23 nt, synthetic construct
  source 1..23: mol_type = other RNA
ttcagcggctctttggaagcggt

SEQ ID NO: 2119 - RNA, 23 nt, synthetic construct
  source 1..23: mol_type = other RNA
ttcgctcgtgagtgttggcgcca

SEQ ID NO: 2120 - RNA, 23 nt, synthetic construct
  source 1..23: mol_type = other RNA
ttctcggcctgagaggtggacag

SEQ ID NO: 2121 - RNA, 23 nt, synthetic construct
  source 1..23: mol_type = other RNA
ttcattgtcgtctctgtcctggg

SEQ ID NO: 2122 - RNA, 23 nt, synthetic construct
  source 1..23: mol_type = other RNA
ttggtggtggtgttagtcaaggg

SEQ ID NO: 2123 - RNA, 23 nt, synthetic construct
  source 1..23: mol_type = other RNA
tactcacacttcggttgacagcg

SEQ ID NO: 2124 - RNA, 23 nt, synthetic construct
  source 1..23: mol_type = other RNA
tagtccacgtcaaaccactctgt

SEQ ID NO: 2125 - RNA, 23 nt, synthetic construct
  source 1..23: mol_type = other RNA
ttgatgttttcaaaagtttccat

SEQ ID NO: 2126 - RNA, 23 nt, synthetic construct
  source 1..23: mol_type = other RNA
tcactctatgctctttggtgccc

SEQ ID NO: 2127 - RNA, 23 nt, synthetic construct
  source 1..23: mol_type = other RNA
tcctggtcgatgcttacctcggg

SEQ ID NO: 2128 - RNA, 23 nt, synthetic construct
  source 1..23: mol_type = other RNA
tgtctccaggctgcaggtcagca

SEQ ID NO: 2129 - RNA, 23 nt, synthetic construct
  source 1..23: mol_type = other RNA
ttctggtcttcgttcttgcaggt

SEQ ID NO: 2130 - RNA, 23 nt, synthetic construct
  source 1..23: mol_type = other RNA
tcgcacgttgtagttgaagcaca

SEQ ID NO: 2131 - RNA, 23 nt, synthetic construct
  source 1..23: mol_type = other RNA
tggctgtagtcgtcacagcaaag

SEQ ID NO: 2132 - RNA, 23 nt, synthetic construct
  source 1..23: mol_type = other RNA
tttgtgaggatccaggtcgtccc

SEQ ID NO: 2133 - RNA, 23 nt, synthetic construct
  source 1..23: mol_type = other RNA
tcgtagtggctgttgtggtcggc

SEQ ID NO: 2134 - RNA, 23 nt, synthetic construct
  source 1..23: mol_type = other RNA
tggagctgttctcagggtggagg

SEQ ID NO: 2135 - RNA, 23 nt, synthetic construct
  source 1..23: mol_type = other RNA
ttggtggtcagcactttgggagg

SEQ ID NO: 2136 - RNA, 23 nt, synthetic construct
  source 1..23: mol_type = other RNA
tagggagtggctttggagctggt

SEQ ID NO: 2137 - RNA, 23 nt, synthetic construct
  source 1..23: mol_type = other RNA
tggttgcagtccctggactggag

SEQ ID NO: 2138 - RNA, 23 nt, synthetic construct
  source 1..23: mol_type = other RNA
ttggctgtgcttctcagtgctgg

SEQ ID NO: 2139 - RNA, 23 nt, synthetic construct
  source 1..23: mol_type = other RNA
tgatgggtgtaacgctggtagct

SEQ ID NO: 2140 - RNA, 23 nt, synthetic construct
  source 1..23: mol_type = other RNA
taggtggtgcccagggaggaaga

SEQ ID NO: 2141 - RNA, 23 nt, synthetic construct
  source 1..23: mol_type = other RNA
tgtgtggtggtctgtgataggcg

SEQ ID NO: 2142 - RNA, 23 nt, synthetic construct
  source 1..23: mol_type = other RNA
ttgtggctgtggacatggtggcc

SEQ ID NO: 2143 - RNA, 23 nt, synthetic construct
  source 1..23: mol_type = other RNA
tgcagtctctggagtggaggagg

SEQ ID NO: 2144 - RNA, 23 nt, synthetic construct
  source 1..23: mol_type = other RNA
ttggcggtaagcactgtggaggt

SEQ ID NO: 2145 - RNA, 23 nt, synthetic construct
  source 1..23: mol_type = other RNA
tggtagtgtgagctgttcctggg

SEQ ID NO: 2146 - RNA, 23 nt, synthetic construct
  source 1..23: mol_type = other RNA
tcgtggttgtggtagttggcact

SEQ ID NO: 2147 - RNA, 23 nt, synthetic construct
  source 1..23: mol_type = other RNA
tttgtgctgatccacactggagg

SEQ ID NO: 2148 - RNA, 23 nt, synthetic construct
  source 1..23: mol_type = other RNA
ttggagcctctggttgtgggtgt

SEQ ID NO: 2149 - RNA, 23 nt, synthetic construct
  source 1..23: mol_type = other RNA
ttggtggtcagcactgtggcggt

SEQ ID NO: 2150 - RNA, 23 nt, synthetic construct
  source 1..23: mol_type = other RNA
tgttgccatagaaccagtggcca

SEQ ID NO: 2151 - RNA, 23 nt, synthetic construct
  source 1..23: mol_type = other RNA
ttggtctgtgtgctagaggaggg

SEQ ID NO: 2152 - RNA, 23 nt, synthetic construct
  source 1..23: mol_type = other RNA
ttggccgtgatcgtagtggccgt

SEQ ID NO: 2153 - RNA, 23 nt, synthetic construct
  source 1..23: mol_type = other RNA
tttgtcccaggagttgaggaggg

SEQ ID NO: 2154 - RNA, 23 nt, synthetic construct
  source 1..23: mol_type = other RNA
tagggagtcactgtgttgctggt

SEQ ID NO: 2155 - RNA, 23 nt, synthetic construct
  source 1..23: mol_type = other RNA
ttgtgggtggtccctagggcaga

SEQ ID NO: 2156 - RNA, 23 nt, synthetic construct
  source 1..23: mol_type = other RNA
ttggccatggtgttcggcactgg

SEQ ID NO: 2157 - RNA, 23 nt, synthetic construct
  source 1..23: mol_type = other RNA
taggtggccgaagtccaggctgt

SEQ ID NO: 2158 - RNA, 23 nt, synthetic construct
  source 1..23: mol_type = other RNA
tgaaggctctgtgatgtgggtgg

SEQ ID NO: 2159 - RNA, 23 nt, synthetic construct
  source 1..23: mol_type = other RNA
tctagggtgtgggaagtcaccgt

SEQ ID NO: 2160 - RNA, 23 nt, synthetic construct
  source 1..23: mol_type = other RNA
tctgggtggtaccggtggttgct

SEQ ID NO: 2161 - RNA, 23 nt, synthetic construct
  source 1..23: mol_type = other RNA
tgctggaaagggctggagtcgag

SEQ ID NO: 2162 - RNA, 23 nt, synthetic construct
  source 1..23: mol_type = other RNA
tactcggtggttctgctgctagg

SEQ ID NO: 2163 - RNA, 23 nt, synthetic construct
  source 1..23: mol_type = other RNA
taggtgcgggtcttgctgggtgt

SEQ ID NO: 2164 - RNA, 23 nt, synthetic construct
  source 1..23: mol_type = other RNA
tacagcccatggtcaccaccgtg

SEQ ID NO: 2165 - RNA, 23 nt, synthetic construct
  source 1..23: mol_type = other RNA
tggtagctgtagtccagccactc

SEQ ID NO: 2166 - RNA, 23 nt, synthetic construct
  source 1..23: mol_type = other RNA
tgatgttggagtaggtgtcaaag

SEQ ID NO: 2167 - RNA, 23 nt, synthetic construct
  source 1..23: mol_type = other RNA
tcattccacgacctggcccaact

SEQ ID NO: 2168 - RNA, 23 nt, synthetic construct
  source 1..23: mol_type = other RNA
tagaccaggccaaagtccaggct

SEQ ID NO: 2169 - RNA, 23 nt, synthetic construct
  source 1..23: mol_type = other RNA
tatttcatagttgaagcacatct

SEQ ID NO: 2170 - RNA, 23 nt, synthetic construct
  source 1..23: mol_type = other RNA
tcgtagttgcagcagaacacacg

SEQ ID NO: 2171 - RNA, 23 nt, synthetic construct
  source 1..23: mol_type = other RNA
tagggcatggccgtagagctggt

SEQ ID NO: 2172 - RNA, 23 nt, synthetic construct
  source 1..23: mol_type = other RNA
tgtggtcagctctgtgaggatcc

SEQ ID NO: 2173 - RNA, 23 nt, synthetic construct
  source 1..23: mol_type = other RNA
tagtggactcagtcgtagtggct

SEQ ID NO: 2174 - RNA, 23 nt, synthetic construct
  source 1..23: mol_type = other RNA
tctgtgaggatccaggtggtccc

SEQ ID NO: 2175 - RNA, 23 nt, synthetic construct
  source 1..23: mol_type = other RNA
ttcacggtggctgtagtgctcgg

SEQ ID NO: 2176 - RNA, 23 nt, synthetic construct
  source 1..23: mol_type = other RNA
tagcagttgcctgggtggaggag

SEQ ID NO: 2177 - RNA, 23 nt, synthetic construct
  source 1..23: mol_type = other RNA
ttgactgtgggtgtcgtggccgt

SEQ ID NO: 2178 - RNA, 23 nt, synthetic construct
  source 1..23: mol_type = other RNA
tgaagggagtggctttggagctg

SEQ ID NO: 2179 - RNA, 23 nt, synthetic construct
  source 1..23: mol_type = other RNA
tgctgtaaagctggtagctgtgg

SEQ ID NO: 2180 - RNA, 23 nt, synthetic construct
  source 1..23: mol_type = other RNA
tacagtctctggagtggaggagg

SEQ ID NO: 2181 - RNA, 23 nt, synthetic construct
  source 1..23: mol_type = other RNA
tcgtggtggtaagcactgtggag

SEQ ID NO: 2182 - RNA, 23 nt, synthetic construct
  source 1..23: mol_type = other RNA
tagcactttggtagtgtgagctg

SEQ ID NO: 2183 - RNA, 23 nt, synthetic construct
  source 1..23: mol_type = other RNA
ttgaagcccgtggttgtggtagt

SEQ ID NO: 2184 - RNA, 23 nt, synthetic construct
  source 1..23: mol_type = other RNA
ttgatccacactggaagcgtgcg

SEQ ID NO: 2185 - RNA, 23 nt, synthetic construct
  source 1..23: mol_type = other RNA
ttggaacctctggttgtgggtgt

SEQ ID NO: 2186 - RNA, 23 nt, synthetic construct
  source 1..23: mol_type = other RNA
tagttgtggtggtggtggtcagc

SEQ ID NO: 2187 - RNA, 23 nt, synthetic construct
  source 1..23: mol_type = other RNA
tttgtccctggagttgaggaggg

SEQ ID NO: 2188 - RNA, 23 nt, synthetic construct
  source 1..23: mol_type = other RNA
tagggagtcactgtgctgctggt

SEQ ID NO: 2189 - RNA, 23 nt, synthetic construct
  source 1..23: mol_type = other RNA
tacagggatcgcccgtgtgtggt

SEQ ID NO: 2190 - RNA, 23 nt, synthetic construct
  source 1..23: mol_type = other RNA
ttggagtcgagtgctgggtggta

SEQ ID NO: 2191 - RNA, 23 nt, synthetic construct
  source 1..23: mol_type = other RNA
ttgctgctagggtgagggctgga

SEQ ID NO: 2192 - RNA, 23 nt, synthetic construct
  source 1..23: mol_type = other RNA
ttctgctctgtgaggatccaggt

SEQ ID NO: 2193 - RNA, 23 nt, synthetic construct
  source 1..23: mol_type = other RNA
tggttgcggtcgtagtggctgct

SEQ ID NO: 2194 - RNA, 23 nt, synthetic construct
  source 1..23: mol_type = other RNA
ttgctggtcagcactttgggagg

SEQ ID NO: 2195 - RNA, 23 nt, synthetic construct
  source 1..23: mol_type = other RNA
taggaagtggctttggaactggt

SEQ ID NO: 2196 - RNA, 23 nt, synthetic construct
  source 1..23: mol_type = other RNA
taagggtggttgcagtccttgga

SEQ ID NO: 2197 - RNA, 23 nt, synthetic construct
  source 1..23: mol_type = other RNA
tgtggctgtgcttgtcagcactg

SEQ ID NO: 2198 - RNA, 23 nt, synthetic construct
  source 1..23: mol_type = other RNA
tgtgtaaagctggtagctgtgga

SEQ ID NO: 2199 - RNA, 23 nt, synthetic construct
  source 1..23: mol_type = other RNA
ttggtcccaagggtgaaggaggg

SEQ ID NO: 2200 - RNA, 23 nt, synthetic construct
  source 1..23: mol_type = other RNA
tgtgtggtggtctgttctgggag

SEQ ID NO: 2201 - RNA, 23 nt, synthetic construct
  source 1..23: mol_type = other RNA
tggtggattgtggacatggtggc

SEQ ID NO: 2202 - RNA, 23 nt, synthetic construct
  source 1..23: mol_type = other RNA
ttcgtggtcagcactgtggaggt

SEQ ID NO: 2203 - RNA, 23 nt, synthetic construct
  source 1..23: mol_type = other RNA
ttggacatggaactggtggccct

SEQ ID NO: 2204 - RNA, 23 nt, synthetic construct
  source 1..23: mol_type = other RNA
tagtggctgcagttgtagtggct

SEQ ID NO: 2205 - RNA, 23 nt, synthetic construct
  source 1..23: mol_type = other RNA
ttcacggtggctgtagtgctggg

SEQ ID NO: 2206 - RNA, 23 nt, synthetic construct
  source 1..23: mol_type = other RNA
tctggtcagcactttgagggtgc

SEQ ID NO: 2207 - RNA, 23 nt, synthetic construct
  source 1..23: mol_type = other RNA
ttggagctgatgactgtgggtgt

SEQ ID NO: 2208 - RNA, 23 nt, synthetic construct
  source 1..23: mol_type = other RNA
ttggactggaggagggagtggct

SEQ ID NO: 2209 - RNA, 23 nt, synthetic construct
  source 1..23: mol_type = other RNA
tgatggctgtaacgctggtagct

SEQ ID NO: 2210 - RNA, 23 nt, synthetic construct
  source 1..23: mol_type = other RNA
tgacagtctctggagtagaggag

SEQ ID NO: 2211 - RNA, 23 nt, synthetic construct
  source 1..23: mol_type = other RNA
tgcactttggtagtgtgagctgt

SEQ ID NO: 2212 - RNA, 23 nt, synthetic construct
  source 1..23: mol_type = other RNA
tgaagcccgtggttgtggtagtc

SEQ ID NO: 2213 - RNA, 23 nt, synthetic construct
  source 1..23: mol_type = other RNA
ttggctgtgatcgtagtggccgt

SEQ ID NO: 2214 - RNA, 23 nt, synthetic construct
  source 1..23: mol_type = other RNA
tcgtgtgtggtggccgtggtgtt

SEQ ID NO: 2215 - RNA, 23 nt, synthetic construct
  source 1..23: mol_type = other RNA
tggtactggtggttgctgctggg

SEQ ID NO: 2216 - RNA, 23 nt, synthetic construct
  source 1..23: mol_type = other RNA
ttgtggctgtggtcctggaggtg

SEQ ID NO: 2217 - RNA, 23 nt, synthetic construct
  source 1..23: mol_type = other RNA
tcccgtggtcaccaccgtggtta

SEQ ID NO: 2218 - RNA, 23 nt, synthetic construct
  source 1..23: mol_type = other RNA
tagttgaggagggcgtggccgta

SEQ ID NO: 2219 - RNA, 23 nt, synthetic construct
  source 1..23: mol_type = other RNA
ttcagctttgtgaggatccaggt

SEQ ID NO: 2220 - RNA, 23 nt, synthetic construct
  source 1..23: mol_type = other RNA
ttggagccactggttgtgggtgt

SEQ ID NO: 2221 - RNA, 23 nt, synthetic construct
  source 1..23: mol_type = other RNA
tctgtgaggatccaggtcgtccc

SEQ ID NO: 2222 - RNA, 23 nt, synthetic construct
  source 1..23: mol_type = other RNA
tcgtagtggctgttgtggtcagc

SEQ ID NO: 2223 - RNA, 23 nt, synthetic construct
  source 1..23: mol_type = other RNA
ttggccgtggatccagtggatgc

SEQ ID NO: 2224 - RNA, 23 nt, synthetic construct
  source 1..23: mol_type = other RNA
tgctggtcagcactttgggaggg

SEQ ID NO: 2225 - RNA, 23 nt, synthetic construct
  source 1..23: mol_type = other RNA
tggtagctgtggatttggtggct

SEQ ID NO: 2226 - RNA, 23 nt, synthetic construct
  source 1..23: mol_type = other RNA
ttggacgtggaactggtggccct

SEQ ID NO: 2227 - RNA, 23 nt, synthetic construct
  source 1..23: mol_type = other RNA
ttgtcgtggccgtggtgctcaca

SEQ ID NO: 2228 - RNA, 23 nt, synthetic construct
  source 1..23: mol_type = other RNA
tagggcagttgcagtccctggac

SEQ ID NO: 2229 - RNA, 23 nt, synthetic construct
  source 1..23: mol_type = other RNA
ttggtggtcagcactctggcggt

SEQ ID NO: 2230 - RNA, 23 nt, synthetic construct
  source 1..23: mol_type = other RNA
tggtgatgggtgttgtccctgga

SEQ ID NO: 2231 - RNA, 23 nt, synthetic construct
  source 1..23: mol_type = other RNA
taggaggaagtggctttggagct

SEQ ID NO: 2232 - RNA, 23 nt, synthetic construct
  source 1..23: mol_type = other RNA
ttgtggctgtgcttgtcagcact

SEQ ID NO: 2233 - RNA, 23 nt, synthetic construct
  source 1..23: mol_type = other RNA
tacgtggtccacagggtggagga

SEQ ID NO: 2234 - RNA, 23 nt, synthetic construct
  source 1..23: mol_type = other RNA
tgtgtggtggtctgtgctgggac

SEQ ID NO: 2235 - RNA, 23 nt, synthetic construct
  source 1..23: mol_type = other RNA
tggattgtggacatggtggacat

SEQ ID NO: 2236 - RNA, 23 nt, synthetic construct
  source 1..23: mol_type = other RNA
ttggtctctggagtagaggaggt

SEQ ID NO: 2237 - RNA, 23 nt, synthetic construct
  source 1..23: mol_type = other RNA
ttggtggtcagcactgtggaggt

SEQ ID NO: 2238 - RNA, 23 nt, synthetic construct
  source 1..23: mol_type = other RNA
ttggccgtggaattggtggccct

SEQ ID NO: 2239 - RNA, 23 nt, synthetic construct
  source 1..23: mol_type = other RNA
ttgtagtggctgttgtggtcagc

SEQ ID NO: 2240 - RNA, 23 nt, synthetic construct
  source 1..23: mol_type = other RNA
tacagggtggccgtggatccagt

SEQ ID NO: 2241 - RNA, 23 nt, synthetic construct
  source 1..23: mol_type = other RNA
ttcacggtggctatagtgctcgg

SEQ ID NO: 2242 - RNA, 23 nt, synthetic construct
  source 1..23: mol_type = other RNA
tgtgagctgttcccagagtggag

SEQ ID NO: 2243 - RNA, 23 nt, synthetic construct
  source 1..23: mol_type = other RNA
tctgtgggcatagtggccatggt

SEQ ID NO: 2244 - RNA, 23 nt, synthetic construct
  source 1..23: mol_type = other RNA
tagctgggaaccgtggaggcagt

SEQ ID NO: 2245 - RNA, 23 nt, synthetic construct
  source 1..23: mol_type = other RNA
ttggacacgctgaaggttggcag

SEQ ID NO: 2246 - RNA, 23 nt, synthetic construct
  source 1..23: mol_type = other RNA
tgtggtgaggactgaggaggaca

SEQ ID NO: 2247 - RNA, 23 nt, synthetic construct
  source 1..23: mol_type = other RNA
tcagggagtagagaagtgggagc

SEQ ID NO: 2248 - RNA, 23 nt, synthetic construct
  source 1..23: mol_type = other RNA
tgagaaaaactgtccaaatgccc

SEQ ID NO: 2249 - RNA, 23 nt, synthetic construct
  source 1..23: mol_type = other RNA
tgtcttattgtagatgacttccc

SEQ ID NO: 2250 - RNA, 23 nt, synthetic construct
  source 1..23: mol_type = other RNA
tacactgcgtagaaatggcagcc

SEQ ID NO: 2251 - RNA, 23 nt, synthetic construct
  source 1..23: mol_type = other RNA
taagcggtcaatgtcacagtgct

SEQ ID NO: 2252 - RNA, 23 nt, synthetic construct
  source 1..23: mol_type = other RNA
tagagggatggcattgtcacagc

SEQ ID NO: 2253 - RNA, 23 nt, synthetic construct
  source 1..23: mol_type = other RNA
taccgtgcagttctccagggtcc

SEQ ID NO: 2254 - RNA, 23 nt, synthetic construct
  source 1..23: mol_type = other RNA
tacgacacggttgtcacccacgc

SEQ ID NO: 2255 - RNA, 23 nt, synthetic construct
  source 1..23: mol_type = other RNA
tttggccacaggctttgggtcca

SEQ ID NO: 2256 - RNA, 23 nt, synthetic construct
  source 1..23: mol_type = other RNA
tgcaggtgcttgttcacgcaggt

SEQ ID NO: 2257 - RNA, 23 nt, synthetic construct
  source 1..23: mol_type = other RNA
tgctcgggtccgacactttgatg

SEQ ID NO: 2258 - RNA, 23 nt, synthetic construct
  source 1..23: mol_type = other RNA
tctcatagtggaagtcacagggc

SEQ ID NO: 2259 - RNA, 23 nt, synthetic construct
  source 1..23: mol_type = other RNA
tcacatgctgcagatgcactcgc

SEQ ID NO: 2260 - RNA, 23 nt, synthetic construct
  source 1..23: mol_type = other RNA
tgtcaaaggtggaatagtgggag

SEQ ID NO: 2261 - RNA, 23 nt, synthetic construct
  source 1..23: mol_type = other RNA
ttctctcatgaggacataggtgc

SEQ ID NO: 2262 - RNA, 23 nt, synthetic construct
  source 1..23: mol_type = other RNA
tgctgagattcccaaagcgtgca

SEQ ID NO: 2263 - RNA, 23 nt, synthetic construct
  source 1..23: mol_type = other RNA
tgtgcagtagtggttgtccaggt

SEQ ID NO: 2264 - RNA, 23 nt, synthetic construct
  source 1..23: mol_type = other RNA
tgacttgtagtggatgctgaggg

SEQ ID NO: 2265 - RNA, 23 nt, synthetic construct
  source 1..23: mol_type = other RNA
taccatggtgacagtgaggacga

SEQ ID NO: 2266 - RNA, 23 nt, synthetic construct
  source 1..23: mol_type = other RNA
ttttggtcaaacaggatcaggcc

SEQ ID NO: 2267 - RNA, 23 nt, synthetic construct
  source 1..23: mol_type = other RNA
tccgttcttgctgaaaccgctgc

SEQ ID NO: 2268 - RNA, 23 nt, synthetic construct
  source 1..23: mol_type = other RNA
tagggcaggaatgtccacacgca

SEQ ID NO: 2269 - RNA, 23 nt, synthetic construct
  source 1..23: mol_type = other RNA
tccattgaaggtgacgctcacgc

SEQ ID NO: 2270 - RNA, 23 nt, synthetic construct
  source 1..23: mol_type = other RNA
tgtgttgttgtggaagaggctgt

SEQ ID NO: 2271 - RNA, 23 nt, synthetic construct
  source 1..23: mol_type = other RNA
ttccctctggttgttggtgcagg

SEQ ID NO: 2272 - RNA, 23 nt, synthetic construct
  source 1..23: mol_type = other RNA
tgttccgtcccgctggagacagt

SEQ ID NO: 2273 - RNA, 23 nt, synthetic construct
  source 1..23: mol_type = other RNA
tccatgtccttgcaactggcggc

SEQ ID NO: 2274 - RNA, 23 nt, synthetic construct
  source 1..23: mol_type = other RNA
tagccatcctttctgctgtcggg

SEQ ID NO: 2275 - RNA, 23 nt, synthetic construct
  source 1..23: mol_type = other RNA
tagcatcagatcacagagcggct

SEQ ID NO: 2276 - RNA, 23 nt, synthetic construct
  source 1..23: mol_type = other RNA
ttggcactcagcaaagacctggc

SEQ ID NO: 2277 - RNA, 23 nt, synthetic construct
  source 1..23: mol_type = other RNA
taggcgttgaagaatgggcccgg

SEQ ID NO: 2278 - RNA, 23 nt, synthetic construct
  source 1..23: mol_type = other RNA
tcagagctctgcgtaagcctcca

SEQ ID NO: 2279 - RNA, 23 nt, synthetic construct
  source 1..23: mol_type = other RNA
tctcgccagtcactgcacactcc

SEQ ID NO: 2280 - RNA, 23 nt, synthetic construct
  source 1..23: mol_type = other RNA
ttggcttgtacactttggtgggt

SEQ ID NO: 2281 - RNA, 23 nt, synthetic construct
  source 1..23: mol_type = other RNA
ttctggttcctagagttgcaggt

SEQ ID NO: 2282 - RNA, 23 nt, synthetic construct
  source 1..23: mol_type = other RNA
ttgtgcgttgaagaggatctggt

SEQ ID NO: 2283 - RNA, 23 nt, synthetic construct
  source 1..23: mol_type = other RNA
taggcctgcacgcagatgcccat

SEQ ID NO: 2284 - RNA, 23 nt, synthetic construct
  source 1..23: mol_type = other RNA
tgaaatttaggaaacccatcggg

SEQ ID NO: 2285 - RNA, 23 nt, synthetic construct
  source 1..23: mol_type = other RNA
taggactggcagttgctgaccca

SEQ ID NO: 2286 - RNA, 23 nt, synthetic construct
  source 1..23: mol_type = other RNA
ttgcaccgacactgaaccctcgt

SEQ ID NO: 2287 - RNA, 23 nt, synthetic construct
  source 1..23: mol_type = other RNA
ttggtcacggttacgaagccggg

SEQ ID NO: 2288 - RNA, 23 nt, synthetic construct
  source 1..23: mol_type = other RNA
taggtggttgtgttgcacacgca

SEQ ID NO: 2289 - RNA, 23 nt, synthetic construct
  source 1..23: mol_type = other RNA
ttgggtgcagatggactcctgcc

SEQ ID NO: 2290 - RNA, 23 nt, synthetic construct
  source 1..23: mol_type = other RNA
ttgcagcggaaggtgggacagca

SEQ ID NO: 2291 - RNA, 23 nt, synthetic construct
  source 1..23: mol_type = other RNA
tcattgtacgaacacagctgagg

SEQ ID NO: 2292 - RNA, 23 nt, synthetic construct
  source 1..23: mol_type = other RNA
tgcctgggaaggttgcaccaacc

SEQ ID NO: 2293 - RNA, 23 nt, synthetic construct
  source 1..23: mol_type = other RNA
taggtacacatgtggcagggaag

SEQ ID NO: 2294 - RNA, 23 nt, synthetic construct
  source 1..23: mol_type = other RNA
ttcctcctgacattgcaccgttg

SEQ ID NO: 2295 - RNA, 23 nt, synthetic construct
  source 1..23: mol_type = other RNA
tgacaggtagtattgttgcaggc

SEQ ID NO: 2296 - RNA, 23 nt, synthetic construct
  source 1..23: mol_type = other RNA
tctctcttgtactcaaagccctg

SEQ ID NO: 2297 - RNA, 23 nt, synthetic construct
  source 1..23: mol_type = other RNA
tcaggtttcattcagctggactg

SEQ ID NO: 2298 - RNA, 23 nt, synthetic construct
  source 1..23: mol_type = other RNA
tagttgtccacatggctgttgac

SEQ ID NO: 2299 - RNA, 23 nt, synthetic construct
  source 1..23: mol_type = other RNA
tagcctcacagaggtacacggtg

SEQ ID NO: 2300 - RNA, 23 nt, synthetic construct
  source 1..23: mol_type = other RNA
tgtcagcaaatggactccaccct

SEQ ID NO: 2301 - RNA, 23 nt, synthetic construct
  source 1..23: mol_type = other RNA
tagctggacacatctgggcagga

SEQ ID NO: 2302 - RNA, 23 nt, synthetic construct
  source 1..23: mol_type = other RNA
tctcctcacaggagtagcagcag

SEQ ID NO: 2303 - RNA, 23 nt, synthetic construct
  source 1..23: mol_type = other RNA
tttgatgcggacttgacaggagt

SEQ ID NO: 2304 - RNA, 23 nt, synthetic construct
  source 1..23: mol_type = other RNA
tcctggtgccacaggatggtcgt

SEQ ID NO: 2305 - RNA, 23 nt, synthetic construct
  source 1..23: mol_type = other RNA
tcgcagaaggtgatgttgacctc

SEQ ID NO: 2306 - RNA, 23 nt, synthetic construct
  source 1..23: mol_type = other RNA
tctctgctgagtacttggacgct

SEQ ID NO: 2307 - RNA, 23 nt, synthetic construct
  source 1..23: mol_type = other RNA
tcaggtgcactggtgctgcatgg

SEQ ID NO: 2308 - RNA, 23 nt, synthetic construct
  source 1..23: mol_type = other RNA
tcgttaggacagtgcaagggcac

SEQ ID NO: 2309 - RNA, 23 nt, synthetic construct
  source 1..23: mol_type = other RNA
tacgtgggtgtaggtgtgcagga

SEQ ID NO: 2310 - RNA, 23 nt, synthetic construct
  source 1..23: mol_type = other RNA
tagggacacagaagggcgtgcag

SEQ ID NO: 2311 - RNA, 23 nt, synthetic construct
  source 1..23: mol_type = other RNA
tgaacgttctcagacagcagtgg

SEQ ID NO: 2312 - RNA, 23 nt, synthetic construct
  source 1..23: mol_type = other RNA
tctccaggtggacagagcatggg

SEQ ID NO: 2313 - RNA, 23 nt, synthetic construct
  source 1..23: mol_type = other RNA
tttttcatgatcagacaatgcac

SEQ ID NO: 2314 - RNA, 23 nt, synthetic construct
  source 1..23: mol_type = other RNA
ttaggactcctgagtggcgccct

SEQ ID NO: 2315 - RNA, 23 nt, synthetic construct
  source 1..23: mol_type = other RNA
tgtcccagtgacatcagggaggg

SEQ ID NO: 2316 - RNA, 23 nt, synthetic construct
  source 1..23: mol_type = other RNA
tacatgcttagtttgttccaggg

SEQ ID NO: 2317 - RNA, 23 nt, synthetic construct
  source 1..23: mol_type = other RNA
ttggccagctggaatccgtgctg

SEQ ID NO: 2318 - RNA, 23 nt, synthetic construct
  source 1..23: mol_type = other RNA
tcttgcctggaccagcctgtctg

SEQ ID NO: 2319 - RNA, 23 nt, synthetic construct
  source 1..23: mol_type = other RNA
ttgtcgcagcttcctggcagcag

SEQ ID NO: 2320 - RNA, 23 nt, synthetic construct
  source 1..23: mol_type = other RNA
ttcagccctgagttaccctgcag

SEQ ID NO: 2321 - RNA, 23 nt, synthetic construct
  source 1..23: mol_type = other RNA
tctctctgacctggccgttgcga

SEQ ID NO: 2322 - RNA, 23 nt, synthetic construct
  source 1..23: mol_type = other RNA
ttttatttgcaaaactgggctgg

SEQ ID NO: 2323 - RNA, 21 nt, synthetic construct
  source 1..21: mol_type = other RNA
  modified_base 1: mod_base = OTHER; note = 2'-O-methyluridine-3'-phosphorothioate
  modified_base 2: mod_base = OTHER; note = 2'-O-methyluridine-3'-phosphorothioate
  modified_base 3: mod_base = OTHER; note = 2'-O-methylguanosine-3'-phosphate
  modified_base 4: mod_base = OTHER; note = 2'-O-methylguanosine-3'-phosphate
  modified_base 5: mod_base = OTHER; note = 2'-O-methylcytidine-3'-phosphate
  modified_base 6: mod_base = OTHER; note = 2'-O-methyluridine-3'-phosphate
  modified_base 7: mod_base = OTHER; note = 2'-deoxy-2'-fluorocytidine-3'-phosphate
  modified_base 8: mod_base = OTHER; note = 2'-O-methyluridine-3'-phosphate
  modified_base 9: mod_base = OTHER; note = 2'-deoxy-2'-fluoroguanosine-3'-phosphate
  modified_base 10: mod_base = OTHER; note = 2'-deoxy-2'-fluoroguanosine-3'-phosphate
  modified_base 11: mod_base = OTHER; note = 2'-deoxy-2'-fluorocytidine-3'-phosphate
  modified_base 12: mod_base = OTHER; note = 2'-O-methylguanosine-3'-phosphate
  modified_base 13: mod_base = OTHER; note = 2'-O-methylguanosine-3'-phosphate
  modified_base 14: mod_base = OTHER; note = 2'-O-methylcytidine-3'-phosphate
  modified_base 15: mod_base = OTHER; note = 2'-O-methylcytidine-3'-phosphate
  modified_base 16: mod_base = OTHER; note = 2'-O-methyladenosine-3'-phosphate
  modified_base 17: mod_base = OTHER; note = 2'-O-methyluridine-3'-phosphate
  modified_base 18: mod_base = OTHER; note = 2'-O-methylguanosine-3'-phosphate
  modified_base 19: mod_base = OTHER; note = 2'-O-methylcytidine-3'-phosphorothioate
  modified_base 20: mod_base = OTHER; note = 2'-O-methyluridine-3'-phosphorothioate
  modified_base 21: mod_base = OTHER; note = 2'-O-methyladenosine
ttggctctggcggccatgcta

SEQ ID NO: 2324 - RNA, 21 nt, synthetic construct
  source 1..21: mol_type = other RNA
  modified_base 1: mod_base = OTHER; note = 2'-O-methylcytidine-3'-phosphorothioate
  modified_base 2: mod_base = OTHER; note = 2'-O-methyluridine-3'-phosphorothioate
  modified_base 3: mod_base = OTHER; note = 2'-O-methylguanosine-3'-phosphate
  modified_base 4: mod_base = OTHER; note = 2'-O-methylguanosine-3'-phosphate
  modified_base 5: mod_base = OTHER; note = 2'-O-methylguanosine-3'-phosphate
  modified_base 6: mod_base = OTHER; note = 2'-O-methyladenosine-3'-phosphate
  modified_base 7: mod_base = OTHER; note = 2'-deoxy-2'-fluoroguanosine-3'-phosphate
  modified_base 8: mod_base = OTHER; note = 2'-O-methyladenosine-3'-phosphate
  modified_base 9: mod_base = OTHER; note = 2'-deoxy-2'-fluoroadenosine-3'-phosphate
  modified_base 10: mod_base = OTHER; note = 2'-deoxy-2'-fluorouridine-3'-phosphate
  modified_base 11: mod_base = OTHER; note = 2'-deoxy-2'-fluoroguanosine-3'-phosphate
  modified_base 12: mod_base = OTHER; note = 2'-O-methylcytidine-3'-phosphate
  modified_base 13: mod_base = OTHER; note = 2'-O-methyladenosine-3'-phosphate
  modified_base 14: mod_base = OTHER; note = 2'-O-methylguanosine-3'-phosphate
  modified_base 15: mod_base = OTHER; note = 2'-O-methylguanosine-3'-phosphate
  modified_base 16: mod_base = OTHER; note = 2'-O-methylguanosine-3'-phosphate
  modified_base 17: mod_base = OTHER; note = 2'-O-methylcytidine-3'-phosphate
  modified_base 18: mod_base = OTHER; note = 2'-O-methyladenosine-3'-phosphate
  modified_base 19: mod_base = OTHER; note = 2'-O-methylcytidine-3'-phosphorothioate
  modified_base 20: mod_base = OTHER; note = 2'-O-methyladenosine-3'-phosphorothioate
  modified_base 21: mod_base = OTHER; note = 2'-O-methyladenosine
ctgggagaatgcagggcacaa

SEQ ID NO: 2325 - RNA, 21 nt, synthetic construct
  source 1..21: mol_type = other RNA
  modified_base 1: mod_base = OTHER; note = 2'-O-methylguanosine-3'-phosphorothioate
  modified_base 2: mod_base = OTHER; note = 2'-O-methylcytidine-3'-phosphorothioate
  modified_base 3: mod_base = OTHER; note = 2'-O-methylguanosine-3'-phosphate
  modified_base 4: mod_base = OTHER; note = 2'-O-methylcytidine-3'-phosphate
  modified_base 5: mod_base = OTHER; note = 2'-O-methylguanosine-3'-phosphate
  modified_base 6: mod_base = OTHER; note = 2'-O-methyluridine-3'-phosphate
  modified_base 7: mod_base = OTHER; note = 2'-deoxy-2'-fluoroguanosine-3'-phosphate
  modified_base 8: mod_base = OTHER; note = 2'-O-methyladenosine-3'-phosphate
  modified_base 9: mod_base = OTHER; note = 2'-deoxy-2'-fluoroguanosine-3'-phosphate
  modified_base 10: mod_base = OTHER; note = 2'-deoxy-2'-fluorocytidine-3'-phosphate
  modified_base 11: mod_base = OTHER; note = 2'-deoxy-2'-fluorouridine-3'-phosphate
  modified_base 12: mod_base = OTHER; note = 2'-O-methyluridine-3'-phosphate
  modified_base 13: mod_base = OTHER; note = 2'-O-methyluridine-3'-phosphate
  modified_base 14: mod_base = OTHER; note = 2'-O-methylguanosine-3'-phosphate
  modified_base 15: mod_base = OTHER; note = 2'-O-methyluridine-3'-phosphate
  modified_base 16: mod_base = OTHER; note = 2'-O-methyluridine-3'-phosphate
  modified_base 17: mod_base = OTHER; note = 2'-O-methylcytidine-3'-phosphate
  modified_base 18: mod_base = OTHER; note = 2'-O-methylcytidine-3'-phosphate
  modified_base 19: mod_base = OTHER; note = 2'-O-methyladenosine-3'-phosphorothioate
  modified_base 20: mod_base = OTHER; note = 2'-O-methylcytidine-3'-phosphorothioate
  modified_base 21: mod_base = OTHER; note = 2'-O-methyladenosine
gcgcgtgagctttgttccaca

SEQ ID NO: 2326 - RNA, 21 nt, synthetic construct
  source 1..21: mol_type = other RNA
  modified_base 1: mod_base = OTHER; note = 2'-O-methyluridine-3'-phosphorothioate
  modified_base 2: mod_base = OTHER; note = 2'-O-methylguanosine-3'-phosphorothioate
  modified_base 3: mod_base = OTHER; note = 2'-O-methylguanosine-3'-phosphate
  modified_base 4: mod_base = OTHER; note = 2'-O-methylguanosine-3'-phosphate
  modified_base 5: mod_base = OTHER; note = 2'-O-methylcytidine-3'-phosphate
  modified_base 6: mod_base = OTHER; note = 2'-O-methylguanosine-3'-phosphate
  modified_base 7: mod_base = OTHER; note = 2'-deoxy-2'-fluoroguanosine-3'-phosphate
  modified_base 8: mod_base = OTHER; note = 2'-O-methylguanosine-3'-phosphate
  modified_base 9: mod_base = OTHER; note = 2'-deoxy-2'-fluorouridine-3'-phosphate
  modified_base 10: mod_base = OTHER; note = 2'-deoxy-2'-fluoroguanosine-3'-phosphate
  modified_base 11: mod_base = OTHER; note = 2'-deoxy-2'-fluorouridine-3'-phosphate
  modified_base 12: mod_base = OTHER; note = 2'-O-methylguanosine-3'-phosphate
  modified_base 13: mod_base = OTHER; note = 2'-O-methylcytidine-3'-phosphate
  modified_base 14: mod_base = OTHER; note = 2'-O-methyladenosine-3'-phosphate
  modified_base 15: mod_base = OTHER; note = 2'-O-methylguanosine-3'-phosphate
  modified_base 16: mod_base = OTHER; note = 2'-O-methylcytidine-3'-phosphate
  modified_base 17: mod_base = OTHER; note = 2'-O-methyladenosine-3'-phosphate
  modified_base 18: mod_base = OTHER; note = 2'-O-methylcytidine-3'-phosphate
  modified_base 19: mod_base = OTHER; note = 2'-O-methylcytidine-3'-phosphorothioate
  modified_base 20: mod_base = OTHER; note = 2'-O-methyluridine-3'-phosphorothioate
  modified_base 21: mod_base = OTHER; note = 2'-O-methyladenosine
tgggcgggtgtgcagcaccta

SEQ ID NO: 2327 - RNA, 21 nt, synthetic construct
  source 1..21: mol_type = other RNA
  modified_base 1: mod_base = OTHER; note = 2'-O-methylcytidine-3'-phosphorothioate
  modified_base 2: mod_base = OTHER; note = 2'-O-methylcytidine-3'-phosphorothioate
  modified_base 3: mod_base = OTHER; note = 2'-O-methyladenosine-3'-phosphate
  modified_base 4: mod_base = OTHER; note = 2'-O-methylcytidine-3'-phosphate
  modified_base 5: mod_base = OTHER; note = 2'-O-methyluridine-3'-phosphate
  modified_base 6: mod_base = OTHER; note = 2'-O-methyladenosine-3'-phosphate
  modified_base 7: mod_base = OTHER; note = 2'-deoxy-2'-fluorocytidine-3'-phosphate
  modified_base 8: mod_base = OTHER; note = 2'-O-methyladenosine-3'-phosphate
  modified_base 9: mod_base = OTHER; note = 2'-deoxy-2'-fluoroadenosine-3'-phosphate
  modified_base 10: mod_base = OTHER; note = 2'-deoxy-2'-fluoroguanosine-3'-phosphate
  modified_base 11: mod_base = OTHER; note = 2'-deoxy-2'-fluoroadenosine-3'-phosphate
  modified_base 12: mod_base = OTHER; note = 2'-O-methylcytidine-3'-phosphate
  modified_base 13: mod_base = OTHER; note = 2'-O-methylcytidine-3'-phosphate
  modified_base 14: mod_base = OTHER; note = 2'-O-methyluridine-3'-phosphate
  modified_base 15: mod_base = OTHER; note = 2'-O-methyluridine-3'-phosphate
  modified_base 16: mod_base = OTHER; note = 2'-O-methylcytidine-3'-phosphate
  modified_base 17: mod_base = OTHER; note = 2'-O-methylguanosine-3'-phosphate
  modified_base 18: mod_base = OTHER; note = 2'-O-methyladenosine-3'-phosphate
  modified_base 19: mod_base = OTHER; note = 2'-O-methylcytidine-3'-phosphorothioate
  modified_base 20: mod_base = OTHER; note = 2'-O-methylguanosine-3'-phosphorothioate
  modified_base 21: mod_base = OTHER; note = 2'-O-methyladenosine
ccactacaagaccttcgacga

SEQ ID NO: 2328 - RNA, 21 nt, synthetic construct
  source 1..21: mol_type = other RNA
  modified_base 1: mod_base = OTHER; note = 2'-O-methylcytidine-3'-phosphorothioate
  modified_base 2: mod_base = OTHER; note = 2'-O-methylcytidine-3'-phosphorothioate
  modified_base 3: mod_base = OTHER; note = 2'-O-methyluridine-3'-phosphate
  modified_base 4: mod_base = OTHER; note = 2'-O-methyluridine-3'-phosphate
  modified_base 5: mod_base = OTHER; note = 2'-O-methyluridine-3'-phosphate
  modified_base 6: mod_base = OTHER; note = 2'-O-methylguanosine-3'-phosphate
  modified_base 7: mod_base = OTHER; note = 2'-deoxy-2'-fluorocytidine-3'-phosphate
  modified_base 8: mod_base = OTHER; note = 2'-O-methyladenosine-3'-phosphate
  modified_base 9: mod_base = OTHER; note = 2'-deoxy-2'-fluoroadenosine-3'-phosphate
  modified_base 10: mod_base = OTHER; note = 2'-deoxy-2'-fluorocytidine-3'-phosphate
  modified_base 11: mod_base = OTHER; note = 2'-deoxy-2'-fluorouridine-3'-phosphate
  modified_base 12: mod_base = OTHER; note = 2'-O-methyladenosine-3'-phosphate
  modified_base 13: mod_base = OTHER; note = 2'-O-methylcytidine-3'-phosphate
  modified_base 14: mod_base = OTHER; note = 2'-O-methylguanosine-3'-phosphate
  modified_base 15: mod_base = OTHER; note = 2'-O-methyluridine-3'-phosphate
  modified_base 16: mod_base = OTHER; note = 2'-O-methylguanosine-3'-phosphate
  modified_base 17: mod_base = OTHER; note = 2'-O-methyluridine-3'-phosphate
  modified_base 18: mod_base = OTHER; note = 2'-O-methyluridine-3'-phosphate
  modified_base 19: mod_base = OTHER; note = 2'-O-methylcytidine-3'-phosphorothioate
  modified_base 20: mod_base = OTHER; note = 2'-O-methyluridine-3'-phosphorothioate
  modified_base 21: mod_base = OTHER; note = 2'-O-methyladenosine
cctttgcaactacgtgttcta

SEQ ID NO: 2329 - RNA, 21 nt, synthetic construct
  source 1..21: mol_type = other RNA
  modified_base 1: mod_base = OTHER; note = 2'-O-methylguanosine-3'-phosphorothioate
  modified_base 2: mod_base = OTHER; note = 2'-O-methyladenosine-3'-phosphorothioate
  modified_base 3: mod_base = OTHER; note = 2'-O-methylguanosine-3'-phosphate
  modified_base 4: mod_base = OTHER; note = 2'-O-methylguanosine-3'-phosphate
  modified_base 5: mod_base = OTHER; note = 2'-O-methyladenosine-3'-phosphate
  modified_base 6: mod_base = OTHER; note = 2'-O-methylcytidine-3'-phosphate
  modified_base 7: mod_base = OTHER; note = 2'-deoxy-2'-fluorouridine-3'-phosphate
  modified_base 8: mod_base = OTHER; note = 2'-O-methyluridine-3'-phosphate
  modified_base 9: mod_base = OTHER; note = 2'-deoxy-2'-fluorocytidine-3'-phosphate
  modified_base 10: mod_base = OTHER; note = 2'-deoxy-2'-fluoroadenosine-3'-phosphate
  modified_base 11: mod_base = OTHER; note = 2'-deoxy-2'-fluoroadenosine-3'-phosphate
  modified_base 12: mod_base = OTHER; note = 2'-O-methylcytidine-3'-phosphate
  modified_base 13: mod_base = OTHER; note = 2'-O-methylguanosine-3'-phosphate
  modified_base 14: mod_base = OTHER; note = 2'-O-methyluridine-3'-phosphate
  modified_base 15: mod_base = OTHER; note = 2'-O-methylcytidine-3'-phosphate
  modified_base 16: mod_base = OTHER; note = 2'-O-methylcytidine-3'-phosphate
  modified_base 17: mod_base = OTHER; note = 2'-O-methyladenosine-3'-phosphate
  modified_base 18: mod_base = OTHER; note = 2'-O-methylguanosine-3'-phosphate
  modified_base 19: mod_base = OTHER; note = 2'-O-methylcytidine-3'-phosphorothioate
  modified_base 20: mod_base = OTHER; note = 2'-O-methyluridine-3'-phosphorothioate
  modified_base 21: mod_base = OTHER; note = 2'-O-methyladenosine
gaggacttcaacgtccagcta

SEQ ID NO: 2330 - RNA, 21 nt, synthetic construct
  source 1..21: mol_type = other RNA
  modified_base 1: mod_base = OTHER; note = 2'-O-methyladenosine-3'-phosphorothioate
  modified_base 2: mod_base = OTHER; note = 2'-O-methylcytidine-3'-phosphorothioate
  modified_base 3: mod_base = OTHER; note = 2'-O-methylcytidine-3'-phosphate
  modified_base 4: mod_base = OTHER; note = 2'-O-methylcytidine-3'-phosphate
  modified_base 5: mod_base = OTHER; note = 2'-O-methylguanosine-3'-phosphate
  modified_base 6: mod_base = OTHER; note = 2'-O-methyluridine-3'-phosphate
  modified_base 7: mod_base = OTHER; note = 2'-deoxy-2'-fluoroguanosine-3'-phosphate
  modified_base 8: mod_base = OTHER; note = 2'-O-methyluridine-3'-phosphate
  modified_base 9: mod_base = OTHER; note = 2'-deoxy-2'-fluorouridine-3'-phosphate
  modified_base 10: mod_base = OTHER; note = 2'-deoxy-2'-fluoroguanosine-3'-phosphate
  modified_base 11: mod_base = OTHER; note = 2'-deoxy-2'-fluorouridine-3'-phosphate
  modified_base 12: mod_base = OTHER; note = 2'-O-methylcytidine-3'-phosphate
  modified_base 13: mod_base = OTHER; note = 2'-O-methyladenosine-3'-phosphate
  modified_base 14: mod_base = OTHER; note = 2'-O-methyluridine-3'-phosphate
  modified_base 15: mod_base = OTHER; note = 2'-O-methylcytidine-3'-phosphate
  modified_base 16: mod_base = OTHER; note = 2'-O-methyladenosine-3'-phosphate
  modified_base 17: mod_base = OTHER; note = 2'-O-methyladenosine-3'-phosphate
  modified_base 18: mod_base = OTHER; note = 2'-O-methylguanosine-3'-phosphate
  modified_base 19: mod_base = OTHER; note = 2'-O-methylguanosine-3'-phosphorothioate
  modified_base 20: mod_base = OTHER; note = 2'-O-methylcytidine-3'-phosphorothioate
  modified_base 21: mod_base = OTHER; note = 2'-O-methyladenosine
acccgtgttgtcatcaaggca

SEQ ID NO: 2331 - RNA, 21 nt, synthetic construct
  source 1..21: mol_type = other RNA
  modified_base 1: mod_base = OTHER; note = 2'-O-methylguanosine-3'-phosphorothioate
  modified_base 2: mod_base = OTHER; note = 2'-O-methylguanosine-3'-phosphorothioate
  modified_base 3: mod_base = OTHER; note = 2'-O-methylcytidine-3'-phosphate
  modified_base 4: mod_base = OTHER; note = 2'-O-methyluridine-3'-phosphate
  modified_base 5: mod_base = OTHER; note = 2'-O-methylcytidine-3'-phosphate
  modified_base 6: mod_base = OTHER; note = 2'-O-methylcytidine-3'-phosphate
  modified_base 7: mod_base = OTHER; note = 2'-deoxy-2'-fluoroguanosine-3'-phosphate
  modified_base 8: mod_base = OTHER; note = 2'-O-methyluridine-3'-phosphate
  modified_base 9: mod_base = OTHER; note = 2'-deoxy-2'-fluorocytidine-3'-phosphate
  modified_base 10: mod_base = OTHER; note = 2'-deoxy-2'-fluorocytidine-3'-phosphate
  modified_base 11: mod_base = OTHER; note = 2'-deoxy-2'-fluorouridine-3'-phosphate
  modified_base 12: mod_base = OTHER; note = 2'-O-methylcytidine-3'-phosphate
  modified_base 13: mod_base = OTHER; note = 2'-O-methyladenosine-3'-phosphate
  modified_base 14: mod_base = OTHER; note = 2'-O-methyluridine-3'-phosphate
  modified_base 15: mod_base = OTHER; note = 2'-O-methylcytidine-3'-phosphate
  modified_base 16: mod_base = OTHER; note = 2'-O-methyladenosine-3'-phosphate
  modified_base 17: mod_base = OTHER; note = 2'-O-methyladenosine-3'-phosphate
  modified_base 18: mod_base = OTHER; note = 2'-O-methyluridine-3'-phosphate
  modified_base 19: mod_base = OTHER; note = 2'-O-methylguanosine-3'-phosphorothioate
  modified_base 20: mod_base = OTHER; note = 2'-O-methylguanosine-3'-phosphorothioate
  modified_base 21: mod_base = OTHER; note = 2'-O-methyladenosine
ggctccgtcctcatcaatgga

SEQ ID NO: 2332 - RNA, 21 nt, synthetic construct
  source 1..21: mol_type = other RNA
  modified_base 1: mod_base = OTHER; note = 2'-O-methylguanosine-3'-phosphorothioate
  modified_base 2: mod_base = OTHER; note = 2'-O-methylcytidine-3'-phosphorothioate
  modified_base 3: mod_base = OTHER; note = 2'-O-methyluridine-3'-phosphate
  modified_base 4: mod_base = OTHER; note = 2'-O-methylguanosine-3'-phosphate
  modified_base 5: mod_base = OTHER; note = 2'-O-methylcytidine-3'-phosphate
  modified_base 6: mod_base = OTHER; note = 2'-O-methylcytidine-3'-phosphate
  modified_base 7: mod_base = OTHER; note = 2'-deoxy-2'-fluorouridine-3'-phosphate
  modified_base 8: mod_base = OTHER; note = 2'-O-methyluridine-3'-phosphate
  modified_base 9: mod_base = OTHER; note = 2'-deoxy-2'-fluoroadenosine-3'-phosphate
  modified_base 10: mod_base = OTHER; note = 2'-deoxy-2'-fluorocytidine-3'-phosphate
  modified_base 11: mod_base = OTHER; note = 2'-deoxy-2'-fluoroadenosine-3'-phosphate
  modified_base 12: mod_base = OTHER; note = 2'-O-methylguanosine-3'-phosphate
  modified_base 13: mod_base = OTHER; note = 2'-O-methylcytidine-3'-phosphate
  modified_base 14: mod_base = OTHER; note = 2'-O-methylcytidine-3'-phosphate
  modified_base 15: mod_base = OTHER; note = 2'-O-methylguanosine-3'-phosphate
  modified_base 16: mod_base = OTHER; note = 2'-O-methylcytidine-3'-phosphate
  modified_base 17: mod_base = OTHER; note = 2'-O-methyladenosine-3'-phosphate
  modified_base 18: mod_base = OTHER; note = 2'-O-methylcytidine-3'-phosphate
  modified_base 19: mod_base = OTHER; note = 2'-O-methyluridine-3'-phosphorothioate
  modified_base 20: mod_base = OTHER; note = 2'-O-methylguanosine-3'-phosphorothioate
  modified_base 21: mod_base = OTHER; note = 2'-O-methyladenosine
gctgccttacagccgcactga

SEQ ID NO: 2333 - RNA, 21 nt, synthetic construct
  source 1..21: mol_type = other RNA
  modified_base 1: mod_base = OTHER; note = 2'-O-methylguanosine-3'-phosphorothioate
  modified_base 2: mod_base = OTHER; note = 2'-O-methyladenosine-3'-phosphorothioate
  modified_base 3: mod_base = OTHER; note = 2'-O-methylcytidine-3'-phosphate
  modified_base 4: mod_base = OTHER; note = 2'-O-methyluridine-3'-phosphate
  modified_base 5: mod_base = OTHER; note = 2'-O-methyladenosine-3'-phosphate
  modified_base 6: mod_base = OTHER; note = 2'-O-methylcytidine-3'-phosphate
  modified_base 7: mod_base = OTHER; note = 2'-deoxy-2'-fluoroadenosine-3'-phosphate
  modified_base 8: mod_base = OTHER; note = 2'-O-methyluridine-3'-phosphate
  modified_base 9: mod_base = OTHER; note = 2'-deoxy-2'-fluorocytidine-3'-phosphate
  modified_base 10: mod_base = OTHER; note = 2'-deoxy-2'-fluoroadenosine-3'-phosphate
  modified_base 11: mod_base = OTHER; note = 2'-deoxy-2'-fluoroadenosine-3'-phosphate
  modified_base 12: mod_base = OTHER; note = 2'-O-methylguanosine-3'-phosphate
  modified_base 13: mod_base = OTHER; note = 2'-O-methylguanosine-3'-phosphate
  modified_base 14: mod_base = OTHER; note = 2'-O-methyluridine-3'-phosphate
  modified_base 15: mod_base = OTHER; note = 2'-O-methylcytidine-3'-phosphate
  modified_base 16: mod_base = OTHER; note = 2'-O-methyladenosine-3'-phosphate
  modified_base 17: mod_base = OTHER; note = 2'-O-methylguanosine-3'-phosphate
  modified_base 18: mod_base = OTHER; note = 2'-O-methylcytidine-3'-phosphate
  modified_base 19: mod_base = OTHER; note = 2'-O-methyladenosine-3'-phosphorothioate
  modified_base 20: mod_base = OTHER; note = 2'-O-methyluridine-3'-phosphorothioate
  modified_base 21: mod_base = OTHER; note = 2'-O-methyladenosine
gactacatcaaggtcagcata

SEQ ID NO: 2334 - RNA, 21 nt, synthetic construct
  source 1..21: mol_type = other RNA
  modified_base 1: mod_base = OTHER; note = 2'-O-methylguanosine-3'-phosphorothioate
  modified_base 2: mod_base = OTHER; note = 2'-O-methylcytidine-3'-phosphorothioate
  modified_base 3: mod_base = OTHER; note = 2'-O-methyluridine-3'-phosphate
  modified_base 4: mod_base = OTHER; note = 2'-O-methylguanosine-3'-phosphate
  modified_base 5: mod_base = OTHER; note = 2'-O-methyladenosine-3'-phosphate
  modified_base 6: mod_base = OTHER; note = 2'-O-methylcytidine-3'-phosphate
  modified_base 7: mod_base = OTHER; note = 2'-deoxy-2'-fluoroadenosine-3'-phosphate
  modified_base 8: mod_base = OTHER; note = 2'-O-methyluridine-3'-phosphate
  modified_base 9: mod_base = OTHER; note = 2'-deoxy-2'-fluorouridine-3'-phosphate
  modified_base 10: mod_base = OTHER; note = 2'-deoxy-2'-fluorocytidine-3'-phosphate
  modified_base 11: mod_base = OTHER; note = 2'-deoxy-2'-fluorocytidine-3'-phosphate
  modified_base 12: mod_base = OTHER; note = 2'-O-methyluridine-3'-phosphate
  modified_base 13: mod_base = OTHER; note = 2'-O-methylguanosine-3'-phosphate
  modified_base 14: mod_base = OTHER; note = 2'-O-methyluridine-3'-phosphate
  modified_base 15: mod_base = OTHER; note = 2'-O-methylguanosine-3'-phosphate
  modified_base 16: mod_base = OTHER; note = 2'-O-methylguanosine-3'-phosphate
  modified_base 17: mod_base = OTHER; note = 2'-O-methyladenosine-3'-phosphate
  modified_base 18: mod_base = OTHER; note = 2'-O-methyladenosine-3'-phosphate
  modified_base 19: mod_base = OTHER; note = 2'-O-methylcytidine-3'-phosphorothioate
  modified_base 20: mod_base = OTHER; note = 2'-O-methylguanosine-3'-phosphorothioate
  modified_base 21: mod_base = OTHER; note = 2'-O-methyladenosine
gctgacattcctgtggaacga

SEQ ID NO: 2335 - RNA, 21 nt, synthetic construct
  source 1..21: mol_type = other RNA
  modified_base 1: mod_base = OTHER; note = 2'-O-methylcytidine-3'-phosphorothioate
  modified_base 2: mod_base = OTHER; note = 2'-O-methyluridine-3'-phosphorothioate
  modified_base 3: mod_base = OTHER; note = 2'-O-methylguanosine-3'-phosphate
  modified_base 4: mod_base = OTHER; note = 2'-O-methylguanosine-3'-phosphate
  modified_base 5: mod_base = OTHER; note = 2'-O-methyladenosine-3'-phosphate
  modified_base 6: mod_base = OTHER; note = 2'-O-methyluridine-3'-phosphate
  modified_base 7: mod_base = OTHER; note = 2'-deoxy-2'-fluorocytidine-3'-phosphate
  modified_base 8: mod_base = OTHER; note = 2'-O-methylcytidine-3'-phosphate
  modified_base 9: mod_base = OTHER; note = 2'-deoxy-2'-fluorocytidine-3'-phosphate
  modified_base 10: mod_base = OTHER; note = 2'-deoxy-2'-fluoroadenosine-3'-phosphate
  modified_base 11: mod_base = OTHER; note = 2'-deoxy-2'-fluoroadenosine-3'-phosphate
  modified_base 12: mod_base = OTHER; note = 2'-O-methyladenosine-3'-phosphate
  modified_base 13: mod_base = OTHER; note = 2'-O-methyluridine-3'-phosphate
  modified_base 14: mod_base = OTHER; note = 2'-O-methyladenosine-3'-phosphate
  modified_base 15: mod_base = OTHER; note = 2'-O-methylcytidine-3'-phosphate
  modified_base 16: mod_base = OTHER; note = 2'-O-methylguanosine-3'-phosphate
  modified_base 17: mod_base = OTHER; note = 2'-O-methylcytidine-3'-phosphate
  modified_base 18: mod_base = OTHER; note = 2'-O-methylcytidine-3'-phosphate
  modified_base 19: mod_base = OTHER; note = 2'-O-methyladenosine-3'-phosphorothioate
  modified_base 20: mod_base = OTHER; note = 2'-O-methyladenosine-3'-phosphorothioate
  modified_base 21: mod_base = OTHER; note = 2'-O-methyladenosine
ctggatcccaaatacgccaaa

SEQ ID NO: 2336 - RNA, 21 nt, synthetic construct
  source 1..21: mol_type = other RNA
  modified_base 1: mod_base = OTHER; note = 2'-O-methylguanosine-3'-phosphorothioate
  modified_base 2: mod_base = OTHER; note = 2'-O-methylcytidine-3'-phosphorothioate
  modified_base 3: mod_base = OTHER; note = 2'-O-methylcytidine-3'-phosphate
  modified_base 4: mod_base = OTHER; note = 2'-O-methyluridine-3'-phosphate
  modified_base 5: mod_base = OTHER; note = 2'-O-methyluridine-3'-phosphate
  modified_base 6: mod_base = OTHER; note = 2'-O-methylcytidine-3'-phosphate
  modified_base 7: mod_base = OTHER; note = 2'-deoxy-2'-fluoroadenosine-3'-phosphate
  modified_base 8: mod_base = OTHER; note = 2'-O-methyladenosine-3'-phosphate
  modified_base 9: mod_base = OTHER; note = 2'-deoxy-2'-fluorocytidine-3'-phosphate
  modified_base 10: mod_base = OTHER; note = 2'-deoxy-2'-fluoroguanosine-3'-phosphate
  modified_base 11: mod_base = OTHER; note = 2'-deoxy-2'-fluoroadenosine-3'-phosphate
  modified_base 12: mod_base = OTHER; note = 2'-O-methylguanosine-3'-phosphate
  modified_base 13: mod_base = OTHER; note = 2'-O-methyluridine-3'-phosphate
  modified_base 14: mod_base = OTHER; note = 2'-O-methyluridine-3'-phosphate
  modified_base 15: mod_base = OTHER; note = 2'-O-methylcytidine-3'-phosphate
  modified_base 16: mod_base = OTHER; note = 2'-O-methyluridine-3'-phosphate
  modified_base 17: mod_base = OTHER; note = 2'-O-methyladenosine-3'-phosphate
  modified_base 18: mod_base = OTHER; note = 2'-O-methyluridine-3'-phosphate
  modified_base 19: mod_base = OTHER; note = 2'-O-methylguanosine-3'-phosphorothioate
  modified_base 20: mod_base = OTHER; note = 2'-O-methylcytidine-3'-phosphorothioate
  modified_base 21: mod_base = OTHER; note = 2'-O-methyladenosine
gccttcaacgagttctatgca

SEQ ID NO: 2337 - RNA, 21 nt, synthetic construct
  source 1..21: mol_type = other RNA
  modified_base 1: mod_base = OTHER; note = 2'-O-methyladenosine-3'-phosphorothioate
  modified_base 2: mod_base = OTHER; note = 2'-O-methyladenosine-3'-phosphorothioate
  modified_base 3: mod_base = OTHER; note = 2'-O-methylcytidine-3'-phosphate
  modified_base 4: mod_base = OTHER; note = 2'-O-methylcytidine-3'-phosphate
  modified_base 5: mod_base = OTHER; note = 2'-O-methyluridine-3'-phosphate
  modified_base 6: mod_base = OTHER; note = 2'-O-methylguanosine-3'-phosphate
  modified_base 7: mod_base = OTHER; note = 2'-deoxy-2'-fluorocytidine-3'-phosphate
  modified_base 8: mod_base = OTHER; note = 2'-O-methyladenosine-3'-phosphate
  modified_base 9: mod_base = OTHER; note = 2'-deoxy-2'-fluoroguanosine-3'-phosphate
  modified_base 10: mod_base = OTHER; note = 2'-deoxy-2'-fluoroadenosine-3'-phosphate
  modified_base 11: mod_base = OTHER; note = 2'-deoxy-2'-fluoroadenosine-3'-phosphate
  modified_base 12: mod_base = OTHER; note = 2'-O-methylguanosine-3'-phosphate
  modified_base 13: mod_base = OTHER; note = 2'-O-methyluridine-3'-phosphate
  modified_base 14: mod_base = OTHER; note = 2'-O-methyluridine-3'-phosphate
  modified_base 15: mod_base = OTHER; note = 2'-O-methylguanosine-3'-phosphate
  modified_base 16: mod_base = OTHER; note = 2'-O-methylguanosine-3'-phosphate
  modified_base 17: mod_base = OTHER; note = 2'-O-methyladenosine-3'-phosphate
  modified_base 18: mod_base = OTHER; note = 2'-O-methyluridine-3'-phosphate
  modified_base 19: mod_base = OTHER; note = 2'-O-methylguanosine-3'-phosphorothioate
  modified_base 20: mod_base = OTHER; note = 2'-O-methylguanosine-3'-phosphorothioate
  modified_base 21: mod_base = OTHER; note = 2'-O-methyladenosine
aacctgcagaagttggatgga

SEQ ID NO: 2338 - RNA, 21 nt, synthetic construct
  source 1..21: mol_type = other RNA
  modified_base 1: mod_base = OTHER; note = 2'-O-methyluridine-3'-phosphorothioate
  modified_base 2: mod_base = OTHER; note = 2'-O-methylguanosine-3'-phosphorothioate
  modified_base 3: mod_base = OTHER; note = 2'-O-methylcytidine-3'-phosphate
  modified_base 4: mod_base = OTHER; note = 2'-O-methyladenosine-3'-phosphate
  modified_base 5: mod_base = OTHER; note = 2'-O-methylcytidine-3'-phosphate
  modified_base 6: mod_base = OTHER; note = 2'-O-methylguanosine-3'-phosphate
  modified_base 7: mod_base = OTHER; note = 2'-deoxy-2'-fluoroguanosine-3'-phosphate
  modified_base 8: mod_base = OTHER; note = 2'-O-methyladenosine-3'-phosphate
  modified_base 9: mod_base = OTHER; note = 2'-deoxy-2'-fluorocytidine-3'-phosphate
  modified_base 10: mod_base = OTHER; note = 2'-deoxy-2'-fluoroguanosine-3'-phosphate
  modified_base 11: mod_base = OTHER; note = 2'-deoxy-2'-fluoroadenosine-3'-phosphate
  modified_base 12: mod_base = OTHER; note = 2'-O-methylguanosine-3'-phosphate
  modified_base 13: mod_base = OTHER; note = 2'-O-methylguanosine-3'-phosphate
  modified_base 14: mod_base = OTHER; note = 2'-O-methyladenosine-3'-phosphate
  modified_base 15: mod_base = OTHER; note = 2'-O-methylguanosine-3'-phosphate
  modified_base 16: mod_base = OTHER; note = 2'-O-methylguanosine-3'-phosphate
  modified_base 17: mod_base = OTHER; note = 2'-O-methylguanosine-3'-phosphate
  modified_base 18: mod_base = OTHER; note = 2'-O-methylcytidine-3'-phosphate
  modified_base 19: mod_base = OTHER; note = 2'-O-methyladenosine-3'-phosphorothioate
  modified_base 20: mod_base = OTHER; note = 2'-O-methyluridine-3'-phosphorothioate
  modified_base 21: mod_base = OTHER; note = 2'-O-methyladenosine
tgcacggacgaggagggcata

SEQ ID NO: 2339 - RNA, 21 nt, synthetic construct
  source 1..21: mol_type = other RNA
  modified_base 1: mod_base = OTHER; note = 2'-O-methyluridine-3'-phosphorothioate
  modified_base 2: mod_base = OTHER; note = 2'-O-methyluridine-3'-phosphorothioate
  modified_base 3: mod_base = OTHER; note = 2'-O-methyluridine-3'-phosphate
  modified_base 4: mod_base = OTHER; note = 2'-O-methylguanosine-3'-phosphate
  modified_base 5: mod_base = OTHER; note = 2'-O-methylcytidine-3'-phosphate
  modified_base 6: mod_base = OTHER; note = 2'-O-methylguanosine-3'-phosphate
  modified_base 7: mod_base = OTHER; note = 2'-deoxy-2'-fluoroguanosine-3'-phosphate
  modified_base 8: mod_base = OTHER; note = 2'-O-methyladenosine-3'-phosphate
  modified_base 9: mod_base = OTHER; note = 2'-deoxy-2'-fluoroguanosine-3'-phosphate
  modified_base 10: mod_base = OTHER; note = 2'-deoxy-2'-fluorouridine-3'-phosphate
  modified_base 11: mod_base = OTHER; note = 2'-deoxy-2'-fluoroguanosine-3'-phosphate
  modified_base 12: mod_base = OTHER; note = 2'-O-methylcytidine-3'-phosphate
  modified_base 13: mod_base = OTHER; note = 2'-O-methylcytidine-3'-phosphate
  modified_base 14: mod_base = OTHER; note = 2'-O-methyladenosine-3'-phosphate
  modified_base 15: mod_base = OTHER; note = 2'-O-methylcytidine-3'-phosphate
  modified_base 16: mod_base = OTHER; note = 2'-O-methylguanosine-3'-phosphate
  modified_base 17: mod_base = OTHER; note = 2'-O-methylcytidine-3'-phosphate
  modified_base 18: mod_base = OTHER; note = 2'-O-methyladenosine-3'-phosphate
  modified_base 19: mod_base = OTHER; note = 2'-O-methylcytidine-3'-phosphorothioate
  modified_base 20: mod_base = OTHER; note = 2'-O-methyluridine-3'-phosphorothioate
  modified_base 21: mod_base = OTHER; note = 2'-O-methyladenosine
tttgcggagtgccacgcacta

SEQ ID NO: 2340 - RNA, 21 nt, synthetic construct
  source 1..21: mol_type = other RNA
  modified_base 1: mod_base = OTHER; note = 2'-O-methylguanosine-3'-phosphorothioate
  modified_base 2: mod_base = OTHER; note = 2'-O-methyladenosine-3'-phosphorothioate
  modified_base 3: mod_base = OTHER; note = 2'-O-methylcytidine-3'-phosphate
  modified_base 4: mod_base = OTHER; note = 2'-O-methyladenosine-3'-phosphate
  modified_base 5: mod_base = OTHER; note = 2'-O-methylguanosine-3'-phosphate
  modified_base 6: mod_base = OTHER; note = 2'-O-methylcytidine-3'-phosphate
  modified_base 7: mod_base = OTHER; note = 2'-deoxy-2'-fluoroadenosine-3'-phosphate
  modified_base 8: mod_base = OTHER; note = 2'-O-methylcytidine-3'-phosphate
  modified_base 9: mod_base = OTHER; note = 2'-deoxy-2'-fluorouridine-3'-phosphate
  modified_base 10: mod_base = OTHER; note = 2'-deoxy-2'-fluoroguanosine-3'-phosphate
  modified_base 11: mod_base = OTHER; note = 2'-deoxy-2'-fluorocytidine-3'-phosphate
  modified_base 12: mod_base = OTHER; note = 2'-O-methylguanosine-3'-phosphate
  modified_base 13: mod_base = OTHER; note = 2'-O-methyluridine-3'-phosphate
  modified_base 14: mod_base = OTHER; note = 2'-O-methyladenosine-3'-phosphate
  modified_base 15: mod_base = OTHER; note = 2'-O-methylcytidine-3'-phosphate
  modified_base 16: mod_base = OTHER; note = 2'-O-methylcytidine-3'-phosphate
  modified_base 17: mod_base = OTHER; note = 2'-O-methyluridine-3'-phosphate
  modified_base 18: mod_base = OTHER; note = 2'-O-methylguanosine-3'-phosphate
  modified_base 19: mod_base = OTHER; note = 2'-O-methylguanosine-3'-phosphorothioate
  modified_base 20: mod_base = OTHER; note = 2'-O-methylcytidine-3'-phosphorothioate
  modified_base 21: mod_base = OTHER; note = 2'-O-methyladenosine
gacagcactgcgtacctggca

SEQ ID NO: 2341 - RNA, 21 nt, synthetic construct
  source 1..21: mol_type = other RNA
  modified_base 1: mod_base = OTHER; note = 2'-O-methylguanosine-3'-phosphorothioate
  modified_base 2: mod_base = OTHER; note = 2'-O-methylcytidine-3'-phosphorothioate
  modified_base 3: mod_base = OTHER; note = 2'-O-methylcytidine-3'-phosphate
  modified_base 4: mod_base = OTHER; note = 2'-O-methyladenosine-3'-phosphate
  modified_base 5: mod_base = OTHER; note = 2'-O-methylcytidine-3'-phosphate
  modified_base 6: mod_base = OTHER; note = 2'-O-methylcytidine-3'-phosphate
  modified_base 7: mod_base = OTHER; note = 2'-deoxy-2'-fluorouridine-3'-phosphate
  modified_base 8: mod_base = OTHER; note = 2'-O-methyluridine-3'-phosphate
  modified_base 9: mod_base = OTHER; note = 2'-deoxy-2'-fluorouridine-3'-phosphate
  modified_base 10: mod_base = OTHER; note = 2'-deoxy-2'-fluoroguanosine-3'-phosphate
  modified_base 11: mod_base = OTHER; note = 2'-deoxy-2'-fluorouridine-3'-phosphate
  modified_base 12: mod_base = OTHER; note = 2'-O-methylguanosine-3'-phosphate
  modified_base 13: mod_base = OTHER; note = 2'-O-methylguanosine-3'-phosphate
  modified_base 14: mod_base = OTHER; note = 2'-O-methyladenosine-3'-phosphate
  modified_base 15: mod_base = OTHER; note = 2'-O-methyladenosine-3'-phosphate
  modified_base 16: mod_base = OTHER; note = 2'-O-methyluridine-3'-phosphate
  modified_base 17: mod_base = OTHER; note = 2'-O-methyladenosine-3'-phosphate
  modified_base 18: mod_base = OTHER; note = 2'-O-methylcytidine-3'-phosphate
  modified_base 19: mod_base = OTHER; note = 2'-O-methyluridine-3'-phosphorothioate
  modified_base 20: mod_base = OTHER; note = 2'-O-methylcytidine-3'-phosphorothioate
  modified_base 21: mod_base = OTHER; note = 2'-O-methyladenosine
gccacctttgtggaatactca

SEQ ID NO: 2342 - RNA, 21 nt, synthetic construct
  source 1..21: mol_type = other RNA
  modified_base 1: mod_base = OTHER; note = 2'-O-methylcytidine-3'-phosphorothioate
  modified_base 2: mod_base = OTHER; note = 2'-O-methyluridine-3'-phosphorothioate
  modified_base 3: mod_base = OTHER; note = 2'-O-methylguanosine-3'-phosphate
  modified_base 4: mod_base = OTHER; note = 2'-O-methylguanosine-3'-phosphate
  modified_base 5: mod_base = OTHER; note = 2'-O-methyladenosine-3'-phosphate
  modified_base 6: mod_base = OTHER; note = 2'-O-methylguanosine-3'-phosphate
  modified_base 7: mod_base = OTHER; note = 2'-deoxy-2'-fluoroguanosine-3'-phosphate
  modified_base 8: mod_base = OTHER; note = 2'-O-methyluridine-3'-phosphate
  modified_base 9: mod_base = OTHER; note = 2'-deoxy-2'-fluoroguanosine-3'-phosphate
  modified_base 10: mod_base = OTHER; note = 2'-deoxy-2'-fluorocytidine-3'-phosphate
  modified_base 11: mod_base = OTHER; note = 2'-deoxy-2'-fluorocytidine-3'-phosphate
  modified_base 12: mod_base = OTHER; note = 2'-O-methylcytidine-3'-phosphate
  modified_base 13: mod_base = OTHER; note = 2'-O-methyluridine-3'-phosphate
  modified_base 14: mod_base = OTHER; note = 2'-O-methylguanosine-3'-phosphate
  modified_base 15: mod_base = OTHER; note = 2'-O-methyladenosine-3'-phosphate
  modified_base 16: mod_base = OTHER; note = 2'-O-methylguanosine-3'-phosphate
  modified_base 17: mod_base = OTHER; note = 2'-O-methylcytidine-3'-phosphate
  modified_base 18: mod_base = OTHER; note = 2'-O-methyluridine-3'-phosphate
  modified_base 19: mod_base = OTHER; note = 2'-O-methylcytidine-3'-phosphorothioate
  modified_base 20: mod_base = OTHER; note = 2'-O-methyluridine-3'-phosphorothioate
  modified_base 21: mod_base = OTHER; note = 2'-O-methyladenosine
ctggaggtgccctgagctcta

SEQ ID NO: 2343 - RNA, 21 nt, synthetic construct
  source 1..21: mol_type = other RNA
  modified_base 1: mod_base = OTHER; note = 2'-O-methylcytidine-3'-phosphorothioate
  modified_base 2: mod_base = OTHER; note = 2'-O-methyluridine-3'-phosphorothioate
  modified_base 3: mod_base = OTHER; note = 2'-O-methylcytidine-3'-phosphate
  modified_base 4: mod_base = OTHER; note = 2'-O-methyladenosine-3'-phosphate
  modified_base 5: mod_base = OTHER; note = 2'-O-methyladenosine-3'-phosphate
  modified_base 6: mod_base = OTHER; note = 2'-O-methylcytidine-3'-phosphate
  modified_base 7: mod_base = OTHER; note = 2'-deoxy-2'-fluoroadenosine-3'-phosphate
  modified_base 8: mod_base = OTHER; note = 2'-O-methyluridine-3'-phosphate
  modified_base 9: mod_base = OTHER; note = 2'-deoxy-2'-fluoroguanosine-3'-phosphate
  modified_base 10: mod_base = OTHER; note = 2'-deoxy-2'-fluorocytidine-3'-phosphate
  modified_base 11: mod_base = OTHER; note = 2'-deoxy-2'-fluoroadenosine-3'-phosphate
  modified_base 12: mod_base = OTHER; note = 2'-O-methylguanosine-3'-phosphate
  modified_base 13: mod_base = OTHER; note = 2'-O-methylcytidine-3'-phosphate
  modified_base 14: mod_base = OTHER; note = 2'-O-methyladenosine-3'-phosphate
  modified_base 15: mod_base = OTHER; note = 2'-O-methylcytidine-3'-phosphate
  modified_base 16: mod_base = OTHER; note = 2'-O-methylcytidine-3'-phosphate
  modified_base 17: mod_base = OTHER; note = 2'-O-methyladenosine-3'-phosphate
  modified_base 18: mod_base = OTHER; note = 2'-O-methylguanosine-3'-phosphate
  modified_base 19: mod_base = OTHER; note = 2'-O-methylguanosine-3'-phosphorothioate
  modified_base 20: mod_base = OTHER; note = 2'-O-methyladenosine-3'-phosphorothioate
  modified_base 21: mod_base = OTHER; note = 2'-O-methyladenosine
ctcaacatgcagcaccaggaa

SEQ ID NO: 2344 - RNA, 21 nt, synthetic construct
  source 1..21: mol_type = other RNA
  modified_base 1: mod_base = OTHER; note = 2'-O-methyladenosine-3'-phosphorothioate
  modified_base 2: mod_base = OTHER; note = 2'-O-methylcytidine-3'-phosphorothioate
  modified_base 3: mod_base = OTHER; note = 2'-O-methylcytidine-3'-phosphate
  modified_base 4: mod_base = OTHER; note = 2'-O-methylcytidine-3'-phosphate
  modified_base 5: mod_base = OTHER; note = 2'-O-methyluridine-3'-phosphate
  modified_base 6: mod_base = OTHER; note = 2'-O-methylguanosine-3'-phosphate
  modified_base 7: mod_base = OTHER; note = 2'-deoxy-2'-fluorocytidine-3'-phosphate
  modified_base 8: mod_base = OTHER; note = 2'-O-methyladenosine-3'-phosphate
  modified_base 9: mod_base = OTHER; note = 2'-deoxy-2'-fluorocytidine-3'-phosphate
  modified_base 10: mod_base = OTHER; note = 2'-deoxy-2'-fluoroguanosine-3'-phosphate
  modified_base 11: mod_base = OTHER; note = 2'-deoxy-2'-fluoroguanosine-3'-phosphate
  modified_base 12: mod_base = OTHER; note = 2'-O-methyladenosine-3'-phosphate
  modified_base 13: mod_base = OTHER; note = 2'-O-methylcytidine-3'-phosphate
  modified_base 14: mod_base = OTHER; note = 2'-O-methyladenosine-3'-phosphate
  modified_base 15: mod_base = OTHER; note = 2'-O-methylcytidine-3'-phosphate
  modified_base 16: mod_base = OTHER; note = 2'-O-methylcytidine-3'-phosphate
  modified_base 17: mod_base = OTHER; note = 2'-O-methyluridine-3'-phosphate
  modified_base 18: mod_base = OTHER; note = 2'-O-methylguanosine-3'-phosphate
  modified_base 19: mod_base = OTHER; note = 2'-O-methylcytidine-3'-phosphorothioate
  modified_base 20: mod_base = OTHER; note = 2'-O-methyluridine-3'-phosphorothioate
  modified_base 21: mod_base = OTHER; note = 2'-O-methyladenosine
accctgcacggacacctgcta

SEQ ID NO: 2345 - RNA, 21 nt, synthetic construct
  source 1..21: mol_type = other RNA
  modified_base 1: mod_base = OTHER; note = 2'-O-methylguanosine-3'-phosphorothioate
  modified_base 2: mod_base = OTHER; note = 2'-O-methylguanosine-3'-phosphorothioate
  modified_base 3: mod_base = OTHER; note = 2'-O-methyladenosine-3'-phosphate
  modified_base 4: mod_base = OTHER; note = 2'-O-methylcytidine-3'-phosphate
  modified_base 5: mod_base = OTHER; note = 2'-O-methylcytidine-3'-phosphate
  modified_base 6: mod_base = OTHER; note = 2'-O-methyladenosine-3'-phosphate
  modified_base 7: mod_base = OTHER; note = 2'-deoxy-2'-fluorocytidine-3'-phosphate
  modified_base 8: mod_base = OTHER; note = 2'-O-methyluridine-3'-phosphate
  modified_base 9: mod_base = OTHER; note = 2'-deoxy-2'-fluoroguanosine-3'-phosphate
  modified_base 10: mod_base = OTHER; note = 2'-deoxy-2'-fluorouridine-3'-phosphate
  modified_base 11: mod_base = OTHER; note = 2'-deoxy-2'-fluoroguanosine-3'-phosphate
  modified_base 12: mod_base = OTHER; note = 2'-O-methyluridine-3'-phosphate
  modified_base 13: mod_base = OTHER; note = 2'-O-methylguanosine-3'-phosphate
  modified_base 14: mod_base = OTHER; note = 2'-O-methylguanosine-3'-phosphate
  modified_base 15: mod_base = OTHER; note = 2'-O-methyladenosine-3'-phosphate
  modified_base 16: mod_base = OTHER; note = 2'-O-methylcytidine-3'-phosphate
  modified_base 17: mod_base = OTHER; note = 2'-O-methylguanosine-3'-phosphate
  modified_base 18: mod_base = OTHER; note = 2'-O-methylguanosine-3'-phosphate
  modified_base 19: mod_base = OTHER; note = 2'-O-methylcytidine-3'-phosphorothioate
  modified_base 20: mod_base = OTHER; note = 2'-O-methyluridine-3'-phosphorothioate
  modified_base 21: mod_base = OTHER; note = 2'-O-methyladenosine
ggaccactgtgtggacggcta

SEQ ID NO: 2346 - RNA, 21 nt, synthetic construct
  source 1..21: mol_type = other RNA
  modified_base 1: mod_base = OTHER; note = 2'-O-methylguanosine-3'-phosphorothioate
  modified_base 2: mod_base = OTHER; note = 2'-O-methylcytidine-3'-phosphorothioate
  modified_base 3: mod_base = OTHER; note = 2'-O-methyluridine-3'-phosphate
  modified_base 4: mod_base = OTHER; note = 2'-O-methylguanosine-3'-phosphate
  modified_base 5: mod_base = OTHER; note = 2'-O-methylguanosine-3'-phosphate
  modified_base 6: mod_base = OTHER; note = 2'-O-methyladenosine-3'-phosphate
  modified_base 7: mod_base = OTHER; note = 2'-deoxy-2'-fluorouridine-3'-phosphate
  modified_base 8: mod_base = OTHER; note = 2'-O-methylguanosine-3'-phosphate
  modified_base 9: mod_base = OTHER; note = 2'-deoxy-2'-fluoroadenosine-3'-phosphate
  modified_base 10: mod_base = OTHER; note = 2'-deoxy-2'-fluorocytidine-3'-phosphate
  modified_base 11: mod_base = OTHER; note = 2'-deoxy-2'-fluoroadenosine-3'-phosphate
  modified_base 12: mod_base = OTHER; note = 2'-O-methyluridine-3'-phosphate
  modified_base 13: mod_base = OTHER; note = 2'-O-methylcytidine-3'-phosphate
  modified_base 14: mod_base = OTHER; note = 2'-O-methyladenosine-3'-phosphate
  modified_base 15: mod_base = OTHER; note = 2'-O-methylcytidine-3'-phosphate
  modified_base 16: mod_base = OTHER; note = 2'-O-methylguanosine-3'-phosphate
  modified_base 17: mod_base = OTHER; note = 2'-O-methylcytidine-3'-phosphate
  modified_base 18: mod_base = OTHER; note = 2'-O-methyladenosine-3'-phosphate
  modified_base 19: mod_base = OTHER; note = 2'-O-methylcytidine-3'-phosphorothioate
  modified_base 20: mod_base = OTHER; note = 2'-O-methyluridine-3'-phosphorothioate
  modified_base 21: mod_base = OTHER; note = 2'-O-methyladenosine
gctggatgacatcacgcacta

SEQ ID NO: 2347 - RNA, 21 nt, synthetic construct
  source 1..21: mol_type = other RNA
  modified_base 1: mod_base = OTHER; note = 2'-O-methylcytidine-3'-phosphorothioate
  modified_base 2: mod_base = OTHER; note = 2'-O-methyluridine-3'-phosphorothioate
  modified_base 3: mod_base = OTHER; note = 2'-O-methylcytidine-3'-phosphate
  modified_base 4: mod_base = OTHER; note = 2'-O-methylcytidine-3'-phosphate
  modified_base 5: mod_base = OTHER; note = 2'-O-methyluridine-3'-phosphate
  modified_base 6: mod_base = OTHER; note = 2'-O-methyluridine-3'-phosphate
  modified_base 7: mod_base = OTHER; note = 2'-deoxy-2'-fluorocytidine-3'-phosphate
  modified_base 8: mod_base = OTHER; note = 2'-O-methyladenosine-3'-phosphate
  modified_base 9: mod_base = OTHER; note = 2'-deoxy-2'-fluoroadenosine-3'-phosphate
  modified_base 10: mod_base = OTHER; note = 2'-deoxy-2'-fluorocytidine-3'-phosphate
  modified_base 11: mod_base = OTHER; note = 2'-deoxy-2'-fluoroadenosine-3'-phosphate
  modified_base 12: mod_base = OTHER; note = 2'-O-methylcytidine-3'-phosphate
  modified_base 13: mod_base = OTHER; note = 2'-O-methylcytidine-3'-phosphate
  modified_base 14: mod_base = OTHER; note = 2'-O-methyladenosine-3'-phosphate
  modified_base 15: mod_base = OTHER; note = 2'-O-methylcytidine-3'-phosphate
  modified_base 16: mod_base = OTHER; note = 2'-O-methylcytidine-3'-phosphate
  modified_base 17: mod_base = OTHER; note = 2'-O-methyluridine-3'-phosphate
  modified_base 18: mod_base = OTHER; note = 2'-O-methylguanosine-3'-phosphate
  modified_base 19: mod_base = OTHER; note = 2'-O-methylcytidine-3'-phosphorothioate
  modified_base 20: mod_base = OTHER; note = 2'-O-methyladenosine-3'-phosphorothioate
  modified_base 21: mod_base = OTHER; note = 2'-O-methyladenosine
ctccttcaacaccacctgcaa

SEQ ID NO: 2348 - RNA, 21 nt, synthetic construct
  source 1..21: mol_type = other RNA
  modified_base 1: mod_base = OTHER; note = 2'-O-methylcytidine-3'-phosphorothioate
  modified_base 2: mod_base = OTHER; note = 2'-O-methyluridine-3'-phosphorothioate
  modified_base 3: mod_base = OTHER; note = 2'-O-methyladenosine-3'-phosphate
  modified_base 4: mod_base = OTHER; note = 2'-O-methyluridine-3'-phosphate
  modified_base 5: mod_base = OTHER; note = 2'-O-methylguanosine-3'-phosphate
  modified_base 6: mod_base = OTHER; note = 2'-O-methylguanosine-3'-phosphate
  modified_base 7: mod_base = OTHER; note = 2'-deoxy-2'-fluorocytidine-3'-phosphate
  modified_base 8: mod_base = OTHER; note = 2'-O-methyladenosine-3'-phosphate
  modified_base 9: mod_base = OTHER; note = 2'-deoxy-2'-fluoroguanosine-3'-phosphate
  modified_base 10: mod_base = OTHER; note = 2'-deoxy-2'-fluorouridine-3'-phosphate
  modified_base 11: mod_base = OTHER; note = 2'-deoxy-2'-fluoroguanosine-3'-phosphate
  modified_base 12: mod_base = OTHER; note = 2'-O-methylcytidine-3'-phosphate
  modified_base 13: mod_base = OTHER; note = 2'-O-methylcytidine-3'-phosphate
  modified_base 14: mod_base = OTHER; note = 2'-O-methyladenosine-3'-phosphate
  modified_base 15: mod_base = OTHER; note = 2'-O-methylguanosine-3'-phosphate
  modified_base 16: mod_base = OTHER; note = 2'-O-methylguanosine-3'-phosphate
  modified_base 17: mod_base = OTHER; note = 2'-O-methyladenosine-3'-phosphate
  modified_base 18: mod_base = OTHER; note = 2'-O-methylcytidine-3'-phosphate
  modified_base 19: mod_base = OTHER; note = 2'-O-methylcytidine-3'-phosphorothioate
  modified_base 20: mod_base = OTHER; note = 2'-O-methyluridine-3'-phosphorothioate
  modified_base 21: mod_base = OTHER; note = 2'-O-methyladenosine
ctatggcagtgccaggaccta

SEQ ID NO: 2349 - RNA, 21 nt, synthetic construct
  source 1..21: mol_type = other RNA
  modified_base 1: mod_base = OTHER; note = 2'-O-methyladenosine-3'-phosphorothioate
  modified_base 2: mod_base = OTHER; note = 2'-O-methylcytidine-3'-phosphorothioate
  modified_base 3: mod_base = OTHER; note = 2'-O-methylcytidine-3'-phosphate
  modified_base 4: mod_base = OTHER; note = 2'-O-methyluridine-3'-phosphate
  modified_base 5: mod_base = OTHER; note = 2'-O-methyladenosine-3'-phosphate
  modified_base 6: mod_base = OTHER; note = 2'-O-methyluridine-3'-phosphate
  modified_base 7: mod_base = OTHER; note = 2'-deoxy-2'-fluoroguanosine-3'-phosphate
  modified_base 8: mod_base = OTHER; note = 2'-O-methyladenosine-3'-phosphate
  modified_base 9: mod_base = OTHER; note = 2'-deoxy-2'-fluorouridine-3'-phosphate
  modified_base 10: mod_base = OTHER; note = 2'-deoxy-2'-fluoroguanosine-3'-phosphate
  modified_base 11: mod_base = OTHER; note = 2'-deoxy-2'-fluoroadenosine-3'-phosphate
  modified_base 12: mod_base = OTHER; note = 2'-O-methylguanosine-3'-phosphate
  modified_base 13: mod_base = OTHER; note = 2'-O-methyladenosine-3'-phosphate
  modified_base 14: mod_base = OTHER; note = 2'-O-methyladenosine-3'-phosphate
  modified_base 15: mod_base = OTHER; note = 2'-O-methyladenosine-3'-phosphate
  modified_base 16: mod_base = OTHER; note = 2'-O-methylcytidine-3'-phosphate
  modified_base 17: mod_base = OTHER; note = 2'-O-methyluridine-3'-phosphate
  modified_base 18: mod_base = OTHER; note = 2'-O-methylcytidine-3'-phosphate
  modified_base 19: mod_base = OTHER; note = 2'-O-methyluridine-3'-phosphorothioate
  modified_base 20: mod_base = OTHER; note = 2'-O-methyladenosine-3'-phosphorothioate
  modified_base 21: mod_base = OTHER; note = 2'-O-methyladenosine
acctatgatgagaaactctaa

SEQ ID NO: 2350 - RNA, 21 nt, synthetic construct
  source 1..21: mol_type = other RNA
  modified_base 1: mod_base = OTHER; note = 2'-O-methyladenosine-3'-phosphorothioate
  modified_base 2: mod_base = OTHER; note = 2'-O-methylguanosine-3'-phosphorothioate
  modified_base 3: mod_base = OTHER; note = 2'-O-methylcytidine-3'-phosphate
  modified_base 4: mod_base = OTHER; note = 2'-O-methyluridine-3'-phosphate
  modified_base 5: mod_base = OTHER; note = 2'-O-methyladenosine-3'-phosphate
  modified_base 6: mod_base = OTHER; note = 2'-O-methylcytidine-3'-phosphate
  modified_base 7: mod_base = OTHER; note = 2'-deoxy-2'-fluoroguanosine-3'-phosphate
  modified_base 8: mod_base = OTHER; note = 2'-O-methyluridine-3'-phosphate
  modified_base 9: mod_base = OTHER; note = 2'-deoxy-2'-fluorouridine-3'-phosphate
  modified_base 10: mod_base = OTHER; note = 2'-deoxy-2'-fluorocytidine-3'-phosphate
  modified_base 11: mod_base = OTHER; note = 2'-deoxy-2'-fluorouridine-3'-phosphate
  modified_base 12: mod_base = OTHER; note = 2'-O-methylguanosine-3'-phosphate
  modified_base 13: mod_base = OTHER; note = 2'-O-methyluridine-3'-phosphate
  modified_base 14: mod_base = OTHER; note = 2'-O-methylcytidine-3'-phosphate
  modified_base 15: mod_base = OTHER; note = 2'-O-methylcytidine-3'-phosphate
  modified_base 16: mod_base = OTHER; note = 2'-O-methyladenosine-3'-phosphate
  modified_base 17: mod_base = OTHER; note = 2'-O-methyladenosine-3'-phosphate
  modified_base 18: mod_base = OTHER; note = 2'-O-methylguanosine-3'-phosphate
  modified_base 19: mod_base = OTHER; note = 2'-O-methyladenosine-3'-phosphorothioate
  modified_base 20: mod_base = OTHER; note = 2'-O-methyladenosine-3'-phosphorothioate
  modified_base 21: mod_base = OTHER; note = 2'-O-methyladenosine
agctacgttctgtccaagaaa

SEQ ID NO: 2351 - RNA, 21 nt, synthetic construct
  source 1..21: mol_type = other RNA
  modified_base 1: mod_base = OTHER; note = 2'-O-methylguanosine-3'-phosphorothioate
  modified_base 2: mod_base = OTHER; note = 2'-O-methyladenosine-3'-phosphorothioate
  modified_base 3: mod_base = OTHER; note = 2'-O-methylcytidine-3'-phosphate
  modified_base 4: mod_base = OTHER; note = 2'-O-methyladenosine-3'-phosphate
  modified_base 5: mod_base = OTHER; note = 2'-O-methylguanosine-3'-phosphate
  modified_base 6: mod_base = OTHER; note = 2'-O-methylcytidine-3'-phosphate
  modified_base 7: mod_base = OTHER; note = 2'-deoxy-2'-fluoroadenosine-3'-phosphate
  modified_base 8: mod_base = OTHER; note = 2'-O-methylguanosine-3'-phosphate
  modified_base 9: mod_base = OTHER; note = 2'-deoxy-2'-fluorocytidine-3'-phosphate
  modified_base 10: mod_base = OTHER; note = 2'-deoxy-2'-fluorouridine-3'-phosphate
  modified_base 11: mod_base = OTHER; note = 2'-deoxy-2'-fluorouridine-3'-phosphate
  modified_base 12: mod_base = OTHER; note = 2'-O-methylcytidine-3'-phosphate
  modified_base 13: mod_base = OTHER; note = 2'-O-methyladenosine-3'-phosphate
  modified_base 14: mod_base = OTHER; note = 2'-O-methylcytidine-3'-phosphate
  modified_base 15: mod_base = OTHER; note = 2'-O-methylcytidine-3'-phosphate
  modified_base 16: mod_base = OTHER; note = 2'-O-methylguanosine-3'-phosphate
  modified_base 17: mod_base = OTHER; note = 2'-O-methyluridine-3'-phosphate
  modified_base 18: mod_base = OTHER; note = 2'-O-methylguanosine-3'-phosphate
  modified_base 19: mod_base = OTHER; note = 2'-O-methylcytidine-3'-phosphorothioate
  modified_base 20: mod_base = OTHER; note = 2'-O-methyluridine-3'-phosphorothioate
  modified_base 21: mod_base = OTHER; note = 2'-O-methyladenosine
gacagcagcttcaccgtgcta

SEQ ID NO: 2352 - RNA, 21 nt, synthetic construct
  source 1..21: mol_type = other RNA
  modified_base 1: mod_base = OTHER; note = 2'-O-methylguanosine-3'-phosphorothioate
  modified_base 2: mod_base = OTHER; note = 2'-O-methylguanosine-3'-phosphorothioate
  modified_base 3: mod_base = OTHER; note = 2'-O-methyladenosine-3'-phosphate
  modified_base 4: mod_base = OTHER; note = 2'-O-methylcytidine-3'-phosphate
  modified_base 5: mod_base = OTHER; note = 2'-O-methyladenosine-3'-phosphate
  modified_base 6: mod_base = OTHER; note = 2'-O-methyladenosine-3'-phosphate
  modified_base 7: mod_base = OTHER; note = 2'-deoxy-2'-fluorocytidine-3'-phosphate
  modified_base 8: mod_base = OTHER; note = 2'-O-methylguanosine-3'-phosphate
  modified_base 9: mod_base = OTHER; note = 2'-deoxy-2'-fluoroadenosine-3'-phosphate
  modified_base 10: mod_base = OTHER; note = 2'-deoxy-2'-fluoroguanosine-3'-phosphate
  modified_base 11: mod_base = OTHER; note = 2'-deoxy-2'-fluoroadenosine-3'-phosphate
  modified_base 12: mod_base = OTHER; note = 2'-O-methyladenosine-3'-phosphate
  modified_base 13: mod_base = OTHER; note = 2'-O-methylcytidine-3'-phosphate
  modified_base 14: mod_base = OTHER; note = 2'-O-methyluridine-3'-phosphate
  modified_base 15: mod_base = OTHER; note = 2'-O-methylguanosine-3'-phosphate
  modified_base 16: mod_base = OTHER; note = 2'-O-methylcytidine-3'-phosphate
  modified_base 17: mod_base = OTHER; note = 2'-O-methylcytidine-3'-phosphate
  modified_base 18: mod_base = OTHER; note = 2'-O-methyluridine-3'-phosphate
  modified_base 19: mod_base = OTHER; note = 2'-O-methylguanosine-3'-phosphorothioate
  modified_base 20: mod_base = OTHER; note = 2'-O-methyladenosine-3'-phosphorothioate
  modified_base 21: mod_base = OTHER; note = 2'-O-methyladenosine
ggacaacgagaactgcctgaa

SEQ ID NO: 2353 - RNA, 21 nt, synthetic construct
  source 1..21: mol_type = other RNA
  modified_base 1: mod_base = OTHER; note = 2'-O-methyluridine-3'-phosphorothioate
  modified_base 2: mod_base = OTHER; note = 2'-O-methylcytidine-3'-phosphorothioate
  modified_base 3: mod_base = OTHER; note = 2'-O-methylcytidine-3'-phosphate
  modified_base 4: mod_base = OTHER; note = 2'-O-methyluridine-3'-phosphate
  modified_base 5: mod_base = OTHER; note = 2'-O-methylcytidine-3'-phosphate
  modified_base 6: mod_base = OTHER; note = 2'-O-methyladenosine-3'-phosphate
  modified_base 7: mod_base = OTHER; note = 2'-deoxy-2'-fluoroadenosine-3'-phosphate
  modified_base 8: mod_base = OTHER; note = 2'-O-methylcytidine-3'-phosphate
  modified_base 9: mod_base = OTHER; note = 2'-deoxy-2'-fluorouridine-3'-phosphate
  modified_base 10: mod_base = OTHER; note = 2'-deoxy-2'-fluorocytidine-3'-phosphate
  modified_base 11: mod_base = OTHER; note = 2'-deoxy-2'-fluorocytidine-3'-phosphate
  modified_base 12: mod_base = OTHER; note = 2'-O-methyladenosine-3'-phosphate
  modified_base 13: mod_base = OTHER; note = 2'-O-methyluridine-3'-phosphate
  modified_base 14: mod_base = OTHER; note = 2'-O-methylcytidine-3'-phosphate
  modified_base 15: mod_base = OTHER; note = 2'-O-methyluridine-3'-phosphate
  modified_base 16: mod_base = OTHER; note = 2'-O-methyladenosine-3'-phosphate
  modified_base 17: mod_base = OTHER; note = 2'-O-methylcytidine-3'-phosphate
  modified_base 18: mod_base = OTHER; note = 2'-O-methyladenosine-3'-phosphate
  modified_base 19: mod_base = OTHER; note = 2'-O-methylcytidine-3'-phosphorothioate
  modified_base 20: mod_base = OTHER; note = 2'-O-methylguanosine-3'-phosphorothioate
  modified_base 21: mod_base = OTHER; note = 2'-O-methyladenosine
tcctcaactccatctacacga

SEQ ID NO: 2354 - RNA, 21 nt, synthetic construct
  source 1..21: mol_type = other RNA
  modified_base 1: mod_base = OTHER; note = 2'-O-methylguanosine-3'-phosphorothioate
  modified_base 2: mod_base = OTHER; note = 2'-O-methylcytidine-3'-phosphorothioate
  modified_base 3: mod_base = OTHER; note = 2'-O-methylcytidine-3'-phosphate
  modified_base 4: mod_base = OTHER; note = 2'-O-methyladenosine-3'-phosphate
  modified_base 5: mod_base = OTHER; note = 2'-O-methyladenosine-3'-phosphate
  modified_base 6: mod_base = OTHER; note = 2'-O-methylcytidine-3'-phosphate
  modified_base 7: mod_base = OTHER; note = 2'-deoxy-2'-fluoroadenosine-3'-phosphate
  modified_base 8: mod_base = OTHER; note = 2'-O-methyluridine-3'-phosphate
  modified_base 9: mod_base = OTHER; note = 2'-deoxy-2'-fluorocytidine-3'-phosphate
  modified_base 10: mod_base = OTHER; note = 2'-deoxy-2'-fluoroadenosine-3'-phosphate
  modified_base 11: mod_base = OTHER; note = 2'-deoxy-2'-fluorocytidine-3'-phosphate
  modified_base 12: mod_base = OTHER; note = 2'-O-methylcytidine-3'-phosphate
  modified_base 13: mod_base = OTHER; note = 2'-O-methylcytidine-3'-phosphate
  modified_base 14: mod_base = OTHER; note = 2'-O-methyluridine-3'-phosphate
  modified_base 15: mod_base = OTHER; note = 2'-O-methylguanosine-3'-phosphate
  modified_base 16: mod_base = OTHER; note = 2'-O-methyluridine-3'-phosphate
  modified_base 17: mod_base = OTHER; note = 2'-O-methyluridine-3'-phosphate
  modified_base 18: mod_base = OTHER; note = 2'-O-methylcytidine-3'-phosphate
  modified_base 19: mod_base = OTHER; note = 2'-O-methyladenosine-3'-phosphorothioate
  modified_base 20: mod_base = OTHER; note = 2'-O-methylcytidine-3'-phosphorothioate
  modified_base 21: mod_base = OTHER; note = 2'-O-methyladenosine
gccaacatcaccctgttcaca

SEQ ID NO: 2355 - RNA, 21 nt, synthetic construct
  source 1..21: mol_type = other RNA
  modified_base 1: mod_base = OTHER; note = 2'-O-methyluridine-3'-phosphorothioate
  modified_base 2: mod_base = OTHER; note = 2'-O-methylcytidine-3'-phosphorothioate
  modified_base 3: mod_base = OTHER; note = 2'-O-methylguanosine-3'-phosphate
  modified_base 4: mod_base = OTHER; note = 2'-O-methyladenosine-3'-phosphate
  modified_base 5: mod_base = OTHER; note = 2'-O-methylguanosine-3'-phosphate
  modified_base 6: mod_base = OTHER; note = 2'-O-methylcytidine-3'-phosphate
  modified_base 7: mod_base = OTHER; note = 2'-deoxy-2'-fluorouridine-3'-phosphate
  modified_base 8: mod_base = OTHER; note = 2'-O-methyluridine-3'-phosphate
  modified_base 9: mod_base = OTHER; note = 2'-deoxy-2'-fluorocytidine-3'-phosphate
  modified_base 10: mod_base = OTHER; note = 2'-deoxy-2'-fluorouridine-3'-phosphate
  modified_base 11: mod_base = OTHER; note = 2'-deoxy-2'-fluorouridine-3'-phosphate
  modified_base 12: mod_base = OTHER; note = 2'-O-methylcytidine-3'-phosphate
  modified_base 13: mod_base = OTHER; note = 2'-O-methyladenosine-3'-phosphate
  modified_base 14: mod_base = OTHER; note = 2'-O-methyluridine-3'-phosphate
  modified_base 15: mod_base = OTHER; note = 2'-O-methylcytidine-3'-phosphate
  modified_base 16: mod_base = OTHER; note = 2'-O-methylguanosine-3'-phosphate
  modified_base 17: mod_base = OTHER; note = 2'-O-methyluridine-3'-phosphate
  modified_base 18: mod_base = OTHER; note = 2'-O-methylguanosine-3'-phosphate
  modified_base 19: mod_base = OTHER; note = 2'-O-methylguanosine-3'-phosphorothioate
  modified_base 20: mod_base = OTHER; note = 2'-O-methyluridine-3'-phosphorothioate
  modified_base 21: mod_base = OTHER; note = 2'-O-methyladenosine
tcgagcttcttcatcgtggta

SEQ ID NO: 2356 - RNA, 21 nt, synthetic construct
  source 1..21: mol_type = other RNA
  modified_base 1: mod_base = OTHER; note = 2'-O-methylguanosine-3'-phosphorothioate
  modified_base 2: mod_base = OTHER; note = 2'-O-methylcytidine-3'-phosphorothioate
  modified_base 3: mod_base = OTHER; note = 2'-O-methylcytidine-3'-phosphate
  modified_base 4: mod_base = OTHER; note = 2'-O-methyladenosine-3'-phosphate
  modified_base 5: mod_base = OTHER; note = 2'-O-methylcytidine-3'-phosphate
  modified_base 6: mod_base = OTHER; note = 2'-O-methyluridine-3'-phosphate
  modified_base 7: mod_base = OTHER; note = 2'-deoxy-2'-fluorocytidine-3'-phosphate
  modified_base 8: mod_base = OTHER; note = 2'-O-methyladenosine-3'-phosphate
  modified_base 9: mod_base = OTHER; note = 2'-deoxy-2'-fluorouridine-3'-phosphate
  modified_base 10: mod_base = OTHER; note = 2'-deoxy-2'-fluoroguanosine-3'-phosphate
  modified_base 11: mod_base = OTHER; note = 2'-deoxy-2'-fluorocytidine-3'-phosphate
  modified_base 12: mod_base = OTHER; note = 2'-O-methyladenosine-3'-phosphate
  modified_base 13: mod_base = OTHER; note = 2'-O-methylguanosine-3'-phosphate
  modified_base 14: mod_base = OTHER; note = 2'-O-methylguanosine-3'-phosphate
  modified_base 15: mod_base = OTHER; note = 2'-O-methyluridine-3'-phosphate
  modified_base 16: mod_base = OTHER; note = 2'-O-methylguanosine-3'-phosphate
  modified_base 17: mod_base = OTHER; note = 2'-O-methyluridine-3'-phosphate
  modified_base 18: mod_base = OTHER; note = 2'-O-methyluridine-3'-phosphate
  modified_base 19: mod_base = OTHER; note = 2'-O-methyluridine-3'-phosphorothioate
  modified_base 20: mod_base = OTHER; note = 2'-O-methylguanosine-3'-phosphorothioate
  modified_base 21: mod_base = OTHER; note = 2'-O-methyladenosine
gccactcatgcaggtgtttga

SEQ ID NO: 2357 - RNA, 21 nt, synthetic construct
  source 1..21: mol_type = other RNA
  modified_base 1: mod_base = OTHER; note = 2'-O-methylguanosine-3'-phosphorothioate
  modified_base 2: mod_base = OTHER; note = 2'-O-methylguanosine-3'-phosphorothioate
  modified_base 3: mod_base = OTHER; note = 2'-O-methylguanosine-3'-phosphate
  modified_base 4: mod_base = OTHER; note = 2'-O-methyladenosine-3'-phosphate
  modified_base 5: mod_base = OTHER; note = 2'-O-methyladenosine-3'-phosphate
  modified_base 6: mod_base = OTHER; note = 2'-O-methylcytidine-3'-phosphate
  modified_base 7: mod_base = OTHER; note = 2'-deoxy-2'-fluorouridine-3'-phosphate
  modified_base 8: mod_base = OTHER; note = 2'-O-methyluridine-3'-phosphate
  modified_base 9: mod_base = OTHER; note = 2'-deoxy-2'-fluorocytidine-3'-phosphate
  modified_base 10: mod_base = OTHER; note = 2'-deoxy-2'-fluoroadenosine-3'-phosphate
  modified_base 11: mod_base = OTHER; note = 2'-deoxy-2'-fluoroadenosine-3'-phosphate
  modified_base 12: mod_base = OTHER; note = 2'-O-methylcytidine-3'-phosphate
  modified_base 13: mod_base = OTHER; note = 2'-O-methylcytidine-3'-phosphate
  modified_base 14: mod_base = OTHER; note = 2'-O-methyladenosine-3'-phosphate
  modified_base 15: mod_base = OTHER; note = 2'-O-methylguanosine-3'-phosphate
  modified_base 16: mod_base = OTHER; note = 2'-O-methyladenosine-3'-phosphate
  modified_base 17: mod_base = OTHER; note = 2'-O-methyladenosine-3'-phosphate
  modified_base 18: mod_base = OTHER; note = 2'-O-methylcytidine-3'-phosphate
  modified_base 19: mod_base = OTHER; note = 2'-O-methylcytidine-3'-phosphorothioate
  modified_base 20: mod_base = OTHER; note = 2'-O-methyladenosine-3'-phosphorothioate
  modified_base 21: mod_base = OTHER; note = 2'-O-methyladenosine
gggaacttcaaccagaaccaa

SEQ ID NO: 2358 - RNA, 21 nt, synthetic construct
  source 1..21: mol_type = other RNA
  modified_base 1: mod_base = OTHER; note = 2'-O-methyluridine-3'-phosphorothioate
  modified_base 2: mod_base = OTHER; note = 2'-O-methylguanosine-3'-phosphorothioate
  modified_base 3: mod_base = OTHER; note = 2'-O-methyladenosine-3'-phosphate
  modified_base 4: mod_base = OTHER; note = 2'-O-methylcytidine-3'-phosphate
  modified_base 5: mod_base = OTHER; note = 2'-O-methylguanosine-3'-phosphate
  modified_base 6: mod_base = OTHER; note = 2'-O-methyladenosine-3'-phosphate
  modified_base 7: mod_base = OTHER; note = 2'-deoxy-2'-fluorocytidine-3'-phosphate
  modified_base 8: mod_base = OTHER; note = 2'-O-methyluridine-3'-phosphate
  modified_base 9: mod_base = OTHER; note = 2'-deoxy-2'-fluorouridine-3'-phosphate
  modified_base 10: mod_base = OTHER; note = 2'-deoxy-2'-fluorocytidine-3'-phosphate
  modified_base 11: mod_base = OTHER; note = 2'-deoxy-2'-fluoroadenosine-3'-phosphate
  modified_base 12: mod_base = OTHER; note = 2'-O-methylcytidine-3'-phosphate
  modified_base 13: mod_base = OTHER; note = 2'-O-methylguanosine-3'-phosphate
  modified_base 14: mod_base = OTHER; note = 2'-O-methylguanosine-3'-phosphate
  modified_base 15: mod_base = OTHER; note = 2'-O-methylcytidine-3'-phosphate
  modified_base 16: mod_base = OTHER; note = 2'-O-methylcytidine-3'-phosphate
  modified_base 17: mod_base = OTHER; note = 2'-O-methylcytidine-3'-phosphate
  modified_base 18: mod_base = OTHER; note = 2'-O-methyluridine-3'-phosphate
  modified_base 19: mod_base = OTHER; note = 2'-O-methylcytidine-3'-phosphorothioate
  modified_base 20: mod_base = OTHER; note = 2'-O-methyladenosine-3'-phosphorothioate
  modified_base 21: mod_base = OTHER; note = 2'-O-methyladenosine
tgacgacttcacggccctcaa

SEQ ID NO: 2359 - RNA, 21 nt, synthetic construct
  source 1..21: mol_type = other RNA
  modified_base 1: mod_base = OTHER; note = 2'-O-methyladenosine-3'-phosphorothioate
  modified_base 2: mod_base = OTHER; note = 2'-O-methylguanosine-3'-phosphorothioate
  modified_base 3: mod_base = OTHER; note = 2'-O-methylcytidine-3'-phosphate
  modified_base 4: mod_base = OTHER; note = 2'-O-methylcytidine-3'-phosphate
  modified_base 5: mod_base = OTHER; note = 2'-O-methyluridine-3'-phosphate
  modified_base 6: mod_base = OTHER; note = 2'-O-methyluridine-3'-phosphate
  modified_base 7: mod_base = OTHER; note = 2'-deoxy-2'-fluorocytidine-3'-phosphate
  modified_base 8: mod_base = OTHER; note = 2'-O-methylguanosine-3'-phosphate
  modified_base 9: mod_base = OTHER; note = 2'-deoxy-2'-fluorocytidine-3'-phosphate
  modified_base 10: mod_base = OTHER; note = 2'-deoxy-2'-fluorocytidine-3'-phosphate
  modified_base 11: mod_base = OTHER; note = 2'-deoxy-2'-fluoroadenosine-3'-phosphate
  modified_base 12: mod_base = OTHER; note = 2'-O-methyladenosine-3'-phosphate
  modified_base 13: mod_base = OTHER; note = 2'-O-methylcytidine-3'-phosphate
  modified_base 14: mod_base = OTHER; note = 2'-O-methyladenosine-3'-phosphate
  modified_base 15: mod_base = OTHER; note = 2'-O-methylcytidine-3'-phosphate
  modified_base 16: mod_base = OTHER; note = 2'-O-methylcytidine-3'-phosphate
  modified_base 17: mod_base = OTHER; note = 2'-O-methyluridine-3'-phosphate
  modified_base 18: mod_base = OTHER; note = 2'-O-methylguanosine-3'-phosphate
  modified_base 19: mod_base = OTHER; note = 2'-O-methylguanosine-3'-phosphorothioate
  modified_base 20: mod_base = OTHER; note = 2'-O-methyladenosine-3'-phosphorothioate
  modified_base 21: mod_base = OTHER; note = 2'-O-methyladenosine
agccttcgccaacacctggaa

SEQ ID NO: 2360 - RNA, 21 nt, synthetic construct
  source 1..21: mol_type = other RNA
  modified_base 1: mod_base = OTHER; note = 2'-O-methylcytidine-3'-phosphorothioate
  modified_base 2: mod_base = OTHER; note = 2'-O-methylcytidine-3'-phosphorothioate
  modified_base 3: mod_base = OTHER; note = 2'-O-methyladenosine-3'-phosphate
  modified_base 4: mod_base = OTHER; note = 2'-O-methylguanosine-3'-phosphate
  modified_base 5: mod_base = OTHER; note = 2'-O-methylguanosine-3'-phosphate
  modified_base 6: mod_base = OTHER; note = 2'-O-methyladenosine-3'-phosphate
  modified_base 7: mod_base = OTHER; note = 2'-deoxy-2'-fluoroadenosine-3'-phosphate
  modified_base 8: mod_base = OTHER; note = 2'-O-methylcytidine-3'-phosphate
  modified_base 9: mod_base = OTHER; note = 2'-deoxy-2'-fluoroadenosine-3'-phosphate
  modified_base 10: mod_base = OTHER; note = 2'-deoxy-2'-fluoroguanosine-3'-phosphate
  modified_base 11: mod_base = OTHER; note = 2'-deoxy-2'-fluorocytidine-3'-phosphate
  modified_base 12: mod_base = OTHER; note = 2'-O-methyluridine-3'-phosphate
  modified_base 13: mod_base = OTHER; note = 2'-O-methyluridine-3'-phosphate
  modified_base 14: mod_base = OTHER; note = 2'-O-methyluridine-3'-phosphate
  modified_base 15: mod_base = OTHER; note = 2'-O-methylguanosine-3'-phosphate
  modified_base 16: mod_base = OTHER; note = 2'-O-methyladenosine-3'-phosphate
  modified_base 17: mod_base = OTHER; note = 2'-O-methylguanosine-3'-phosphate
  modified_base 18: mod_base = OTHER; note = 2'-O-methylguanosine-3'-phosphate
  modified_base 19: mod_base = OTHER; note = 2'-O-methyladenosine-3'-phosphorothioate
  modified_base 20: mod_base = OTHER; note = 2'-O-methylcytidine-3'-phosphorothioate
  modified_base 21: mod_base = OTHER; note = 2'-O-methyladenosine
ccaggaacagctttgaggaca

SEQ ID NO: 2361 - RNA, 21 nt, synthetic construct
  source 1..21: mol_type = other RNA
  modified_base 1: mod_base = OTHER; note = 2'-O-methylguanosine-3'-phosphorothioate
  modified_base 2: mod_base = OTHER; note = 2'-O-methyluridine-3'-phosphorothioate
  modified_base 3: mod_base = OTHER; note = 2'-O-methylguanosine-3'-phosphate
  modified_base 4: mod_base = OTHER; note = 2'-O-methylguanosine-3'-phosphate
  modified_base 5: mod_base = OTHER; note = 2'-O-methyladenosine-3'-phosphate
  modified_base 6: mod_base = OTHER; note = 2'-O-methylguanosine-3'-phosphate
  modified_base 7: mod_base = OTHER; note = 2'-deoxy-2'-fluoroadenosine-3'-phosphate
  modified_base 8: mod_base = OTHER; note = 2'-O-methyladenosine-3'-phosphate
  modified_base 9: mod_base = OTHER; note = 2'-deoxy-2'-fluorouridine-3'-phosphate
  modified_base 10: mod_base = OTHER; note = 2'-deoxy-2'-fluoroguanosine-3'-phosphate
  modified_base 11: mod_base = OTHER; note = 2'-deoxy-2'-fluoroadenosine-3'-phosphate
  modified_base 12: mod_base = OTHER; note = 2'-O-methylguanosine-3'-phosphate
  modified_base 13: mod_base = OTHER; note = 2'-O-methyladenosine-3'-phosphate
  modified_base 14: mod_base = OTHER; note = 2'-O-methyladenosine-3'-phosphate
  modified_base 15: mod_base = OTHER; note = 2'-O-methylcytidine-3'-phosphate
  modified_base 16: mod_base = OTHER; note = 2'-O-methyluridine-3'-phosphate
  modified_base 17: mod_base = OTHER; note = 2'-O-methyladenosine-3'-phosphate
  modified_base 18: mod_base = OTHER; note = 2'-O-methylcytidine-3'-phosphate
  modified_base 19: mod_base = OTHER; note = 2'-O-methylguanosine-3'-phosphorothioate
  modified_base 20: mod_base = OTHER; note = 2'-O-methylcytidine-3'-phosphorothioate
  modified_base 21: mod_base = OTHER; note = 2'-O-methyladenosine
gtggagaatgagaactacgca

SEQ ID NO: 2362 - RNA, 21 nt, synthetic construct
  source 1..21: mol_type = other RNA
  modified_base 1: mod_base = OTHER; note = 2'-O-methylcytidine-3'-phosphorothioate
  modified_base 2: mod_base = OTHER; note = 2'-O-methyladenosine-3'-phosphorothioate
  modified_base 3: mod_base = OTHER; note = 2'-O-methyladenosine-3'-phosphate
  modified_base 4: mod_base = OTHER; note = 2'-O-methylcytidine-3'-phosphate
  modified_base 5: mod_base = OTHER; note = 2'-O-methyladenosine-3'-phosphate
  modified_base 6: mod_base = OTHER; note = 2'-O-methylguanosine-3'-phosphate
  modified_base 7: mod_base = OTHER; note = 2'-deoxy-2'-fluorouridine-3'-phosphate
  modified_base 8: mod_base = OTHER; note = 2'-O-methylguanosine-3'-phosphate
  modified_base 9: mod_base = OTHER; note = 2'-deoxy-2'-fluorocytidine-3'-phosphate
  modified_base 10: mod_base = OTHER; note = 2'-deoxy-2'-fluorocytidine-3'-phosphate
  modified_base 11: mod_base = OTHER; note = 2'-deoxy-2'-fluorouridine-3'-phosphate
  modified_base 12: mod_base = OTHER; note = 2'-O-methyluridine-3'-phosphate
  modified_base 13: mod_base = OTHER; note = 2'-O-methylcytidine-3'-phosphate
  modified_base 14: mod_base = OTHER; note = 2'-O-methyluridine-3'-phosphate
  modified_base 15: mod_base = OTHER; note = 2'-O-methylcytidine-3'-phosphate
  modified_base 16: mod_base = OTHER; note = 2'-O-methylguanosine-3'-phosphate
  modified_base 17: mod_base = OTHER; note = 2'-O-methylcytidine-3'-phosphate
  modified_base 18: mod_base = OTHER; note = 2'-O-methylguanosine-3'-phosphate
  modified_base 19: mod_base = OTHER; note = 2'-O-methylcytidine-3'-phosphorothioate
  modified_base 20: mod_base = OTHER; note = 2'-O-methyluridine-3'-phosphorothioate
  modified_base 21: mod_base = OTHER; note = 2'-O-methyladenosine
caacagtgccttctcgcgcta

SEQ ID NO: 2363 - RNA, 21 nt, synthetic construct
  source 1..21: mol_type = other RNA
  modified_base 1: mod_base = OTHER; note = 2'-O-methylcytidine-3'-phosphorothioate
  modified_base 2: mod_base = OTHER; note = 2'-O-methyluridine-3'-phosphorothioate
  modified_base 3: mod_base = OTHER; note = 2'-O-methyluridine-3'-phosphate
  modified_base 4: mod_base = OTHER; note = 2'-O-methylcytidine-3'-phosphate
  modified_base 5: mod_base = OTHER; note = 2'-O-methylcytidine-3'-phosphate
  modified_base 6: mod_base = OTHER; note = 2'-O-methyladenosine-3'-phosphate
  modified_base 7: mod_base = OTHER; note = 2'-deoxy-2'-fluorocytidine-3'-phosphate
  modified_base 8: mod_base = OTHER; note = 2'-O-methyluridine-3'-phosphate
  modified_base 9: mod_base = OTHER; note = 2'-deoxy-2'-fluorocytidine-3'-phosphate
  modified_base 10: mod_base = OTHER; note = 2'-deoxy-2'-fluoroguanosine-3'-phosphate
  modified_base 11: mod_base = OTHER; note = 2'-deoxy-2'-fluoroadenosine-3'-phosphate
  modified_base 12: mod_base = OTHER; note = 2'-O-methyladenosine-3'-phosphate
  modified_base 13: mod_base = OTHER; note = 2'-O-methylcytidine-3'-phosphate
  modified_base 14: mod_base = OTHER; note = 2'-O-methyluridine-3'-phosphate
  modified_base 15: mod_base = OTHER; note = 2'-O-methylguanosine-3'-phosphate
  modified_base 16: mod_base = OTHER; note = 2'-O-methylcytidine-3'-phosphate
  modified_base 17: mod_base = OTHER; note = 2'-O-methyladenosine-3'-phosphate
  modified_base 18: mod_base = OTHER; note = 2'-O-methyluridine-3'-phosphate
  modified_base 19: mod_base = OTHER; note = 2'-O-methylguanosine-3'-phosphorothioate
  modified_base 20: mod_base = OTHER; note = 2'-O-methyluridine-3'-phosphorothioate
  modified_base 21: mod_base = OTHER; note = 2'-O-methyladenosine
cttccactcgaactgcatgta

SEQ ID NO: 2364 - RNA, 21 nt, synthetic construct
  source 1..21: mol_type = other RNA
  modified_base 1: mod_base = OTHER; note = 2'-O-methylcytidine-3'-phosphorothioate
  modified_base 2: mod_base = OTHER; note = 2'-O-methyladenosine-3'-phosphorothioate
  modified_base 3: mod_base = OTHER; note = 2'-O-methylcytidine-3'-phosphate
  modified_base 4: mod_base = OTHER; note = 2'-O-methylcytidine-3'-phosphate
  modified_base 5: mod_base = OTHER; note = 2'-O-methyluridine-3'-phosphate
  modified_base 6: mod_base = OTHER; note = 2'-O-methylguanosine-3'-phosphate
  modified_base 7: mod_base = OTHER; note = 2'-deoxy-2'-fluorocytidine-3'-phosphate
  modified_base 8: mod_base = OTHER; note = 2'-O-methyladenosine-3'-phosphate
  modified_base 9: mod_base = OTHER; note = 2'-deoxy-2'-fluoroadenosine-3'-phosphate
  modified_base 10: mod_base = OTHER; note = 2'-deoxy-2'-fluorocytidine-3'-phosphate
  modified_base 11: mod_base = OTHER; note = 2'-deoxy-2'-fluorouridine-3'-phosphate
  modified_base 12: mod_base = OTHER; note = 2'-O-methylguanosine-3'-phosphate
  modified_base 13: mod_base = OTHER; note = 2'-O-methyluridine-3'-phosphate
  modified_base 14: mod_base = OTHER; note = 2'-O-methylguanosine-3'-phosphate
  modified_base 15: mod_base = OTHER; note = 2'-O-methyladenosine-3'-phosphate
  modified_base 16: mod_base = OTHER; note = 2'-O-methylguanosine-3'-phosphate
  modified_base 17: mod_base = OTHER; note = 2'-O-methylcytidine-3'-phosphate
  modified_base 18: mod_base = OTHER; note = 2'-O-methylguanosine-3'-phosphate
  modified_base 19: mod_base = OTHER; note = 2'-O-methylguanosine-3'-phosphorothioate
  modified_base 20: mod_base = OTHER; note = 2'-O-methyladenosine-3'-phosphorothioate
  modified_base 21: mod_base = OTHER; note = 2'-O-methyladenosine
cacctgcaactgtgagcggaa

SEQ ID NO: 2365 - RNA, 21 nt, synthetic construct
  source 1..21: mol_type = other RNA
  modified_base 1: mod_base = OTHER; note = 2'-O-methylcytidine-3'-phosphorothioate
  modified_base 2: mod_base = OTHER; note = 2'-O-methylcytidine-3'-phosphorothioate
  modified_base 3: mod_base = OTHER; note = 2'-O-methyluridine-3'-phosphate
  modified_base 4: mod_base = OTHER; note = 2'-O-methylcytidine-3'-phosphate
  modified_base 5: mod_base = OTHER; note = 2'-O-methylcytidine-3'-phosphate
  modified_base 6: mod_base = OTHER; note = 2'-O-methyluridine-3'-phosphate
  modified_base 7: mod_base = OTHER; note = 2'-deoxy-2'-fluoroadenosine-3'-phosphate
  modified_base 8: mod_base = OTHER; note = 2'-O-methyluridine-3'-phosphate
  modified_base 9: mod_base = OTHER; note = 2'-deoxy-2'-fluoroguanosine-3'-phosphate
  modified_base 10: mod_base = OTHER; note = 2'-deoxy-2'-fluorouridine-3'-phosphate
  modified_base 11: mod_base = OTHER; note = 2'-deoxy-2'-fluoroguanosine-3'-phosphate
  modified_base 12: mod_base = OTHER; note = 2'-O-methylcytidine-3'-phosphate
  modified_base 13: mod_base = OTHER; note = 2'-O-methyladenosine-3'-phosphate
  modified_base 14: mod_base = OTHER; note = 2'-O-methylcytidine-3'-phosphate
  modified_base 15: mod_base = OTHER; note = 2'-O-methylguanosine-3'-phosphate
  modified_base 16: mod_base = OTHER; note = 2'-O-methylcytidine-3'-phosphate
  modified_base 17: mod_base = OTHER; note = 2'-O-methylcytidine-3'-phosphate
  modified_base 18: mod_base = OTHER; note = 2'-O-methyluridine-3'-phosphate
  modified_base 19: mod_base = OTHER; note = 2'-O-methylguanosine-3'-phosphorothioate
  modified_base 20: mod_base = OTHER; note = 2'-O-methyluridine-3'-phosphorothioate
  modified_base 21: mod_base = OTHER; note = 2'-O-methyladenosine
cctcctatgtgcacgcctgta

SEQ ID NO: 2366 - RNA, 21 nt, synthetic construct
  source 1..21: mol_type = other RNA
  modified_base 1: mod_base = OTHER; note = 2'-O-methylguanosine-3'-phosphorothioate
  modified_base 2: mod_base = OTHER; note = 2'-O-methylguanosine-3'-phosphorothioate
  modified_base 3: mod_base = OTHER; note = 2'-O-methylcytidine-3'-phosphate
  modified_base 4: mod_base = OTHER; note = 2'-O-methylguanosine-3'-phosphate
  modified_base 5: mod_base = OTHER; note = 2'-O-methyluridine-3'-phosphate
  modified_base 6: mod_base = OTHER; note = 2'-O-methyladenosine-3'-phosphate
  modified_base 7: mod_base = OTHER; note = 2'-deoxy-2'-fluorocytidine-3'-phosphate
  modified_base 8: mod_base = OTHER; note = 2'-O-methyladenosine-3'-phosphate
  modified_base 9: mod_base = OTHER; note = 2'-deoxy-2'-fluoroguanosine-3'-phosphate
  modified_base 10: mod_base = OTHER; note = 2'-deoxy-2'-fluorocytidine-3'-phosphate
  modified_base 11: mod_base = OTHER; note = 2'-deoxy-2'-fluorouridine-3'-phosphate
  modified_base 12: mod_base = OTHER; note = 2'-O-methylcytidine-3'-phosphate
  modified_base 13: mod_base = OTHER; note = 2'-O-methyladenosine-3'-phosphate
  modified_base 14: mod_base = OTHER; note = 2'-O-methylguanosine-3'-phosphate
  modified_base 15: mod_base = OTHER; note = 2'-O-methylcytidine-3'-phosphate
  modified_base 16: mod_base = OTHER; note = 2'-O-methylguanosine-3'-phosphate
  modified_base 17: mod_base = OTHER; note = 2'-O-methyladenosine-3'-phosphate
  modified_base 18: mod_base = OTHER; note = 2'-O-methylcytidine-3'-phosphate
  modified_base 19: mod_base = OTHER; note = 2'-O-methyluridine-3'-phosphorothioate
  modified_base 20: mod_base = OTHER; note = 2'-O-methylguanosine-3'-phosphorothioate
  modified_base 21: mod_base = OTHER; note = 2'-O-methyladenosine
ggcgtacagctcagcgactga

SEQ ID NO: 2367 - RNA, 21 nt, synthetic construct
  source 1..21: mol_type = other RNA
  modified_base 1: mod_base = OTHER; note = 2'-O-methyladenosine-3'-phosphorothioate
  modified_base 2: mod_base = OTHER; note = 2'-O-methylcytidine-3'-phosphorothioate
  modified_base 3: mod_base = OTHER; note = 2'-O-methylcytidine-3'-phosphate
  modified_base 4: mod_base = OTHER; note = 2'-O-methyladenosine-3'-phosphate
  modified_base 5: mod_base = OTHER; note = 2'-O-methyladenosine-3'-phosphate
  modified_base 6: mod_base = OTHER; note = 2'-O-methylguanosine-3'-phosphate
  modified_base 7: mod_base = OTHER; note = 2'-deoxy-2'-fluorouridine-3'-phosphate
  modified_base 8: mod_base = OTHER; note = 2'-O-methyladenosine-3'-phosphate
  modified_base 9: mod_base = OTHER; note = 2'-deoxy-2'-fluorocytidine-3'-phosphate
  modified_base 10: mod_base = OTHER; note = 2'-deoxy-2'-fluoroadenosine-3'-phosphate
  modified_base 11: mod_base = OTHER; note = 2'-deoxy-2'-fluorouridine-3'-phosphate
  modified_base 12: mod_base = OTHER; note = 2'-O-methylguanosine-3'-phosphate
  modified_base 13: mod_base = OTHER; note = 2'-O-methylcytidine-3'-phosphate
  modified_base 14: mod_base = OTHER; note = 2'-O-methyladenosine-3'-phosphate
  modified_base 15: mod_base = OTHER; note = 2'-O-methylguanosine-3'-phosphate
  modified_base 16: mod_base = OTHER; note = 2'-O-methyladenosine-3'-phosphate
  modified_base 17: mod_base = OTHER; note = 2'-O-methyladenosine-3'-phosphate
  modified_base 18: mod_base = OTHER; note = 2'-O-methylcytidine-3'-phosphate
  modified_base 19: mod_base = OTHER; note = 2'-O-methyluridine-3'-phosphorothioate
  modified_base 20: mod_base = OTHER; note = 2'-O-methylguanosine-3'-phosphorothioate
  modified_base 21: mod_base = OTHER; note = 2'-O-methyladenosine
accaagtacatgcagaactga

SEQ ID NO: 2368 - RNA, 21 nt, synthetic construct
  source 1..21: mol_type = other RNA
  modified_base 1: mod_base = OTHER; note = 2'-O-methyluridine-3'-phosphorothioate
  modified_base 2: mod_base = OTHER; note = 2'-O-methyladenosine-3'-phosphorothioate
  modified_base 3: mod_base = OTHER; note = 2'-O-methylcytidine-3'-phosphate
  modified_base 4: mod_base = OTHER; note = 2'-O-methylguanosine-3'-phosphate
  modified_base 5: mod_base = OTHER; note = 2'-O-methylcytidine-3'-phosphate
  modified_base 6: mod_base = OTHER; note = 2'-O-methylcytidine-3'-phosphate
  modified_base 7: mod_base = OTHER; note = 2'-deoxy-2'-fluorouridine-3'-phosphate
  modified_base 8: mod_base = OTHER; note = 2'-O-methyladenosine-3'-phosphate
  modified_base 9: mod_base = OTHER; note = 2'-deoxy-2'-fluorocytidine-3'-phosphate
  modified_base 10: mod_base = OTHER; note = 2'-deoxy-2'-fluoroguanosine-3'-phosphate
  modified_base 11: mod_base = OTHER; note = 2'-deoxy-2'-fluorouridine-3'-phosphate
  modified_base 12: mod_base = OTHER; note = 2'-O-methylguanosine-3'-phosphate
  modified_base 13: mod_base = OTHER; note = 2'-O-methylguanosine-3'-phosphate
  modified_base 14: mod_base = OTHER; note = 2'-O-methyluridine-3'-phosphate
  modified_base 15: mod_base = OTHER; note = 2'-O-methylguanosine-3'-phosphate
  modified_base 16: mod_base = OTHER; note = 2'-O-methylguanosine-3'-phosphate
  modified_base 17: mod_base = OTHER; note = 2'-O-methyladenosine-3'-phosphate
  modified_base 18: mod_base = OTHER; note = 2'-O-methyluridine-3'-phosphate
  modified_base 19: mod_base = OTHER; note = 2'-O-methylguanosine-3'-phosphorothioate
  modified_base 20: mod_base = OTHER; note = 2'-O-methylcytidine-3'-phosphorothioate
  modified_base 21: mod_base = OTHER; note = 2'-O-methyladenosine
tacgcctacgtggtggatgca

SEQ ID NO: 2369 - RNA, 21 nt, synthetic construct
  source 1..21: mol_type = other RNA
  modified_base 1: mod_base = OTHER; note = 2'-O-methylguanosine-3'-phosphorothioate
  modified_base 2: mod_base = OTHER; note = 2'-O-methylcytidine-3'-phosphorothioate
  modified_base 3: mod_base = OTHER; note = 2'-O-methyladenosine-3'-phosphate
  modified_base 4: mod_base = OTHER; note = 2'-O-methylguanosine-3'-phosphate
  modified_base 5: mod_base = OTHER; note = 2'-O-methylcytidine-3'-phosphate
  modified_base 6: mod_base = OTHER; note = 2'-O-methylguanosine-3'-phosphate
  modified_base 7: mod_base = OTHER; note = 2'-deoxy-2'-fluorouridine-3'-phosphate
  modified_base 8: mod_base = OTHER; note = 2'-O-methyluridine-3'-phosphate
  modified_base 9: mod_base = OTHER; note = 2'-deoxy-2'-fluorouridine-3'-phosphate
  modified_base 10: mod_base = OTHER; note = 2'-deoxy-2'-fluorocytidine-3'-phosphate
  modified_base 11: mod_base = OTHER; note = 2'-deoxy-2'-fluorocytidine-3'-phosphate
  modified_base 12: mod_base = OTHER; note = 2'-O-methyluridine-3'-phosphate
  modified_base 13: mod_base = OTHER; note = 2'-O-methyluridine-3'-phosphate
  modified_base 14: mod_base = OTHER; note = 2'-O-methylcytidine-3'-phosphate
  modified_base 15: mod_base = OTHER; note = 2'-O-methylguanosine-3'-phosphate
  modified_base 16: mod_base = OTHER; note = 2'-O-methyluridine-3'-phosphate
  modified_base 17: mod_base = OTHER; note = 2'-O-methylguanosine-3'-phosphate
  modified_base 18: mod_base = OTHER; note = 2'-O-methylcytidine-3'-phosphate
  modified_base 19: mod_base = OTHER; note = 2'-O-methylcytidine-3'-phosphorothioate
  modified_base 20: mod_base = OTHER; note = 2'-O-methyluridine-3'-phosphorothioate
  modified_base 21: mod_base = OTHER; note = 2'-O-methyladenosine
gcagcgtttccttcgtgccta

SEQ ID NO: 2370 - RNA, 21 nt, synthetic construct
  source 1..21: mol_type = other RNA
  modified_base 1: mod_base = OTHER; note = 2'-O-methylguanosine-3'-phosphorothioate
  modified_base 2: mod_base = OTHER; note = 2'-O-methylcytidine-3'-phosphorothioate
  modified_base 3: mod_base = OTHER; note = 2'-O-methyladenosine-3'-phosphate
  modified_base 4: mod_base = OTHER; note = 2'-O-methylcytidine-3'-phosphate
  modified_base 5: mod_base = OTHER; note = 2'-O-methylcytidine-3'-phosphate
  modified_base 6: mod_base = OTHER; note = 2'-O-methyluridine-3'-phosphate
  modified_base 7: mod_base = OTHER; note = 2'-deoxy-2'-fluorouridine-3'-phosphate
  modified_base 8: mod_base = OTHER; note = 2'-O-methylcytidine-3'-phosphate
  modified_base 9: mod_base = OTHER; note = 2'-deoxy-2'-fluorocytidine-3'-phosphate
  modified_base 10: mod_base = OTHER; note = 2'-deoxy-2'-fluorouridine-3'-phosphate
  modified_base 11: mod_base = OTHER; note = 2'-deoxy-2'-fluorocytidine-3'-phosphate
  modified_base 12: mod_base = OTHER; note = 2'-O-methyladenosine-3'-phosphate
  modified_base 13: mod_base = OTHER; note = 2'-O-methyladenosine-3'-phosphate
  modified_base 14: mod_base = OTHER; note = 2'-O-methyluridine-3'-phosphate
  modified_base 15: mod_base = OTHER; note = 2'-O-methylguanosine-3'-phosphate
  modified_base 16: mod_base = OTHER; note = 2'-O-methyladenosine-3'-phosphate
  modified_base 17: mod_base = OTHER; note = 2'-O-methylcytidine-3'-phosphate
  modified_base 18: mod_base = OTHER; note = 2'-O-methylguanosine-3'-phosphate
  modified_base 19: mod_base = OTHER; note = 2'-O-methylcytidine-3'-phosphorothioate
  modified_base 20: mod_base = OTHER; note = 2'-O-methylguanosine-3'-phosphorothioate
  modified_base 21: mod_base = OTHER; note = 2'-O-methyladenosine
gcaccttcctcaatgacgcga

SEQ ID NO: 2371 - RNA, 21 nt, synthetic construct
  source 1..21: mol_type = other RNA
  modified_base 1: mod_base = OTHER; note = 2'-O-methylcytidine-3'-phosphorothioate
  modified_base 2: mod_base = OTHER; note = 2'-O-methyluridine-3'-phosphorothioate
  modified_base 3: mod_base = OTHER; note = 2'-O-methylguanosine-3'-phosphate
  modified_base 4: mod_base = OTHER; note = 2'-O-methylguanosine-3'-phosphate
  modified_base 5: mod_base = OTHER; note = 2'-O-methyladenosine-3'-phosphate
  modified_base 6: mod_base = OTHER; note = 2'-O-methylguanosine-3'-phosphate
  modified_base 7: mod_base = OTHER; note = 2'-deoxy-2'-fluoroadenosine-3'-phosphate
  modified_base 8: mod_base = OTHER; note = 2'-O-methylguanosine-3'-phosphate
  modified_base 9: mod_base = OTHER; note = 2'-deoxy-2'-fluoroguanosine-3'-phosphate
  modified_base 10: mod_base = OTHER; note = 2'-deoxy-2'-fluorouridine-3'-phosphate
  modified_base 11: mod_base = OTHER; note = 2'-deoxy-2'-fluoroguanosine-3'-phosphate
  modified_base 12: mod_base = OTHER; note = 2'-O-methylguanosine-3'-phosphate
  modified_base 13: mod_base = OTHER; note = 2'-O-methyluridine-3'-phosphate
  modified_base 14: mod_base = OTHER; note = 2'-O-methylguanosine-3'-phosphate
  modified_base 15: mod_base = OTHER; note = 2'-O-methylcytidine-3'-phosphate
  modified_base 16: mod_base = OTHER; note = 2'-O-methyladenosine-3'-phosphate
  modified_base 17: mod_base = OTHER; note = 2'-O-methylcytidine-3'-phosphate
  modified_base 18: mod_base = OTHER; note = 2'-O-methylguanosine-3'-phosphate
  modified_base 19: mod_base = OTHER; note = 2'-O-methyladenosine-3'-phosphorothioate
  modified_base 20: mod_base = OTHER; note = 2'-O-methylcytidine-3'-phosphorothioate
  modified_base 21: mod_base = OTHER; note = 2'-O-methyladenosine
ctggagaggtggtgcacgaca

SEQ ID NO: 2372 - RNA, 21 nt, synthetic construct
  source 1..21: mol_type = other RNA
  modified_base 1: mod_base = OTHER; note = 2'-O-methylcytidine-3'-phosphorothioate
  modified_base 2: mod_base = OTHER; note = 2'-O-methylcytidine-3'-phosphorothioate
  modified_base 3: mod_base = OTHER; note = 2'-O-methylguanosine-3'-phosphate
  modified_base 4: mod_base = OTHER; note = 2'-O-methyluridine-3'-phosphate
  modified_base 5: mod_base = OTHER; note = 2'-O-methylguanosine-3'-phosphate
  modified_base 6: mod_base = OTHER; note = 2'-O-methyluridine-3'-phosphate
  modified_base 7: mod_base = OTHER; note = 2'-deoxy-2'-fluoroguanosine-3'-phosphate
  modified_base 8: mod_base = OTHER; note = 2'-O-methyluridine-3'-phosphate
  modified_base 9: mod_base = OTHER; note = 2'-deoxy-2'-fluorouridine-3'-phosphate
  modified_base 10: mod_base = OTHER; note = 2'-deoxy-2'-fluorocytidine-3'-phosphate
  modified_base 11: mod_base = OTHER; note = 2'-deoxy-2'-fluoroadenosine-3'-phosphate
  modified_base 12: mod_base = OTHER; note = 2'-O-methyluridine-3'-phosphate
  modified_base 13: mod_base = OTHER; note = 2'-O-methylguanosine-3'-phosphate
  modified_base 14: mod_base = OTHER; note = 2'-O-methyluridine-3'-phosphate
  modified_base 15: mod_base = OTHER; note = 2'-O-methyladenosine-3'-phosphate
  modified_base 16: mod_base = OTHER; note = 2'-O-methylcytidine-3'-phosphate
  modified_base 17: mod_base = OTHER; note = 2'-O-methylguanosine-3'-phosphate
  modified_base 18: mod_base = OTHER; note = 2'-O-methylguanosine-3'-phosphate
  modified_base 19: mod_base = OTHER; note = 2'-O-methylguanosine-3'-phosphorothioate
  modified_base 20: mod_base = OTHER; note = 2'-O-methyluridine-3'-phosphorothioate
  modified_base 21: mod_base = OTHER; note = 2'-O-methyladenosine
ccgtgtgttcatgtacgggta

SEQ ID NO: 2373 - RNA, 21 nt, synthetic construct
  source 1..21: mol_type = other RNA
  modified_base 1: mod_base = OTHER; note = 2'-O-methylcytidine-3'-phosphorothioate
  modified_base 2: mod_base = OTHER; note = 2'-O-methylcytidine-3'-phosphorothioate
  modified_base 3: mod_base = OTHER; note = 2'-O-methyluridine-3'-phosphate
  modified_base 4: mod_base = OTHER; note = 2'-O-methylcytidine-3'-phosphate
  modified_base 5: mod_base = OTHER; note = 2'-O-methyluridine-3'-phosphate
  modified_base 6: mod_base = OTHER; note = 2'-O-methylcytidine-3'-phosphate
  modified_base 7: mod_base = OTHER; note = 2'-deoxy-2'-fluorouridine-3'-phosphate
  modified_base 8: mod_base = OTHER; note = 2'-O-methylguanosine-3'-phosphate
  modified_base 9: mod_base = OTHER; note = 2'-deoxy-2'-fluorocytidine-3'-phosphate
  modified_base 10: mod_base = OTHER; note = 2'-deoxy-2'-fluoroadenosine-3'-phosphate
  modified_base 11: mod_base = OTHER; note = 2'-deoxy-2'-fluoroguanosine-3'-phosphate
  modified_base 12: mod_base = OTHER; note = 2'-O-methyladenosine-3'-phosphate
  modified_base 13: mod_base = OTHER; note = 2'-O-methyladenosine-3'-phosphate
  modified_base 14: mod_base = OTHER; note = 2'-O-methyladenosine-3'-phosphate
  modified_base 15: mod_base = OTHER; note = 2'-O-methyladenosine-3'-phosphate
  modified_base 16: mod_base = OTHER; note = 2'-O-methylguanosine-3'-phosphate
  modified_base 17: mod_base = OTHER; note = 2'-O-methylcytidine-3'-phosphate
  modified_base 18: mod_base = OTHER; note = 2'-O-methyladenosine-3'-phosphate
  modified_base 19: mod_base = OTHER; note = 2'-O-methylcytidine-3'-phosphorothioate
  modified_base 20: mod_base = OTHER; note = 2'-O-methyladenosine-3'-phosphorothioate
  modified_base 21: mod_base = OTHER; note = 2'-O-methyladenosine
cctctctgcagaaaagcacaa

SEQ ID NO: 2374 - RNA, 21 nt, synthetic construct
  source 1..21: mol_type = other RNA
  modified_base 1: mod_base = OTHER; note = 2'-O-methylguanosine-3'-phosphorothioate
  modified_base 2: mod_base = OTHER; note = 2'-O-methylguanosine-3'-phosphorothioate
  modified_base 3: mod_base = OTHER; note = 2'-O-methyladenosine-3'-phosphate
  modified_base 4: mod_base = OTHER; note = 2'-O-methylcytidine-3'-phosphate
  modified_base 5: mod_base = OTHER; note = 2'-O-methyluridine-3'-phosphate
  modified_base 6: mod_base = OTHER; note = 2'-O-methylguanosine-3'-phosphate
  modified_base 7: mod_base = OTHER; note = 2'-deoxy-2'-fluorocytidine-3'-phosphate
  modified_base 8: mod_base = OTHER; note = 2'-O-methyladenosine-3'-phosphate
  modified_base 9: mod_base = OTHER; note = 2'-deoxy-2'-fluoroguanosine-3'-phosphate
  modified_base 10: mod_base = OTHER; note = 2'-deoxy-2'-fluorocytidine-3'-phosphate
  modified_base 11: mod_base = OTHER; note = 2'-deoxy-2'-fluoroadenosine-3'-phosphate
  modified_base 12: mod_base = OTHER; note = 2'-O-methyladenosine-3'-phosphate
  modified_base 13: mod_base = OTHER; note = 2'-O-methylcytidine-3'-phosphate
  modified_base 14: mod_base = OTHER; note = 2'-O-methyladenosine-3'-phosphate
  modified_base 15: mod_base = OTHER; note = 2'-O-methylguanosine-3'-phosphate
  modified_base 16: mod_base = OTHER; note = 2'-O-methylcytidine-3'-phosphate
  modified_base 17: mod_base = OTHER; note = 2'-O-methyluridine-3'-phosphate
  modified_base 18: mod_base = OTHER; note = 2'-O-methylcytidine-3'-phosphate
  modified_base 19: mod_base = OTHER; note = 2'-O-methylguanosine-3'-phosphorothioate
  modified_base 20: mod_base = OTHER; note = 2'-O-methylguanosine-3'-phosphorothioate
  modified_base 21: mod_base = OTHER; note = 2'-O-methyladenosine
ggactgcagcaacagctcgga

SEQ ID NO: 2375 - RNA, 21 nt, synthetic construct
  source 1..21: mol_type = other RNA
  modified_base 1: mod_base = OTHER; note = 2'-O-methylcytidine-3'-phosphorothioate
  modified_base 2: mod_base = OTHER; note = 2'-O-methyluridine-3'-phosphorothioate
  modified_base 3: mod_base = OTHER; note = 2'-O-methylguanosine-3'-phosphate
  modified_base 4: mod_base = OTHER; note = 2'-O-methyluridine-3'-phosphate
  modified_base 5: mod_base = OTHER; note = 2'-O-methyluridine-3'-phosphate
  modified_base 6: mod_base = OTHER; note = 2'-O-methyluridine-3'-phosphate
  modified_base 7: mod_base = OTHER; note = 2'-deoxy-2'-fluorocytidine-3'-phosphate
  modified_base 8: mod_base = OTHER; note = 2'-O-methyladenosine-3'-phosphate
  modified_base 9: mod_base = OTHER; note = 2'-deoxy-2'-fluoroguanosine-3'-phosphate
  modified_base 10: mod_base = OTHER; note = 2'-deoxy-2'-fluorocytidine-3'-phosphate
  modified_base 11: mod_base = OTHER; note = 2'-deoxy-2'-fluoroadenosine-3'-phosphate
  modified_base 12: mod_base = OTHER; note = 2'-O-methylcytidine-3'-phosphate
  modified_base 13: mod_base = OTHER; note = 2'-O-methyladenosine-3'-phosphate
  modified_base 14: mod_base = OTHER; note = 2'-O-methylcytidine-3'-phosphate
  modified_base 15: mod_base = OTHER; note = 2'-O-methyladenosine-3'-phosphate
  modified_base 16: mod_base = OTHER; note = 2'-O-methylcytidine-3'-phosphate
  modified_base 17: mod_base = OTHER; note = 2'-O-methyluridine-3'-phosphate
  modified_base 18: mod_base = OTHER; note = 2'-O-methylguanosine-3'-phosphate
  modified_base 19: mod_base = OTHER; note = 2'-O-methylcytidine-3'-phosphorothioate
  modified_base 20: mod_base = OTHER; note = 2'-O-methylguanosine-3'-phosphorothioate
  modified_base 21: mod_base = OTHER; note = 2'-O-methyladenosine
ctgtttcagcacacactgcga

SEQ ID NO: 2376 - RNA, 21 nt, synthetic construct
  source 1..21: mol_type = other RNA
  modified_base 1: mod_base = OTHER; note = 2'-O-methylcytidine-3'-phosphorothioate
  modified_base 2: mod_base = OTHER; note = 2'-O-methyluridine-3'-phosphorothioate
  modified_base 3: mod_base = OTHER; note = 2'-O-methylguanosine-3'-phosphate
  modified_base 4: mod_base = OTHER; note = 2'-O-methylcytidine-3'-phosphate
  modified_base 5: mod_base = OTHER; note = 2'-O-methyladenosine-3'-phosphate
  modified_base 6: mod_base = OTHER; note = 2'-O-methyluridine-3'-phosphate
  modified_base 7: mod_base = OTHER; note = 2'-deoxy-2'-fluorouridine-3'-phosphate
  modified_base 8: mod_base = OTHER; note = 2'-O-methylguanosine-3'-phosphate
  modified_base 9: mod_base = OTHER; note = 2'-deoxy-2'-fluorocytidine-3'-phosphate
  modified_base 10: mod_base = OTHER; note = 2'-deoxy-2'-fluorocytidine-3'-phosphate
  modified_base 11: mod_base = OTHER; note = 2'-deoxy-2'-fluoroguanosine-3'-phosphate
  modified_base 12: mod_base = OTHER; note = 2'-O-methyladenosine-3'-phosphate
  modified_base 13: mod_base = OTHER; note = 2'-O-methylguanosine-3'-phosphate
  modified_base 14: mod_base = OTHER; note = 2'-O-methylguanosine-3'-phosphate
  modified_base 15: mod_base = OTHER; note = 2'-O-methyladenosine-3'-phosphate
  modified_base 16: mod_base = OTHER; note = 2'-O-methylguanosine-3'-phosphate
  modified_base 17: mod_base = OTHER; note = 2'-O-methylguanosine-3'-phosphate
  modified_base 18: mod_base = OTHER; note = 2'-O-methyladenosine-3'-phosphate
  modified_base 19: mod_base = OTHER; note = 2'-O-methylcytidine-3'-phosphorothioate
  modified_base 20: mod_base = OTHER; note = 2'-O-methyluridine-3'-phosphorothioate
  modified_base 21: mod_base = OTHER; note = 2'-O-methyladenosine
ctgcattgccgaggaggacta

SEQ ID NO: 2377 - RNA, 21 nt, synthetic construct
  source 1..21: mol_type = other RNA
  modified_base 1: mod_base = OTHER; note = 2'-O-methylcytidine-3'-phosphorothioate
  modified_base 2: mod_base = OTHER; note = 2'-O-methyladenosine-3'-phosphorothioate
  modified_base 3: mod_base = OTHER; note = 2'-O-methylcytidine-3'-phosphate
  modified_base 4: mod_base = OTHER; note = 2'-O-methylcytidine-3'-phosphate
  modified_base 5: mod_base = OTHER; note = 2'-O-methyluridine-3'-phosphate
  modified_base 6: mod_base = OTHER; note = 2'-O-methyladenosine-3'-phosphate
  modified_base 7: mod_base = OTHER; note = 2'-deoxy-2'-fluorocytidine-3'-phosphate
  modified_base 8: mod_base = OTHER; note = 2'-O-methyladenosine-3'-phosphate
  modified_base 9: mod_base = OTHER; note = 2'-deoxy-2'-fluoroadenosine-3'-phosphate
  modified_base 10: mod_base = OTHER; note = 2'-deoxy-2'-fluoroguanosine-3'-phosphate
  modified_base 11: mod_base = OTHER; note = 2'-deoxy-2'-fluorocytidine-3'-phosphate
  modified_base 12: mod_base = OTHER; note = 2'-O-methylcytidine-3'-phosphate
  modified_base 13: mod_base = OTHER; note = 2'-O-methyluridine-3'-phosphate
  modified_base 14: mod_base = OTHER; note = 2'-O-methylguanosine-3'-phosphate
  modified_base 15: mod_base = OTHER; note = 2'-O-methylguanosine-3'-phosphate
  modified_base 16: mod_base = OTHER; note = 2'-O-methyladenosine-3'-phosphate
  modified_base 17: mod_base = OTHER; note = 2'-O-methylguanosine-3'-phosphate
  modified_base 18: mod_base = OTHER; note = 2'-O-methyladenosine-3'-phosphate
  modified_base 19: mod_base = OTHER; note = 2'-O-methylguanosine-3'-phosphorothioate
  modified_base 20: mod_base = OTHER; note = 2'-O-methyladenosine-3'-phosphorothioate
  modified_base 21: mod_base = OTHER; note = 2'-O-methyladenosine
cacctacaagcctggagagaa

SEQ ID NO: 2378 - RNA, 21 nt, synthetic construct
  source 1..21: mol_type = other RNA
  modified_base 1: mod_base = OTHER; note = 2'-O-methylcytidine-3'-phosphorothioate
  modified_base 2: mod_base = OTHER; note = 2'-O-methylguanosine-3'-phosphorothioate
  modified_base 3: mod_base = OTHER; note = 2'-O-methyladenosine-3'-phosphate
  modified_base 4: mod_base = OTHER; note = 2'-O-methylcytidine-3'-phosphate
  modified_base 5: mod_base = OTHER; note = 2'-O-methyluridine-3'-phosphate
  modified_base 6: mod_base = OTHER; note = 2'-O-methylguanosine-3'-phosphate
  modified_base 7: mod_base = OTHER; note = 2'-deoxy-2'-fluorocytidine-3'-phosphate
  modified_base 8: mod_base = OTHER; note = 2'-O-methyladenosine-3'-phosphate
  modified_base 9: mod_base = OTHER; note = 2'-deoxy-2'-fluoroadenosine-3'-phosphate
  modified_base 10: mod_base = OTHER; note = 2'-deoxy-2'-fluorocytidine-3'-phosphate
  modified_base 11: mod_base = OTHER; note = 2'-deoxy-2'-fluoroadenosine-3'-phosphate
  modified_base 12: mod_base = OTHER; note = 2'-O-methylcytidine-3'-phosphate
  modified_base 13: mod_base = OTHER; note = 2'-O-methylcytidine-3'-phosphate
  modified_base 14: mod_base = OTHER; note = 2'-O-methyluridine-3'-phosphate
  modified_base 15: mod_base = OTHER; note = 2'-O-methylguanosine-3'-phosphate
  modified_base 16: mod_base = OTHER; note = 2'-O-methylcytidine-3'-phosphate
  modified_base 17: mod_base = OTHER; note = 2'-O-methyladenosine-3'-phosphate
  modified_base 18: mod_base = OTHER; note = 2'-O-methylcytidine-3'-phosphate
  modified_base 19: mod_base = OTHER; note = 2'-O-methylcytidine-3'-phosphorothioate
  modified_base 20: mod_base = OTHER; note = 2'-O-methyluridine-3'-phosphorothioate
  modified_base 21: mod_base = OTHER; note = 2'-O-methyladenosine
cgactgcaacacctgcaccta

SEQ ID NO: 2379 - RNA, 21 nt, synthetic construct
  source 1..21: mol_type = other RNA
  modified_base 1: mod_base = OTHER; note = 2'-O-methylguanosine-3'-phosphorothioate
  modified_base 2: mod_base = OTHER; note = 2'-O-methyladenosine-3'-phosphorothioate
  modified_base 3: mod_base = OTHER; note = 2'-O-methyladenosine-3'-phosphate
  modified_base 4: mod_base = OTHER; note = 2'-O-methylcytidine-3'-phosphate
  modified_base 5: mod_base = OTHER; note = 2'-O-methylcytidine-3'-phosphate
  modified_base 6: mod_base = OTHER; note = 2'-O-methylguanosine-3'-phosphate
  modified_base 7: mod_base = OTHER; note = 2'-deoxy-2'-fluoroguanosine-3'-phosphate
  modified_base 8: mod_base = OTHER; note = 2'-O-methyladenosine-3'-phosphate
  modified_base 9: mod_base = OTHER; note = 2'-deoxy-2'-fluoroguanosine-3'-phosphate
  modified_base 10: mod_base = OTHER; note = 2'-deoxy-2'-fluoroguanosine-3'-phosphate
  modified_base 11: mod_base = OTHER; note = 2'-deoxy-2'-fluorouridine-3'-phosphate
  modified_base 12: mod_base = OTHER; note = 2'-O-methylguanosine-3'-phosphate
  modified_base 13: mod_base = OTHER; note = 2'-O-methylguanosine-3'-phosphate
  modified_base 14: mod_base = OTHER; note = 2'-O-methylguanosine-3'-phosphate
  modified_base 15: mod_base = OTHER; note = 2'-O-methyladenosine-3'-phosphate
  modified_base 16: mod_base = OTHER; note = 2'-O-methylguanosine-3'-phosphate
  modified_base 17: mod_base = OTHER; note = 2'-O-methyluridine-3'-phosphate
  modified_base 18: mod_base = OTHER; note = 2'-O-methylguanosine-3'-phosphate
  modified_base 19: mod_base = OTHER; note = 2'-O-methylcytidine-3'-phosphorothioate
  modified_base 20: mod_base = OTHER; note = 2'-O-methyladenosine-3'-phosphorothioate
  modified_base 21: mod_base = OTHER; note = 2'-O-methyladenosine
gaaccggaggtgggagtgcaa

SEQ ID NO: 2380 - RNA, 21 nt, synthetic construct
  source 1..21: mol_type = other RNA
  modified_base 1: mod_base = OTHER; note = 2'-O-methyluridine-3'-phosphorothioate
  modified_base 2: mod_base = OTHER; note = 2'-O-methylguanosine-3'-phosphorothioate
  modified_base 3: mod_base = OTHER; note = 2'-O-methylguanosine-3'-phosphate
  modified_base 4: mod_base = OTHER; note = 2'-O-methylcytidine-3'-phosphate
  modified_base 5: mod_base = OTHER; note = 2'-O-methylcytidine-3'-phosphate
  modified_base 6: mod_base = OTHER; note = 2'-O-methyladenosine-3'-phosphate
  modified_base 7: mod_base = OTHER; note = 2'-deoxy-2'-fluorocytidine-3'-phosphate
  modified_base 8: mod_base = OTHER; note = 2'-O-methyluridine-3'-phosphate
  modified_base 9: mod_base = OTHER; note = 2'-deoxy-2'-fluorouridine-3'-phosphate
  modified_base 10: mod_base = OTHER; note = 2'-deoxy-2'-fluorocytidine-3'-phosphate
  modified_base 11: mod_base = OTHER; note = 2'-deoxy-2'-fluoroadenosine-3'-phosphate
  modified_base 12: mod_base = OTHER; note = 2'-O-methyluridine-3'-phosphate
  modified_base 13: mod_base = OTHER; note = 2'-O-methylcytidine-3'-phosphate
  modified_base 14: mod_base = OTHER; note = 2'-O-methyladenosine-3'-phosphate
  modified_base 15: mod_base = OTHER; note = 2'-O-methylcytidine-3'-phosphate
  modified_base 16: mod_base = OTHER; note = 2'-O-methylcytidine-3'-phosphate
  modified_base 17: mod_base = OTHER; note = 2'-O-methyluridine-3'-phosphate
  modified_base 18: mod_base = OTHER; note = 2'-O-methyluridine-3'-phosphate
  modified_base 19: mod_base = OTHER; note = 2'-O-methyluridine-3'-phosphorothioate
  modified_base 20: mod_base = OTHER; note = 2'-O-methylguanosine-3'-phosphorothioate
  modified_base 21: mod_base = OTHER; note = 2'-O-methyladenosine
tggccacttcatcacctttga

SEQ ID NO: 2381 - RNA, 21 nt, synthetic construct
  source 1..21: mol_type = other RNA
  modified_base 1: mod_base = OTHER; note = 2'-O-methylcytidine-3'-phosphorothioate
  modified_base 2: mod_base = OTHER; note = 2'-O-methylguanosine-3'-phosphorothioate
  modified_base 3: mod_base = OTHER; note = 2'-O-methyladenosine-3'-phosphate
  modified_base 4: mod_base = OTHER; note = 2'-O-methyluridine-3'-phosphate
  modified_base 5: mod_base = OTHER; note = 2'-O-methylcytidine-3'-phosphate
  modified_base 6: mod_base = OTHER; note = 2'-O-methylguanosine-3'-phosphate
  modified_base 7: mod_base = OTHER; note = 2'-deoxy-2'-fluorocytidine-3'-phosphate
  modified_base 8: mod_base = OTHER; note = 2'-O-methyluridine-3'-phosphate
  modified_base 9: mod_base = OTHER; note = 2'-deoxy-2'-fluoroadenosine-3'-phosphate
  modified_base 10: mod_base = OTHER; note = 2'-deoxy-2'-fluorocytidine-3'-phosphate
  modified_base 11: mod_base = OTHER; note = 2'-deoxy-2'-fluoroadenosine-3'-phosphate
  modified_base 12: mod_base = OTHER; note = 2'-O-methylguanosine-3'-phosphate
  modified_base 13: mod_base = OTHER; note = 2'-O-methylcytidine-3'-phosphate
  modified_base 14: mod_base = OTHER; note = 2'-O-methyluridine-3'-phosphate
  modified_base 15: mod_base = OTHER; note = 2'-O-methyluridine-3'-phosphate
  modified_base 16: mod_base = OTHER; note = 2'-O-methyluridine-3'-phosphate
  modified_base 17: mod_base = OTHER; note = 2'-O-methylguanosine-3'-phosphate
  modified_base 18: mod_base = OTHER; note = 2'-O-methyladenosine-3'-phosphate
  modified_base 19: mod_base = OTHER; note = 2'-O-methyladenosine-3'-phosphorothioate
  modified_base 20: mod_base = OTHER; note = 2'-O-methylguanosine-3'-phosphorothioate
  modified_base 21: mod_base = OTHER; note = 2'-O-methyladenosine
cgatcgctacagctttgaaga

SEQ ID NO: 2382 - RNA, 21 nt, synthetic construct
  source 1..21: mol_type = other RNA
  modified_base 1: mod_base = OTHER; note = 2'-O-methylguanosine-3'-phosphorothioate
  modified_base 2: mod_base = OTHER; note = 2'-O-methylcytidine-3'-phosphorothioate
  modified_base 3: mod_base = OTHER; note = 2'-O-methyluridine-3'-phosphate
  modified_base 4: mod_base = OTHER; note = 2'-O-methylguanosine-3'-phosphate
  modified_base 5: mod_base = OTHER; note = 2'-O-methylcytidine-3'-phosphate
  modified_base 6: mod_base = OTHER; note = 2'-O-methylguanosine-3'-phosphate
  modified_base 7: mod_base = OTHER; note = 2'-deoxy-2'-fluoroadenosine-3'-phosphate
  modified_base 8: mod_base = OTHER; note = 2'-O-methylguanosine-3'-phosphate
  modified_base 9: mod_base = OTHER; note = 2'-deoxy-2'-fluorouridine-3'-phosphate
  modified_base 10: mod_base = OTHER; note = 2'-deoxy-2'-fluoroadenosine-3'-phosphate
  modified_base 11: mod_base = OTHER; note = 2'-deoxy-2'-fluorocytidine-3'-phosphate
  modified_base 12: mod_base = OTHER; note = 2'-O-methyladenosine-3'-phosphate
  modified_base 13: mod_base = OTHER; note = 2'-O-methyluridine-3'-phosphate
  modified_base 14: mod_base = OTHER; note = 2'-O-methylcytidine-3'-phosphate
  modified_base 15: mod_base = OTHER; note = 2'-O-methyluridine-3'-phosphate
  modified_base 16: mod_base = OTHER; note = 2'-O-methyluridine-3'-phosphate
  modified_base 17: mod_base = OTHER; note = 2'-O-methylguanosine-3'-phosphate
  modified_base 18: mod_base = OTHER; note = 2'-O-methylguanosine-3'-phosphate
  modified_base 19: mod_base = OTHER; note = 2'-O-methylcytidine-3'-phosphorothioate
  modified_base 20: mod_base = OTHER; note = 2'-O-methylcytidine-3'-phosphorothioate
  modified_base 21: mod_base = OTHER; note = 2'-O-methyladenosine
gctgcgagtacatcttggcca

SEQ ID NO: 2383 - RNA, 21 nt, synthetic construct
  source 1..21: mol_type = other RNA
  modified_base 1: mod_base = OTHER; note = 2'-O-methylcytidine-3'-phosphorothioate
  modified_base 2: mod_base = OTHER; note = 2'-O-methyluridine-3'-phosphorothioate
  modified_base 3: mod_base = OTHER; note = 2'-O-methyluridine-3'-phosphate
  modified_base 4: mod_base = OTHER; note = 2'-O-methylcytidine-3'-phosphate
  modified_base 5: mod_base = OTHER; note = 2'-O-methylcytidine-3'-phosphate
  modified_base 6: mod_base = OTHER; note = 2'-O-methylguanosine-3'-phosphate
  modified_base 7: mod_base = OTHER; note = 2'-deoxy-2'-fluorocytidine-3'-phosphate
  modified_base 8: mod_base = OTHER; note = 2'-O-methyladenosine-3'-phosphate
  modified_base 9: mod_base = OTHER; note = 2'-deoxy-2'-fluorouridine-3'-phosphate
  modified_base 10: mod_base = OTHER; note = 2'-deoxy-2'-fluorocytidine-3'-phosphate
  modified_base 11: mod_base = OTHER; note = 2'-deoxy-2'-fluoroguanosine-3'-phosphate
  modified_base 12: mod_base = OTHER; note = 2'-O-methyluridine-3'-phosphate
  modified_base 13: mod_base = OTHER; note = 2'-O-methylcytidine-3'-phosphate
  modified_base 14: mod_base = OTHER; note = 2'-O-methyladenosine-3'-phosphate
  modified_base 15: mod_base = OTHER; note = 2'-O-methylcytidine-3'-phosphate
  modified_base 16: mod_base = OTHER; note = 2'-O-methylcytidine-3'-phosphate
  modified_base 17: mod_base = OTHER; note = 2'-O-methylguanosine-3'-phosphate
  modified_base 18: mod_base = OTHER; note = 2'-O-methyladenosine-3'-phosphate
  modified_base 19: mod_base = OTHER; note = 2'-O-methylguanosine-3'-phosphorothioate
  modified_base 20: mod_base = OTHER; note = 2'-O-methyladenosine-3'-phosphorothioate
  modified_base 21: mod_base = OTHER; note = 2'-O-methyladenosine
cttccgcatcgtcaccgagaa

SEQ ID NO: 2384 - RNA, 21 nt, synthetic construct
  source 1..21: mol_type = other RNA
  modified_base 1: mod_base = OTHER; note = 2'-O-methylguanosine-3'-phosphorothioate
  modified_base 2: mod_base = OTHER; note = 2'-O-methylcytidine-3'-phosphorothioate
  modified_base 3: mod_base = OTHER; note = 2'-O-methylcytidine-3'-phosphate
  modified_base 4: mod_base = OTHER; note = 2'-O-methyladenosine-3'-phosphate
  modified_base 5: mod_base = OTHER; note = 2'-O-methyluridine-3'-phosphate
  modified_base 6: mod_base = OTHER; note = 2'-O-methylcytidine-3'-phosphate
  modified_base 7: mod_base = OTHER; note = 2'-deoxy-2'-fluoroadenosine-3'-phosphate
  modified_base 8: mod_base = OTHER; note = 2'-O-methyladenosine-3'-phosphate
  modified_base 9: mod_base = OTHER; note = 2'-deoxy-2'-fluoroguanosine-3'-phosphate
  modified_base 10: mod_base = OTHER; note = 2'-deoxy-2'-fluorocytidine-3'-phosphate
  modified_base 11: mod_base = OTHER; note = 2'-deoxy-2'-fluorouridine-3'-phosphate
  modified_base 12: mod_base = OTHER; note = 2'-O-methylcytidine-3'-phosphate
  modified_base 13: mod_base = OTHER; note = 2'-O-methyluridine-3'-phosphate
  modified_base 14: mod_base = OTHER; note = 2'-O-methyluridine-3'-phosphate
  modified_base 15: mod_base = OTHER; note = 2'-O-methylcytidine-3'-phosphate
  modified_base 16: mod_base = OTHER; note = 2'-O-methylguanosine-3'-phosphate
  modified_base 17: mod_base = OTHER; note = 2'-O-methyluridine-3'-phosphate
  modified_base 18: mod_base = OTHER; note = 2'-O-methylguanosine-3'-phosphate
  modified_base 19: mod_base = OTHER; note = 2'-O-methylguanosine-3'-phosphorothioate
  modified_base 20: mod_base = OTHER; note = 2'-O-methyladenosine-3'-phosphorothioate
  modified_base 21: mod_base = OTHER; note = 2'-O-methyladenosine
gccatcaagctcttcgtggaa

SEQ ID NO: 2385 - RNA, 21 nt, synthetic construct
  source 1..21: mol_type = other RNA
  modified_base 1: mod_base = OTHER; note = 2'-O-methyluridine-3'-phosphorothioate
  modified_base 2: mod_base = OTHER; note = 2'-O-methyladenosine-3'-phosphorothioate
  modified_base 3: mod_base = OTHER; note = 2'-O-methylcytidine-3'-phosphate
  modified_base 4: mod_base = OTHER; note = 2'-O-methylguanosine-3'-phosphate
  modified_base 5: mod_base = OTHER; note = 2'-O-methyladenosine-3'-phosphate
  modified_base 6: mod_base = OTHER; note = 2'-O-methylguanosine-3'-phosphate
  modified_base 7: mod_base = OTHER; note = 2'-deoxy-2'-fluorocytidine-3'-phosphate
  modified_base 8: mod_base = OTHER; note = 2'-O-methyluridine-3'-phosphate
  modified_base 9: mod_base = OTHER; note = 2'-deoxy-2'-fluoroguanosine-3'-phosphate
  modified_base 10: mod_base = OTHER; note = 2'-deoxy-2'-fluoroadenosine-3'-phosphate
  modified_base 11: mod_base = OTHER; note = 2'-deoxy-2'-fluorouridine-3'-phosphate
  modified_base 12: mod_base = OTHER; note = 2'-O-methylcytidine-3'-phosphate
  modified_base 13: mod_base = OTHER; note = 2'-O-methylcytidine-3'-phosphate
  modified_base 14: mod_base = OTHER; note = 2'-O-methyluridine-3'-phosphate
  modified_base 15: mod_base = OTHER; note = 2'-O-methylcytidine-3'-phosphate
  modified_base 16: mod_base = OTHER; note = 2'-O-methylcytidine-3'-phosphate
  modified_base 17: mod_base = OTHER; note = 2'-O-methyladenosine-3'-phosphate
  modified_base 18: mod_base = OTHER; note = 2'-O-methyladenosine-3'-phosphate
  modified_base 19: mod_base = OTHER; note = 2'-O-methylguanosine-3'-phosphorothioate
  modified_base 20: mod_base = OTHER; note = 2'-O-methyladenosine-3'-phosphorothioate
  modified_base 21: mod_base = OTHER; note = 2'-O-methyladenosine
tacgagctgatcctccaagaa

SEQ ID NO: 2386 - RNA, 21 nt, synthetic construct
  source 1..21: mol_type = other RNA
  modified_base 1: mod_base = OTHER; note = 2'-O-methylguanosine-3'-phosphorothioate
  modified_base 2: mod_base = OTHER; note = 2'-O-methyladenosine-3'-phosphorothioate
  modified_base 3: mod_base = OTHER; note = 2'-O-methylcytidine-3'-phosphate
  modified_base 4: mod_base = OTHER; note = 2'-O-methylcytidine-3'-phosphate
  modified_base 5: mod_base = OTHER; note = 2'-O-methyluridine-3'-phosphate
  modified_base 6: mod_base = OTHER; note = 2'-O-methyluridine-3'-phosphate
  modified_base 7: mod_base = OTHER; note = 2'-deoxy-2'-fluorouridine-3'-phosphate
  modified_base 8: mod_base = OTHER; note = 2'-O-methyladenosine-3'-phosphate
  modified_base 9: mod_base = OTHER; note = 2'-deoxy-2'-fluoroadenosine-3'-phosphate
  modified_base 10: mod_base = OTHER; note = 2'-deoxy-2'-fluoroguanosine-3'-phosphate
  modified_base 11: mod_base = OTHER; note = 2'-deoxy-2'-fluoroguanosine-3'-phosphate
  modified_base 12: mod_base = OTHER; note = 2'-O-methylcytidine-3'-phosphate
  modified_base 13: mod_base = OTHER; note = 2'-O-methylguanosine-3'-phosphate
  modified_base 14: mod_base = OTHER; note = 2'-O-methylguanosine-3'-phosphate
  modified_base 15: mod_base = OTHER; note = 2'-O-methyluridine-3'-phosphate
  modified_base 16: mod_base = OTHER; note = 2'-O-methylguanosine-3'-phosphate
  modified_base 17: mod_base = OTHER; note = 2'-O-methylguanosine-3'-phosphate
  modified_base 18: mod_base = OTHER; note = 2'-O-methylcytidine-3'-phosphate
  modified_base 19: mod_base = OTHER; note = 2'-O-methylguanosine-3'-phosphorothioate
  modified_base 20: mod_base = OTHER; note = 2'-O-methyladenosine-3'-phosphorothioate
  modified_base 21: mod_base = OTHER; note = 2'-O-methyladenosine
gacctttaaggcggtggcgaa

SEQ ID NO: 2387 - RNA, 21 nt, synthetic construct
  source 1..21: mol_type = other RNA
  modified_base 1: mod_base = OTHER; note = 2'-O-methyladenosine-3'-phosphorothioate
  modified_base 2: mod_base = OTHER; note = 2'-O-methylcytidine-3'-phosphorothioate
  modified_base 3: mod_base = OTHER; note = 2'-O-methylcytidine-3'-phosphate
  modified_base 4: mod_base = OTHER; note = 2'-O-methylcytidine-3'-phosphate
  modified_base 5: mod_base = OTHER; note = 2'-O-methyluridine-3'-phosphate
  modified_base 6: mod_base = OTHER; note = 2'-O-methyladenosine-3'-phosphate
  modified_base 7: mod_base = OTHER; note = 2'-deoxy-2'-fluorocytidine-3'-phosphate
  modified_base 8: mod_base = OTHER; note = 2'-O-methyladenosine-3'-phosphate
  modified_base 9: mod_base = OTHER; note = 2'-deoxy-2'-fluoroadenosine-3'-phosphate
  modified_base 10: mod_base = OTHER; note = 2'-deoxy-2'-fluoroguanosine-3'-phosphate
  modified_base 11: mod_base = OTHER; note = 2'-deoxy-2'-fluoroadenosine-3'-phosphate
  modified_base 12: mod_base = OTHER; note = 2'-O-methyluridine-3'-phosphate
  modified_base 13: mod_base = OTHER; note = 2'-O-methyladenosine-3'-phosphate
  modified_base 14: mod_base = OTHER; note = 2'-O-methylcytidine-3'-phosphate
  modified_base 15: mod_base = OTHER; note = 2'-O-methylguanosine-3'-phosphate
  modified_base 16: mod_base = OTHER; note = 2'-O-methylcytidine-3'-phosphate
  modified_base 17: mod_base = OTHER; note = 2'-O-methyluridine-3'-phosphate
  modified_base 18: mod_base = OTHER; note = 2'-O-methyladenosine-3'-phosphate
  modified_base 19: mod_base = OTHER; note = 2'-O-methylcytidine-3'-phosphorothioate
  modified_base 20: mod_base = OTHER; note = 2'-O-methyladenosine-3'-phosphorothioate
  modified_base 21: mod_base = OTHER; note = 2'-O-methyladenosine
accctacaagatacgctacaa

SEQ ID NO: 2388 - RNA, 21 nt, synthetic construct
  source 1..21: mol_type = other RNA
  modified_base 1: mod_base = OTHER; note = 2'-O-methyluridine-3'-phosphorothioate
  modified_base 2: mod_base = OTHER; note = 2'-O-methyluridine-3'-phosphorothioate
  modified_base 3: mod_base = OTHER; note = 2'-O-methylcytidine-3'-phosphate
  modified_base 4: mod_base = OTHER; note = 2'-O-methylcytidine-3'-phosphate
  modified_base 5: mod_base = OTHER; note = 2'-O-methyluridine-3'-phosphate
  modified_base 6: mod_base = OTHER; note = 2'-O-methylguanosine-3'-phosphate
  modified_base 7: mod_base = OTHER; note = 2'-deoxy-2'-fluoroguanosine-3'-phosphate
  modified_base 8: mod_base = OTHER; note = 2'-O-methyluridine-3'-phosphate
  modified_base 9: mod_base = OTHER; note = 2'-deoxy-2'-fluorocytidine-3'-phosphate
  modified_base 10: mod_base = OTHER; note = 2'-deoxy-2'-fluoroadenosine-3'-phosphate
  modified_base 11: mod_base = OTHER; note = 2'-deoxy-2'-fluorouridine-3'-phosphate
  modified_base 12: mod_base = OTHER; note = 2'-O-methylcytidine-3'-phosphate
  modified_base 13: mod_base = OTHER; note = 2'-O-methylguanosine-3'-phosphate
  modified_base 14: mod_base = OTHER; note = 2'-O-methyladenosine-3'-phosphate
  modified_base 15: mod_base = OTHER; note = 2'-O-methylguanosine-3'-phosphate
  modified_base 16: mod_base = OTHER; note = 2'-O-methyladenosine-3'-phosphate
  modified_base 17: mod_base = OTHER; note = 2'-O-methylcytidine-3'-phosphate
  modified_base 18: mod_base = OTHER; note = 2'-O-methylcytidine-3'-phosphate
  modified_base 19: mod_base = OTHER; note = 2'-O-methylcytidine-3'-phosphorothioate
  modified_base 20: mod_base = OTHER; note = 2'-O-methyladenosine-3'-phosphorothioate
  modified_base 21: mod_base = OTHER; note = 2'-O-methyladenosine
ttcctggtcatcgagacccaa

SEQ ID NO: 2389 - RNA, 21 nt, synthetic construct
  source 1..21: mol_type = other RNA
  modified_base 1: mod_base = OTHER; note = 2'-O-methylcytidine-3'-phosphorothioate
  modified_base 2: mod_base = OTHER; note = 2'-O-methylcytidine-3'-phosphorothioate
  modified_base 3: mod_base = OTHER; note = 2'-O-methyladenosine-3'-phosphate
  modified_base 4: mod_base = OTHER; note = 2'-O-methylguanosine-3'-phosphate
  modified_base 5: mod_base = OTHER; note = 2'-O-methylcytidine-3'-phosphate
  modified_base 6: mod_base = OTHER; note = 2'-O-methylguanosine-3'-phosphate
  modified_base 7: mod_base = OTHER; note = 2'-deoxy-2'-fluorouridine-3'-phosphate
  modified_base 8: mod_base = OTHER; note = 2'-O-methylguanosine-3'-phosphate
  modified_base 9: mod_base = OTHER; note = 2'-deoxy-2'-fluorouridine-3'-phosphate
  modified_base 10: mod_base = OTHER; note = 2'-deoxy-2'-fluorouridine-3'-phosphate
  modified_base 11: mod_base = OTHER; note = 2'-deoxy-2'-fluorocytidine-3'-phosphate
  modified_base 12: mod_base = OTHER; note = 2'-O-methyladenosine-3'-phosphate
  modified_base 13: mod_base = OTHER; note = 2'-O-methyluridine-3'-phosphate
  modified_base 14: mod_base = OTHER; note = 2'-O-methylcytidine-3'-phosphate
  modified_base 15: mod_base = OTHER; note = 2'-O-methylcytidine-3'-phosphate
  modified_base 16: mod_base = OTHER; note = 2'-O-methylguanosine-3'-phosphate
  modified_base 17: mod_base = OTHER; note = 2'-O-methyladenosine-3'-phosphate
  modified_base 18: mod_base = OTHER; note = 2'-O-methylcytidine-3'-phosphate
  modified_base 19: mod_base = OTHER; note = 2'-O-methyluridine-3'-phosphorothioate
  modified_base 20: mod_base = OTHER; note = 2'-O-methylguanosine-3'-phosphorothioate
  modified_base 21: mod_base = OTHER; note = 2'-O-methyladenosine
ccagcgtgttcatccgactga

SEQ ID NO: 2390 - RNA, 21 nt, synthetic construct
  source 1..21: mol_type = other RNA
  modified_base 1: mod_base = OTHER; note = 2'-O-methylcytidine-3'-phosphorothioate
  modified_base 2: mod_base = OTHER; note = 2'-O-methyladenosine-3'-phosphorothioate
  modified_base 3: mod_base = OTHER; note = 2'-O-methylguanosine-3'-phosphate
  modified_base 4: mod_base = OTHER; note = 2'-O-methylguanosine-3'-phosphate
  modified_base 5: mod_base = OTHER; note = 2'-O-methyladenosine-3'-phosphate
  modified_base 6: mod_base = OTHER; note = 2'-O-methylcytidine-3'-phosphate
  modified_base 7: mod_base = OTHER; note = 2'-deoxy-2'-fluorouridine-3'-phosphate
  modified_base 8: mod_base = OTHER; note = 2'-O-methyladenosine-3'-phosphate
  modified_base 9: mod_base = OTHER; note = 2'-deoxy-2'-fluorocytidine-3'-phosphate
  modified_base 10: mod_base = OTHER; note = 2'-deoxy-2'-fluoroadenosine-3'-phosphate
  modified_base 11: mod_base = OTHER; note = 2'-deoxy-2'-fluoroadenosine-3'-phosphate
  modified_base 12: mod_base = OTHER; note = 2'-O-methylguanosine-3'-phosphate
  modified_base 13: mod_base = OTHER; note = 2'-O-methylguanosine-3'-phosphate
  modified_base 14: mod_base = OTHER; note = 2'-O-methylguanosine-3'-phosphate
  modified_base 15: mod_base = OTHER; note = 2'-O-methylcytidine-3'-phosphate
  modified_base 16: mod_base = OTHER; note = 2'-O-methyladenosine-3'-phosphate
  modified_base 17: mod_base = OTHER; note = 2'-O-methylguanosine-3'-phosphate
  modified_base 18: mod_base = OTHER; note = 2'-O-methylguanosine-3'-phosphate
  modified_base 19: mod_base = OTHER; note = 2'-O-methylguanosine-3'-phosphorothioate
  modified_base 20: mod_base = OTHER; note = 2'-O-methyluridine-3'-phosphorothioate
  modified_base 21: mod_base = OTHER; note = 2'-O-methyladenosine
caggactacaagggcagggta

SEQ ID NO: 2391 - RNA, 21 nt, synthetic construct
  source 1..21: mol_type = other RNA
  modified_base 1: mod_base = OTHER; note = 2'-O-methylguanosine-3'-phosphorothioate
  modified_base 2: mod_base = OTHER; note = 2'-O-methylguanosine-3'-phosphorothioate
  modified_base 3: mod_base = OTHER; note = 2'-O-methylguanosine-3'-phosphate
  modified_base 4: mod_base = OTHER; note = 2'-O-methyladenosine-3'-phosphate
  modified_base 5: mod_base = OTHER; note = 2'-O-methyladenosine-3'-phosphate
  modified_base 6: mod_base = OTHER; note = 2'-O-methylcytidine-3'-phosphate
  modified_base 7: mod_base = OTHER; note = 2'-deoxy-2'-fluorouridine-3'-phosphate
  modified_base 8: mod_base = OTHER; note = 2'-O-methyluridine-3'-phosphate
  modified_base 9: mod_base = OTHER; note = 2'-deoxy-2'-fluorocytidine-3'-phosphate
  modified_base 10: mod_base = OTHER; note = 2'-deoxy-2'-fluoroguanosine-3'-phosphate
  modified_base 11: mod_base = OTHER; note = 2'-deoxy-2'-fluoroadenosine-3'-phosphate
  modified_base 12: mod_base = OTHER; note = 2'-O-methylcytidine-3'-phosphate
  modified_base 13: mod_base = OTHER; note = 2'-O-methylguanosine-3'-phosphate
  modified_base 14: mod_base = OTHER; note = 2'-O-methyladenosine-3'-phosphate
  modified_base 15: mod_base = OTHER; note = 2'-O-methylcytidine-3'-phosphate
  modified_base 16: mod_base = OTHER; note = 2'-O-methyladenosine-3'-phosphate
  modified_base 17: mod_base = OTHER; note = 2'-O-methyladenosine-3'-phosphate
  modified_base 18: mod_base = OTHER; note = 2'-O-methyluridine-3'-phosphate
  modified_base 19: mod_base = OTHER; note = 2'-O-methylguanosine-3'-phosphorothioate
  modified_base 20: mod_base = OTHER; note = 2'-O-methylcytidine-3'-phosphorothioate
  modified_base 21: mod_base = OTHER; note = 2'-O-methyladenosine
gggaacttcgacgacaatgca

SEQ ID NO: 2392 - RNA, 21 nt, synthetic construct
  source 1..21: mol_type = other RNA
  modified_base 1: mod_base = OTHER; note = 2'-O-methylcytidine-3'-phosphorothioate
  modified_base 2: mod_base = OTHER; note = 2'-O-methyladenosine-3'-phosphorothioate
  modified_base 3: mod_base = OTHER; note = 2'-O-methyladenosine-3'-phosphate
  modified_base 4: mod_base = OTHER; note = 2'-O-methyluridine-3'-phosphate
  modified_base 5: mod_base = OTHER; note = 2'-O-methylguanosine-3'-phosphate
  modified_base 6: mod_base = OTHER; note = 2'-O-methyladenosine-3'-phosphate
  modified_base 7: mod_base = OTHER; note = 2'-deoxy-2'-fluorocytidine-3'-phosphate
  modified_base 8: mod_base = OTHER; note = 2'-O-methyluridine-3'-phosphate
  modified_base 9: mod_base = OTHER; note = 2'-deoxy-2'-fluorouridine-3'-phosphate
  modified_base 10: mod_base = OTHER; note = 2'-deoxy-2'-fluorouridine-3'-phosphate
  modified_base 11: mod_base = OTHER; note = 2'-deoxy-2'-fluoroguanosine-3'-phosphate
  modified_base 12: mod_base = OTHER; note = 2'-O-methylcytidine-3'-phosphate
  modified_base 13: mod_base = OTHER; note = 2'-O-methylcytidine-3'-phosphate
  modified_base 14: mod_base = OTHER; note = 2'-O-methyladenosine-3'-phosphate
  modified_base 15: mod_base = OTHER; note = 2'-O-methylcytidine-3'-phosphate
  modified_base 16: mod_base = OTHER; note = 2'-O-methylguanosine-3'-phosphate
  modified_base 17: mod_base = OTHER; note = 2'-O-methylcytidine-3'-phosphate
  modified_base 18: mod_base = OTHER; note = 2'-O-methylguanosine-3'-phosphate
  modified_base 19: mod_base = OTHER; note = 2'-O-methyluridine-3'-phosphorothioate
  modified_base 20: mod_base = OTHER; note = 2'-O-methyladenosine-3'-phosphorothioate
  modified_base 21: mod_base = OTHER; note = 2'-O-methyladenosine
caatgactttgccacgcgtaa

SEQ ID NO: 2393 - RNA, 21 nt, synthetic construct
  source 1..21: mol_type = other RNA
  modified_base 1: mod_base = OTHER; note = 2'-O-methylguanosine-3'-phosphorothioate
  modified_base 2: mod_base = OTHER; note = 2'-O-methylcytidine-3'-phosphorothioate
  modified_base 3: mod_base = OTHER; note = 2'-O-methyladenosine-3'-phosphate
  modified_base 4: mod_base = OTHER; note = 2'-O-methylcytidine-3'-phosphate
  modified_base 5: mod_base = OTHER; note = 2'-O-methyluridine-3'-phosphate
  modified_base 6: mod_base = OTHER; note = 2'-O-methylguanosine-3'-phosphate
  modified_base 7: mod_base = OTHER; note = 2'-deoxy-2'-fluoroguanosine-3'-phosphate
  modified_base 8: mod_base = OTHER; note = 2'-O-methyladenosine-3'-phosphate
  modified_base 9: mod_base = OTHER; note = 2'-deoxy-2'-fluoroguanosine-3'-phosphate
  modified_base 10: mod_base = OTHER; note = 2'-deoxy-2'-fluorouridine-3'-phosphate
  modified_base 11: mod_base = OTHER; note = 2'-deoxy-2'-fluorouridine-3'-phosphate
  modified_base 12: mod_base = OTHER; note = 2'-O-methyluridine-3'-phosphate
  modified_base 13: mod_base = OTHER; note = 2'-O-methylguanosine-3'-phosphate
  modified_base 14: mod_base = OTHER; note = 2'-O-methylguanosine-3'-phosphate
  modified_base 15: mod_base = OTHER; note = 2'-O-methylguanosine-3'-phosphate
  modified_base 16: mod_base = OTHER; note = 2'-O-methyladenosine-3'-phosphate
  modified_base 17: mod_base = OTHER; note = 2'-O-methyladenosine-3'-phosphate
  modified_base 18: mod_base = OTHER; note = 2'-O-methylcytidine-3'-phosphate
  modified_base 19: mod_base = OTHER; note = 2'-O-methyladenosine-3'-phosphorothioate
  modified_base 20: mod_base = OTHER; note = 2'-O-methylguanosine-3'-phosphorothioate
  modified_base 21: mod_base = OTHER; note = 2'-O-methyladenosine
gcactggagtttgggaacaga

SEQ ID NO: 2394 - RNA, 21 nt, synthetic construct
  source 1..21: mol_type = other RNA
  modified_base 1: mod_base = OTHER; note = 2'-O-methylguanosine-3'-phosphorothioate
  modified_base 2: mod_base = OTHER; note = 2'-O-methylguanosine-3'-phosphorothioate
  modified_base 3: mod_base = OTHER; note = 2'-O-methylcytidine-3'-phosphate
  modified_base 4: mod_base = OTHER; note = 2'-O-methylcytidine-3'-phosphate
  modified_base 5: mod_base = OTHER; note = 2'-O-methylcytidine-3'-phosphate
  modified_base 6: mod_base = OTHER; note = 2'-O-methyladenosine-3'-phosphate
  modified_base 7: mod_base = OTHER; note = 2'-deoxy-2'-fluoroguanosine-3'-phosphate
  modified_base 8: mod_base = OTHER; note = 2'-O-methyladenosine-3'-phosphate
  modified_base 9: mod_base = OTHER; note = 2'-deoxy-2'-fluoroadenosine-3'-phosphate
  modified_base 10: mod_base = OTHER; note = 2'-deoxy-2'-fluoroguanosine-3'-phosphate
  modified_base 11: mod_base = OTHER; note = 2'-deoxy-2'-fluorocytidine-3'-phosphate
  modified_base 12: mod_base = OTHER; note = 2'-O-methyladenosine-3'-phosphate
  modified_base 13: mod_base = OTHER; note = 2'-O-methylguanosine-3'-phosphate
  modified_base 14: mod_base = OTHER; note = 2'-O-methyluridine-3'-phosphate
  modified_base 15: mod_base = OTHER; note = 2'-O-methylguanosine-3'-phosphate
  modified_base 16: mod_base = OTHER; note = 2'-O-methylcytidine-3'-phosphate
  modified_base 17: mod_base = OTHER; note = 2'-O-methyladenosine-3'-phosphate
  modified_base 18: mod_base = OTHER; note = 2'-O-methylguanosine-3'-phosphate
  modified_base 19: mod_base = OTHER; note = 2'-O-methylcytidine-3'-phosphorothioate
  modified_base 20: mod_base = OTHER; note = 2'-O-methyladenosine-3'-phosphorothioate
  modified_base 21: mod_base = OTHER; note = 2'-O-methyladenosine
ggcccagaagcagtgcagcaa

SEQ ID NO: 2395 - RNA, 21 nt, synthetic construct
  source 1..21: mol_type = other RNA
  modified_base 1: mod_base = OTHER; note = 2'-O-methylcytidine-3'-phosphorothioate
  modified_base 2: mod_base = OTHER; note = 2'-O-methylcytidine-3'-phosphorothioate
  modified_base 3: mod_base = OTHER; note = 2'-O-methyladenosine-3'-phosphate
  modified_base 4: mod_base = OTHER; note = 2'-O-methylguanosine-3'-phosphate
  modified_base 5: mod_base = OTHER; note = 2'-O-methylguanosine-3'-phosphate
  modified_base 6: mod_base = OTHER; note = 2'-O-methyluridine-3'-phosphate
  modified_base 7: mod_base = OTHER; note = 2'-deoxy-2'-fluorouridine-3'-phosphate
  modified_base 8: mod_base = OTHER; note = 2'-O-methylguanosine-3'-phosphate
  modified_base 9: mod_base = OTHER; note = 2'-deoxy-2'-fluoroadenosine-3'-phosphate
  modified_base 10: mod_base = OTHER; note = 2'-deoxy-2'-fluorocytidine-3'-phosphate
  modified_base 11: mod_base = OTHER; note = 2'-deoxy-2'-fluorouridine-3'-phosphate
  modified_base 12: mod_base = OTHER; note = 2'-O-methylcytidine-3'-phosphate
  modified_base 13: mod_base = OTHER; note = 2'-O-methylcytidine-3'-phosphate
  modified_base 14: mod_base = OTHER; note = 2'-O-methyladenosine-3'-phosphate
  modified_base 15: mod_base = OTHER; note = 2'-O-methylcytidine-3'-phosphate
  modified_base 16: mod_base = OTHER; note = 2'-O-methylcytidine-3'-phosphate
  modified_base 17: mod_base = OTHER; note = 2'-O-methyladenosine-3'-phosphate
  modified_base 18: mod_base = OTHER; note = 2'-O-methyladenosine-3'-phosphate
  modified_base 19: mod_base = OTHER; note = 2'-O-methylguanosine-3'-phosphorothioate
  modified_base 20: mod_base = OTHER; note = 2'-O-methyluridine-3'-phosphorothioate
  modified_base 21: mod_base = OTHER; note = 2'-O-methyladenosine
ccaggttgactccaccaagta

SEQ ID NO: 2396 - RNA, 21 nt, synthetic construct
  source 1..21: mol_type = other RNA
  modified_base 1: mod_base = OTHER; note = 2'-O-methylcytidine-3'-phosphorothioate
  modified_base 2: mod_base = OTHER; note = 2'-O-methylguanosine-3'-phosphorothioate
  modified_base 3: mod_base = OTHER; note = 2'-O-methyladenosine-3'-phosphate
  modified_base 4: mod_base = OTHER; note = 2'-O-methylguanosine-3'-phosphate
  modified_base 5: mod_base = OTHER; note = 2'-O-methylguanosine-3'-phosphate
  modified_base 6: mod_base = OTHER; note = 2'-O-methylcytidine-3'-phosphate
  modified_base 7: mod_base = OTHER; note = 2'-deoxy-2'-fluorocytidine-3'-phosphate
  modified_base 8: mod_base = OTHER; note = 2'-O-methyluridine-3'-phosphate
  modified_base 9: mod_base = OTHER; note = 2'-deoxy-2'-fluoroguanosine-3'-phosphate
  modified_base 10: mod_base = OTHER; note = 2'-deoxy-2'-fluorocytidine-3'-phosphate
  modified_base 11: mod_base = OTHER; note = 2'-deoxy-2'-fluoroguanosine-3'-phosphate
  modified_base 12: mod_base = OTHER; note = 2'-O-methyluridine-3'-phosphate
  modified_base 13: mod_base = OTHER; note = 2'-O-methylguanosine-3'-phosphate
  modified_base 14: mod_base = OTHER; note = 2'-O-methyladenosine-3'-phosphate
  modified_base 15: mod_base = OTHER; note = 2'-O-methyladenosine-3'-phosphate
  modified_base 16: mod_base = OTHER; note = 2'-O-methylcytidine-3'-phosphate
  modified_base 17: mod_base = OTHER; note = 2'-O-methylguanosine-3'-phosphate
  modified_base 18: mod_base = OTHER; note = 2'-O-methyladenosine-3'-phosphate
  modified_base 19: mod_base = OTHER; note = 2'-O-methylcytidine-3'-phosphorothioate
  modified_base 20: mod_base = OTHER; note = 2'-O-methylguanosine-3'-phosphorothioate
  modified_base 21: mod_base = OTHER; note = 2'-O-methyladenosine
cgaggcctgcgtgaacgacga

SEQ ID NO: 2397 - RNA, 21 nt, synthetic construct
  source 1..21: mol_type = other RNA
  modified_base 1: mod_base = OTHER; note = 2'-O-methyladenosine-3'-phosphorothioate
  modified_base 2: mod_base = OTHER; note = 2'-O-methylcytidine-3'-phosphorothioate
  modified_base 3: mod_base = OTHER; note = 2'-O-methyluridine-3'-phosphate
  modified_base 4: mod_base = OTHER; note = 2'-O-methylguanosine-3'-phosphate
  modified_base 5: mod_base = OTHER; note = 2'-O-methylcytidine-3'-phosphate
  modified_base 6: mod_base = OTHER; note = 2'-O-methylguanosine-3'-phosphate
  modified_base 7: mod_base = OTHER; note = 2'-deoxy-2'-fluoroadenosine-3'-phosphate
  modified_base 8: mod_base = OTHER; note = 2'-O-methylguanosine-3'-phosphate
  modified_base 9: mod_base = OTHER; note = 2'-deoxy-2'-fluorouridine-3'-phosphate
  modified_base 10: mod_base = OTHER; note = 2'-deoxy-2'-fluoroguanosine-3'-phosphate
  modified_base 11: mod_base = OTHER; note = 2'-deoxy-2'-fluorouridine-3'-phosphate
  modified_base 12: mod_base = OTHER; note = 2'-O-methyluridine-3'-phosphate
  modified_base 13: mod_base = OTHER; note = 2'-O-methyluridine-3'-phosphate
  modified_base 14: mod_base = OTHER; note = 2'-O-methylcytidine-3'-phosphate
  modified_base 15: mod_base = OTHER; note = 2'-O-methyluridine-3'-phosphate
  modified_base 16: mod_base = OTHER; note = 2'-O-methylguanosine-3'-phosphate
  modified_base 17: mod_base = OTHER; note = 2'-O-methylcytidine-3'-phosphate
  modified_base 18: mod_base = OTHER; note = 2'-O-methyladenosine-3'-phosphate
  modified_base 19: mod_base = OTHER; note = 2'-O-methylcytidine-3'-phosphorothioate
  modified_base 20: mod_base = OTHER; note = 2'-O-methylguanosine-3'-phosphorothioate
  modified_base 21: mod_base = OTHER; note = 2'-O-methyladenosine
actgcgagtgtttctgcacga

SEQ ID NO: 2398 - RNA, 21 nt, synthetic construct
  source 1..21: mol_type = other RNA
  modified_base 1: mod_base = OTHER; note = 2'-O-methyluridine-3'-phosphorothioate
  modified_base 2: mod_base = OTHER; note = 2'-O-methylguanosine-3'-phosphorothioate
  modified_base 3: mod_base = OTHER; note = 2'-O-methyluridine-3'-phosphate
  modified_base 4: mod_base = OTHER; note = 2'-O-methylguanosine-3'-phosphate
  modified_base 5: mod_base = OTHER; note = 2'-O-methyluridine-3'-phosphate
  modified_base 6: mod_base = OTHER; note = 2'-O-methylguanosine-3'-phosphate
  modified_base 7: mod_base = OTHER; note = 2'-deoxy-2'-fluorouridine-3'-phosphate
  modified_base 8: mod_base = OTHER; note = 2'-O-methylguanosine-3'-phosphate
  modified_base 9: mod_base = OTHER; note = 2'-deoxy-2'-fluorouridine-3'-phosphate
  modified_base 10: mod_base = OTHER; note = 2'-deoxy-2'-fluorocytidine-3'-phosphate
  modified_base 11: mod_base = OTHER; note = 2'-deoxy-2'-fluorocytidine-3'-phosphate
  modified_base 12: mod_base = OTHER; note = 2'-O-methyluridine-3'-phosphate
  modified_base 13: mod_base = OTHER; note = 2'-O-methylguanosine-3'-phosphate
  modified_base 14: mod_base = OTHER; note = 2'-O-methylguanosine-3'-phosphate
  modified_base 15: mod_base = OTHER; note = 2'-O-methylcytidine-3'-phosphate
  modified_base 16: mod_base = OTHER; note = 2'-O-methylguanosine-3'-phosphate
  modified_base 17: mod_base = OTHER; note = 2'-O-methylguanosine-3'-phosphate
  modified_base 18: mod_base = OTHER; note = 2'-O-methyladenosine-3'-phosphate
  modified_base 19: mod_base = OTHER; note = 2'-O-methylcytidine-3'-phosphorothioate
  modified_base 20: mod_base = OTHER; note = 2'-O-methyluridine-3'-phosphorothioate
  modified_base 21: mod_base = OTHER; note = 2'-O-methyladenosine
tgtgtgtgtcctggcggacta

SEQ ID NO: 2399 - RNA, 21 nt, synthetic construct
  source 1..21: mol_type = other RNA
  modified_base 1: mod_base = OTHER; note = 2'-O-methyluridine-3'-phosphorothioate
  modified_base 2: mod_base = OTHER; note = 2'-O-methylguanosine-3'-phosphorothioate
  modified_base 3: mod_base = OTHER; note = 2'-O-methyluridine-3'-phosphate
  modified_base 4: mod_base = OTHER; note = 2'-O-methyluridine-3'-phosphate
  modified_base 5: mod_base = OTHER; note = 2'-O-methylcytidine-3'-phosphate
  modified_base 6: mod_base = OTHER; note = 2'-O-methyluridine-3'-phosphate
  modified_base 7: mod_base = OTHER; note = 2'-deoxy-2'-fluoroguanosine-3'-phosphate
  modified_base 8: mod_base = OTHER; note = 2'-O-methyluridine-3'-phosphate
  modified_base 9: mod_base = OTHER; note = 2'-deoxy-2'-fluoroguanosine-3'-phosphate
  modified_base 10: mod_base = OTHER; note = 2'-deoxy-2'-fluoroadenosine-3'-phosphate
  modified_base 11: mod_base = OTHER; note = 2'-deoxy-2'-fluorocytidine-3'-phosphate
  modified_base 12: mod_base = OTHER; note = 2'-O-methyluridine-3'-phosphate
  modified_base 13: mod_base = OTHER; note = 2'-O-methyluridine-3'-phosphate
  modified_base 14: mod_base = OTHER; note = 2'-O-methylcytidine-3'-phosphate
  modified_base 15: mod_base = OTHER; note = 2'-O-methyluridine-3'-phosphate
  modified_base 16: mod_base = OTHER; note = 2'-O-methyladenosine-3'-phosphate
  modified_base 17: mod_base = OTHER; note = 2'-O-methylcytidine-3'-phosphate
  modified_base 18: mod_base = OTHER; note = 2'-O-methyladenosine-3'-phosphate
  modified_base 19: mod_base = OTHER; note = 2'-O-methyladenosine-3'-phosphorothioate
  modified_base 20: mod_base = OTHER; note = 2'-O-methylcytidine-3'-phosphorothioate
  modified_base 21: mod_base = OTHER; note = 2'-O-methyladenosine
tgttctgtgacttctacaaca

SEQ ID NO: 2400 - RNA, 21 nt, synthetic construct
  source 1..21: mol_type = other RNA
  modified_base 1: mod_base = OTHER; note = 2'-O-methyluridine-3'-phosphorothioate
  modified_base 2: mod_base = OTHER; note = 2'-O-methylguanosine-3'-phosphorothioate
  modified_base 3: mod_base = OTHER; note = 2'-O-methyluridine-3'-phosphate
  modified_base 4: mod_base = OTHER; note = 2'-O-methylguanosine-3'-phosphate
  modified_base 5: mod_base = OTHER; note = 2'-O-methyladenosine-3'-phosphate
  modified_base 6: mod_base = OTHER; note = 2'-O-methylguanosine-3'-phosphate
  modified_base 7: mod_base = OTHER; note = 2'-deoxy-2'-fluorouridine-3'-phosphate
  modified_base 8: mod_base = OTHER; note = 2'-O-methylguanosine-3'-phosphate
  modified_base 9: mod_base = OTHER; note = 2'-deoxy-2'-fluoroguanosine-3'-phosphate
  modified_base 10: mod_base = OTHER; note = 2'-deoxy-2'-fluorocytidine-3'-phosphate
  modified_base 11: mod_base = OTHER; note = 2'-deoxy-2'-fluoroadenosine-3'-phosphate
  modified_base 12: mod_base = OTHER; note = 2'-O-methylcytidine-3'-phosphate
  modified_base 13: mod_base = OTHER; note = 2'-O-methyluridine-3'-phosphate
  modified_base 14: mod_base = OTHER; note = 2'-O-methyladenosine-3'-phosphate
  modified_base 15: mod_base = OTHER; note = 2'-O-methylcytidine-3'-phosphate
  modified_base 16: mod_base = OTHER; note = 2'-O-methylcytidine-3'-phosphate
  modified_base 17: mod_base = OTHER; note = 2'-O-methyladenosine-3'-phosphate
  modified_base 18: mod_base = OTHER; note = 2'-O-methylguanosine-3'-phosphate
  modified_base 19: mod_base = OTHER; note = 2'-O-methylcytidine-3'-phosphorothioate
  modified_base 20: mod_base = OTHER; note = 2'-O-methylcytidine-3'-phosphorothioate
  modified_base 21: mod_base = OTHER; note = 2'-O-methyladenosine
tgtgagtggcactaccagcca

SEQ ID NO: 2401 - RNA, 21 nt, synthetic construct
  source 1..21: mol_type = other RNA
  modified_base 1: mod_base = OTHER; note = 2'-O-methylguanosine-3'-phosphorothioate
  modified_base 2: mod_base = OTHER; note = 2'-O-methylcytidine-3'-phosphorothioate
  modified_base 3: mod_base = OTHER; note = 2'-O-methyluridine-3'-phosphate
  modified_base 4: mod_base = OTHER; note = 2'-O-methylguanosine-3'-phosphate
  modified_base 5: mod_base = OTHER; note = 2'-O-methylcytidine-3'-phosphate
  modified_base 6: mod_base = OTHER; note = 2'-O-methyluridine-3'-phosphate
  modified_base 7: mod_base = OTHER; note = 2'-deoxy-2'-fluoroadenosine-3'-phosphate
  modified_base 8: mod_base = OTHER; note = 2'-O-methylcytidine-3'-phosphate
  modified_base 9: mod_base = OTHER; note = 2'-deoxy-2'-fluorocytidine-3'-phosphate
  modified_base 10: mod_base = OTHER; note = 2'-deoxy-2'-fluorocytidine-3'-phosphate
  modified_base 11: mod_base = OTHER; note = 2'-deoxy-2'-fluoroguanosine-3'-phosphate
  modified_base 12: mod_base = OTHER; note = 2'-O-methyladenosine-3'-phosphate
  modified_base 13: mod_base = OTHER; note = 2'-O-methyladenosine-3'-phosphate
  modified_base 14: mod_base = OTHER; note = 2'-O-methylguanosine-3'-phosphate
  modified_base 15: mod_base = OTHER; note = 2'-O-methyluridine-3'-phosphate
  modified_base 16: mod_base = OTHER; note = 2'-O-methylguanosine-3'-phosphate
  modified_base 17: mod_base = OTHER; note = 2'-O-methylcytidine-3'-phosphate
  modified_base 18: mod_base = OTHER; note = 2'-O-methylcytidine-3'-phosphate
  modified_base 19: mod_base = OTHER; note = 2'-O-methylcytidine-3'-phosphorothioate
  modified_base 20: mod_base = OTHER; note = 2'-O-methyladenosine-3'-phosphorothioate
  modified_base 21: mod_base = OTHER; note = 2'-O-methyladenosine
gctgctacccgaagtgcccaa

SEQ ID NO: 2402 - RNA, 21 nt, synthetic construct
  source 1..21: mol_type = other RNA
  modified_base 1: mod_base = OTHER; note = 2'-O-methyladenosine-3'-phosphorothioate
  modified_base 2: mod_base = OTHER; note = 2'-O-methylguanosine-3'-phosphorothioate
  modified_base 3: mod_base = OTHER; note = 2'-O-methylcytidine-3'-phosphate
  modified_base 4: mod_base = OTHER; note = 2'-O-methylcytidine-3'-phosphate
  modified_base 5: mod_base = OTHER; note = 2'-O-methylcytidine-3'-phosphate
  modified_base 6: mod_base = OTHER; note = 2'-O-methyluridine-3'-phosphate
  modified_base 7: mod_base = OTHER; note = 2'-deoxy-2'-fluorouridine-3'-phosphate
  modified_base 8: mod_base = OTHER; note = 2'-O-methylcytidine-3'-phosphate
  modified_base 9: mod_base = OTHER; note = 2'-deoxy-2'-fluorouridine-3'-phosphate
  modified_base 10: mod_base = OTHER; note = 2'-deoxy-2'-fluorouridine-3'-phosphate
  modified_base 11: mod_base = OTHER; note = 2'-deoxy-2'-fluorocytidine-3'-phosphate
  modified_base 12: mod_base = OTHER; note = 2'-O-methyladenosine-3'-phosphate
  modified_base 13: mod_base = OTHER; note = 2'-O-methyladenosine-3'-phosphate
  modified_base 14: mod_base = OTHER; note = 2'-O-methyluridine-3'-phosphate
  modified_base 15: mod_base = OTHER; note = 2'-O-methylguanosine-3'-phosphate
  modified_base 16: mod_base = OTHER; note = 2'-O-methyladenosine-3'-phosphate
  modified_base 17: mod_base = OTHER; note = 2'-O-methylguanosine-3'-phosphate
  modified_base 18: mod_base = OTHER; note = 2'-O-methylguanosine-3'-phosphate
  modified_base 19: mod_base = OTHER; note = 2'-O-methyladenosine-3'-phosphorothioate
  modified_base 20: mod_base = OTHER; note = 2'-O-methylcytidine-3'-phosphorothioate
  modified_base 21: mod_base = OTHER; note = 2'-O-methyladenosine
agcccttcttcaatgaggaca

SEQ ID NO: 2403 - RNA, 21 nt, synthetic construct
  source 1..21: mol_type = other RNA
  modified_base 1: mod_base = OTHER; note = 2'-O-methyladenosine-3'-phosphorothioate
  modified_base 2: mod_base = OTHER; note = 2'-O-methyladenosine-3'-phosphorothioate
  modified_base 3: mod_base = OTHER; note = 2'-O-methylguanosine-3'-phosphate
  modified_base 4: mod_base = OTHER; note = 2'-O-methyluridine-3'-phosphate
  modified_base 5: mod_base = OTHER; note = 2'-O-methylguanosine-3'-phosphate
  modified_base 6: mod_base = OTHER; note = 2'-O-methylcytidine-3'-phosphate
  modified_base 7: mod_base = OTHER; note = 2'-deoxy-2'-fluoroguanosine-3'-phosphate
  modified_base 8: mod_base = OTHER; note = 2'-O-methyluridine-3'-phosphate
  modified_base 9: mod_base = OTHER; note = 2'-deoxy-2'-fluoroguanosine-3'-phosphate
  modified_base 10: mod_base = OTHER; note = 2'-deoxy-2'-fluoroguanosine-3'-phosphate
  modified_base 11: mod_base = OTHER; note = 2'-deoxy-2'-fluorocytidine-3'-phosphate
  modified_base 12: mod_base = OTHER; note = 2'-O-methylcytidine-3'-phosphate
  modified_base 13: mod_base = OTHER; note = 2'-O-methylcytidine-3'-phosphate
  modified_base 14: mod_base = OTHER; note = 2'-O-methyladenosine-3'-phosphate
  modified_base 15: mod_base = OTHER; note = 2'-O-methylguanosine-3'-phosphate
  modified_base 16: mod_base = OTHER; note = 2'-O-methyluridine-3'-phosphate
  modified_base 17: mod_base = OTHER; note = 2'-O-methylguanosine-3'-phosphate
  modified_base 18: mod_base = OTHER; note = 2'-O-methyluridine-3'-phosphate
  modified_base 19: mod_base = OTHER; note = 2'-O-methylguanosine-3'-phosphorothioate
  modified_base 20: mod_base = OTHER; note = 2'-O-methylguanosine-3'-phosphorothioate
  modified_base 21: mod_base = OTHER; note = 2'-O-methyladenosine
aagtgcgtggcccagtgtgga

SEQ ID NO: 2404 - RNA, 21 nt, synthetic construct
  source 1..21: mol_type = other RNA
  modified_base 1: mod_base = OTHER; note = 2'-O-methylcytidine-3'-phosphorothioate
  modified_base 2: mod_base = OTHER; note = 2'-O-methyluridine-3'-phosphorothioate
  modified_base 3: mod_base = OTHER; note = 2'-O-methyladenosine-3'-phosphate
  modified_base 4: mod_base = OTHER; note = 2'-O-methylcytidine-3'-phosphate
  modified_base 5: mod_base = OTHER; note = 2'-O-methylguanosine-3'-phosphate
  modified_base 6: mod_base = OTHER; note = 2'-O-methyladenosine-3'-phosphate
  modified_base 7: mod_base = OTHER; note = 2'-deoxy-2'-fluorocytidine-3'-phosphate
  modified_base 8: mod_base = OTHER; note = 2'-O-methyladenosine-3'-phosphate
  modified_base 9: mod_base = OTHER; note = 2'-deoxy-2'-fluoroadenosine-3'-phosphate
  modified_base 10: mod_base = OTHER; note = 2'-deoxy-2'-fluoroguanosine-3'-phosphate
  modified_base 11: mod_base = OTHER; note = 2'-deoxy-2'-fluoroguanosine-3'-phosphate
  modified_base 12: mod_base = OTHER; note = 2'-O-methyladenosine-3'-phosphate
  modified_base 13: mod_base = OTHER; note = 2'-O-methylcytidine-3'-phosphate
  modified_base 14: mod_base = OTHER; note = 2'-O-methylguanosine-3'-phosphate
  modified_base 15: mod_base = OTHER; note = 2'-O-methylguanosine-3'-phosphate
  modified_base 16: mod_base = OTHER; note = 2'-O-methyladenosine-3'-phosphate
  modified_base 17: mod_base = OTHER; note = 2'-O-methyladenosine-3'-phosphate
  modified_base 18: mod_base = OTHER; note = 2'-O-methyladenosine-3'-phosphate
  modified_base 19: mod_base = OTHER; note = 2'-O-methylcytidine-3'-phosphorothioate
  modified_base 20: mod_base = OTHER; note = 2'-O-methyluridine-3'-phosphorothioate
  modified_base 21: mod_base = OTHER; note = 2'-O-methyladenosine
ctacgacaaggacggaaacta

SEQ ID NO: 2405 - RNA, 21 nt, synthetic construct
  source 1..21: mol_type = other RNA
  modified_base 1: mod_base = OTHER; note = 2'-O-methyluridine-3'-phosphorothioate
  modified_base 2: mod_base = OTHER; note = 2'-O-methylguanosine-3'-phosphorothioate
  modified_base 3: mod_base = OTHER; note = 2'-O-methyladenosine-3'-phosphate
  modified_base 4: mod_base = OTHER; note = 2'-O-methylcytidine-3'-phosphate
  modified_base 5: mod_base = OTHER; note = 2'-O-methylguanosine-3'-phosphate
  modified_base 6: mod_base = OTHER; note = 2'-O-methyluridine-3'-phosphate
  modified_base 7: mod_base = OTHER; note = 2'-deoxy-2'-fluorocytidine-3'-phosphate
  modified_base 8: mod_base = OTHER; note = 2'-O-methylguanosine-3'-phosphate
  modified_base 9: mod_base = OTHER; note = 2'-deoxy-2'-fluoroguanosine-3'-phosphate
  modified_base 10: mod_base = OTHER; note = 2'-deoxy-2'-fluorouridine-3'-phosphate
  modified_base 11: mod_base = OTHER; note = 2'-deoxy-2'-fluoroguanosine-3'-phosphate
  modified_base 12: mod_base = OTHER; note = 2'-O-methylcytidine-3'-phosphate
  modified_base 13: mod_base = OTHER; note = 2'-O-methyladenosine-3'-phosphate
  modified_base 14: mod_base = OTHER; note = 2'-O-methyladenosine-3'-phosphate
  modified_base 15: mod_base = OTHER; note = 2'-O-methylguanosine-3'-phosphate
  modified_base 16: mod_base = OTHER; note = 2'-O-methylguanosine-3'-phosphate
  modified_base 17: mod_base = OTHER; note = 2'-O-methylguanosine-3'-phosphate
  modified_base 18: mod_base = OTHER; note = 2'-O-methyluridine-3'-phosphate
  modified_base 19: mod_base = OTHER; note = 2'-O-methylcytidine-3'-phosphorothioate
  modified_base 20: mod_base = OTHER; note = 2'-O-methylcytidine-3'-phosphorothioate
  modified_base 21: mod_base = OTHER; note = 2'-O-methyladenosine
tgacgtcggtgcaagggtcca

SEQ ID NO: 2406 - RNA, 21 nt, synthetic construct
  source 1..21: mol_type = other RNA
  modified_base 1: mod_base = OTHER; note = 2'-O-methylcytidine-3'-phosphorothioate
  modified_base 2: mod_base = OTHER; note = 2'-O-methylcytidine-3'-phosphorothioate
  modified_base 3: mod_base = OTHER; note = 2'-O-methyladenosine-3'-phosphate
  modified_base 4: mod_base = OTHER; note = 2'-O-methylguanosine-3'-phosphate
  modified_base 5: mod_base = OTHER; note = 2'-O-methyladenosine-3'-phosphate
  modified_base 6: mod_base = OTHER; note = 2'-O-methylguanosine-3'-phosphate
  modified_base 7: mod_base = OTHER; note = 2'-deoxy-2'-fluorocytidine-3'-phosphate
  modified_base 8: mod_base = OTHER; note = 2'-O-methyluridine-3'-phosphate
  modified_base 9: mod_base = OTHER; note = 2'-deoxy-2'-fluoroguanosine-3'-phosphate
  modified_base 10: mod_base = OTHER; note = 2'-deoxy-2'-fluorouridine-3'-phosphate
  modified_base 11: mod_base = OTHER; note = 2'-deoxy-2'-fluoroadenosine-3'-phosphate
  modified_base 12: mod_base = OTHER; note = 2'-O-methyladenosine-3'-phosphate
  modified_base 13: mod_base = OTHER; note = 2'-O-methylcytidine-3'-phosphate
  modified_base 14: mod_base = OTHER; note = 2'-O-methyluridine-3'-phosphate
  modified_base 15: mod_base = OTHER; note = 2'-O-methylguanosine-3'-phosphate
  modified_base 16: mod_base = OTHER; note = 2'-O-methylcytidine-3'-phosphate
  modified_base 17: mod_base = OTHER; note = 2'-O-methyladenosine-3'-phosphate
  modified_base 18: mod_base = OTHER; note = 2'-O-methylcytidine-3'-phosphate
  modified_base 19: mod_base = OTHER; note = 2'-O-methyladenosine-3'-phosphorothioate
  modified_base 20: mod_base = OTHER; note = 2'-O-methylcytidine-3'-phosphorothioate
  modified_base 21: mod_base = OTHER; note = 2'-O-methyladenosine
ccagagctgtaactgcacaca

SEQ ID NO: 2407 - RNA, 21 nt, synthetic construct
  source 1..21: mol_type = other RNA
  modified_base 1: mod_base = OTHER; note = 2'-O-methylcytidine-3'-phosphorothioate
  modified_base 2: mod_base = OTHER; note = 2'-O-methyladenosine-3'-phosphorothioate
  modified_base 3: mod_base = OTHER; note = 2'-O-methylguanosine-3'-phosphate
  modified_base 4: mod_base = OTHER; note = 2'-O-methyluridine-3'-phosphate
  modified_base 5: mod_base = OTHER; note = 2'-O-methylguanosine-3'-phosphate
  modified_base 6: mod_base = OTHER; note = 2'-O-methylcytidine-3'-phosphate
  modified_base 7: mod_base = OTHER; note = 2'-deoxy-2'-fluoroguanosine-3'-phosphate
  modified_base 8: mod_base = OTHER; note = 2'-O-methylcytidine-3'-phosphate
  modified_base 9: mod_base = OTHER; note = 2'-deoxy-2'-fluorouridine-3'-phosphate
  modified_base 10: mod_base = OTHER; note = 2'-deoxy-2'-fluorocytidine-3'-phosphate
  modified_base 11: mod_base = OTHER; note = 2'-deoxy-2'-fluoroadenosine-3'-phosphate
  modified_base 12: mod_base = OTHER; note = 2'-O-methylcytidine-3'-phosphate
  modified_base 13: mod_base = OTHER; note = 2'-O-methyladenosine-3'-phosphate
  modified_base 14: mod_base = OTHER; note = 2'-O-methylguanosine-3'-phosphate
  modified_base 15: mod_base = OTHER; note = 2'-O-methylcytidine-3'-phosphate
  modified_base 16: mod_base = OTHER; note = 2'-O-methylcytidine-3'-phosphate
  modified_base 17: mod_base = OTHER; note = 2'-O-methyluridine-3'-phosphate
  modified_base 18: mod_base = OTHER; note = 2'-O-methyluridine-3'-phosphate
  modified_base 19: mod_base = OTHER; note = 2'-O-methylguanosine-3'-phosphorothioate
  modified_base 20: mod_base = OTHER; note = 2'-O-methyladenosine-3'-phosphorothioate
  modified_base 21: mod_base = OTHER; note = 2'-O-methyladenosine
cagtgcgctcacagccttgaa

SEQ ID NO: 2408 - RNA, 21 nt, synthetic construct
  source 1..21: mol_type = other RNA
  modified_base 1: mod_base = OTHER; note = 2'-O-methylcytidine-3'-phosphorothioate
  modified_base 2: mod_base = OTHER; note = 2'-O-methyluridine-3'-phosphorothioate
  modified_base 3: mod_base = OTHER; note = 2'-O-methylguanosine-3'-phosphate
  modified_base 4: mod_base = OTHER; note = 2'-O-methylcytidine-3'-phosphate
  modified_base 5: mod_base = OTHER; note = 2'-O-methyladenosine-3'-phosphate
  modified_base 6: mod_base = OTHER; note = 2'-O-methylcytidine-3'-phosphate
  modified_base 7: mod_base = OTHER; note = 2'-deoxy-2'-fluorocytidine-3'-phosphate
  modified_base 8: mod_base = OTHER; note = 2'-O-methyluridine-3'-phosphate
  modified_base 9: mod_base = OTHER; note = 2'-deoxy-2'-fluoroadenosine-3'-phosphate
  modified_base 10: mod_base = OTHER; note = 2'-deoxy-2'-fluorouridine-3'-phosphate
  modified_base 11: mod_base = OTHER; note = 2'-deoxy-2'-fluoroguanosine-3'-phosphate
  modified_base 12: mod_base = OTHER; note = 2'-O-methyladenosine-3'-phosphate
  modified_base 13: mod_base = OTHER; note = 2'-O-methylguanosine-3'-phosphate
  modified_base 14: mod_base = OTHER; note = 2'-O-methylguanosine-3'-phosphate
  modified_base 15: mod_base = OTHER; note = 2'-O-methyladenosine-3'-phosphate
  modified_base 16: mod_base = OTHER; note = 2'-O-methylcytidine-3'-phosphate
  modified_base 17: mod_base = OTHER; note = 2'-O-methyladenosine-3'-phosphate
  modified_base 18: mod_base = OTHER; note = 2'-O-methylguanosine-3'-phosphate
  modified_base 19: mod_base = OTHER; note = 2'-O-methylguanosine-3'-phosphorothioate
  modified_base 20: mod_base = OTHER; note = 2'-O-methyladenosine-3'-phosphorothioate
  modified_base 21: mod_base = OTHER; note = 2'-O-methyladenosine
ctgcacctatgaggacaggaa

SEQ ID NO: 2409 - RNA, 21 nt, synthetic construct
  source 1..21: mol_type = other RNA
  modified_base 1: mod_base = OTHER; note = 2'-O-methylcytidine-3'-phosphorothioate
  modified_base 2: mod_base = OTHER; note = 2'-O-methyladenosine-3'-phosphorothioate
  modified_base 3: mod_base = OTHER; note = 2'-O-methylguanosine-3'-phosphate
  modified_base 4: mod_base = OTHER; note = 2'-O-methylguanosine-3'-phosphate
  modified_base 5: mod_base = OTHER; note = 2'-O-methyladenosine-3'-phosphate
  modified_base 6: mod_base = OTHER; note = 2'-O-methylcytidine-3'-phosphate
  modified_base 7: mod_base = OTHER; note = 2'-deoxy-2'-fluoroguanosine-3'-phosphate
  modified_base 8: mod_base = OTHER; note = 2'-O-methyluridine-3'-phosphate
  modified_base 9: mod_base = OTHER; note = 2'-deoxy-2'-fluorocytidine-3'-phosphate
  modified_base 10: mod_base = OTHER; note = 2'-deoxy-2'-fluoroadenosine-3'-phosphate
  modified_base 11: mod_base = OTHER; note = 2'-deoxy-2'-fluorouridine-3'-phosphate
  modified_base 12: mod_base = OTHER; note = 2'-O-methylcytidine-3'-phosphate
  modified_base 13: mod_base = OTHER; note = 2'-O-methyluridine-3'-phosphate
  modified_base 14: mod_base = OTHER; note = 2'-O-methyladenosine-3'-phosphate
  modified_base 15: mod_base = OTHER; note = 2'-O-methylcytidine-3'-phosphate
  modified_base 16: mod_base = OTHER; note = 2'-O-methyladenosine-3'-phosphate
  modified_base 17: mod_base = OTHER; note = 2'-O-methyladenosine-3'-phosphate
  modified_base 18: mod_base = OTHER; note = 2'-O-methylcytidine-3'-phosphate
  modified_base 19: mod_base = OTHER; note = 2'-O-methyladenosine-3'-phosphorothioate
  modified_base 20: mod_base = OTHER; note = 2'-O-methylcytidine-3'-phosphorothioate
  modified_base 21: mod_base = OTHER; note = 2'-O-methyladenosine
caggacgtcatctacaacaca

SEQ ID NO: 2410 - RNA, 21 nt, synthetic construct
  source 1..21: mol_type = other RNA
  modified_base 1: mod_base = OTHER; note = 2'-O-methylcytidine-3'-phosphorothioate
  modified_base 2: mod_base = OTHER; note = 2'-O-methylguanosine-3'-phosphorothioate
  modified_base 3: mod_base = OTHER; note = 2'-O-methylcytidine-3'-phosphate
  modified_base 4: mod_base = OTHER; note = 2'-O-methylcytidine-3'-phosphate
  modified_base 5: mod_base = OTHER; note = 2'-O-methyluridine-3'-phosphate
  modified_base 6: mod_base = OTHER; note = 2'-O-methylguanosine-3'-phosphate
  modified_base 7: mod_base = OTHER; note = 2'-deoxy-2'-fluorocytidine-3'-phosphate
  modified_base 8: mod_base = OTHER; note = 2'-O-methyluridine-3'-phosphate
  modified_base 9: mod_base = OTHER; note = 2'-deoxy-2'-fluorouridine-3'-phosphate
  modified_base 10: mod_base = OTHER; note = 2'-deoxy-2'-fluoroguanosine-3'-phosphate
  modified_base 11: mod_base = OTHER; note = 2'-deoxy-2'-fluoroadenosine-3'-phosphate
  modified_base 12: mod_base = OTHER; note = 2'-O-methyluridine-3'-phosphate
  modified_base 13: mod_base = OTHER; note = 2'-O-methylcytidine-3'-phosphate
  modified_base 14: mod_base = OTHER; note = 2'-O-methylguanosine-3'-phosphate
  modified_base 15: mod_base = OTHER; note = 2'-O-methylcytidine-3'-phosphate
  modified_base 16: mod_base = OTHER; note = 2'-O-methylcytidine-3'-phosphate
  modified_base 17: mod_base = OTHER; note = 2'-O-methyladenosine-3'-phosphate
  modified_base 18: mod_base = OTHER; note = 2'-O-methyluridine-3'-phosphate
  modified_base 19: mod_base = OTHER; note = 2'-O-methylcytidine-3'-phosphorothioate
  modified_base 20: mod_base = OTHER; note = 2'-O-methyluridine-3'-phosphorothioate
  modified_base 21: mod_base = OTHER; note = 2'-O-methyladenosine
cgcctgcttgatcgccatcta

SEQ ID NO: 2411 - RNA, 21 nt, synthetic construct
  source 1..21: mol_type = other RNA
  modified_base 1: mod_base = OTHER; note = 2'-O-methyladenosine-3'-phosphorothioate
  modified_base 2: mod_base = OTHER; note = 2'-O-methylcytidine-3'-phosphorothioate
  modified_base 3: mod_base = OTHER; note = 2'-O-methylcytidine-3'-phosphate
  modified_base 4: mod_base = OTHER; note = 2'-O-methyladenosine-3'-phosphate
  modified_base 5: mod_base = OTHER; note = 2'-O-methyluridine-3'-phosphate
  modified_base 6: mod_base = OTHER; note = 2'-O-methylcytidine-3'-phosphate
  modified_base 7: mod_base = OTHER; note = 2'-deoxy-2'-fluoroadenosine-3'-phosphate
  modified_base 8: mod_base = OTHER; note = 2'-O-methyluridine-3'-phosphate
  modified_base 9: mod_base = OTHER; note = 2'-deoxy-2'-fluorocytidine-3'-phosphate
  modified_base 10: mod_base = OTHER; note = 2'-deoxy-2'-fluoroadenosine-3'-phosphate
  modified_base 11: mod_base = OTHER; note = 2'-deoxy-2'-fluoroguanosine-3'-phosphate
  modified_base 12: mod_base = OTHER; note = 2'-O-methylguanosine-3'-phosphate
  modified_base 13: mod_base = OTHER; note = 2'-O-methyladenosine-3'-phosphate
  modified_base 14: mod_base = OTHER; note = 2'-O-methyladenosine-3'-phosphate
  modified_base 15: mod_base = OTHER; note = 2'-O-methylguanosine-3'-phosphate
  modified_base 16: mod_base = OTHER; note = 2'-O-methylguanosine-3'-phosphate
  modified_base 17: mod_base = OTHER; note = 2'-O-methylcytidine-3'-phosphate
  modified_base 18: mod_base = OTHER; note = 2'-O-methyluridine-3'-phosphate
  modified_base 19: mod_base = OTHER; note = 2'-O-methylguanosine-3'-phosphorothioate
  modified_base 20: mod_base = OTHER; note = 2'-O-methyluridine-3'-phosphorothioate
  modified_base 21: mod_base = OTHER; note = 2'-O-methyladenosine
accatcatcaggaaggctgta

SEQ ID NO: 2412 - RNA, 21 nt, synthetic construct
  source 1..21: mol_type = other RNA
  modified_base 1: mod_base = OTHER; note = 2'-O-methylcytidine-3'-phosphorothioate
  modified_base 2: mod_base = OTHER; note = 2'-O-methyladenosine-3'-phosphorothioate
  modified_base 3: mod_base = OTHER; note = 2'-O-methylcytidine-3'-phosphate
  modified_base 4: mod_base = OTHER; note = 2'-O-methyladenosine-3'-phosphate
  modified_base 5: mod_base = OTHER; note = 2'-O-methyladenosine-3'-phosphate
  modified_base 6: mod_base = OTHER; note = 2'-O-methylcytidine-3'-phosphate
  modified_base 7: mod_base = OTHER; note = 2'-deoxy-2'-fluoroguanosine-3'-phosphate
  modified_base 8: mod_base = OTHER; note = 2'-O-methylcytidine-3'-phosphate
  modified_base 9: mod_base = OTHER; note = 2'-deoxy-2'-fluorocytidine-3'-phosphate
  modified_base 10: mod_base = OTHER; note = 2'-deoxy-2'-fluoroadenosine-3'-phosphate
  modified_base 11: mod_base = OTHER; note = 2'-deoxy-2'-fluorouridine-3'-phosphate
  modified_base 12: mod_base = OTHER; note = 2'-O-methyluridine-3'-phosphate
  modified_base 13: mod_base = OTHER; note = 2'-O-methylcytidine-3'-phosphate
  modified_base 14: mod_base = OTHER; note = 2'-O-methyladenosine-3'-phosphate
  modified_base 15: mod_base = OTHER; note = 2'-O-methylcytidine-3'-phosphate
  modified_base 16: mod_base = OTHER; note = 2'-O-methylcytidine-3'-phosphate
  modified_base 17: mod_base = OTHER; note = 2'-O-methyluridine-3'-phosphate
  modified_base 18: mod_base = OTHER; note = 2'-O-methyluridine-3'-phosphate
  modified_base 19: mod_base = OTHER; note = 2'-O-methylcytidine-3'-phosphorothioate
  modified_base 20: mod_base = OTHER; note = 2'-O-methyladenosine-3'-phosphorothioate
  modified_base 21: mod_base = OTHER; note = 2'-O-methyladenosine
cacaacgccattcaccttcaa

SEQ ID NO: 2413 - RNA, 21 nt, synthetic construct
  source 1..21: mol_type = other RNA
  modified_base 1: mod_base = OTHER; note = 2'-O-methyluridine-3'-phosphorothioate
  modified_base 2: mod_base = OTHER; note = 2'-O-methylcytidine-3'-phosphorothioate
  modified_base 3: mod_base = OTHER; note = 2'-O-methylcytidine-3'-phosphate
  modified_base 4: mod_base = OTHER; note = 2'-O-methyladenosine-3'-phosphate
  modified_base 5: mod_base = OTHER; note = 2'-O-methylcytidine-3'-phosphate
  modified_base 6: mod_base = OTHER; note = 2'-O-methylcytidine-3'-phosphate
  modified_base 7: mod_base = OTHER; note = 2'-deoxy-2'-fluoroguanosine-3'-phosphate
  modified_base 8: mod_base = OTHER; note = 2'-O-methyluridine-3'-phosphate
  modified_base 9: mod_base = OTHER; note = 2'-deoxy-2'-fluoroguanosine-3'-phosphate
  modified_base 10: mod_base = OTHER; note = 2'-deoxy-2'-fluorouridine-3'-phosphate
  modified_base 11: mod_base = OTHER; note = 2'-deoxy-2'-fluoroguanosine-3'-phosphate
  modified_base 12: mod_base = OTHER; note = 2'-O-methyluridine-3'-phosphate
  modified_base 13: mod_base = OTHER; note = 2'-O-methylguanosine-3'-phosphate
  modified_base 14: mod_base = OTHER; note = 2'-O-methyluridine-3'-phosphate
  modified_base 15: mod_base = OTHER; note = 2'-O-methylcytidine-3'-phosphate
  modified_base 16: mod_base = OTHER; note = 2'-O-methylcytidine-3'-phosphate
  modified_base 17: mod_base = OTHER; note = 2'-O-methylguanosine-3'-phosphate
  modified_base 18: mod_base = OTHER; note = 2'-O-methylcytidine-3'-phosphate
  modified_base 19: mod_base = OTHER; note = 2'-O-methylguanosine-3'-phosphorothioate
  modified_base 20: mod_base = OTHER; note = 2'-O-methyladenosine-3'-phosphorothioate
  modified_base 21: mod_base = OTHER; note = 2'-O-methyladenosine
tccaccgtgtgtgtccgcgaa

SEQ ID NO: 2414 - RNA, 21 nt, synthetic construct
  source 1..21: mol_type = other RNA
  modified_base 1: mod_base = OTHER; note = 2'-O-methyluridine-3'-phosphorothioate
  modified_base 2: mod_base = OTHER; note = 2'-O-methylcytidine-3'-phosphorothioate
  modified_base 3: mod_base = OTHER; note = 2'-O-methylcytidine-3'-phosphate
  modified_base 4: mod_base = OTHER; note = 2'-O-methyladenosine-3'-phosphate
  modified_base 5: mod_base = OTHER; note = 2'-O-methylguanosine-3'-phosphate
  modified_base 6: mod_base = OTHER; note = 2'-O-methylcytidine-3'-phosphate
  modified_base 7: mod_base = OTHER; note = 2'-deoxy-2'-fluorouridine-3'-phosphate
  modified_base 8: mod_base = OTHER; note = 2'-O-methylguanosine-3'-phosphate
  modified_base 9: mod_base = OTHER; note = 2'-deoxy-2'-fluoroguanosine-3'-phosphate
  modified_base 10: mod_base = OTHER; note = 2'-deoxy-2'-fluorouridine-3'-phosphate
  modified_base 11: mod_base = OTHER; note = 2'-deoxy-2'-fluoroadenosine-3'-phosphate
  modified_base 12: mod_base = OTHER; note = 2'-O-methylcytidine-3'-phosphate
  modified_base 13: mod_base = OTHER; note = 2'-O-methyladenosine-3'-phosphate
  modified_base 14: mod_base = OTHER; note = 2'-O-methyladenosine-3'-phosphate
  modified_base 15: mod_base = OTHER; note = 2'-O-methyluridine-3'-phosphate
  modified_base 16: mod_base = OTHER; note = 2'-O-methylguanosine-3'-phosphate
  modified_base 17: mod_base = OTHER; note = 2'-O-methylguanosine-3'-phosphate
  modified_base 18: mod_base = OTHER; note = 2'-O-methylguanosine-3'-phosphate
  modified_base 19: mod_base = OTHER; note = 2'-O-methylcytidine-3'-phosphorothioate
  modified_base 20: mod_base = OTHER; note = 2'-O-methyladenosine-3'-phosphorothioate
  modified_base 21: mod_base = OTHER; note = 2'-O-methyladenosine
tccagctggtacaatgggcaa

SEQ ID NO: 2415 - RNA, 21 nt, synthetic construct
  source 1..21: mol_type = other RNA
  modified_base 1: mod_base = OTHER; note = 2'-O-methylcytidine-3'-phosphorothioate
  modified_base 2: mod_base = OTHER; note = 2'-O-methylguanosine-3'-phosphorothioate
  modified_base 3: mod_base = OTHER; note = 2'-O-methylguanosine-3'-phosphate
  modified_base 4: mod_base = OTHER; note = 2'-O-methyladenosine-3'-phosphate
  modified_base 5: mod_base = OTHER; note = 2'-O-methylguanosine-3'-phosphate
  modified_base 6: mod_base = OTHER; note = 2'-O-methyladenosine-3'-phosphate
  modified_base 7: mod_base = OTHER; note = 2'-deoxy-2'-fluorocytidine-3'-phosphate
  modified_base 8: mod_base = OTHER; note = 2'-O-methyluridine-3'-phosphate
  modified_base 9: mod_base = OTHER; note = 2'-deoxy-2'-fluorouridine-3'-phosphate
  modified_base 10: mod_base = OTHER; note = 2'-deoxy-2'-fluorouridine-3'-phosphate
  modified_base 11: mod_base = OTHER; note = 2'-deoxy-2'-fluoroguanosine-3'-phosphate
  modified_base 12: mod_base = OTHER; note = 2'-O-methyladenosine-3'-phosphate
  modified_base 13: mod_base = OTHER; note = 2'-O-methylguanosine-3'-phosphate
  modified_base 14: mod_base = OTHER; note = 2'-O-methyladenosine-3'-phosphate
  modified_base 15: mod_base = OTHER; note = 2'-O-methylcytidine-3'-phosphate
  modified_base 16: mod_base = OTHER; note = 2'-O-methylguanosine-3'-phosphate
  modified_base 17: mod_base = OTHER; note = 2'-O-methyluridine-3'-phosphate
  modified_base 18: mod_base = OTHER; note = 2'-O-methyluridine-3'-phosphate
  modified_base 19: mod_base = OTHER; note = 2'-O-methyluridine-3'-phosphorothioate
  modified_base 20: mod_base = OTHER; note = 2'-O-methylguanosine-3'-phosphorothioate
  modified_base 21: mod_base = OTHER; note = 2'-O-methyladenosine
cggagactttgagacgtttga

SEQ ID NO: 2416 - RNA, 21 nt, synthetic construct
  source 1..21: mol_type = other RNA
  modified_base 1: mod_base = OTHER; note = 2'-O-methylguanosine-3'-phosphorothioate
  modified_base 2: mod_base = OTHER; note = 2'-O-methyladenosine-3'-phosphorothioate
  modified_base 3: mod_base = OTHER; note = 2'-O-methylguanosine-3'-phosphate
  modified_base 4: mod_base = OTHER; note = 2'-O-methylguanosine-3'-phosphate
  modified_base 5: mod_base = OTHER; note = 2'-O-methylguanosine-3'-phosphate
  modified_base 6: mod_base = OTHER; note = 2'-O-methyluridine-3'-phosphate
  modified_base 7: mod_base = OTHER; note = 2'-deoxy-2'-fluoroadenosine-3'-phosphate
  modified_base 8: mod_base = OTHER; note = 2'-O-methylcytidine-3'-phosphate
  modified_base 9: mod_base = OTHER; note = 2'-deoxy-2'-fluorocytidine-3'-phosphate
  modified_base 10: mod_base = OTHER; note = 2'-deoxy-2'-fluoroadenosine-3'-phosphate
  modified_base 11: mod_base = OTHER; note = 2'-deoxy-2'-fluoroguanosine-3'-phosphate
  modified_base 12: mod_base = OTHER; note = 2'-O-methylguanosine-3'-phosphate
  modified_base 13: mod_base = OTHER; note = 2'-O-methyluridine-3'-phosphate
  modified_base 14: mod_base = OTHER; note = 2'-O-methyladenosine-3'-phosphate
  modified_base 15: mod_base = OTHER; note = 2'-O-methyluridine-3'-phosphate
  modified_base 16: mod_base = OTHER; note = 2'-O-methylguanosine-3'-phosphate
  modified_base 17: mod_base = OTHER; note = 2'-O-methylcytidine-3'-phosphate
  modified_base 18: mod_base = OTHER; note = 2'-O-methylcytidine-3'-phosphate
  modified_base 19: mod_base = OTHER; note = 2'-O-methylcytidine-3'-phosphorothioate
  modified_base 20: mod_base = OTHER; note = 2'-O-methyluridine-3'-phosphorothioate
  modified_base 21: mod_base = OTHER; note = 2'-O-methyladenosine
gagggtaccaggtatgcccta

SEQ ID NO: 2417 - RNA, 21 nt, synthetic construct
  source 1..21: mol_type = other RNA
  modified_base 1: mod_base = OTHER; note = 2'-O-methylcytidine-3'-phosphorothioate
  modified_base 2: mod_base = OTHER; note = 2'-O-methyluridine-3'-phosphorothioate
  modified_base 3: mod_base = OTHER; note = 2'-O-methylguanosine-3'-phosphate
  modified_base 4: mod_base = OTHER; note = 2'-O-methylguanosine-3'-phosphate
  modified_base 5: mod_base = OTHER; note = 2'-O-methylcytidine-3'-phosphate
  modified_base 6: mod_base = OTHER; note = 2'-O-methyluridine-3'-phosphate
  modified_base 7: mod_base = OTHER; note = 2'-deoxy-2'-fluoroguanosine-3'-phosphate
  modified_base 8: mod_base = OTHER; note = 2'-O-methyladenosine-3'-phosphate
  modified_base 9: mod_base = OTHER; note = 2'-deoxy-2'-fluorocytidine-3'-phosphate
  modified_base 10: mod_base = OTHER; note = 2'-deoxy-2'-fluoroadenosine-3'-phosphate
  modified_base 11: mod_base = OTHER; note = 2'-deoxy-2'-fluorouridine-3'-phosphate
  modified_base 12: mod_base = OTHER; note = 2'-O-methylcytidine-3'-phosphate
  modified_base 13: mod_base = OTHER; note = 2'-O-methylguanosine-3'-phosphate
  modified_base 14: mod_base = OTHER; note = 2'-O-methyladenosine-3'-phosphate
  modified_base 15: mod_base = OTHER; note = 2'-O-methylguanosine-3'-phosphate
  modified_base 16: mod_base = OTHER; note = 2'-O-methyluridine-3'-phosphate
  modified_base 17: mod_base = OTHER; note = 2'-O-methylguanosine-3'-phosphate
  modified_base 18: mod_base = OTHER; note = 2'-O-methylcytidine-3'-phosphate
  modified_base 19: mod_base = OTHER; note = 2'-O-methylcytidine-3'-phosphorothioate
  modified_base 20: mod_base = OTHER; note = 2'-O-methylguanosine-3'-phosphorothioate
  modified_base 21: mod_base = OTHER; note = 2'-O-methyladenosine
ctggctgacatcgagtgccga

SEQ ID NO: 2418 - RNA, 21 nt, synthetic construct
  source 1..21: mol_type = other RNA
  modified_base 1: mod_base = OTHER; note = 2'-O-methylcytidine-3'-phosphorothioate
  modified_base 2: mod_base = OTHER; note = 2'-O-methyluridine-3'-phosphorothioate
  modified_base 3: mod_base = OTHER; note = 2'-O-methyluridine-3'-phosphate
  modified_base 4: mod_base = OTHER; note = 2'-O-methylcytidine-3'-phosphate
  modified_base 5: mod_base = OTHER; note = 2'-O-methylcytidine-3'-phosphate
  modified_base 6: mod_base = OTHER; note = 2'-O-methylcytidine-3'-phosphate
  modified_base 7: mod_base = OTHER; note = 2'-deoxy-2'-fluoroguanosine-3'-phosphate
  modified_base 8: mod_base = OTHER; note = 2'-O-methyladenosine-3'-phosphate
  modified_base 9: mod_base = OTHER; note = 2'-deoxy-2'-fluorocytidine-3'-phosphate
  modified_base 10: mod_base = OTHER; note = 2'-deoxy-2'-fluoroadenosine-3'-phosphate
  modified_base 11: mod_base = OTHER; note = 2'-deoxy-2'-fluorouridine-3'-phosphate
  modified_base 12: mod_base = OTHER; note = 2'-O-methylguanosine-3'-phosphate
  modified_base 13: mod_base = OTHER; note = 2'-O-methylcytidine-3'-phosphate
  modified_base 14: mod_base = OTHER; note = 2'-O-methylcytidine-3'-phosphate
  modified_base 15: mod_base = OTHER; note = 2'-O-methylguanosine-3'-phosphate
  modified_base 16: mod_base = OTHER; note = 2'-O-methylcytidine-3'-phosphate
  modified_base 17: mod_base = OTHER; note = 2'-O-methyluridine-3'-phosphate
  modified_base 18: mod_base = OTHER; note = 2'-O-methylguanosine-3'-phosphate
  modified_base 19: mod_base = OTHER; note = 2'-O-methylguanosine-3'-phosphorothioate
  modified_base 20: mod_base = OTHER; note = 2'-O-methyladenosine-3'-phosphorothioate
  modified_base 21: mod_base = OTHER; note = 2'-O-methyladenosine
cttcccgacatgccgctggaa

SEQ ID NO: 2419 - RNA, 21 nt, synthetic construct
  source 1..21: mol_type = other RNA
  modified_base 1: mod_base = OTHER; note = 2'-O-methylcytidine-3'-phosphorothioate
  modified_base 2: mod_base = OTHER; note = 2'-O-methyladenosine-3'-phosphorothioate
  modified_base 3: mod_base = OTHER; note = 2'-O-methylguanosine-3'-phosphate
  modified_base 4: mod_base = OTHER; note = 2'-O-methylguanosine-3'-phosphate
  modified_base 5: mod_base = OTHER; note = 2'-O-methyluridine-3'-phosphate
  modified_base 6: mod_base = OTHER; note = 2'-O-methylguanosine-3'-phosphate
  modified_base 7: mod_base = OTHER; note = 2'-deoxy-2'-fluoroguanosine-3'-phosphate
  modified_base 8: mod_base = OTHER; note = 2'-O-methyladenosine-3'-phosphate
  modified_base 9: mod_base = OTHER; note = 2'-deoxy-2'-fluorocytidine-3'-phosphate
  modified_base 10: mod_base = OTHER; note = 2'-deoxy-2'-fluorouridine-3'-phosphate
  modified_base 11: mod_base = OTHER; note = 2'-deoxy-2'-fluoroguanosine-3'-phosphate
  modified_base 12: mod_base = OTHER; note = 2'-O-methyluridine-3'-phosphate
  modified_base 13: mod_base = OTHER; note = 2'-O-methylguanosine-3'-phosphate
  modified_base 14: mod_base = OTHER; note = 2'-O-methyladenosine-3'-phosphate
  modified_base 15: mod_base = OTHER; note = 2'-O-methylcytidine-3'-phosphate
  modified_base 16: mod_base = OTHER; note = 2'-O-methylcytidine-3'-phosphate
  modified_base 17: mod_base = OTHER; note = 2'-O-methylguanosine-3'-phosphate
  modified_base 18: mod_base = OTHER; note = 2'-O-methylcytidine-3'-phosphate
  modified_base 19: mod_base = OTHER; note = 2'-O-methyladenosine-3'-phosphorothioate
  modified_base 20: mod_base = OTHER; note = 2'-O-methyluridine-3'-phosphorothioate
  modified_base 21: mod_base = OTHER; note = 2'-O-methyladenosine
caggtggactgtgaccgcata

SEQ ID NO: 2420 - RNA, 21 nt, synthetic construct
  source 1..21: mol_type = other RNA
  modified_base 1: mod_base = OTHER; note = 2'-O-methylcytidine-3'-phosphorothioate
  modified_base 2: mod_base = OTHER; note = 2'-O-methylguanosine-3'-phosphorothioate
  modified_base 3: mod_base = OTHER; note = 2'-O-methylcytidine-3'-phosphate
  modified_base 4: mod_base = OTHER; note = 2'-O-methylcytidine-3'-phosphate
  modified_base 5: mod_base = OTHER; note = 2'-O-methyladenosine-3'-phosphate
  modified_base 6: mod_base = OTHER; note = 2'-O-methyladenosine-3'-phosphate
  modified_base 7: mod_base = OTHER; note = 2'-deoxy-2'-fluorocytidine-3'-phosphate
  modified_base 8: mod_base = OTHER; note = 2'-O-methyladenosine-3'-phosphate
  modified_base 9: mod_base = OTHER; note = 2'-deoxy-2'-fluoroguanosine-3'-phosphate
  modified_base 10: mod_base = OTHER; note = 2'-deoxy-2'-fluorocytidine-3'-phosphate
  modified_base 11: mod_base = OTHER; note = 2'-deoxy-2'-fluorocytidine-3'-phosphate
  modified_base 12: mod_base = OTHER; note = 2'-O-methyladenosine-3'-phosphate
  modified_base 13: mod_base = OTHER; note = 2'-O-methyladenosine-3'-phosphate
  modified_base 14: mod_base = OTHER; note = 2'-O-methylcytidine-3'-phosphate
  modified_base 15: mod_base = OTHER; note = 2'-O-methyladenosine-3'-phosphate
  modified_base 16: mod_base = OTHER; note = 2'-O-methylguanosine-3'-phosphate
  modified_base 17: mod_base = OTHER; note = 2'-O-methyladenosine-3'-phosphate
  modified_base 18: mod_base = OTHER; note = 2'-O-methylguanosine-3'-phosphate
  modified_base 19: mod_base = OTHER; note = 2'-O-methyluridine-3'-phosphorothioate
  modified_base 20: mod_base = OTHER; note = 2'-O-methylcytidine-3'-phosphorothioate
  modified_base 21: mod_base = OTHER; note = 2'-O-methyladenosine
cgccaacagccaacagagtca

SEQ ID NO: 2421 - RNA, 21 nt, synthetic construct
  source 1..21: mol_type = other RNA
  modified_base 1: mod_base = OTHER; note = 2'-O-methyluridine-3'-phosphorothioate
  modified_base 2: mod_base = OTHER; note = 2'-O-methylcytidine-3'-phosphorothioate
  modified_base 3: mod_base = OTHER; note = 2'-O-methyluridine-3'-phosphate
  modified_base 4: mod_base = OTHER; note = 2'-O-methylguanosine-3'-phosphate
  modified_base 5: mod_base = OTHER; note = 2'-O-methyluridine-3'-phosphate
  modified_base 6: mod_base = OTHER; note = 2'-O-methylcytidine-3'-phosphate
  modified_base 7: mod_base = OTHER; note = 2'-deoxy-2'-fluoroadenosine-3'-phosphate
  modified_base 8: mod_base = OTHER; note = 2'-O-methylcytidine-3'-phosphate
  modified_base 9: mod_base = OTHER; note = 2'-deoxy-2'-fluoroguanosine-3'-phosphate
  modified_base 10: mod_base = OTHER; note = 2'-deoxy-2'-fluoroadenosine-3'-phosphate
  modified_base 11: mod_base = OTHER; note = 2'-deoxy-2'-fluorocytidine-3'-phosphate
  modified_base 12: mod_base = OTHER; note = 2'-O-methyluridine-3'-phosphate
  modified_base 13: mod_base = OTHER; note = 2'-O-methyladenosine-3'-phosphate
  modified_base 14: mod_base = OTHER; note = 2'-O-methylcytidine-3'-phosphate
  modified_base 15: mod_base = OTHER; note = 2'-O-methylguanosine-3'-phosphate
  modified_base 16: mod_base = OTHER; note = 2'-O-methyladenosine-3'-phosphate
  modified_base 17: mod_base = OTHER; note = 2'-O-methylguanosine-3'-phosphate
  modified_base 18: mod_base = OTHER; note = 2'-O-methylcytidine-3'-phosphate
  modified_base 19: mod_base = OTHER; note = 2'-O-methyluridine-3'-phosphorothioate
  modified_base 20: mod_base = OTHER; note = 2'-O-methylguanosine-3'-phosphorothioate
  modified_base 21: mod_base = OTHER; note = 2'-O-methyladenosine
tctgtcacgactacgagctga

SEQ ID NO: 2422 - RNA, 21 nt, synthetic construct
  source 1..21: mol_type = other RNA
  modified_base 1: mod_base = OTHER; note = 2'-O-methyluridine-3'-phosphorothioate
  modified_base 2: mod_base = OTHER; note = 2'-O-methylcytidine-3'-phosphorothioate
  modified_base 3: mod_base = OTHER; note = 2'-O-methyluridine-3'-phosphate
  modified_base 4: mod_base = OTHER; note = 2'-O-methylcytidine-3'-phosphate
  modified_base 5: mod_base = OTHER; note = 2'-O-methyluridine-3'-phosphate
  modified_base 6: mod_base = OTHER; note = 2'-O-methylguanosine-3'-phosphate
  modified_base 7: mod_base = OTHER; note = 2'-deoxy-2'-fluorocytidine-3'-phosphate
  modified_base 8: mod_base = OTHER; note = 2'-O-methyluridine-3'-phosphate
  modified_base 9: mod_base = OTHER; note = 2'-deoxy-2'-fluoroguanosine-3'-phosphate
  modified_base 10: mod_base = OTHER; note = 2'-deoxy-2'-fluorocytidine-3'-phosphate
  modified_base 11: mod_base = OTHER; note = 2'-deoxy-2'-fluoroguanosine-3'-phosphate
  modified_base 12: mod_base = OTHER; note = 2'-O-methyladenosine-3'-phosphate
  modified_base 13: mod_base = OTHER; note = 2'-O-methyladenosine-3'-phosphate
  modified_base 14: mod_base = OTHER; note = 2'-O-methyluridine-3'-phosphate
  modified_base 15: mod_base = OTHER; note = 2'-O-methyladenosine-3'-phosphate
  modified_base 16: mod_base = OTHER; note = 2'-O-methylcytidine-3'-phosphate
  modified_base 17: mod_base = OTHER; note = 2'-O-methylguanosine-3'-phosphate
  modified_base 18: mod_base = OTHER; note = 2'-O-methyluridine-3'-phosphate
  modified_base 19: mod_base = OTHER; note = 2'-O-methylguanosine-3'-phosphorothioate
  modified_base 20: mod_base = OTHER; note = 2'-O-methylcytidine-3'-phosphorothioate
  modified_base 21: mod_base = OTHER; note = 2'-O-methyladenosine
tctctgctgcgaatacgtgca

SEQ ID NO: 2423 - RNA, 21 nt, synthetic construct
  source 1..21: mol_type = other RNA
  modified_base 1: mod_base = OTHER; note = 2'-O-methylcytidine-3'-phosphorothioate
  modified_base 2: mod_base = OTHER; note = 2'-O-methyladenosine-3'-phosphorothioate
  modified_base 3: mod_base = OTHER; note = 2'-O-methylcytidine-3'-phosphate
  modified_base 4: mod_base = OTHER; note = 2'-O-methylguanosine-3'-phosphate
  modified_base 5: mod_base = OTHER; note = 2'-O-methylguanosine-3'-phosphate
  modified_base 6: mod_base = OTHER; note = 2'-O-methyladenosine-3'-phosphate
  modified_base 7: mod_base = OTHER; note = 2'-deoxy-2'-fluoroguanosine-3'-phosphate
  modified_base 8: mod_base = OTHER; note = 2'-O-methylcytidine-3'-phosphate
  modified_base 9: mod_base = OTHER; note = 2'-deoxy-2'-fluorocytidine-3'-phosphate
  modified_base 10: mod_base = OTHER; note = 2'-deoxy-2'-fluorouridine-3'-phosphate
  modified_base 11: mod_base = OTHER; note = 2'-deoxy-2'-fluoroguanosine-3'-phosphate
  modified_base 12: mod_base = OTHER; note = 2'-O-methylcytidine-3'-phosphate
  modified_base 13: mod_base = OTHER; note = 2'-O-methyluridine-3'-phosphate
  modified_base 14: mod_base = OTHER; note = 2'-O-methylguanosine-3'-phosphate
  modified_base 15: mod_base = OTHER; note = 2'-O-methyluridine-3'-phosphate
  modified_base 16: mod_base = OTHER; note = 2'-O-methylguanosine-3'-phosphate
  modified_base 17: mod_base = OTHER; note = 2'-O-methylcytidine-3'-phosphate
  modified_base 18: mod_base = OTHER; note = 2'-O-methylcytidine-3'-phosphate
  modified_base 19: mod_base = OTHER; note = 2'-O-methyluridine-3'-phosphorothioate
  modified_base 20: mod_base = OTHER; note = 2'-O-methyladenosine-3'-phosphorothioate
  modified_base 21: mod_base = OTHER; note = 2'-O-methyladenosine
cacggagcctgctgtgcctaa

SEQ ID NO: 2424 - RNA, 21 nt, synthetic construct
  source 1..21: mol_type = other RNA
  modified_base 1: mod_base = OTHER; note = 2'-O-methyladenosine-3'-phosphorothioate
  modified_base 2: mod_base = OTHER; note = 2'-O-methylguanosine-3'-phosphorothioate
  modified_base 3: mod_base = OTHER; note = 2'-O-methyladenosine-3'-phosphate
  modified_base 4: mod_base = OTHER; note = 2'-O-methylcytidine-3'-phosphate
  modified_base 5: mod_base = OTHER; note = 2'-O-methylcytidine-3'-phosphate
  modified_base 6: mod_base = OTHER; note = 2'-O-methyladenosine-3'-phosphate
  modified_base 7: mod_base = OTHER; note = 2'-deoxy-2'-fluorocytidine-3'-phosphate
  modified_base 8: mod_base = OTHER; note = 2'-O-methyladenosine-3'-phosphate
  modified_base 9: mod_base = OTHER; note = 2'-deoxy-2'-fluoroguanosine-3'-phosphate
  modified_base 10: mod_base = OTHER; note = 2'-deoxy-2'-fluorocytidine-3'-phosphate
  modified_base 11: mod_base = OTHER; note = 2'-deoxy-2'-fluoroadenosine-3'-phosphate
  modified_base 12: mod_base = OTHER; note = 2'-O-methyladenosine-3'-phosphate
  modified_base 13: mod_base = OTHER; note = 2'-O-methylcytidine-3'-phosphate
  modified_base 14: mod_base = OTHER; note = 2'-O-methylcytidine-3'-phosphate
  modified_base 15: mod_base = OTHER; note = 2'-O-methylguanosine-3'-phosphate
  modified_base 16: mod_base = OTHER; note = 2'-O-methyladenosine-3'-phosphate
  modified_base 17: mod_base = OTHER; note = 2'-O-methyladenosine-3'-phosphate
  modified_base 18: mod_base = OTHER; note = 2'-O-methyladenosine-3'-phosphate
  modified_base 19: mod_base = OTHER; note = 2'-O-methyladenosine-3'-phosphorothioate
  modified_base 20: mod_base = OTHER; note = 2'-O-methylguanosine-3'-phosphorothioate
  modified_base 21: mod_base = OTHER; note = 2'-O-methyladenosine
agaccacagcaaccgaaaaga

SEQ ID NO: 2425 - RNA, 21 nt, synthetic construct
  source 1..21: mol_type = other RNA
  modified_base 1: mod_base = OTHER; note = 2'-O-methylcytidine-3'-phosphorothioate
  modified_base 2: mod_base = OTHER; note = 2'-O-methyladenosine-3'-phosphorothioate
  modified_base 3: mod_base = OTHER; note = 2'-O-methylcytidine-3'-phosphate
  modified_base 4: mod_base = OTHER; note = 2'-O-methylcytidine-3'-phosphate
  modified_base 5: mod_base = OTHER; note = 2'-O-methyluridine-3'-phosphate
  modified_base 6: mod_base = OTHER; note = 2'-O-methylcytidine-3'-phosphate
  modified_base 7: mod_base = OTHER; note = 2'-deoxy-2'-fluoroguanosine-3'-phosphate
  modified_base 8: mod_base = OTHER; note = 2'-O-methylcytidine-3'-phosphate
  modified_base 9: mod_base = OTHER; note = 2'-deoxy-2'-fluoroadenosine-3'-phosphate
  modified_base 10: mod_base = OTHER; note = 2'-deoxy-2'-fluoroguanosine-3'-phosphate
  modified_base 11: mod_base = OTHER; note = 2'-deoxy-2'-fluoroadenosine-3'-phosphate
  modified_base 12: mod_base = OTHER; note = 2'-O-methylcytidine-3'-phosphate
  modified_base 13: mod_base = OTHER; note = 2'-O-methyluridine-3'-phosphate
  modified_base 14: mod_base = OTHER; note = 2'-O-methylguanosine-3'-phosphate
  modified_base 15: mod_base = OTHER; note = 2'-O-methylguanosine-3'-phosphate
  modified_base 16: mod_base = OTHER; note = 2'-O-methylguanosine-3'-phosphate
  modified_base 17: mod_base = OTHER; note = 2'-O-methyluridine-3'-phosphate
  modified_base 18: mod_base = OTHER; note = 2'-O-methylcytidine-3'-phosphate
  modified_base 19: mod_base = OTHER; note = 2'-O-methylcytidine-3'-phosphorothioate
  modified_base 20: mod_base = OTHER; note = 2'-O-methyladenosine-3'-phosphorothioate
  modified_base 21: mod_base = OTHER; note = 2'-O-methyladenosine
cacctcgcagactgggtccaa

SEQ ID NO: 2426 - RNA, 21 nt, synthetic construct
  source 1..21: mol_type = other RNA
  modified_base 1: mod_base = OTHER; note = 2'-O-methyladenosine-3'-phosphorothioate
  modified_base 2: mod_base = OTHER; note = 2'-O-methylcytidine-3'-phosphorothioate
  modified_base 3: mod_base = OTHER; note = 2'-O-methyladenosine-3'-phosphate
  modified_base 4: mod_base = OTHER; note = 2'-O-methylguanosine-3'-phosphate
  modified_base 5: mod_base = OTHER; note = 2'-O-methyladenosine-3'-phosphate
  modified_base 6: mod_base = OTHER; note = 2'-O-methylguanosine-3'-phosphate
  modified_base 7: mod_base = OTHER; note = 2'-deoxy-2'-fluorouridine-3'-phosphate
  modified_base 8: mod_base = OTHER; note = 2'-O-methylguanosine-3'-phosphate
  modified_base 9: mod_base = OTHER; note = 2'-deoxy-2'-fluoroguanosine-3'-phosphate
  modified_base 10: mod_base = OTHER; note = 2'-deoxy-2'-fluorouridine-3'-phosphate
  modified_base 11: mod_base = OTHER; note = 2'-deoxy-2'-fluorouridine-3'-phosphate
  modified_base 12: mod_base = OTHER; note = 2'-O-methyluridine-3'-phosphate
  modified_base 13: mod_base = OTHER; note = 2'-O-methylguanosine-3'-phosphate
  modified_base 14: mod_base = OTHER; note = 2'-O-methyladenosine-3'-phosphate
  modified_base 15: mod_base = OTHER; note = 2'-O-methyluridine-3'-phosphate
  modified_base 16: mod_base = OTHER; note = 2'-O-methylguanosine-3'-phosphate
  modified_base 17: mod_base = OTHER; note = 2'-O-methyladenosine-3'-phosphate
  modified_base 18: mod_base = OTHER; note = 2'-O-methylguanosine-3'-phosphate
  modified_base 19: mod_base = OTHER; note = 2'-O-methylguanosine-3'-phosphorothioate
  modified_base 20: mod_base = OTHER; note = 2'-O-methyladenosine-3'-phosphorothioate
  modified_base 21: mod_base = OTHER; note = 2'-O-methyladenosine
acagagtggtttgatgaggaa

SEQ ID NO: 2427 - RNA, 21 nt, synthetic construct
  source 1..21: mol_type = other RNA
  modified_base 1: mod_base = OTHER; note = 2'-O-methylguanosine-3'-phosphorothioate
  modified_base 2: mod_base = OTHER; note = 2'-O-methyladenosine-3'-phosphorothioate
  modified_base 3: mod_base = OTHER; note = 2'-O-methylcytidine-3'-phosphate
  modified_base 4: mod_base = OTHER; note = 2'-O-methylguanosine-3'-phosphate
  modified_base 5: mod_base = OTHER; note = 2'-O-methyluridine-3'-phosphate
  modified_base 6: mod_base = OTHER; note = 2'-O-methyluridine-3'-phosphate
  modified_base 7: mod_base = OTHER; note = 2'-deoxy-2'-fluoroguanosine-3'-phosphate
  modified_base 8: mod_base = OTHER; note = 2'-O-methyladenosine-3'-phosphate
  modified_base 9: mod_base = OTHER; note = 2'-deoxy-2'-fluoroguanosine-3'-phosphate
  modified_base 10: mod_base = OTHER; note = 2'-deoxy-2'-fluorouridine-3'-phosphate
  modified_base 11: mod_base = OTHER; note = 2'-deoxy-2'-fluorocytidine-3'-phosphate
  modified_base 12: mod_base = OTHER; note = 2'-O-methylcytidine-3'-phosphate
  modified_base 13: mod_base = OTHER; note = 2'-O-methyluridine-3'-phosphate
  modified_base 14: mod_base = OTHER; note = 2'-O-methyladenosine-3'-phosphate
  modified_base 15: mod_base = OTHER; note = 2'-O-methylcytidine-3'-phosphate
  modified_base 16: mod_base = OTHER; note = 2'-O-methylguanosine-3'-phosphate
  modified_base 17: mod_base = OTHER; note = 2'-O-methyladenosine-3'-phosphate
  modified_base 18: mod_base = OTHER; note = 2'-O-methyluridine-3'-phosphate
  modified_base 19: mod_base = OTHER; note = 2'-O-methyladenosine-3'-phosphorothioate
  modified_base 20: mod_base = OTHER; note = 2'-O-methyladenosine-3'-phosphorothioate
  modified_base 21: mod_base = OTHER; note = 2'-O-methyladenosine
gacgttgagtcctacgataaa

SEQ ID NO: 2428 - RNA, 21 nt, synthetic construct
  source 1..21: mol_type = other RNA
  modified_base 1: mod_base = OTHER; note = 2'-O-methylguanosine-3'-phosphorothioate
  modified_base 2: mod_base = OTHER; note = 2'-O-methylguanosine-3'-phosphorothioate
  modified_base 3: mod_base = OTHER; note = 2'-O-methylcytidine-3'-phosphate
  modified_base 4: mod_base = OTHER; note = 2'-O-methylcytidine-3'-phosphate
  modified_base 5: mod_base = OTHER; note = 2'-O-methylguanosine-3'-phosphate
  modified_base 6: mod_base = OTHER; note = 2'-O-methylcytidine-3'-phosphate
  modified_base 7: mod_base = OTHER; note = 2'-deoxy-2'-fluorouridine-3'-phosphate
  modified_base 8: mod_base = OTHER; note = 2'-O-methylguanosine-3'-phosphate
  modified_base 9: mod_base = OTHER; note = 2'-deoxy-2'-fluoroguanosine-3'-phosphate
  modified_base 10: mod_base = OTHER; note = 2'-deoxy-2'-fluoroadenosine-3'-phosphate
  modified_base 11: mod_base = OTHER; note = 2'-deoxy-2'-fluoroguanosine-3'-phosphate
  modified_base 12: mod_base = OTHER; note = 2'-O-methylguanosine-3'-phosphate
  modified_base 13: mod_base = OTHER; note = 2'-O-methylguanosine-3'-phosphate
  modified_base 14: mod_base = OTHER; note = 2'-O-methylcytidine-3'-phosphate
  modified_base 15: mod_base = OTHER; note = 2'-O-methyladenosine-3'-phosphate
  modified_base 16: mod_base = OTHER; note = 2'-O-methylcytidine-3'-phosphate
  modified_base 17: mod_base = OTHER; note = 2'-O-methyluridine-3'-phosphate
  modified_base 18: mod_base = OTHER; note = 2'-O-methyluridine-3'-phosphate
  modified_base 19: mod_base = OTHER; note = 2'-O-methyladenosine-3'-phosphorothioate
  modified_base 20: mod_base = OTHER; note = 2'-O-methyluridine-3'-phosphorothioate
  modified_base 21: mod_base = OTHER; note = 2'-O-methyladenosine
ggccgctggagggcacttata

SEQ ID NO: 2429 - RNA, 21 nt, synthetic construct
  source 1..21: mol_type = other RNA
  modified_base 1: mod_base = OTHER; note = 2'-O-methylcytidine-3'-phosphorothioate
  modified_base 2: mod_base = OTHER; note = 2'-O-methyladenosine-3'-phosphorothioate
  modified_base 3: mod_base = OTHER; note = 2'-O-methylguanosine-3'-phosphate
  modified_base 4: mod_base = OTHER; note = 2'-O-methylcytidine-3'-phosphate
  modified_base 5: mod_base = OTHER; note = 2'-O-methylcytidine-3'-phosphate
  modified_base 6: mod_base = OTHER; note = 2'-O-methyluridine-3'-phosphate
  modified_base 7: mod_base = OTHER; note = 2'-deoxy-2'-fluoroadenosine-3'-phosphate
  modified_base 8: mod_base = OTHER; note = 2'-O-methyladenosine-3'-phosphate
  modified_base 9: mod_base = OTHER; note = 2'-deoxy-2'-fluoroguanosine-3'-phosphate
  modified_base 10: mod_base = OTHER; note = 2'-deoxy-2'-fluoroguanosine-3'-phosphate
  modified_base 11: mod_base = OTHER; note = 2'-deoxy-2'-fluoroadenosine-3'-phosphate
  modified_base 12: mod_base = OTHER; note = 2'-O-methylcytidine-3'-phosphate
  modified_base 13: mod_base = OTHER; note = 2'-O-methyladenosine-3'-phosphate
  modified_base 14: mod_base = OTHER; note = 2'-O-methyluridine-3'-phosphate
  modified_base 15: mod_base = OTHER; note = 2'-O-methyladenosine-3'-phosphate
  modified_base 16: mod_base = OTHER; note = 2'-O-methylguanosine-3'-phosphate
  modified_base 17: mod_base = OTHER; note = 2'-O-methyladenosine-3'-phosphate
  modified_base 18: mod_base = OTHER; note = 2'-O-methylguanosine-3'-phosphate
  modified_base 19: mod_base = OTHER; note = 2'-O-methyluridine-3'-phosphorothioate
  modified_base 20: mod_base = OTHER; note = 2'-O-methylguanosine-3'-phosphorothioate
  modified_base 21: mod_base = OTHER; note = 2'-O-methyladenosine
cagcctaaggacatagagtga

SEQ ID NO: 2430 - RNA, 21 nt, synthetic construct
  source 1..21: mol_type = other RNA
  modified_base 1: mod_base = OTHER; note = 2'-O-methyladenosine-3'-phosphorothioate
  modified_base 2: mod_base = OTHER; note = 2'-O-methyladenosine-3'-phosphorothioate
  modified_base 3: mod_base = OTHER; note = 2'-O-methylcytidine-3'-phosphate
  modified_base 4: mod_base = OTHER; note = 2'-O-methyluridine-3'-phosphate
  modified_base 5: mod_base = OTHER; note = 2'-O-methylguanosine-3'-phosphate
  modified_base 6: mod_base = OTHER; note = 2'-O-methylguanosine-3'-phosphate
  modified_base 7: mod_base = OTHER; note = 2'-deoxy-2'-fluoroadenosine-3'-phosphate
  modified_base 8: mod_base = OTHER; note = 2'-O-methylcytidine-3'-phosphate
  modified_base 9: mod_base = OTHER; note = 2'-deoxy-2'-fluorocytidine-3'-phosphate
  modified_base 10: mod_base = OTHER; note = 2'-deoxy-2'-fluorocytidine-3'-phosphate
  modified_base 11: mod_base = OTHER; note = 2'-deoxy-2'-fluorouridine-3'-phosphate
  modified_base 12: mod_base = OTHER; note = 2'-O-methylguanosine-3'-phosphate
  modified_base 13: mod_base = OTHER; note = 2'-O-methylguanosine-3'-phosphate
  modified_base 14: mod_base = OTHER; note = 2'-O-methylcytidine-3'-phosphate
  modified_base 15: mod_base = OTHER; note = 2'-O-methyladenosine-3'-phosphate
  modified_base 16: mod_base = OTHER; note = 2'-O-methylcytidine-3'-phosphate
  modified_base 17: mod_base = OTHER; note = 2'-O-methyladenosine-3'-phosphate
  modified_base 18: mod_base = OTHER; note = 2'-O-methylguanosine-3'-phosphate
  modified_base 19: mod_base = OTHER; note = 2'-O-methylguanosine-3'-phosphorothioate
  modified_base 20: mod_base = OTHER; note = 2'-O-methyluridine-3'-phosphorothioate
  modified_base 21: mod_base = OTHER; note = 2'-O-methyladenosine
aactggaccctggcacaggta

SEQ ID NO: 2431 - RNA, 21 nt, synthetic construct
  source 1..21: mol_type = other RNA
  modified_base 1: mod_base = OTHER; note = 2'-O-methylguanosine-3'-phosphorothioate
  modified_base 2: mod_base = OTHER; note = 2'-O-methyluridine-3'-phosphorothioate
  modified_base 3: mod_base = OTHER; note = 2'-O-methylguanosine-3'-phosphate
  modified_base 4: mod_base = OTHER; note = 2'-O-methylcytidine-3'-phosphate
  modified_base 5: mod_base = OTHER; note = 2'-O-methyladenosine-3'-phosphate
  modified_base 6: mod_base = OTHER; note = 2'-O-methylcytidine-3'-phosphate
  modified_base 7: mod_base = OTHER; note = 2'-deoxy-2'-fluorouridine-3'-phosphate
  modified_base 8: mod_base = OTHER; note = 2'-O-methylguanosine-3'-phosphate
  modified_base 9: mod_base = OTHER; note = 2'-deoxy-2'-fluorouridine-3'-phosphate
  modified_base 10: mod_base = OTHER; note = 2'-deoxy-2'-fluoroguanosine-3'-phosphate
  modified_base 11: mod_base = OTHER; note = 2'-deoxy-2'-fluoroadenosine-3'-phosphate
  modified_base 12: mod_base = OTHER; note = 2'-O-methylcytidine-3'-phosphate
  modified_base 13: mod_base = OTHER; note = 2'-O-methylguanosine-3'-phosphate
  modified_base 14: mod_base = OTHER; note = 2'-O-methyluridine-3'-phosphate
  modified_base 15: mod_base = OTHER; note = 2'-O-methylcytidine-3'-phosphate
  modified_base 16: mod_base = OTHER; note = 2'-O-methylcytidine-3'-phosphate
  modified_base 17: mod_base = OTHER; note = 2'-O-methyladenosine-3'-phosphate
  modified_base 18: mod_base = OTHER; note = 2'-O-methylcytidine-3'-phosphate
  modified_base 19: mod_base = OTHER; note = 2'-O-methyluridine-3'-phosphorothioate
  modified_base 20: mod_base = OTHER; note = 2'-O-methyluridine-3'-phosphorothioate
  modified_base 21: mod_base = OTHER; note = 2'-O-methyladenosine
gtgcactgtgacgtccactta

SEQ ID NO: 2432 - RNA, 21 nt, synthetic construct
  source 1..21: mol_type = other RNA
  modified_base 1: mod_base = OTHER; note = 2'-O-methylguanosine-3'-phosphorothioate
  modified_base 2: mod_base = OTHER; note = 2'-O-methyluridine-3'-phosphorothioate
  modified_base 3: mod_base = OTHER; note = 2'-O-methylguanosine-3'-phosphate
  modified_base 4: mod_base = OTHER; note = 2'-O-methylcytidine-3'-phosphate
  modified_base 5: mod_base = OTHER; note = 2'-O-methyladenosine-3'-phosphate
  modified_base 6: mod_base = OTHER; note = 2'-O-methylguanosine-3'-phosphate
  modified_base 7: mod_base = OTHER; note = 2'-deoxy-2'-fluoroguanosine-3'-phosphate
  modified_base 8: mod_base = OTHER; note = 2'-O-methyladenosine-3'-phosphate
  modified_base 9: mod_base = OTHER; note = 2'-deoxy-2'-fluoroadenosine-3'-phosphate
  modified_base 10: mod_base = OTHER; note = 2'-deoxy-2'-fluorocytidine-3'-phosphate
  modified_base 11: mod_base = OTHER; note = 2'-deoxy-2'-fluorouridine-3'-phosphate
  modified_base 12: mod_base = OTHER; note = 2'-O-methylguanosine-3'-phosphate
  modified_base 13: mod_base = OTHER; note = 2'-O-methylguanosine-3'-phosphate
  modified_base 14: mod_base = OTHER; note = 2'-O-methylguanosine-3'-phosphate
  modified_base 15: mod_base = OTHER; note = 2'-O-methyladenosine-3'-phosphate
  modified_base 16: mod_base = OTHER; note = 2'-O-methylguanosine-3'-phosphate
  modified_base 17: mod_base = OTHER; note = 2'-O-methylcytidine-3'-phosphate
  modified_base 18: mod_base = OTHER; note = 2'-O-methyladenosine-3'-phosphate
  modified_base 19: mod_base = OTHER; note = 2'-O-methylguanosine-3'-phosphorothioate
  modified_base 20: mod_base = OTHER; note = 2'-O-methylguanosine-3'-phosphorothioate
  modified_base 21: mod_base = OTHER; note = 2'-O-methyladenosine
gtgcaggaactgggagcagga

SEQ ID NO: 2433 - RNA, 21 nt, synthetic construct
  source 1..21: mol_type = other RNA
  modified_base 1: mod_base = OTHER; note = 2'-O-methylcytidine-3'-phosphorothioate
  modified_base 2: mod_base = OTHER; note = 2'-O-methylguanosine-3'-phosphorothioate
  modified_base 3: mod_base = OTHER; note = 2'-O-methyluridine-3'-phosphate
  modified_base 4: mod_base = OTHER; note = 2'-O-methylcytidine-3'-phosphate
  modified_base 5: mod_base = OTHER; note = 2'-O-methyluridine-3'-phosphate
  modified_base 6: mod_base = OTHER; note = 2'-O-methyluridine-3'-phosphate
  modified_base 7: mod_base = OTHER; note = 2'-deoxy-2'-fluorocytidine-3'-phosphate
  modified_base 8: mod_base = OTHER; note = 2'-O-methyladenosine-3'-phosphate
  modified_base 9: mod_base = OTHER; note = 2'-deoxy-2'-fluoroadenosine-3'-phosphate
  modified_base 10: mod_base = OTHER; note = 2'-deoxy-2'-fluoroguanosine-3'-phosphate
  modified_base 11: mod_base = OTHER; note = 2'-deoxy-2'-fluoroadenosine-3'-phosphate
  modified_base 12: mod_base = OTHER; note = 2'-O-methyluridine-3'-phosphate
  modified_base 13: mod_base = OTHER; note = 2'-O-methylguanosine-3'-phosphate
  modified_base 14: mod_base = OTHER; note = 2'-O-methyluridine-3'-phosphate
  modified_base 15: mod_base = OTHER; note = 2'-O-methylguanosine-3'-phosphate
  modified_base 16: mod_base = OTHER; note = 2'-O-methylcytidine-3'-phosphate
  modified_base 17: mod_base = OTHER; note = 2'-O-methyluridine-3'-phosphate
  modified_base 18: mod_base = OTHER; note = 2'-O-methyladenosine-3'-phosphate
  modified_base 19: mod_base = OTHER; note = 2'-O-methylcytidine-3'-phosphorothioate
  modified_base 20: mod_base = OTHER; note = 2'-O-methyladenosine-3'-phosphorothioate
  modified_base 21: mod_base = OTHER; note = 2'-O-methyladenosine
cgtcttcaagatgtgctacaa

SEQ ID NO: 2434 - RNA, 21 nt, synthetic construct
  source 1..21: mol_type = other RNA
  modified_base 1: mod_base = OTHER; note = 2'-O-methylcytidine-3'-phosphorothioate
  modified_base 2: mod_base = OTHER; note = 2'-O-methyluridine-3'-phosphorothioate
  modified_base 3: mod_base = OTHER; note = 2'-O-methylguanosine-3'-phosphate
  modified_base 4: mod_base = OTHER; note = 2'-O-methylcytidine-3'-phosphate
  modified_base 5: mod_base = OTHER; note = 2'-O-methyluridine-3'-phosphate
  modified_base 6: mod_base = OTHER; note = 2'-O-methylguanosine-3'-phosphate
  modified_base 7: mod_base = OTHER; note = 2'-deoxy-2'-fluorocytidine-3'-phosphate
  modified_base 8: mod_base = OTHER; note = 2'-O-methyladenosine-3'-phosphate
  modified_base 9: mod_base = OTHER; note = 2'-deoxy-2'-fluoroguanosine-3'-phosphate
  modified_base 10: mod_base = OTHER; note = 2'-deoxy-2'-fluorouridine-3'-phosphate
  modified_base 11: mod_base = OTHER; note = 2'-deoxy-2'-fluoroguanosine-3'-phosphate
  modified_base 12: mod_base = OTHER; note = 2'-O-methyladenosine-3'-phosphate
  modified_base 13: mod_base = OTHER; note = 2'-O-methylcytidine-3'-phosphate
  modified_base 14: mod_base = OTHER; note = 2'-O-methylguanosine-3'-phosphate
  modified_base 15: mod_base = OTHER; note = 2'-O-methyladenosine-3'-phosphate
  modified_base 16: mod_base = OTHER; note = 2'-O-methylcytidine-3'-phosphate
  modified_base 17: mod_base = OTHER; note = 2'-O-methylcytidine-3'-phosphate
  modified_base 18: mod_base = OTHER; note = 2'-O-methyladenosine-3'-phosphate
  modified_base 19: mod_base = OTHER; note = 2'-O-methylcytidine-3'-phosphorothioate
  modified_base 20: mod_base = OTHER; note = 2'-O-methyluridine-3'-phosphorothioate
  modified_base 21: mod_base = OTHER; note = 2'-O-methyladenosine
ctgctgcagtgacgaccacta

SEQ ID NO: 2435 - RNA, 21 nt, synthetic construct
  source 1..21: mol_type = other RNA
  modified_base 1: mod_base = OTHER; note = 2'-O-methylcytidine-3'-phosphorothioate
  modified_base 2: mod_base = OTHER; note = 2'-O-methylguanosine-3'-phosphorothioate
  modified_base 3: mod_base = OTHER; note = 2'-O-methyladenosine-3'-phosphate
  modified_base 4: mod_base = OTHER; note = 2'-O-methylcytidine-3'-phosphate
  modified_base 5: mod_base = OTHER; note = 2'-O-methylcytidine-3'-phosphate
  modified_base 6: mod_base = OTHER; note = 2'-O-methyladenosine-3'-phosphate
  modified_base 7: mod_base = OTHER; note = 2'-deoxy-2'-fluorocytidine-3'-phosphate
  modified_base 8: mod_base = OTHER; note = 2'-O-methyladenosine-3'-phosphate
  modified_base 9: mod_base = OTHER; note = 2'-deoxy-2'-fluoroguanosine-3'-phosphate
  modified_base 10: mod_base = OTHER; note = 2'-deoxy-2'-fluoroadenosine-3'-phosphate
  modified_base 11: mod_base = OTHER; note = 2'-deoxy-2'-fluoroguanosine-3'-phosphate
  modified_base 12: mod_base = OTHER; note = 2'-O-methylcytidine-3'-phosphate
  modified_base 13: mod_base = OTHER; note = 2'-O-methyluridine-3'-phosphate
  modified_base 14: mod_base = OTHER; note = 2'-O-methylguanosine-3'-phosphate
  modified_base 15: mod_base = OTHER; note = 2'-O-methylguanosine-3'-phosphate
  modified_base 16: mod_base = OTHER; note = 2'-O-methyladenosine-3'-phosphate
  modified_base 17: mod_base = OTHER; note = 2'-O-methylguanosine-3'-phosphate
  modified_base 18: mod_base = OTHER; note = 2'-O-methyladenosine-3'-phosphate
  modified_base 19: mod_base = OTHER; note = 2'-O-methylcytidine-3'-phosphorothioate
  modified_base 20: mod_base = OTHER; note = 2'-O-methylguanosine-3'-phosphorothioate
  modified_base 21: mod_base = OTHER; note = 2'-O-methyladenosine
cgaccacagagctggagacga

SEQ ID NO: 2436 - RNA, 21 nt, synthetic construct
  source 1..21: mol_type = other RNA
  modified_base 1: mod_base = OTHER; note = 2'-O-methylguanosine-3'-phosphorothioate
  modified_base 2: mod_base = OTHER; note = 2'-O-methylcytidine-3'-phosphorothioate
  modified_base 3: mod_base = OTHER; note = 2'-O-methylcytidine-3'-phosphate
  modified_base 4: mod_base = OTHER; note = 2'-O-methylcytidine-3'-phosphate
  modified_base 5: mod_base = OTHER; note = 2'-O-methyluridine-3'-phosphate
  modified_base 6: mod_base = OTHER; note = 2'-O-methylguanosine-3'-phosphate
  modified_base 7: mod_base = OTHER; note = 2'-deoxy-2'-fluorouridine-3'-phosphate
  modified_base 8: mod_base = OTHER; note = 2'-O-methyluridine-3'-phosphate
  modified_base 9: mod_base = OTHER; note = 2'-deoxy-2'-fluorocytidine-3'-phosphate
  modified_base 10: mod_base = OTHER; note = 2'-deoxy-2'-fluorouridine-3'-phosphate
  modified_base 11: mod_base = OTHER; note = 2'-deoxy-2'-fluorocytidine-3'-phosphate
  modified_base 12: mod_base = OTHER; note = 2'-O-methyladenosine-3'-phosphate
  modified_base 13: mod_base = OTHER; note = 2'-O-methyladenosine-3'-phosphate
  modified_base 14: mod_base = OTHER; note = 2'-O-methylcytidine-3'-phosphate
  modified_base 15: mod_base = OTHER; note = 2'-O-methylguanosine-3'-phosphate
  modified_base 16: mod_base = OTHER; note = 2'-O-methylcytidine-3'-phosphate
  modified_base 17: mod_base = OTHER; note = 2'-O-methylcytidine-3'-phosphate
  modified_base 18: mod_base = OTHER; note = 2'-O-methylguanosine-3'-phosphate
  modified_base 19: mod_base = OTHER; note = 2'-O-methylcytidine-3'-phosphorothioate
  modified_base 20: mod_base = OTHER; note = 2'-O-methyladenosine-3'-phosphorothioate
  modified_base 21: mod_base = OTHER; note = 2'-O-methyladenosine
gccctgttctcaacgccgcaa

SEQ ID NO: 2437 - RNA, 21 nt, synthetic construct
  source 1..21: mol_type = other RNA
  modified_base 1: mod_base = OTHER; note = 2'-O-methylcytidine-3'-phosphorothioate
  modified_base 2: mod_base = OTHER; note = 2'-O-methylcytidine-3'-phosphorothioate
  modified_base 3: mod_base = OTHER; note = 2'-O-methyluridine-3'-phosphate
  modified_base 4: mod_base = OTHER; note = 2'-O-methylcytidine-3'-phosphate
  modified_base 5: mod_base = OTHER; note = 2'-O-methyluridine-3'-phosphate
  modified_base 6: mod_base = OTHER; note = 2'-O-methylcytidine-3'-phosphate
  modified_base 7: mod_base = OTHER; note = 2'-deoxy-2'-fluoroadenosine-3'-phosphate
  modified_base 8: mod_base = OTHER; note = 2'-O-methylguanosine-3'-phosphate
  modified_base 9: mod_base = OTHER; note = 2'-deoxy-2'-fluoroadenosine-3'-phosphate
  modified_base 10: mod_base = OTHER; note = 2'-deoxy-2'-fluoroadenosine-3'-phosphate
  modified_base 11: mod_base = OTHER; note = 2'-deoxy-2'-fluoroguanosine-3'-phosphate
  modified_base 12: mod_base = OTHER; note = 2'-O-methylguanosine-3'-phosphate
  modified_base 13: mod_base = OTHER; note = 2'-O-methyladenosine-3'-phosphate
  modified_base 14: mod_base = OTHER; note = 2'-O-methylcytidine-3'-phosphate
  modified_base 15: mod_base = OTHER; note = 2'-O-methyluridine-3'-phosphate
  modified_base 16: mod_base = OTHER; note = 2'-O-methylguanosine-3'-phosphate
  modified_base 17: mod_base = OTHER; note = 2'-O-methyladenosine-3'-phosphate
  modified_base 18: mod_base = OTHER; note = 2'-O-methylcytidine-3'-phosphate
  modified_base 19: mod_base = OTHER; note = 2'-O-methyladenosine-3'-phosphorothioate
  modified_base 20: mod_base = OTHER; note = 2'-O-methyluridine-3'-phosphorothioate
  modified_base 21: mod_base = OTHER; note = 2'-O-methyladenosine
cctctcagaaggactgacata

SEQ ID NO: 2438 - RNA, 21 nt, synthetic construct
  source 1..21: mol_type = other RNA
  modified_base 1: mod_base = OTHER; note = 2'-O-methylcytidine-3'-phosphorothioate
  modified_base 2: mod_base = OTHER; note = 2'-O-methyladenosine-3'-phosphorothioate
  modified_base 3: mod_base = OTHER; note = 2'-O-methylguanosine-3'-phosphate
  modified_base 4: mod_base = OTHER; note = 2'-O-methyladenosine-3'-phosphate
  modified_base 5: mod_base = OTHER; note = 2'-O-methyluridine-3'-phosphate
  modified_base 6: mod_base = OTHER; note = 2'-O-methyladenosine-3'-phosphate
  modified_base 7: mod_base = OTHER; note = 2'-deoxy-2'-fluorocytidine-3'-phosphate
  modified_base 8: mod_base = OTHER; note = 2'-O-methyladenosine-3'-phosphate
  modified_base 9: mod_base = OTHER; note = 2'-deoxy-2'-fluorocytidine-3'-phosphate
  modified_base 10: mod_base = OTHER; note = 2'-deoxy-2'-fluoroadenosine-3'-phosphate
  modified_base 11: mod_base = OTHER; note = 2'-deoxy-2'-fluoroadenosine-3'-phosphate
  modified_base 12: mod_base = OTHER; note = 2'-O-methylguanosine-3'-phosphate
  modified_base 13: mod_base = OTHER; note = 2'-O-methylcytidine-3'-phosphate
  modified_base 14: mod_base = OTHER; note = 2'-O-methyladenosine-3'-phosphate
  modified_base 15: mod_base = OTHER; note = 2'-O-methylcytidine-3'-phosphate
  modified_base 16: mod_base = OTHER; note = 2'-O-methylcytidine-3'-phosphate
  modified_base 17: mod_base = OTHER; note = 2'-O-methylcytidine-3'-phosphate
  modified_base 18: mod_base = OTHER; note = 2'-O-methyluridine-3'-phosphate
  modified_base 19: mod_base = OTHER; note = 2'-O-methyluridine-3'-phosphorothioate
  modified_base 20: mod_base = OTHER; note = 2'-O-methylguanosine-3'-phosphorothioate
  modified_base 21: mod_base = OTHER; note = 2'-O-methyladenosine
cagatacacaagcacccttga

SEQ ID NO: 2439 - RNA, 21 nt, synthetic construct
  source 1..21: mol_type = other RNA
  modified_base 1: mod_base = OTHER; note = 2'-O-methylguanosine-3'-phosphorothioate
  modified_base 2: mod_base = OTHER; note = 2'-O-methylcytidine-3'-phosphorothioate
  modified_base 3: mod_base = OTHER; note = 2'-O-methyluridine-3'-phosphate
  modified_base 4: mod_base = OTHER; note = 2'-O-methylcytidine-3'-phosphate
  modified_base 5: mod_base = OTHER; note = 2'-O-methylcytidine-3'-phosphate
  modified_base 6: mod_base = OTHER; note = 2'-O-methyladenosine-3'-phosphate
  modified_base 7: mod_base = OTHER; note = 2'-deoxy-2'-fluorocytidine-3'-phosphate
  modified_base 8: mod_base = OTHER; note = 2'-O-methyladenosine-3'-phosphate
  modified_base 9: mod_base = OTHER; note = 2'-deoxy-2'-fluoroguanosine-3'-phosphate
  modified_base 10: mod_base = OTHER; note = 2'-deoxy-2'-fluoroadenosine-3'-phosphate
  modified_base 11: mod_base = OTHER; note = 2'-deoxy-2'-fluoroadenosine-3'-phosphate
  modified_base 12: mod_base = OTHER; note = 2'-O-methylcytidine-3'-phosphate
  modified_base 13: mod_base = OTHER; note = 2'-O-methylcytidine-3'-phosphate
  modified_base 14: mod_base = OTHER; note = 2'-O-methylcytidine-3'-phosphate
  modified_base 15: mod_base = OTHER; note = 2'-O-methyladenosine-3'-phosphate
  modified_base 16: mod_base = OTHER; note = 2'-O-methylcytidine-3'-phosphate
  modified_base 17: mod_base = OTHER; note = 2'-O-methyluridine-3'-phosphate
  modified_base 18: mod_base = OTHER; note = 2'-O-methylguanosine-3'-phosphate
  modified_base 19: mod_base = OTHER; note = 2'-O-methyluridine-3'-phosphorothioate
  modified_base 20: mod_base = OTHER; note = 2'-O-methylcytidine-3'-phosphorothioate
  modified_base 21: mod_base = OTHER; note = 2'-O-methyladenosine
gctccacagaacccactgtca

SEQ ID NO: 2440 - RNA, 21 nt, synthetic construct
  source 1..21: mol_type = other RNA
  modified_base 1: mod_base = OTHER; note = 2'-O-methylcytidine-3'-phosphorothioate
  modified_base 2: mod_base = OTHER; note = 2'-O-methyladenosine-3'-phosphorothioate
  modified_base 3: mod_base = OTHER; note = 2'-O-methylcytidine-3'-phosphate
  modified_base 4: mod_base = OTHER; note = 2'-O-methylcytidine-3'-phosphate
  modified_base 5: mod_base = OTHER; note = 2'-O-methylcytidine-3'-phosphate
  modified_base 6: mod_base = OTHER; note = 2'-O-methyluridine-3'-phosphate
  modified_base 7: mod_base = OTHER; note = 2'-deoxy-2'-fluorouridine-3'-phosphate
  modified_base 8: mod_base = OTHER; note = 2'-O-methylcytidine-3'-phosphate
  modified_base 9: mod_base = OTHER; note = 2'-deoxy-2'-fluorocytidine-3'-phosphate
  modified_base 10: mod_base = OTHER; note = 2'-deoxy-2'-fluoroadenosine-3'-phosphate
  modified_base 11: mod_base = OTHER; note = 2'-deoxy-2'-fluoroadenosine-3'-phosphate
  modified_base 12: mod_base = OTHER; note = 2'-O-methylcytidine-3'-phosphate
  modified_base 13: mod_base = OTHER; note = 2'-O-methyladenosine-3'-phosphate
  modified_base 14: mod_base = OTHER; note = 2'-O-methylcytidine-3'-phosphate
  modified_base 15: mod_base = OTHER; note = 2'-O-methylguanosine-3'-phosphate
  modified_base 16: mod_base = OTHER; note = 2'-O-methylcytidine-3'-phosphate
  modified_base 17: mod_base = OTHER; note = 2'-O-methyluridine-3'-phosphate
  modified_base 18: mod_base = OTHER; note = 2'-O-methylcytidine-3'-phosphate
  modified_base 19: mod_base = OTHER; note = 2'-O-methyladenosine-3'-phosphorothioate
  modified_base 20: mod_base = OTHER; note = 2'-O-methylguanosine-3'-phosphorothioate
  modified_base 21: mod_base = OTHER; note = 2'-O-methyladenosine
cacccttccaacacgctcaga

SEQ ID NO: 2441 - RNA, 21 nt, synthetic construct
  source 1..21: mol_type = other RNA
  modified_base 1: mod_base = OTHER; note = 2'-O-methylcytidine-3'-phosphorothioate
  modified_base 2: mod_base = OTHER; note = 2'-O-methyladenosine-3'-phosphorothioate
  modified_base 3: mod_base = OTHER; note = 2'-O-methyladenosine-3'-phosphate
  modified_base 4: mod_base = OTHER; note = 2'-O-methylcytidine-3'-phosphate
  modified_base 5: mod_base = OTHER; note = 2'-O-methyladenosine-3'-phosphate
  modified_base 6: mod_base = OTHER; note = 2'-O-methyladenosine-3'-phosphate
  modified_base 7: mod_base = OTHER; note = 2'-deoxy-2'-fluorocytidine-3'-phosphate
  modified_base 8: mod_base = OTHER; note = 2'-O-methyladenosine-3'-phosphate
  modified_base 9: mod_base = OTHER; note = 2'-deoxy-2'-fluoroadenosine-3'-phosphate
  modified_base 10: mod_base = OTHER; note = 2'-deoxy-2'-fluorouridine-3'-phosphate
  modified_base 11: mod_base = OTHER; note = 2'-deoxy-2'-fluoroguanosine-3'-phosphate
  modified_base 12: mod_base = OTHER; note = 2'-O-methylguanosine-3'-phosphate
  modified_base 13: mod_base = OTHER; note = 2'-O-methylcytidine-3'-phosphate
  modified_base 14: mod_base = OTHER; note = 2'-O-methyladenosine-3'-phosphate
  modified_base 15: mod_base = OTHER; note = 2'-O-methyladenosine-3'-phosphate
  modified_base 16: mod_base = OTHER; note = 2'-O-methylcytidine-3'-phosphate
  modified_base 17: mod_base = OTHER; note = 2'-O-methylcytidine-3'-phosphate
  modified_base 18: mod_base = OTHER; note = 2'-O-methyluridine-3'-phosphate
  modified_base 19: mod_base = OTHER; note = 2'-O-methylcytidine-3'-phosphorothioate
  modified_base 20: mod_base = OTHER; note = 2'-O-methylcytidine-3'-phosphorothioate
  modified_base 21: mod_base = OTHER; note = 2'-O-methyladenosine
caacaacaatggcaacctcca

SEQ ID NO: 2442 - RNA, 21 nt, synthetic construct
  source 1..21: mol_type = other RNA
  modified_base 1: mod_base = OTHER; note = 2'-O-methylcytidine-3'-phosphorothioate
  modified_base 2: mod_base = OTHER; note = 2'-O-methylguanosine-3'-phosphorothioate
  modified_base 3: mod_base = OTHER; note = 2'-O-methylcytidine-3'-phosphate
  modified_base 4: mod_base = OTHER; note = 2'-O-methyluridine-3'-phosphate
  modified_base 5: mod_base = OTHER; note = 2'-O-methyluridine-3'-phosphate
  modified_base 6: mod_base = OTHER; note = 2'-O-methylcytidine-3'-phosphate
  modified_base 7: mod_base = OTHER; note = 2'-deoxy-2'-fluorocytidine-3'-phosphate
  modified_base 8: mod_base = OTHER; note = 2'-O-methyladenosine-3'-phosphate
  modified_base 9: mod_base = OTHER; note = 2'-deoxy-2'-fluoroadenosine-3'-phosphate
  modified_base 10: mod_base = OTHER; note = 2'-deoxy-2'-fluoroadenosine-3'-phosphate
  modified_base 11: mod_base = OTHER; note = 2'-deoxy-2'-fluoroguanosine-3'-phosphate
  modified_base 12: mod_base = OTHER; note = 2'-O-methyladenosine-3'-phosphate
  modified_base 13: mod_base = OTHER; note = 2'-O-methylguanosine-3'-phosphate
  modified_base 14: mod_base = OTHER; note = 2'-O-methylcytidine-3'-phosphate
  modified_base 15: mod_base = OTHER; note = 2'-O-methylcytidine-3'-phosphate
  modified_base 16: mod_base = OTHER; note = 2'-O-methylguanosine-3'-phosphate
  modified_base 17: mod_base = OTHER; note = 2'-O-methylcytidine-3'-phosphate
  modified_base 18: mod_base = OTHER; note = 2'-O-methyluridine-3'-phosphate
  modified_base 19: mod_base = OTHER; note = 2'-O-methylguanosine-3'-phosphorothioate
  modified_base 20: mod_base = OTHER; note = 2'-O-methyladenosine-3'-phosphorothioate
  modified_base 21: mod_base = OTHER; note = 2'-O-methyladenosine
cgcttccaaagagccgctgaa

SEQ ID NO: 2443 - RNA, 21 nt, synthetic construct
  source 1..21: mol_type = other RNA
  modified_base 1: mod_base = OTHER; note = 2'-O-methylguanosine-3'-phosphorothioate
  modified_base 2: mod_base = OTHER; note = 2'-O-methylcytidine-3'-phosphorothioate
  modified_base 3: mod_base = OTHER; note = 2'-O-methylguanosine-3'-phosphate
  modified_base 4: mod_base = OTHER; note = 2'-O-methylcytidine-3'-phosphate
  modified_base 5: mod_base = OTHER; note = 2'-O-methylcytidine-3'-phosphate
  modified_base 6: mod_base = OTHER; note = 2'-O-methyladenosine-3'-phosphate
  modified_base 7: mod_base = OTHER; note = 2'-deoxy-2'-fluoroadenosine-3'-phosphate
  modified_base 8: mod_base = OTHER; note = 2'-O-methylcytidine-3'-phosphate
  modified_base 9: mod_base = OTHER; note = 2'-deoxy-2'-fluoroadenosine-3'-phosphate
  modified_base 10: mod_base = OTHER; note = 2'-deoxy-2'-fluorocytidine-3'-phosphate
  modified_base 11: mod_base = OTHER; note = 2'-deoxy-2'-fluorouridine-3'-phosphate
  modified_base 12: mod_base = OTHER; note = 2'-O-methylcytidine-3'-phosphate
  modified_base 13: mod_base = OTHER; note = 2'-O-methyladenosine-3'-phosphate
  modified_base 14: mod_base = OTHER; note = 2'-O-methylcytidine-3'-phosphate
  modified_base 15: mod_base = OTHER; note = 2'-O-methylguanosine-3'-phosphate
  modified_base 16: mod_base = OTHER; note = 2'-O-methyladenosine-3'-phosphate
  modified_base 17: mod_base = OTHER; note = 2'-O-methylguanosine-3'-phosphate
  modified_base 18: mod_base = OTHER; note = 2'-O-methylcytidine-3'-phosphate
  modified_base 19: mod_base = OTHER; note = 2'-O-methylguanosine-3'-phosphorothioate
  modified_base 20: mod_base = OTHER; note = 2'-O-methyladenosine-3'-phosphorothioate
  modified_base 21: mod_base = OTHER; note = 2'-O-methyladenosine
gcgccaacactcacgagcgaa

SEQ ID NO: 2444 - RNA, 21 nt, synthetic construct
  source 1..21: mol_type = other RNA
  modified_base 1: mod_base = OTHER; note = 2'-O-methylguanosine-3'-phosphorothioate
  modified_base 2: mod_base = OTHER; note = 2'-O-methyluridine-3'-phosphorothioate
  modified_base 3: mod_base = OTHER; note = 2'-O-methylcytidine-3'-phosphate
  modified_base 4: mod_base = OTHER; note = 2'-O-methylcytidine-3'-phosphate
  modified_base 5: mod_base = OTHER; note = 2'-O-methyladenosine-3'-phosphate
  modified_base 6: mod_base = OTHER; note = 2'-O-methylcytidine-3'-phosphate
  modified_base 7: mod_base = OTHER; note = 2'-deoxy-2'-fluorocytidine-3'-phosphate
  modified_base 8: mod_base = OTHER; note = 2'-O-methyluridine-3'-phosphate
  modified_base 9: mod_base = OTHER; note = 2'-deoxy-2'-fluorocytidine-3'-phosphate
  modified_base 10: mod_base = OTHER; note = 2'-deoxy-2'-fluorouridine-3'-phosphate
  modified_base 11: mod_base = OTHER; note = 2'-deoxy-2'-fluorocytidine-3'-phosphate
  modified_base 12: mod_base = OTHER; note = 2'-O-methyladenosine-3'-phosphate
  modified_base 13: mod_base = OTHER; note = 2'-O-methylguanosine-3'-phosphate
  modified_base 14: mod_base = OTHER; note = 2'-O-methylguanosine-3'-phosphate
  modified_base 15: mod_base = OTHER; note = 2'-O-methylcytidine-3'-phosphate
  modified_base 16: mod_base = OTHER; note = 2'-O-methylcytidine-3'-phosphate
  modified_base 17: mod_base = OTHER; note = 2'-O-methylguanosine-3'-phosphate
  modified_base 18: mod_base = OTHER; note = 2'-O-methyladenosine-3'-phosphate
  modified_base 19: mod_base = OTHER; note = 2'-O-methylguanosine-3'-phosphorothioate
  modified_base 20: mod_base = OTHER; note = 2'-O-methyladenosine-3'-phosphorothioate
  modified_base 21: mod_base = OTHER; note = 2'-O-methyladenosine
gtccacctctcaggccgagaa

SEQ ID NO: 2445 - RNA, 21 nt, synthetic construct
  source 1..21: mol_type = other RNA
  modified_base 1: mod_base = OTHER; note = 2'-O-methylcytidine-3'-phosphorothioate
  modified_base 2: mod_base = OTHER; note = 2'-O-methyladenosine-3'-phosphorothioate
  modified_base 3: mod_base = OTHER; note = 2'-O-methylguanosine-3'-phosphate
  modified_base 4: mod_base = OTHER; note = 2'-O-methylguanosine-3'-phosphate
  modified_base 5: mod_base = OTHER; note = 2'-O-methyladenosine-3'-phosphate
  modified_base 6: mod_base = OTHER; note = 2'-O-methylcytidine-3'-phosphate
  modified_base 7: mod_base = OTHER; note = 2'-deoxy-2'-fluoroadenosine-3'-phosphate
  modified_base 8: mod_base = OTHER; note = 2'-O-methylguanosine-3'-phosphate
  modified_base 9: mod_base = OTHER; note = 2'-deoxy-2'-fluoroadenosine-3'-phosphate
  modified_base 10: mod_base = OTHER; note = 2'-deoxy-2'-fluoroguanosine-3'-phosphate
  modified_base 11: mod_base = OTHER; note = 2'-deoxy-2'-fluoroadenosine-3'-phosphate
  modified_base 12: mod_base = OTHER; note = 2'-O-methylcytidine-3'-phosphate
  modified_base 13: mod_base = OTHER; note = 2'-O-methylguanosine-3'-phosphate
  modified_base 14: mod_base = OTHER; note = 2'-O-methyladenosine-3'-phosphate
  modified_base 15: mod_base = OTHER; note = 2'-O-methylcytidine-3'-phosphate
  modified_base 16: mod_base = OTHER; note = 2'-O-methyladenosine-3'-phosphate
  modified_base 17: mod_base = OTHER; note = 2'-O-methyladenosine-3'-phosphate
  modified_base 18: mod_base = OTHER; note = 2'-O-methyluridine-3'-phosphate
  modified_base 19: mod_base = OTHER; note = 2'-O-methylguanosine-3'-phosphorothioate
  modified_base 20: mod_base = OTHER; note = 2'-O-methyladenosine-3'-phosphorothioate
  modified_base 21: mod_base = OTHER; note = 2'-O-methyladenosine
caggacagagacgacaatgaa

SEQ ID NO: 2446 - RNA, 21 nt, synthetic construct
  source 1..21: mol_type = other RNA
  modified_base 1: mod_base = OTHER; note = 2'-O-methylcytidine-3'-phosphorothioate
  modified_base 2: mod_base = OTHER; note = 2'-O-methyluridine-3'-phosphorothioate
  modified_base 3: mod_base = OTHER; note = 2'-O-methyluridine-3'-phosphate
  modified_base 4: mod_base = OTHER; note = 2'-O-methylguanosine-3'-phosphate
  modified_base 5: mod_base = OTHER; note = 2'-O-methyladenosine-3'-phosphate
  modified_base 6: mod_base = OTHER; note = 2'-O-methylcytidine-3'-phosphate
  modified_base 7: mod_base = OTHER; note = 2'-deoxy-2'-fluorouridine-3'-phosphate
  modified_base 8: mod_base = OTHER; note = 2'-O-methyladenosine-3'-phosphate
  modified_base 9: mod_base = OTHER; note = 2'-deoxy-2'-fluoroadenosine-3'-phosphate
  modified_base 10: mod_base = OTHER; note = 2'-deoxy-2'-fluorocytidine-3'-phosphate
  modified_base 11: mod_base = OTHER; note = 2'-deoxy-2'-fluoroadenosine-3'-phosphate
  modified_base 12: mod_base = OTHER; note = 2'-O-methylcytidine-3'-phosphate
  modified_base 13: mod_base = OTHER; note = 2'-O-methylcytidine-3'-phosphate
  modified_base 14: mod_base = OTHER; note = 2'-O-methyladenosine-3'-phosphate
  modified_base 15: mod_base = OTHER; note = 2'-O-methylcytidine-3'-phosphate
  modified_base 16: mod_base = OTHER; note = 2'-O-methylcytidine-3'-phosphate
  modified_base 17: mod_base = OTHER; note = 2'-O-methyladenosine-3'-phosphate
  modified_base 18: mod_base = OTHER; note = 2'-O-methylcytidine-3'-phosphate
  modified_base 19: mod_base = OTHER; note = 2'-O-methylcytidine-3'-phosphorothioate
  modified_base 20: mod_base = OTHER; note = 2'-O-methyladenosine-3'-phosphorothioate
  modified_base 21: mod_base = OTHER; note = 2'-O-methyladenosine
cttgactaacaccaccaccaa

SEQ ID NO: 2447 - RNA, 21 nt, synthetic construct
  source 1..21: mol_type = other RNA
  modified_base 1: mod_base = OTHER; note = 2'-O-methylcytidine-3'-phosphorothioate
  modified_base 2: mod_base = OTHER; note = 2'-O-methyluridine-3'-phosphorothioate
  modified_base 3: mod_base = OTHER; note = 2'-O-methylguanosine-3'-phosphate
  modified_base 4: mod_base = OTHER; note = 2'-O-methyluridine-3'-phosphate
  modified_base 5: mod_base = OTHER; note = 2'-O-methylcytidine-3'-phosphate
  modified_base 6: mod_base = OTHER; note = 2'-O-methyladenosine-3'-phosphate
  modified_base 7: mod_base = OTHER; note = 2'-deoxy-2'-fluoroadenosine-3'-phosphate
  modified_base 8: mod_base = OTHER; note = 2'-O-methylcytidine-3'-phosphate
  modified_base 9: mod_base = OTHER; note = 2'-deoxy-2'-fluorocytidine-3'-phosphate
  modified_base 10: mod_base = OTHER; note = 2'-deoxy-2'-fluoroguanosine-3'-phosphate
  modified_base 11: mod_base = OTHER; note = 2'-deoxy-2'-fluoroadenosine-3'-phosphate
  modified_base 12: mod_base = OTHER; note = 2'-O-methyladenosine-3'-phosphate
  modified_base 13: mod_base = OTHER; note = 2'-O-methylguanosine-3'-phosphate
  modified_base 14: mod_base = OTHER; note = 2'-O-methyluridine-3'-phosphate
  modified_base 15: mod_base = OTHER; note = 2'-O-methylguanosine-3'-phosphate
  modified_base 16: mod_base = OTHER; note = 2'-O-methyluridine-3'-phosphate
  modified_base 17: mod_base = OTHER; note = 2'-O-methylguanosine-3'-phosphate
  modified_base 18: mod_base = OTHER; note = 2'-O-methyladenosine-3'-phosphate
  modified_base 19: mod_base = OTHER; note = 2'-O-methylguanosine-3'-phosphorothioate
  modified_base 20: mod_base = OTHER; note = 2'-O-methyluridine-3'-phosphorothioate
  modified_base 21: mod_base = OTHER; note = 2'-O-methyladenosine
ctgtcaaccgaagtgtgagta

SEQ ID NO: 2448 - RNA, 21 nt, synthetic construct
  source 1..21: mol_type = other RNA
  modified_base 1: mod_base = OTHER; note = 2'-O-methyladenosine-3'-phosphorothioate
  modified_base 2: mod_base = OTHER; note = 2'-O-methylguanosine-3'-phosphorothioate
  modified_base 3: mod_base = OTHER; note = 2'-O-methyladenosine-3'-phosphate
  modified_base 4: mod_base = OTHER; note = 2'-O-methylguanosine-3'-phosphate
  modified_base 5: mod_base = OTHER; note = 2'-O-methyluridine-3'-phosphate
  modified_base 6: mod_base = OTHER; note = 2'-O-methylguanosine-3'-phosphate
  modified_base 7: mod_base = OTHER; note = 2'-deoxy-2'-fluoroguanosine-3'-phosphate
  modified_base 8: mod_base = OTHER; note = 2'-O-methyluridine-3'-phosphate
  modified_base 9: mod_base = OTHER; note = 2'-deoxy-2'-fluorouridine-3'-phosphate
  modified_base 10: mod_base = OTHER; note = 2'-deoxy-2'-fluorouridine-3'-phosphate
  modified_base 11: mod_base = OTHER; note = 2'-deoxy-2'-fluoroguanosine-3'-phosphate
  modified_base 12: mod_base = OTHER; note = 2'-O-methyladenosine-3'-phosphate
  modified_base 13: mod_base = OTHER; note = 2'-O-methylcytidine-3'-phosphate
  modified_base 14: mod_base = OTHER; note = 2'-O-methylguanosine-3'-phosphate
  modified_base 15: mod_base = OTHER; note = 2'-O-methyluridine-3'-phosphate
  modified_base 16: mod_base = OTHER; note = 2'-O-methylguanosine-3'-phosphate
  modified_base 17: mod_base = OTHER; note = 2'-O-methylguanosine-3'-phosphate
  modified_base 18: mod_base = OTHER; note = 2'-O-methyladenosine-3'-phosphate
  modified_base 19: mod_base = OTHER; note = 2'-O-methylcytidine-3'-phosphorothioate
  modified_base 20: mod_base = OTHER; note = 2'-O-methyluridine-3'-phosphorothioate
  modified_base 21: mod_base = OTHER; note = 2'-O-methyladenosine
agagtggtttgacgtggacta

SEQ ID NO: 2449 - RNA, 21 nt, synthetic construct
  source 1..21: mol_type = other RNA
  modified_base 1: mod_base = OTHER; note = 2'-O-methylguanosine-3'-phosphorothioate
  modified_base 2: mod_base = OTHER; note = 2'-O-methylguanosine-3'-phosphorothioate
  modified_base 3: mod_base = OTHER; note = 2'-O-methyladenosine-3'-phosphate
  modified_base 4: mod_base = OTHER; note = 2'-O-methyladenosine-3'-phosphate
  modified_base 5: mod_base = OTHER; note = 2'-O-methyladenosine-3'-phosphate
  modified_base 6: mod_base = OTHER; note = 2'-O-methylcytidine-3'-phosphate
  modified_base 7: mod_base = OTHER; note = 2'-deoxy-2'-fluorouridine-3'-phosphate
  modified_base 8: mod_base = OTHER; note = 2'-O-methyluridine-3'-phosphate
  modified_base 9: mod_base = OTHER; note = 2'-deoxy-2'-fluorouridine-3'-phosphate
  modified_base 10: mod_base = OTHER; note = 2'-deoxy-2'-fluorouridine-3'-phosphate
  modified_base 11: mod_base = OTHER; note = 2'-deoxy-2'-fluoroguanosine-3'-phosphate
  modified_base 12: mod_base = OTHER; note = 2'-O-methyladenosine-3'-phosphate
  modified_base 13: mod_base = OTHER; note = 2'-O-methyladenosine-3'-phosphate
  modified_base 14: mod_base = OTHER; note = 2'-O-methyladenosine-3'-phosphate
  modified_base 15: mod_base = OTHER; note = 2'-O-methyladenosine-3'-phosphate
  modified_base 16: mod_base = OTHER; note = 2'-O-methylcytidine-3'-phosphate
  modified_base 17: mod_base = OTHER; note = 2'-O-methyladenosine-3'-phosphate
  modified_base 18: mod_base = OTHER; note = 2'-O-methyluridine-3'-phosphate
  modified_base 19: mod_base = OTHER; note = 2'-O-methylcytidine-3'-phosphorothioate
  modified_base 20: mod_base = OTHER; note = 2'-O-methyladenosine-3'-phosphorothioate
  modified_base 21: mod_base = OTHER; note = 2'-O-methyladenosine
ggaaacttttgaaaacatcaa

SEQ ID NO: 2450 - RNA, 21 nt, synthetic construct
  source 1..21: mol_type = other RNA
  modified_base 1: mod_base = OTHER; note = 2'-O-methylguanosine-3'-phosphorothioate
  modified_base 2: mod_base = OTHER; note = 2'-O-methylcytidine-3'-phosphorothioate
  modified_base 3: mod_base = OTHER; note = 2'-O-methyladenosine-3'-phosphate
  modified_base 4: mod_base = OTHER; note = 2'-O-methylcytidine-3'-phosphate
  modified_base 5: mod_base = OTHER; note = 2'-O-methylcytidine-3'-phosphate
  modified_base 6: mod_base = OTHER; note = 2'-O-methyladenosine-3'-phosphate
  modified_base 7: mod_base = OTHER; note = 2'-deoxy-2'-fluoroadenosine-3'-phosphate
  modified_base 8: mod_base = OTHER; note = 2'-O-methyladenosine-3'-phosphate
  modified_base 9: mod_base = OTHER; note = 2'-deoxy-2'-fluoroguanosine-3'-phosphate
  modified_base 10: mod_base = OTHER; note = 2'-deoxy-2'-fluoroadenosine-3'-phosphate
  modified_base 11: mod_base = OTHER; note = 2'-deoxy-2'-fluoroguanosine-3'-phosphate
  modified_base 12: mod_base = OTHER; note = 2'-O-methylcytidine-3'-phosphate
  modified_base 13: mod_base = OTHER; note = 2'-O-methyladenosine-3'-phosphate
  modified_base 14: mod_base = OTHER; note = 2'-O-methyluridine-3'-phosphate
  modified_base 15: mod_base = OTHER; note = 2'-O-methyladenosine-3'-phosphate
  modified_base 16: mod_base = OTHER; note = 2'-O-methylguanosine-3'-phosphate
  modified_base 17: mod_base = OTHER; note = 2'-O-methyladenosine-3'-phosphate
  modified_base 18: mod_base = OTHER; note = 2'-O-methylguanosine-3'-phosphate
  modified_base 19: mod_base = OTHER; note = 2'-O-methyluridine-3'-phosphorothioate
  modified_base 20: mod_base = OTHER; note = 2'-O-methylguanosine-3'-phosphorothioate
  modified_base 21: mod_base = OTHER; note = 2'-O-methyladenosine
gcaccaaagagcatagagtga

SEQ ID NO: 2451 - RNA, 21 nt, synthetic construct
  source 1..21: mol_type = other RNA
  modified_base 1: mod_base = OTHER; note = 2'-O-methylcytidine-3'-phosphorothioate
  modified_base 2: mod_base = OTHER; note = 2'-O-methylguanosine-3'-phosphorothioate
  modified_base 3: mod_base = OTHER; note = 2'-O-methyladenosine-3'-phosphate
  modified_base 4: mod_base = OTHER; note = 2'-O-methylguanosine-3'-phosphate
  modified_base 5: mod_base = OTHER; note = 2'-O-methylguanosine-3'-phosphate
  modified_base 6: mod_base = OTHER; note = 2'-O-methyluridine-3'-phosphate
  modified_base 7: mod_base = OTHER; note = 2'-deoxy-2'-fluoroadenosine-3'-phosphate
  modified_base 8: mod_base = OTHER; note = 2'-O-methyladenosine-3'-phosphate
  modified_base 9: mod_base = OTHER; note = 2'-deoxy-2'-fluoroguanosine-3'-phosphate
  modified_base 10: mod_base = OTHER; note = 2'-deoxy-2'-fluorocytidine-3'-phosphate
  modified_base 11: mod_base = OTHER; note = 2'-deoxy-2'-fluoroadenosine-3'-phosphate
  modified_base 12: mod_base = OTHER; note = 2'-O-methyluridine-3'-phosphate
  modified_base 13: mod_base = OTHER; note = 2'-O-methylcytidine-3'-phosphate
  modified_base 14: mod_base = OTHER; note = 2'-O-methylguanosine-3'-phosphate
  modified_base 15: mod_base = OTHER; note = 2'-O-methyladenosine-3'-phosphate
  modified_base 16: mod_base = OTHER; note = 2'-O-methylcytidine-3'-phosphate
  modified_base 17: mod_base = OTHER; note = 2'-O-methylcytidine-3'-phosphate
  modified_base 18: mod_base = OTHER; note = 2'-O-methyladenosine-3'-phosphate
  modified_base 19: mod_base = OTHER; note = 2'-O-methylguanosine-3'-phosphorothioate
  modified_base 20: mod_base = OTHER; note = 2'-O-methylguanosine-3'-phosphorothioate
  modified_base 21: mod_base = OTHER; note = 2'-O-methyladenosine
cgaggtaagcatcgaccagga

SEQ ID NO: 2452 - RNA, 21 nt, synthetic construct
  source 1..21: mol_type = other RNA
  modified_base 1: mod_base = OTHER; note = 2'-O-methylcytidine-3'-phosphorothioate
  modified_base 2: mod_base = OTHER; note = 2'-O-methyluridine-3'-phosphorothioate
  modified_base 3: mod_base = OTHER; note = 2'-O-methylguanosine-3'-phosphate
  modified_base 4: mod_base = OTHER; note = 2'-O-methyladenosine-3'-phosphate
  modified_base 5: mod_base = OTHER; note = 2'-O-methylcytidine-3'-phosphate
  modified_base 6: mod_base = OTHER; note = 2'-O-methylcytidine-3'-phosphate
  modified_base 7: mod_base = OTHER; note = 2'-deoxy-2'-fluorouridine-3'-phosphate
  modified_base 8: mod_base = OTHER; note = 2'-O-methylguanosine-3'-phosphate
  modified_base 9: mod_base = OTHER; note = 2'-deoxy-2'-fluorocytidine-3'-phosphate
  modified_base 10: mod_base = OTHER; note = 2'-deoxy-2'-fluoroadenosine-3'-phosphate
  modified_base 11: mod_base = OTHER; note = 2'-deoxy-2'-fluoroguanosine-3'-phosphate
  modified_base 12: mod_base = OTHER; note = 2'-O-methylcytidine-3'-phosphate
  modified_base 13: mod_base = OTHER; note = 2'-O-methylcytidine-3'-phosphate
  modified_base 14: mod_base = OTHER; note = 2'-O-methyluridine-3'-phosphate
  modified_base 15: mod_base = OTHER; note = 2'-O-methylguanosine-3'-phosphate
  modified_base 16: mod_base = OTHER; note = 2'-O-methylguanosine-3'-phosphate
  modified_base 17: mod_base = OTHER; note = 2'-O-methyladenosine-3'-phosphate
  modified_base 18: mod_base = OTHER; note = 2'-O-methylguanosine-3'-phosphate
  modified_base 19: mod_base = OTHER; note = 2'-O-methyladenosine-3'-phosphorothioate
  modified_base 20: mod_base = OTHER; note = 2'-O-methylcytidine-3'-phosphorothioate
  modified_base 21: mod_base = OTHER; note = 2'-O-methyladenosine
ctgacctgcagcctggagaca

SEQ ID NO: 2453 - RNA, 21 nt, synthetic construct
  source 1..21: mol_type = other RNA
  modified_base 1: mod_base = OTHER; note = 2'-O-methylcytidine-3'-phosphorothioate
  modified_base 2: mod_base = OTHER; note = 2'-O-methyluridine-3'-phosphorothioate
  modified_base 3: mod_base = OTHER; note = 2'-O-methylguanosine-3'-phosphate
  modified_base 4: mod_base = OTHER; note = 2'-O-methylcytidine-3'-phosphate
  modified_base 5: mod_base = OTHER; note = 2'-O-methyladenosine-3'-phosphate
  modified_base 6: mod_base = OTHER; note = 2'-O-methyladenosine-3'-phosphate
  modified_base 7: mod_base = OTHER; note = 2'-deoxy-2'-fluoroguanosine-3'-phosphate
  modified_base 8: mod_base = OTHER; note = 2'-O-methyladenosine-3'-phosphate
  modified_base 9: mod_base = OTHER; note = 2'-deoxy-2'-fluoroadenosine-3'-phosphate
  modified_base 10: mod_base = OTHER; note = 2'-deoxy-2'-fluorocytidine-3'-phosphate
  modified_base 11: mod_base = OTHER; note = 2'-deoxy-2'-fluoroguanosine-3'-phosphate
  modified_base 12: mod_base = OTHER; note = 2'-O-methyladenosine-3'-phosphate
  modified_base 13: mod_base = OTHER; note = 2'-O-methyladenosine-3'-phosphate
  modified_base 14: mod_base = OTHER; note = 2'-O-methylguanosine-3'-phosphate
  modified_base 15: mod_base = OTHER; note = 2'-O-methyladenosine-3'-phosphate
  modified_base 16: mod_base = OTHER; note = 2'-O-methylcytidine-3'-phosphate
  modified_base 17: mod_base = OTHER; note = 2'-O-methylcytidine-3'-phosphate
  modified_base 18: mod_base = OTHER; note = 2'-O-methyladenosine-3'-phosphate
  modified_base 19: mod_base = OTHER; note = 2'-O-methylguanosine-3'-phosphorothioate
  modified_base 20: mod_base = OTHER; note = 2'-O-methyladenosine-3'-phosphorothioate
  modified_base 21: mod_base = OTHER; note = 2'-O-methyladenosine
ctgcaagaacgaagaccagaa

SEQ ID NO: 2454 - RNA, 21 nt, synthetic construct
  source 1..21: mol_type = other RNA
  modified_base 1: mod_base = OTHER; note = 2'-O-methyluridine-3'-phosphorothioate
  modified_base 2: mod_base = OTHER; note = 2'-O-methylguanosine-3'-phosphorothioate
  modified_base 3: mod_base = OTHER; note = 2'-O-methylcytidine-3'-phosphate
  modified_base 4: mod_base = OTHER; note = 2'-O-methyluridine-3'-phosphate
  modified_base 5: mod_base = OTHER; note = 2'-O-methyluridine-3'-phosphate
  modified_base 6: mod_base = OTHER; note = 2'-O-methylcytidine-3'-phosphate
  modified_base 7: mod_base = OTHER; note = 2'-deoxy-2'-fluoroadenosine-3'-phosphate
  modified_base 8: mod_base = OTHER; note = 2'-O-methyladenosine-3'-phosphate
  modified_base 9: mod_base = OTHER; note = 2'-deoxy-2'-fluorocytidine-3'-phosphate
  modified_base 10: mod_base = OTHER; note = 2'-deoxy-2'-fluorouridine-3'-phosphate
  modified_base 11: mod_base = OTHER; note = 2'-deoxy-2'-fluoroadenosine-3'-phosphate
  modified_base 12: mod_base = OTHER; note = 2'-O-methylcytidine-3'-phosphate
  modified_base 13: mod_base = OTHER; note = 2'-O-methyladenosine-3'-phosphate
  modified_base 14: mod_base = OTHER; note = 2'-O-methyladenosine-3'-phosphate
  modified_base 15: mod_base = OTHER; note = 2'-O-methylcytidine-3'-phosphate
  modified_base 16: mod_base = OTHER; note = 2'-O-methylguanosine-3'-phosphate
  modified_base 17: mod_base = OTHER; note = 2'-O-methyluridine-3'-phosphate
  modified_base 18: mod_base = OTHER; note = 2'-O-methylguanosine-3'-phosphate
  modified_base 19: mod_base = OTHER; note = 2'-O-methylcytidine-3'-phosphorothioate
  modified_base 20: mod_base = OTHER; note = 2'-O-methylguanosine-3'-phosphorothioate
  modified_base 21: mod_base = OTHER; note = 2'-O-methyladenosine
tgcttcaactacaacgtgcga

SEQ ID NO: 2455 - RNA, 21 nt, synthetic construct
  source 1..21: mol_type = other RNA
  modified_base 1: mod_base = OTHER; note = 2'-O-methyluridine-3'-phosphorothioate
  modified_base 2: mod_base = OTHER; note = 2'-O-methyluridine-3'-phosphorothioate
  modified_base 3: mod_base = OTHER; note = 2'-O-methylguanosine-3'-phosphate
  modified_base 4: mod_base = OTHER; note = 2'-O-methylcytidine-3'-phosphate
  modified_base 5: mod_base = OTHER; note = 2'-O-methyluridine-3'-phosphate
  modified_base 6: mod_base = OTHER; note = 2'-O-methylguanosine-3'-phosphate
  modified_base 7: mod_base = OTHER; note = 2'-deoxy-2'-fluorouridine-3'-phosphate
  modified_base 8: mod_base = OTHER; note = 2'-O-methylguanosine-3'-phosphate
  modified_base 9: mod_base = OTHER; note = 2'-deoxy-2'-fluoroadenosine-3'-phosphate
  modified_base 10: mod_base = OTHER; note = 2'-deoxy-2'-fluorocytidine-3'-phosphate
  modified_base 11: mod_base = OTHER; note = 2'-deoxy-2'-fluoroguanosine-3'-phosphate
  modified_base 12: mod_base = OTHER; note = 2'-O-methyladenosine-3'-phosphate
  modified_base 13: mod_base = OTHER; note = 2'-O-methylcytidine-3'-phosphate
  modified_base 14: mod_base = OTHER; note = 2'-O-methyluridine-3'-phosphate
  modified_base 15: mod_base = OTHER; note = 2'-O-methyladenosine-3'-phosphate
  modified_base 16: mod_base = OTHER; note = 2'-O-methylcytidine-3'-phosphate
  modified_base 17: mod_base = OTHER; note = 2'-O-methyladenosine-3'-phosphate
  modified_base 18: mod_base = OTHER; note = 2'-O-methylguanosine-3'-phosphate
  modified_base 19: mod_base = OTHER; note = 2'-O-methylcytidine-3'-phosphorothioate
  modified_base 20: mod_base = OTHER; note = 2'-O-methylcytidine-3'-phosphorothioate
  modified_base 21: mod_base = OTHER; note = 2'-O-methyladenosine
ttgctgtgacgactacagcca

SEQ ID NO: 2456 - RNA, 21 nt, synthetic construct
  source 1..21: mol_type = other RNA
  modified_base 1: mod_base = OTHER; note = 2'-O-methylguanosine-3'-phosphorothioate
  modified_base 2: mod_base = OTHER; note = 2'-O-methyladenosine-3'-phosphorothioate
  modified_base 3: mod_base = OTHER; note = 2'-O-methylcytidine-3'-phosphate
  modified_base 4: mod_base = OTHER; note = 2'-O-methylguanosine-3'-phosphate
  modified_base 5: mod_base = OTHER; note = 2'-O-methyladenosine-3'-phosphate
  modified_base 6: mod_base = OTHER; note = 2'-O-methylcytidine-3'-phosphate
  modified_base 7: mod_base = OTHER; note = 2'-deoxy-2'-fluorocytidine-3'-phosphate
  modified_base 8: mod_base = OTHER; note = 2'-O-methyluridine-3'-phosphate
  modified_base 9: mod_base = OTHER; note = 2'-deoxy-2'-fluoroguanosine-3'-phosphate
  modified_base 10: mod_base = OTHER; note = 2'-deoxy-2'-fluoroguanosine-3'-phosphate
  modified_base 11: mod_base = OTHER; note = 2'-deoxy-2'-fluoroadenosine-3'-phosphate
  modified_base 12: mod_base = OTHER; note = 2'-O-methyluridine-3'-phosphate
  modified_base 13: mod_base = OTHER; note = 2'-O-methylcytidine-3'-phosphate
  modified_base 14: mod_base = OTHER; note = 2'-O-methylcytidine-3'-phosphate
  modified_base 15: mod_base = OTHER; note = 2'-O-methyluridine-3'-phosphate
  modified_base 16: mod_base = OTHER; note = 2'-O-methylcytidine-3'-phosphate
  modified_base 17: mod_base = OTHER; note = 2'-O-methyladenosine-3'-phosphate
  modified_base 18: mod_base = OTHER; note = 2'-O-methylcytidine-3'-phosphate
  modified_base 19: mod_base = OTHER; note = 2'-O-methyladenosine-3'-phosphorothioate
  modified_base 20: mod_base = OTHER; note = 2'-O-methyladenosine-3'-phosphorothioate
  modified_base 21: mod_base = OTHER; note = 2'-O-methyladenosine
gacgacctggatcctcacaaa

SEQ ID NO: 2457 - RNA, 21 nt, synthetic construct
  source 1..21: mol_type = other RNA
  modified_base 1: mod_base = OTHER; note = 2'-O-methylcytidine-3'-phosphorothioate
  modified_base 2: mod_base = OTHER; note = 2'-O-methylguanosine-3'-phosphorothioate
  modified_base 3: mod_base = OTHER; note = 2'-O-methyladenosine-3'-phosphate
  modified_base 4: mod_base = OTHER; note = 2'-O-methylcytidine-3'-phosphate
  modified_base 5: mod_base = OTHER; note = 2'-O-methylcytidine-3'-phosphate
  modified_base 6: mod_base = OTHER; note = 2'-O-methyladenosine-3'-phosphate
  modified_base 7: mod_base = OTHER; note = 2'-deoxy-2'-fluorocytidine-3'-phosphate
  modified_base 8: mod_base = OTHER; note = 2'-O-methyladenosine-3'-phosphate
  modified_base 9: mod_base = OTHER; note = 2'-deoxy-2'-fluoroadenosine-3'-phosphate
  modified_base 10: mod_base = OTHER; note = 2'-deoxy-2'-fluorocytidine-3'-phosphate
  modified_base 11: mod_base = OTHER; note = 2'-deoxy-2'-fluoroadenosine-3'-phosphate
  modified_base 12: mod_base = OTHER; note = 2'-O-methylguanosine-3'-phosphate
  modified_base 13: mod_base = OTHER; note = 2'-O-methylcytidine-3'-phosphate
  modified_base 14: mod_base = OTHER; note = 2'-O-methylcytidine-3'-phosphate
  modified_base 15: mod_base = OTHER; note = 2'-O-methyladenosine-3'-phosphate
  modified_base 16: mod_base = OTHER; note = 2'-O-methylcytidine-3'-phosphate
  modified_base 17: mod_base = OTHER; note = 2'-O-methyluridine-3'-phosphate
  modified_base 18: mod_base = OTHER; note = 2'-O-methyladenosine-3'-phosphate
  modified_base 19: mod_base = OTHER; note = 2'-O-methylcytidine-3'-phosphorothioate
  modified_base 20: mod_base = OTHER; note = 2'-O-methylguanosine-3'-phosphorothioate
  modified_base 21: mod_base = OTHER; note = 2'-O-methyladenosine
cgaccacaacagccactacga

SEQ ID NO: 2458 - RNA, 21 nt, synthetic construct
  source 1..21: mol_type = other RNA
  modified_base 1: mod_base = OTHER; note = 2'-O-methyluridine-3'-phosphorothioate
  modified_base 2: mod_base = OTHER; note = 2'-O-methylcytidine-3'-phosphorothioate
  modified_base 3: mod_base = OTHER; note = 2'-O-methylcytidine-3'-phosphate
  modified_base 4: mod_base = OTHER; note = 2'-O-methyladenosine-3'-phosphate
  modified_base 5: mod_base = OTHER; note = 2'-O-methylcytidine-3'-phosphate
  modified_base 6: mod_base = OTHER; note = 2'-O-methylcytidine-3'-phosphate
  modified_base 7: mod_base = OTHER; note = 2'-deoxy-2'-fluorocytidine-3'-phosphate
  modified_base 8: mod_base = OTHER; note = 2'-O-methyluridine-3'-phosphate
  modified_base 9: mod_base = OTHER; note = 2'-deoxy-2'-fluoroguanosine-3'-phosphate
  modified_base 10: mod_base = OTHER; note = 2'-deoxy-2'-fluoroadenosine-3'-phosphate
  modified_base 11: mod_base = OTHER; note = 2'-deoxy-2'-fluoroguanosine-3'-phosphate
  modified_base 12: mod_base = OTHER; note = 2'-O-methyladenosine-3'-phosphate
  modified_base 13: mod_base = OTHER; note = 2'-O-methyladenosine-3'-phosphate
  modified_base 14: mod_base = OTHER; note = 2'-O-methylcytidine-3'-phosphate
  modified_base 15: mod_base = OTHER; note = 2'-O-methyladenosine-3'-phosphate
  modified_base 16: mod_base = OTHER; note = 2'-O-methylguanosine-3'-phosphate
  modified_base 17: mod_base = OTHER; note = 2'-O-methylcytidine-3'-phosphate
  modified_base 18: mod_base = OTHER; note = 2'-O-methyluridine-3'-phosphate
  modified_base 19: mod_base = OTHER; note = 2'-O-methylcytidine-3'-phosphorothioate
  modified_base 20: mod_base = OTHER; note = 2'-O-methylcytidine-3'-phosphorothioate
  modified_base 21: mod_base = OTHER; note = 2'-O-methyladenosine
tccaccctgagaacagctcca

SEQ ID NO: 2459 - RNA, 21 nt, synthetic construct
  source 1..21: mol_type = other RNA
  modified_base 1: mod_base = OTHER; note = 2'-O-methyluridine-3'-phosphorothioate
  modified_base 2: mod_base = OTHER; note = 2'-O-methylcytidine-3'-phosphorothioate
  modified_base 3: mod_base = OTHER; note = 2'-O-methylcytidine-3'-phosphate
  modified_base 4: mod_base = OTHER; note = 2'-O-methylcytidine-3'-phosphate
  modified_base 5: mod_base = OTHER; note = 2'-O-methyladenosine-3'-phosphate
  modified_base 6: mod_base = OTHER; note = 2'-O-methyladenosine-3'-phosphate
  modified_base 7: mod_base = OTHER; note = 2'-deoxy-2'-fluoroadenosine-3'-phosphate
  modified_base 8: mod_base = OTHER; note = 2'-O-methylguanosine-3'-phosphate
  modified_base 9: mod_base = OTHER; note = 2'-deoxy-2'-fluorouridine-3'-phosphate
  modified_base 10: mod_base = OTHER; note = 2'-deoxy-2'-fluoroguanosine-3'-phosphate
  modified_base 11: mod_base = OTHER; note = 2'-deoxy-2'-fluorocytidine-3'-phosphate
  modified_base 12: mod_base = OTHER; note = 2'-O-methyluridine-3'-phosphate
  modified_base 13: mod_base = OTHER; note = 2'-O-methylguanosine-3'-phosphate
  modified_base 14: mod_base = OTHER; note = 2'-O-methyladenosine-3'-phosphate
  modified_base 15: mod_base = OTHER; note = 2'-O-methylcytidine-3'-phosphate
  modified_base 16: mod_base = OTHER; note = 2'-O-methylcytidine-3'-phosphate
  modified_base 17: mod_base = OTHER; note = 2'-O-methyladenosine-3'-phosphate
  modified_base 18: mod_base = OTHER; note = 2'-O-methylcytidine-3'-phosphate
  modified_base 19: mod_base = OTHER; note = 2'-O-methylcytidine-3'-phosphorothioate
  modified_base 20: mod_base = OTHER; note = 2'-O-methyladenosine-3'-phosphorothioate
  modified_base 21: mod_base = OTHER; note = 2'-O-methyladenosine
tcccaaagtgctgaccaccaa

SEQ ID NO: 2460 - RNA, 21 nt, synthetic construct
  source 1..21: mol_type = other RNA
  modified_base 1: mod_base = OTHER; note = 2'-O-methylcytidine-3'-phosphorothioate
  modified_base 2: mod_base = OTHER; note = 2'-O-methyladenosine-3'-phosphorothioate
  modified_base 3: mod_base = OTHER; note = 2'-O-methylguanosine-3'-phosphate
  modified_base 4: mod_base = OTHER; note = 2'-O-methylcytidine-3'-phosphate
  modified_base 5: mod_base = OTHER; note = 2'-O-methyluridine-3'-phosphate
  modified_base 6: mod_base = OTHER; note = 2'-O-methylcytidine-3'-phosphate
  modified_base 7: mod_base = OTHER; note = 2'-deoxy-2'-fluorocytidine-3'-phosphate
  modified_base 8: mod_base = OTHER; note = 2'-O-methyladenosine-3'-phosphate
  modified_base 9: mod_base = OTHER; note = 2'-deoxy-2'-fluoroadenosine-3'-phosphate
  modified_base 10: mod_base = OTHER; note = 2'-deoxy-2'-fluoroadenosine-3'-phosphate
  modified_base 11: mod_base = OTHER; note = 2'-deoxy-2'-fluoroguanosine-3'-phosphate
  modified_base 12: mod_base = OTHER; note = 2'-O-methylcytidine-3'-phosphate
  modified_base 13: mod_base = OTHER; note = 2'-O-methylcytidine-3'-phosphate
  modified_base 14: mod_base = OTHER; note = 2'-O-methyladenosine-3'-phosphate
  modified_base 15: mod_base = OTHER; note = 2'-O-methylcytidine-3'-phosphate
  modified_base 16: mod_base = OTHER; note = 2'-O-methyluridine-3'-phosphate
  modified_base 17: mod_base = OTHER; note = 2'-O-methylcytidine-3'-phosphate
  modified_base 18: mod_base = OTHER; note = 2'-O-methylcytidine-3'-phosphate
  modified_base 19: mod_base = OTHER; note = 2'-O-methylcytidine-3'-phosphorothioate
  modified_base 20: mod_base = OTHER; note = 2'-O-methyluridine-3'-phosphorothioate
  modified_base 21: mod_base = OTHER; note = 2'-O-methyladenosine
cagctccaaagccactcccta

SEQ ID NO: 2461 - RNA, 21 nt, synthetic construct
  source 1..21: mol_type = other RNA
  modified_base 1: mod_base = OTHER; note = 2'-O-methylcytidine-3'-phosphorothioate
  modified_base 2: mod_base = OTHER; note = 2'-O-methylcytidine-3'-phosphorothioate
  modified_base 3: mod_base = OTHER; note = 2'-O-methyladenosine-3'-phosphate
  modified_base 4: mod_base = OTHER; note = 2'-O-methylguanosine-3'-phosphate
  modified_base 5: mod_base = OTHER; note = 2'-O-methyluridine-3'-phosphate
  modified_base 6: mod_base = OTHER; note = 2'-O-methylcytidine-3'-phosphate
  modified_base 7: mod_base = OTHER; note = 2'-deoxy-2'-fluorocytidine-3'-phosphate
  modified_base 8: mod_base = OTHER; note = 2'-O-methyladenosine-3'-phosphate
  modified_base 9: mod_base = OTHER; note = 2'-deoxy-2'-fluoroguanosine-3'-phosphate
  modified_base 10: mod_base = OTHER; note = 2'-deoxy-2'-fluoroguanosine-3'-phosphate
  modified_base 11: mod_base = OTHER; note = 2'-deoxy-2'-fluoroguanosine-3'-phosphate
  modified_base 12: mod_base = OTHER; note = 2'-O-methyladenosine-3'-phosphate
  modified_base 13: mod_base = OTHER; note = 2'-O-methylcytidine-3'-phosphate
  modified_base 14: mod_base = OTHER; note = 2'-O-methyluridine-3'-phosphate
  modified_base 15: mod_base = OTHER; note = 2'-O-methylguanosine-3'-phosphate
  modified_base 16: mod_base = OTHER; note = 2'-O-methylcytidine-3'-phosphate
  modified_base 17: mod_base = OTHER; note = 2'-O-methyladenosine-3'-phosphate
  modified_base 18: mod_base = OTHER; note = 2'-O-methyladenosine-3'-phosphate
  modified_base 19: mod_base = OTHER; note = 2'-O-methylcytidine-3'-phosphorothioate
  modified_base 20: mod_base = OTHER; note = 2'-O-methylcytidine-3'-phosphorothioate
  modified_base 21: mod_base = OTHER; note = 2'-O-methyladenosine
ccagtccagggactgcaacca

SEQ ID NO: 2462 - RNA, 21 nt, synthetic construct
  source 1..21: mol_type = other RNA
  modified_base 1: mod_base = OTHER; note = 2'-O-methyladenosine-3'-phosphorothioate
  modified_base 2: mod_base = OTHER; note = 2'-O-methylguanosine-3'-phosphorothioate
  modified_base 3: mod_base = OTHER; note = 2'-O-methylcytidine-3'-phosphate
  modified_base 4: mod_base = OTHER; note = 2'-O-methyladenosine-3'-phosphate
  modified_base 5: mod_base = OTHER; note = 2'-O-methylcytidine-3'-phosphate
  modified_base 6: mod_base = OTHER; note = 2'-O-methyluridine-3'-phosphate
  modified_base 7: mod_base = OTHER; note = 2'-deoxy-2'-fluoroguanosine-3'-phosphate
  modified_base 8: mod_base = OTHER; note = 2'-O-methyladenosine-3'-phosphate
  modified_base 9: mod_base = OTHER; note = 2'-deoxy-2'-fluoroguanosine-3'-phosphate
  modified_base 10: mod_base = OTHER; note = 2'-deoxy-2'-fluoroadenosine-3'-phosphate
  modified_base 11: mod_base = OTHER; note = 2'-deoxy-2'-fluoroadenosine-3'-phosphate
  modified_base 12: mod_base = OTHER; note = 2'-O-methylguanosine-3'-phosphate
  modified_base 13: mod_base = OTHER; note = 2'-O-methylcytidine-3'-phosphate
  modified_base 14: mod_base = OTHER; note = 2'-O-methyladenosine-3'-phosphate
  modified_base 15: mod_base = OTHER; note = 2'-O-methylcytidine-3'-phosphate
  modified_base 16: mod_base = OTHER; note = 2'-O-methyladenosine-3'-phosphate
  modified_base 17: mod_base = OTHER; note = 2'-O-methylguanosine-3'-phosphate
  modified_base 18: mod_base = OTHER; note = 2'-O-methylcytidine-3'-phosphate
  modified_base 19: mod_base = OTHER; note = 2'-O-methylcytidine-3'-phosphorothioate
  modified_base 20: mod_base = OTHER; note = 2'-O-methyladenosine-3'-phosphorothioate
  modified_base 21: mod_base = OTHER; note = 2'-O-methyladenosine
agcactgagaagcacagccaa

SEQ ID NO: 2463 - RNA, 21 nt, synthetic construct
  source 1..21: mol_type = other RNA
  modified_base 1: mod_base = OTHER; note = 2'-O-methylcytidine-3'-phosphorothioate
  modified_base 2: mod_base = OTHER; note = 2'-O-methyluridine-3'-phosphorothioate
  modified_base 3: mod_base = OTHER; note = 2'-O-methyladenosine-3'-phosphate
  modified_base 4: mod_base = OTHER; note = 2'-O-methylcytidine-3'-phosphate
  modified_base 5: mod_base = OTHER; note = 2'-O-methylcytidine-3'-phosphate
  modified_base 6: mod_base = OTHER; note = 2'-O-methyladenosine-3'-phosphate
  modified_base 7: mod_base = OTHER; note = 2'-deoxy-2'-fluoroguanosine-3'-phosphate
  modified_base 8: mod_base = OTHER; note = 2'-O-methylcytidine-3'-phosphate
  modified_base 9: mod_base = OTHER; note = 2'-deoxy-2'-fluoroguanosine-3'-phosphate
  modified_base 10: mod_base = OTHER; note = 2'-deoxy-2'-fluorouridine-3'-phosphate
  modified_base 11: mod_base = OTHER; note = 2'-deoxy-2'-fluorouridine-3'-phosphate
  modified_base 12: mod_base = OTHER; note = 2'-O-methyladenosine-3'-phosphate
  modified_base 13: mod_base = OTHER; note = 2'-O-methylcytidine-3'-phosphate
  modified_base 14: mod_base = OTHER; note = 2'-O-methyladenosine-3'-phosphate
  modified_base 15: mod_base = OTHER; note = 2'-O-methylcytidine-3'-phosphate
  modified_base 16: mod_base = OTHER; note = 2'-O-methylcytidine-3'-phosphate
  modified_base 17: mod_base = OTHER; note = 2'-O-methylcytidine-3'-phosphate
  modified_base 18: mod_base = OTHER; note = 2'-O-methyladenosine-3'-phosphate
  modified_base 19: mod_base = OTHER; note = 2'-O-methyluridine-3'-phosphorothioate
  modified_base 20: mod_base = OTHER; note = 2'-O-methylcytidine-3'-phosphorothioate
  modified_base 21: mod_base = OTHER; note = 2'-O-methyladenosine
ctaccagcgttacacccatca

SEQ ID NO: 2464 - RNA, 21 nt, synthetic construct
  source 1..21: mol_type = other RNA
  modified_base 1: mod_base = OTHER; note = 2'-O-methyluridine-3'-phosphorothioate
  modified_base 2: mod_base = OTHER; note = 2'-O-methyluridine-3'-phosphorothioate
  modified_base 3: mod_base = OTHER; note = 2'-O-methylcytidine-3'-phosphate
  modified_base 4: mod_base = OTHER; note = 2'-O-methylcytidine-3'-phosphate
  modified_base 5: mod_base = OTHER; note = 2'-O-methyluridine-3'-phosphate
  modified_base 6: mod_base = OTHER; note = 2'-O-methylcytidine-3'-phosphate
  modified_base 7: mod_base = OTHER; note = 2'-deoxy-2'-fluorocytidine-3'-phosphate
  modified_base 8: mod_base = OTHER; note = 2'-O-methylcytidine-3'-phosphate
  modified_base 9: mod_base = OTHER; note = 2'-deoxy-2'-fluorouridine-3'-phosphate
  modified_base 10: mod_base = OTHER; note = 2'-deoxy-2'-fluoroguanosine-3'-phosphate
  modified_base 11: mod_base = OTHER; note = 2'-deoxy-2'-fluoroguanosine-3'-phosphate
  modified_base 12: mod_base = OTHER; note = 2'-O-methylguanosine-3'-phosphate
  modified_base 13: mod_base = OTHER; note = 2'-O-methylcytidine-3'-phosphate
  modified_base 14: mod_base = OTHER; note = 2'-O-methyladenosine-3'-phosphate
  modified_base 15: mod_base = OTHER; note = 2'-O-methylcytidine-3'-phosphate
  modified_base 16: mod_base = OTHER; note = 2'-O-methylcytidine-3'-phosphate
  modified_base 17: mod_base = OTHER; note = 2'-O-methyladenosine-3'-phosphate
  modified_base 18: mod_base = OTHER; note = 2'-O-methylcytidine-3'-phosphate
  modified_base 19: mod_base = OTHER; note = 2'-O-methylcytidine-3'-phosphorothioate
  modified_base 20: mod_base = OTHER; note = 2'-O-methyluridine-3'-phosphorothioate
  modified_base 21: mod_base = OTHER; note = 2'-O-methyladenosine
ttcctccctgggcaccaccta

SEQ ID NO: 2465 - RNA, 21 nt, synthetic construct
  source 1..21: mol_type = other RNA
  modified_base 1: mod_base = OTHER; note = 2'-O-methylcytidine-3'-phosphorothioate
  modified_base 2: mod_base = OTHER; note = 2'-O-methylcytidine-3'-phosphorothioate
  modified_base 3: mod_base = OTHER; note = 2'-O-methyluridine-3'-phosphate
  modified_base 4: mod_base = OTHER; note = 2'-O-methyladenosine-3'-phosphate
  modified_base 5: mod_base = OTHER; note = 2'-O-methyluridine-3'-phosphate
  modified_base 6: mod_base = OTHER; note = 2'-O-methylcytidine-3'-phosphate
  modified_base 7: mod_base = OTHER; note = 2'-deoxy-2'-fluoroadenosine-3'-phosphate
  modified_base 8: mod_base = OTHER; note = 2'-O-methylcytidine-3'-phosphate
  modified_base 9: mod_base = OTHER; note = 2'-deoxy-2'-fluoroadenosine-3'-phosphate
  modified_base 10: mod_base = OTHER; note = 2'-deoxy-2'-fluoroguanosine-3'-phosphate
  modified_base 11: mod_base = OTHER; note = 2'-deoxy-2'-fluoroadenosine-3'-phosphate
  modified_base 12: mod_base = OTHER; note = 2'-O-methylcytidine-3'-phosphate
  modified_base 13: mod_base = OTHER; note = 2'-O-methylcytidine-3'-phosphate
  modified_base 14: mod_base = OTHER; note = 2'-O-methyladenosine-3'-phosphate
  modified_base 15: mod_base = OTHER; note = 2'-O-methylcytidine-3'-phosphate
  modified_base 16: mod_base = OTHER; note = 2'-O-methylcytidine-3'-phosphate
  modified_base 17: mod_base = OTHER; note = 2'-O-methyladenosine-3'-phosphate
  modified_base 18: mod_base = OTHER; note = 2'-O-methylcytidine-3'-phosphate
  modified_base 19: mod_base = OTHER; note = 2'-O-methyladenosine-3'-phosphorothioate
  modified_base 20: mod_base = OTHER; note = 2'-O-methylcytidine-3'-phosphorothioate
  modified_base 21: mod_base = OTHER; note = 2'-O-methyladenosine
cctatcacagaccaccacaca

SEQ ID NO: 2466 - RNA, 21 nt, synthetic construct
  source 1..21: mol_type = other RNA
  modified_base 1: mod_base = OTHER; note = 2'-O-methylcytidine-3'-phosphorothioate
  modified_base 2: mod_base = OTHER; note = 2'-O-methylcytidine-3'-phosphorothioate
  modified_base 3: mod_base = OTHER; note = 2'-O-methyladenosine-3'-phosphate
  modified_base 4: mod_base = OTHER; note = 2'-O-methylcytidine-3'-phosphate
  modified_base 5: mod_base = OTHER; note = 2'-O-methylcytidine-3'-phosphate
  modified_base 6: mod_base = OTHER; note = 2'-O-methyladenosine-3'-phosphate
  modified_base 7: mod_base = OTHER; note = 2'-deoxy-2'-fluorouridine-3'-phosphate
  modified_base 8: mod_base = OTHER; note = 2'-O-methylguanosine-3'-phosphate
  modified_base 9: mod_base = OTHER; note = 2'-deoxy-2'-fluorouridine-3'-phosphate
  modified_base 10: mod_base = OTHER; note = 2'-deoxy-2'-fluorocytidine-3'-phosphate
  modified_base 11: mod_base = OTHER; note = 2'-deoxy-2'-fluorocytidine-3'-phosphate
  modified_base 12: mod_base = OTHER; note = 2'-O-methyladenosine-3'-phosphate
  modified_base 13: mod_base = OTHER; note = 2'-O-methylcytidine-3'-phosphate
  modified_base 14: mod_base = OTHER; note = 2'-O-methyladenosine-3'-phosphate
  modified_base 15: mod_base = OTHER; note = 2'-O-methylguanosine-3'-phosphate
  modified_base 16: mod_base = OTHER; note = 2'-O-methylcytidine-3'-phosphate
  modified_base 17: mod_base = OTHER; note = 2'-O-methylcytidine-3'-phosphate
  modified_base 18: mod_base = OTHER; note = 2'-O-methyladenosine-3'-phosphate
  modified_base 19: mod_base = OTHER; note = 2'-O-methylcytidine-3'-phosphorothioate
  modified_base 20: mod_base = OTHER; note = 2'-O-methyladenosine-3'-phosphorothioate
  modified_base 21: mod_base = OTHER; note = 2'-O-methyladenosine
ccaccatgtccacagccacaa

SEQ ID NO: 2467 - RNA, 21 nt, synthetic construct
  source 1..21: mol_type = other RNA
  modified_base 1: mod_base = OTHER; note = 2'-O-methyluridine-3'-phosphorothioate
  modified_base 2: mod_base = OTHER; note = 2'-O-methylcytidine-3'-phosphorothioate
  modified_base 3: mod_base = OTHER; note = 2'-O-methylcytidine-3'-phosphate
  modified_base 4: mod_base = OTHER; note = 2'-O-methyluridine-3'-phosphate
  modified_base 5: mod_base = OTHER; note = 2'-O-methylcytidine-3'-phosphate
  modified_base 6: mod_base = OTHER; note = 2'-O-methylcytidine-3'-phosphate
  modified_base 7: mod_base = OTHER; note = 2'-deoxy-2'-fluoroadenosine-3'-phosphate
  modified_base 8: mod_base = OTHER; note = 2'-O-methylcytidine-3'-phosphate
  modified_base 9: mod_base = OTHER; note = 2'-deoxy-2'-fluorouridine-3'-phosphate
  modified_base 10: mod_base = OTHER; note = 2'-deoxy-2'-fluorocytidine-3'-phosphate
  modified_base 11: mod_base = OTHER; note = 2'-deoxy-2'-fluorocytidine-3'-phosphate
  modified_base 12: mod_base = OTHER; note = 2'-O-methyladenosine-3'-phosphate
  modified_base 13: mod_base = OTHER; note = 2'-O-methylguanosine-3'-phosphate
  modified_base 14: mod_base = OTHER; note = 2'-O-methyladenosine-3'-phosphate
  modified_base 15: mod_base = OTHER; note = 2'-O-methylguanosine-3'-phosphate
  modified_base 16: mod_base = OTHER; note = 2'-O-methyladenosine-3'-phosphate
  modified_base 17: mod_base = OTHER; note = 2'-O-methylcytidine-3'-phosphate
  modified_base 18: mod_base = OTHER; note = 2'-O-methyluridine-3'-phosphate
  modified_base 19: mod_base = OTHER; note = 2'-O-methylguanosine-3'-phosphorothioate
  modified_base 20: mod_base = OTHER; note = 2'-O-methylcytidine-3'-phosphorothioate
  modified_base 21: mod_base = OTHER; note = 2'-O-methyladenosine
tcctccactccagagactgca

SEQ ID NO: 2468 - RNA, 21 nt, synthetic construct
  source 1..21: mol_type = other RNA
  modified_base 1: mod_base = OTHER; note = 2'-O-methylcytidine-3'-phosphorothioate
  modified_base 2: mod_base = OTHER; note = 2'-O-methyluridine-3'-phosphorothioate
  modified_base 3: mod_base = OTHER; note = 2'-O-methylcytidine-3'-phosphate
  modified_base 4: mod_base = OTHER; note = 2'-O-methylcytidine-3'-phosphate
  modified_base 5: mod_base = OTHER; note = 2'-O-methyladenosine-3'-phosphate
  modified_base 6: mod_base = OTHER; note = 2'-O-methylcytidine-3'-phosphate
  modified_base 7: mod_base = OTHER; note = 2'-deoxy-2'-fluoroadenosine-3'-phosphate
  modified_base 8: mod_base = OTHER; note = 2'-O-methylguanosine-3'-phosphate
  modified_base 9: mod_base = OTHER; note = 2'-deoxy-2'-fluorouridine-3'-phosphate
  modified_base 10: mod_base = OTHER; note = 2'-deoxy-2'-fluoroguanosine-3'-phosphate
  modified_base 11: mod_base = OTHER; note = 2'-deoxy-2'-fluorocytidine-3'-phosphate
  modified_base 12: mod_base = OTHER; note = 2'-O-methyluridine-3'-phosphate
  modified_base 13: mod_base = OTHER; note = 2'-O-methyluridine-3'-phosphate
  modified_base 14: mod_base = OTHER; note = 2'-O-methyladenosine-3'-phosphate
  modified_base 15: mod_base = OTHER; note = 2'-O-methylcytidine-3'-phosphate
  modified_base 16: mod_base = OTHER; note = 2'-O-methylcytidine-3'-phosphate
  modified_base 17: mod_base = OTHER; note = 2'-O-methylguanosine-3'-phosphate
  modified_base 18: mod_base = OTHER; note = 2'-O-methylcytidine-3'-phosphate
  modified_base 19: mod_base = OTHER; note = 2'-O-methylcytidine-3'-phosphorothioate
  modified_base 20: mod_base = OTHER; note = 2'-O-methyladenosine-3'-phosphorothioate
  modified_base 21: mod_base = OTHER; note = 2'-O-methyladenosine
ctccacagtgcttaccgccaa

SEQ ID NO: 2469 - RNA, 21 nt, synthetic construct
  source 1..21: mol_type = other RNA
  modified_base 1: mod_base = OTHER; note = 2'-O-methylcytidine-3'-phosphorothioate
  modified_base 2: mod_base = OTHER; note = 2'-O-methyladenosine-3'-phosphorothioate
  modified_base 3: mod_base = OTHER; note = 2'-O-methylguanosine-3'-phosphate
  modified_base 4: mod_base = OTHER; note = 2'-O-methylguanosine-3'-phosphate
  modified_base 5: mod_base = OTHER; note = 2'-O-methyladenosine-3'-phosphate
  modified_base 6: mod_base = OTHER; note = 2'-O-methyladenosine-3'-phosphate
  modified_base 7: mod_base = OTHER; note = 2'-deoxy-2'-fluorocytidine-3'-phosphate
  modified_base 8: mod_base = OTHER; note = 2'-O-methyladenosine-3'-phosphate
  modified_base 9: mod_base = OTHER; note = 2'-deoxy-2'-fluoroguanosine-3'-phosphate
  modified_base 10: mod_base = OTHER; note = 2'-deoxy-2'-fluorocytidine-3'-phosphate
  modified_base 11: mod_base = OTHER; note = 2'-deoxy-2'-fluorouridine-3'-phosphate
  modified_base 12: mod_base = OTHER; note = 2'-O-methylcytidine-3'-phosphate
  modified_base 13: mod_base = OTHER; note = 2'-O-methyladenosine-3'-phosphate
  modified_base 14: mod_base = OTHER; note = 2'-O-methylcytidine-3'-phosphate
  modified_base 15: mod_base = OTHER; note = 2'-O-methyladenosine-3'-phosphate
  modified_base 16: mod_base = OTHER; note = 2'-O-methylcytidine-3'-phosphate
  modified_base 17: mod_base = OTHER; note = 2'-O-methyluridine-3'-phosphate
  modified_base 18: mod_base = OTHER; note = 2'-O-methyladenosine-3'-phosphate
  modified_base 19: mod_base = OTHER; note = 2'-O-methylcytidine-3'-phosphorothioate
  modified_base 20: mod_base = OTHER; note = 2'-O-methylcytidine-3'-phosphorothioate
  modified_base 21: mod_base = OTHER; note = 2'-O-methyladenosine
caggaacagctcacactacca

SEQ ID NO: 2470 - RNA, 21 nt, synthetic construct
  source 1..21: mol_type = other RNA
  modified_base 1: mod_base = OTHER; note = 2'-O-methyluridine-3'-phosphorothioate
  modified_base 2: mod_base = OTHER; note = 2'-O-methylguanosine-3'-phosphorothioate
  modified_base 3: mod_base = OTHER; note = 2'-O-methylcytidine-3'-phosphate
  modified_base 4: mod_base = OTHER; note = 2'-O-methylcytidine-3'-phosphate
  modified_base 5: mod_base = OTHER; note = 2'-O-methyladenosine-3'-phosphate
  modified_base 6: mod_base = OTHER; note = 2'-O-methyladenosine-3'-phosphate
  modified_base 7: mod_base = OTHER; note = 2'-deoxy-2'-fluorocytidine-3'-phosphate
  modified_base 8: mod_base = OTHER; note = 2'-O-methyluridine-3'-phosphate
  modified_base 9: mod_base = OTHER; note = 2'-deoxy-2'-fluoroadenosine-3'-phosphate
  modified_base 10: mod_base = OTHER; note = 2'-deoxy-2'-fluorocytidine-3'-phosphate
  modified_base 11: mod_base = OTHER; note = 2'-deoxy-2'-fluorocytidine-3'-phosphate
  modified_base 12: mod_base = OTHER; note = 2'-O-methyladenosine-3'-phosphate
  modified_base 13: mod_base = OTHER; note = 2'-O-methylcytidine-3'-phosphate
  modified_base 14: mod_base = OTHER; note = 2'-O-methyladenosine-3'-phosphate
  modified_base 15: mod_base = OTHER; note = 2'-O-methyladenosine-3'-phosphate
  modified_base 16: mod_base = OTHER; note = 2'-O-methylcytidine-3'-phosphate
  modified_base 17: mod_base = OTHER; note = 2'-O-methylcytidine-3'-phosphate
  modified_base 18: mod_base = OTHER; note = 2'-O-methyladenosine-3'-phosphate
  modified_base 19: mod_base = OTHER; note = 2'-O-methylcytidine-3'-phosphorothioate
  modified_base 20: mod_base = OTHER; note = 2'-O-methylguanosine-3'-phosphorothioate
  modified_base 21: mod_base = OTHER; note = 2'-O-methyladenosine
tgccaactaccacaaccacga

SEQ ID NO: 2471 - RNA, 21 nt, synthetic construct
  source 1..21: mol_type = other RNA
  modified_base 1: mod_base = OTHER; note = 2'-O-methyluridine-3'-phosphorothioate
  modified_base 2: mod_base = OTHER; note = 2'-O-methylcytidine-3'-phosphorothioate
  modified_base 3: mod_base = OTHER; note = 2'-O-methylcytidine-3'-phosphate
  modified_base 4: mod_base = OTHER; note = 2'-O-methyladenosine-3'-phosphate
  modified_base 5: mod_base = OTHER; note = 2'-O-methylguanosine-3'-phosphate
  modified_base 6: mod_base = OTHER; note = 2'-O-methyluridine-3'-phosphate
  modified_base 7: mod_base = OTHER; note = 2'-deoxy-2'-fluoroguanosine-3'-phosphate
  modified_base 8: mod_base = OTHER; note = 2'-O-methyluridine-3'-phosphate
  modified_base 9: mod_base = OTHER; note = 2'-deoxy-2'-fluoroguanosine-3'-phosphate
  modified_base 10: mod_base = OTHER; note = 2'-deoxy-2'-fluoroguanosine-3'-phosphate
  modified_base 11: mod_base = OTHER; note = 2'-deoxy-2'-fluoroadenosine-3'-phosphate
  modified_base 12: mod_base = OTHER; note = 2'-O-methyluridine-3'-phosphate
  modified_base 13: mod_base = OTHER; note = 2'-O-methylcytidine-3'-phosphate
  modified_base 14: mod_base = OTHER; note = 2'-O-methyladenosine-3'-phosphate
  modified_base 15: mod_base = OTHER; note = 2'-O-methylguanosine-3'-phosphate
  modified_base 16: mod_base = OTHER; note = 2'-O-methylcytidine-3'-phosphate
  modified_base 17: mod_base = OTHER; note = 2'-O-methyladenosine-3'-phosphate
  modified_base 18: mod_base = OTHER; note = 2'-O-methylcytidine-3'-phosphate
  modified_base 19: mod_base = OTHER; note = 2'-O-methyladenosine-3'-phosphorothioate
  modified_base 20: mod_base = OTHER; note = 2'-O-methyladenosine-3'-phosphorothioate
  modified_base 21: mod_base = OTHER; note = 2'-O-methyladenosine
tccagtgtggatcagcacaaa

SEQ ID NO: 2472 - RNA, 21 nt, synthetic construct
  source 1..21: mol_type = other RNA
  modified_base 1: mod_base = OTHER; note = 2'-O-methyladenosine-3'-phosphorothioate
  modified_base 2: mod_base = OTHER; note = 2'-O-methylcytidine-3'-phosphorothioate
  modified_base 3: mod_base = OTHER; note = 2'-O-methylcytidine-3'-phosphate
  modified_base 4: mod_base = OTHER; note = 2'-O-methylcytidine-3'-phosphate
  modified_base 5: mod_base = OTHER; note = 2'-O-methyladenosine-3'-phosphate
  modified_base 6: mod_base = OTHER; note = 2'-O-methylcytidine-3'-phosphate
  modified_base 7: mod_base = OTHER; note = 2'-deoxy-2'-fluoroadenosine-3'-phosphate
  modified_base 8: mod_base = OTHER; note = 2'-O-methyladenosine-3'-phosphate
  modified_base 9: mod_base = OTHER; note = 2'-deoxy-2'-fluorocytidine-3'-phosphate
  modified_base 10: mod_base = OTHER; note = 2'-deoxy-2'-fluorocytidine-3'-phosphate
  modified_base 11: mod_base = OTHER; note = 2'-deoxy-2'-fluoroadenosine-3'-phosphate
  modified_base 12: mod_base = OTHER; note = 2'-O-methylguanosine-3'-phosphate
  modified_base 13: mod_base = OTHER; note = 2'-O-methyladenosine-3'-phosphate
  modified_base 14: mod_base = OTHER; note = 2'-O-methylguanosine-3'-phosphate
  modified_base 15: mod_base = OTHER; note = 2'-O-methylguanosine-3'-phosphate
  modified_base 16: mod_base = OTHER; note = 2'-O-methylcytidine-3'-phosphate
  modified_base 17: mod_base = OTHER; note = 2'-O-methyluridine-3'-phosphate
  modified_base 18: mod_base = OTHER; note = 2'-O-methylcytidine-3'-phosphate
  modified_base 19: mod_base = OTHER; note = 2'-O-methylcytidine-3'-phosphorothioate
  modified_base 20: mod_base = OTHER; note = 2'-O-methyladenosine-3'-phosphorothioate
  modified_base 21: mod_base = OTHER; note = 2'-O-methyladenosine
acccacaaccagaggctccaa

SEQ ID NO: 2473 - RNA, 21 nt, synthetic construct
  source 1..21: mol_type = other RNA
  modified_base 1: mod_base = OTHER; note = 2'-O-methylcytidine-3'-phosphorothioate
  modified_base 2: mod_base = OTHER; note = 2'-O-methylguanosine-3'-phosphorothioate
  modified_base 3: mod_base = OTHER; note = 2'-O-methylcytidine-3'-phosphate
  modified_base 4: mod_base = OTHER; note = 2'-O-methylcytidine-3'-phosphate
  modified_base 5: mod_base = OTHER; note = 2'-O-methyladenosine-3'-phosphate
  modified_base 6: mod_base = OTHER; note = 2'-O-methylcytidine-3'-phosphate
  modified_base 7: mod_base = OTHER; note = 2'-deoxy-2'-fluoroadenosine-3'-phosphate
  modified_base 8: mod_base = OTHER; note = 2'-O-methylguanosine-3'-phosphate
  modified_base 9: mod_base = OTHER; note = 2'-deoxy-2'-fluorouridine-3'-phosphate
  modified_base 10: mod_base = OTHER; note = 2'-deoxy-2'-fluoroguanosine-3'-phosphate
  modified_base 11: mod_base = OTHER; note = 2'-deoxy-2'-fluorocytidine-3'-phosphate
  modified_base 12: mod_base = OTHER; note = 2'-O-methyluridine-3'-phosphate
  modified_base 13: mod_base = OTHER; note = 2'-O-methylguanosine-3'-phosphate
  modified_base 14: mod_base = OTHER; note = 2'-O-methyladenosine-3'-phosphate
  modified_base 15: mod_base = OTHER; note = 2'-O-methylcytidine-3'-phosphate
  modified_base 16: mod_base = OTHER; note = 2'-O-methylcytidine-3'-phosphate
  modified_base 17: mod_base = OTHER; note = 2'-O-methyladenosine-3'-phosphate
  modified_base 18: mod_base = OTHER; note = 2'-O-methylcytidine-3'-phosphate
  modified_base 19: mod_base = OTHER; note = 2'-O-methylcytidine-3'-phosphorothioate
  modified_base 20: mod_base = OTHER; note = 2'-O-methyladenosine-3'-phosphorothioate
  modified_base 21: mod_base = OTHER; note = 2'-O-methyladenosine
cgccacagtgctgaccaccaa

SEQ ID NO: 2474 - RNA, 21 nt, synthetic construct
  source 1..21: mol_type = other RNA
  modified_base 1: mod_base = OTHER; note = 2'-O-methylguanosine-3'-phosphorothioate
  modified_base 2: mod_base = OTHER; note = 2'-O-methylcytidine-3'-phosphorothioate
  modified_base 3: mod_base = OTHER; note = 2'-O-methylcytidine-3'-phosphate
  modified_base 4: mod_base = OTHER; note = 2'-O-methyladenosine-3'-phosphate
  modified_base 5: mod_base = OTHER; note = 2'-O-methylcytidine-3'-phosphate
  modified_base 6: mod_base = OTHER; note = 2'-O-methyluridine-3'-phosphate
  modified_base 7: mod_base = OTHER; note = 2'-deoxy-2'-fluoroguanosine-3'-phosphate
  modified_base 8: mod_base = OTHER; note = 2'-O-methylguanosine-3'-phosphate
  modified_base 9: mod_base = OTHER; note = 2'-deoxy-2'-fluorouridine-3'-phosphate
  modified_base 10: mod_base = OTHER; note = 2'-deoxy-2'-fluorouridine-3'-phosphate
  modified_base 11: mod_base = OTHER; note = 2'-deoxy-2'-fluorocytidine-3'-phosphate
  modified_base 12: mod_base = OTHER; note = 2'-O-methyluridine-3'-phosphate
  modified_base 13: mod_base = OTHER; note = 2'-O-methyladenosine-3'-phosphate
  modified_base 14: mod_base = OTHER; note = 2'-O-methyluridine-3'-phosphate
  modified_base 15: mod_base = OTHER; note = 2'-O-methylguanosine-3'-phosphate
  modified_base 16: mod_base = OTHER; note = 2'-O-methylguanosine-3'-phosphate
  modified_base 17: mod_base = OTHER; note = 2'-O-methylcytidine-3'-phosphate
  modified_base 18: mod_base = OTHER; note = 2'-O-methyladenosine-3'-phosphate
  modified_base 19: mod_base = OTHER; note = 2'-O-methyladenosine-3'-phosphorothioate
  modified_base 20: mod_base = OTHER; note = 2'-O-methylcytidine-3'-phosphorothioate
  modified_base 21: mod_base = OTHER; note = 2'-O-methyladenosine
gccactggttctatggcaaca

SEQ ID NO: 2475 - RNA, 21 nt, synthetic construct
  source 1..21: mol_type = other RNA
  modified_base 1: mod_base = OTHER; note = 2'-O-methylcytidine-3'-phosphorothioate
  modified_base 2: mod_base = OTHER; note = 2'-O-methyluridine-3'-phosphorothioate
  modified_base 3: mod_base = OTHER; note = 2'-O-methylcytidine-3'-phosphate
  modified_base 4: mod_base = OTHER; note = 2'-O-methylcytidine-3'-phosphate
  modified_base 5: mod_base = OTHER; note = 2'-O-methyluridine-3'-phosphate
  modified_base 6: mod_base = OTHER; note = 2'-O-methylcytidine-3'-phosphate
  modified_base 7: mod_base = OTHER; note = 2'-deoxy-2'-fluorouridine-3'-phosphate
  modified_base 8: mod_base = OTHER; note = 2'-O-methyladenosine-3'-phosphate
  modified_base 9: mod_base = OTHER; note = 2'-deoxy-2'-fluoroguanosine-3'-phosphate
  modified_base 10: mod_base = OTHER; note = 2'-deoxy-2'-fluorocytidine-3'-phosphate
  modified_base 11: mod_base = OTHER; note = 2'-deoxy-2'-fluoroadenosine-3'-phosphate
  modified_base 12: mod_base = OTHER; note = 2'-O-methylcytidine-3'-phosphate
  modified_base 13: mod_base = OTHER; note = 2'-O-methyladenosine-3'-phosphate
  modified_base 14: mod_base = OTHER; note = 2'-O-methylcytidine-3'-phosphate
  modified_base 15: mod_base = OTHER; note = 2'-O-methyladenosine-3'-phosphate
  modified_base 16: mod_base = OTHER; note = 2'-O-methylguanosine-3'-phosphate
  modified_base 17: mod_base = OTHER; note = 2'-O-methyladenosine-3'-phosphate
  modified_base 18: mod_base = OTHER; note = 2'-O-methylcytidine-3'-phosphate
  modified_base 19: mod_base = OTHER; note = 2'-O-methylcytidine-3'-phosphorothioate
  modified_base 20: mod_base = OTHER; note = 2'-O-methyladenosine-3'-phosphorothioate
  modified_base 21: mod_base = OTHER; note = 2'-O-methyladenosine
ctcctctagcacacagaccaa

SEQ ID NO: 2476 - RNA, 21 nt, synthetic construct
  source 1..21: mol_type = other RNA
  modified_base 1: mod_base = OTHER; note = 2'-O-methylguanosine-3'-phosphorothioate
  modified_base 2: mod_base = OTHER; note = 2'-O-methylguanosine-3'-phosphorothioate
  modified_base 3: mod_base = OTHER; note = 2'-O-methylcytidine-3'-phosphate
  modified_base 4: mod_base = OTHER; note = 2'-O-methylcytidine-3'-phosphate
  modified_base 5: mod_base = OTHER; note = 2'-O-methyladenosine-3'-phosphate
  modified_base 6: mod_base = OTHER; note = 2'-O-methylcytidine-3'-phosphate
  modified_base 7: mod_base = OTHER; note = 2'-deoxy-2'-fluorouridine-3'-phosphate
  modified_base 8: mod_base = OTHER; note = 2'-O-methyladenosine-3'-phosphate
  modified_base 9: mod_base = OTHER; note = 2'-deoxy-2'-fluorocytidine-3'-phosphate
  modified_base 10: mod_base = OTHER; note = 2'-deoxy-2'-fluoroguanosine-3'-phosphate
  modified_base 11: mod_base = OTHER; note = 2'-deoxy-2'-fluoroadenosine-3'-phosphate
  modified_base 12: mod_base = OTHER; note = 2'-O-methyluridine-3'-phosphate
  modified_base 13: mod_base = OTHER; note = 2'-O-methylcytidine-3'-phosphate
  modified_base 14: mod_base = OTHER; note = 2'-O-methyladenosine-3'-phosphate
  modified_base 15: mod_base = OTHER; note = 2'-O-methylcytidine-3'-phosphate
  modified_base 16: mod_base = OTHER; note = 2'-O-methylguanosine-3'-phosphate
  modified_base 17: mod_base = OTHER; note = 2'-O-methylguanosine-3'-phosphate
  modified_base 18: mod_base = OTHER; note = 2'-O-methylcytidine-3'-phosphate
  modified_base 19: mod_base = OTHER; note = 2'-O-methylcytidine-3'-phosphorothioate
  modified_base 20: mod_base = OTHER; note = 2'-O-methyladenosine-3'-phosphorothioate
  modified_base 21: mod_base = OTHER; note = 2'-O-methyladenosine
ggccactacgatcacggccaa

SEQ ID NO: 2477 - RNA, 21 nt, synthetic construct
  source 1..21: mol_type = other RNA
  modified_base 1: mod_base = OTHER; note = 2'-O-methylcytidine-3'-phosphorothioate
  modified_base 2: mod_base = OTHER; note = 2'-O-methyluridine-3'-phosphorothioate
  modified_base 3: mod_base = OTHER; note = 2'-O-methylcytidine-3'-phosphate
  modified_base 4: mod_base = OTHER; note = 2'-O-methylcytidine-3'-phosphate
  modified_base 5: mod_base = OTHER; note = 2'-O-methyluridine-3'-phosphate
  modified_base 6: mod_base = OTHER; note = 2'-O-methylcytidine-3'-phosphate
  modified_base 7: mod_base = OTHER; note = 2'-deoxy-2'-fluoroadenosine-3'-phosphate
  modified_base 8: mod_base = OTHER; note = 2'-O-methyladenosine-3'-phosphate
  modified_base 9: mod_base = OTHER; note = 2'-deoxy-2'-fluorocytidine-3'-phosphate
  modified_base 10: mod_base = OTHER; note = 2'-deoxy-2'-fluorouridine-3'-phosphate
  modified_base 11: mod_base = OTHER; note = 2'-deoxy-2'-fluorocytidine-3'-phosphate
  modified_base 12: mod_base = OTHER; note = 2'-O-methylcytidine-3'-phosphate
  modified_base 13: mod_base = OTHER; note = 2'-O-methyluridine-3'-phosphate
  modified_base 14: mod_base = OTHER; note = 2'-O-methylguanosine-3'-phosphate
  modified_base 15: mod_base = OTHER; note = 2'-O-methylguanosine-3'-phosphate
  modified_base 16: mod_base = OTHER; note = 2'-O-methylguanosine-3'-phosphate
  modified_base 17: mod_base = OTHER; note = 2'-O-methyladenosine-3'-phosphate
  modified_base 18: mod_base = OTHER; note = 2'-O-methylcytidine-3'-phosphate
  modified_base 19: mod_base = OTHER; note = 2'-O-methyladenosine-3'-phosphorothioate
  modified_base 20: mod_base = OTHER; note = 2'-O-methyladenosine-3'-phosphorothioate
  modified_base 21: mod_base = OTHER; note = 2'-O-methyladenosine
ctcctcaactcctgggacaaa

SEQ ID NO: 2478 - RNA, 21 nt, synthetic construct
  source 1..21: mol_type = other RNA
  modified_base 1: mod_base = OTHER; note = 2'-O-methylcytidine-3'-phosphorothioate
  modified_base 2: mod_base = OTHER; note = 2'-O-methyladenosine-3'-phosphorothioate
  modified_base 3: mod_base = OTHER; note = 2'-O-methylguanosine-3'-phosphate
  modified_base 4: mod_base = OTHER; note = 2'-O-methylcytidine-3'-phosphate
  modified_base 5: mod_base = OTHER; note = 2'-O-methyladenosine-3'-phosphate
  modified_base 6: mod_base = OTHER; note = 2'-O-methyladenosine-3'-phosphate
  modified_base 7: mod_base = OTHER; note = 2'-deoxy-2'-fluorocytidine-3'-phosphate
  modified_base 8: mod_base = OTHER; note = 2'-O-methyladenosine-3'-phosphate
  modified_base 9: mod_base = OTHER; note = 2'-deoxy-2'-fluorocytidine-3'-phosphate
  modified_base 10: mod_base = OTHER; note = 2'-deoxy-2'-fluoroadenosine-3'-phosphate
  modified_base 11: mod_base = OTHER; note = 2'-deoxy-2'-fluoroguanosine-3'-phosphate
  modified_base 12: mod_base = OTHER; note = 2'-O-methyluridine-3'-phosphate
  modified_base 13: mod_base = OTHER; note = 2'-O-methylguanosine-3'-phosphate
  modified_base 14: mod_base = OTHER; note = 2'-O-methyladenosine-3'-phosphate
  modified_base 15: mod_base = OTHER; note = 2'-O-methylcytidine-3'-phosphate
  modified_base 16: mod_base = OTHER; note = 2'-O-methyluridine-3'-phosphate
  modified_base 17: mod_base = OTHER; note = 2'-O-methylcytidine-3'-phosphate
  modified_base 18: mod_base = OTHER; note = 2'-O-methylcytidine-3'-phosphate
  modified_base 19: mod_base = OTHER; note = 2'-O-methylcytidine-3'-phosphorothioate
  modified_base 20: mod_base = OTHER; note = 2'-O-methyluridine-3'-phosphorothioate
  modified_base 21: mod_base = OTHER; note = 2'-O-methyladenosine
cagcaacacagtgactcccta

SEQ ID NO: 2479 - RNA, 21 nt, synthetic construct
  source 1..21: mol_type = other RNA
  modified_base 1: mod_base = OTHER; note = 2'-O-methyluridine-3'-phosphorothioate
  modified_base 2: mod_base = OTHER; note = 2'-O-methylguanosine-3'-phosphorothioate
  modified_base 3: mod_base = OTHER; note = 2'-O-methylcytidine-3'-phosphate
  modified_base 4: mod_base = OTHER; note = 2'-O-methylcytidine-3'-phosphate
  modified_base 5: mod_base = OTHER; note = 2'-O-methylcytidine-3'-phosphate
  modified_base 6: mod_base = OTHER; note = 2'-O-methyluridine-3'-phosphate
  modified_base 7: mod_base = OTHER; note = 2'-deoxy-2'-fluoroadenosine-3'-phosphate
  modified_base 8: mod_base = OTHER; note = 2'-O-methylguanosine-3'-phosphate
  modified_base 9: mod_base = OTHER; note = 2'-deoxy-2'-fluoroguanosine-3'-phosphate
  modified_base 10: mod_base = OTHER; note = 2'-deoxy-2'-fluoroguanosine-3'-phosphate
  modified_base 11: mod_base = OTHER; note = 2'-deoxy-2'-fluoroadenosine-3'-phosphate
  modified_base 12: mod_base = OTHER; note = 2'-O-methylcytidine-3'-phosphate
  modified_base 13: mod_base = OTHER; note = 2'-O-methylcytidine-3'-phosphate
  modified_base 14: mod_base = OTHER; note = 2'-O-methyladenosine-3'-phosphate
  modified_base 15: mod_base = OTHER; note = 2'-O-methylcytidine-3'-phosphate
  modified_base 16: mod_base = OTHER; note = 2'-O-methylcytidine-3'-phosphate
  modified_base 17: mod_base = OTHER; note = 2'-O-methylcytidine-3'-phosphate
  modified_base 18: mod_base = OTHER; note = 2'-O-methyladenosine-3'-phosphate
  modified_base 19: mod_base = OTHER; note = 2'-O-methylcytidine-3'-phosphorothioate
  modified_base 20: mod_base = OTHER; note = 2'-O-methyladenosine-3'-phosphorothioate
  modified_base 21: mod_base = OTHER; note = 2'-O-methyladenosine
tgccctagggaccacccacaa

SEQ ID NO: 2480 - RNA, 21 nt, synthetic construct
  source 1..21: mol_type = other RNA
  modified_base 1: mod_base = OTHER; note = 2'-O-methyladenosine-3'-phosphorothioate
  modified_base 2: mod_base = OTHER; note = 2'-O-methylguanosine-3'-phosphorothioate
  modified_base 3: mod_base = OTHER; note = 2'-O-methyluridine-3'-phosphate
  modified_base 4: mod_base = OTHER; note = 2'-O-methylguanosine-3'-phosphate
  modified_base 5: mod_base = OTHER; note = 2'-O-methylcytidine-3'-phosphate
  modified_base 6: mod_base = OTHER; note = 2'-O-methylcytidine-3'-phosphate
  modified_base 7: mod_base = OTHER; note = 2'-deoxy-2'-fluoroguanosine-3'-phosphate
  modified_base 8: mod_base = OTHER; note = 2'-O-methyladenosine-3'-phosphate
  modified_base 9: mod_base = OTHER; note = 2'-deoxy-2'-fluoroadenosine-3'-phosphate
  modified_base 10: mod_base = OTHER; note = 2'-deoxy-2'-fluorocytidine-3'-phosphate
  modified_base 11: mod_base = OTHER; note = 2'-deoxy-2'-fluoroadenosine-3'-phosphate
  modified_base 12: mod_base = OTHER; note = 2'-O-methylcytidine-3'-phosphate
  modified_base 13: mod_base = OTHER; note = 2'-O-methylcytidine-3'-phosphate
  modified_base 14: mod_base = OTHER; note = 2'-O-methyladenosine-3'-phosphate
  modified_base 15: mod_base = OTHER; note = 2'-O-methyluridine-3'-phosphate
  modified_base 16: mod_base = OTHER; note = 2'-O-methylguanosine-3'-phosphate
  modified_base 17: mod_base = OTHER; note = 2'-O-methylguanosine-3'-phosphate
  modified_base 18: mod_base = OTHER; note = 2'-O-methylcytidine-3'-phosphate
  modified_base 19: mod_base = OTHER; note = 2'-O-methylcytidine-3'-phosphorothioate
  modified_base 20: mod_base = OTHER; note = 2'-O-methyladenosine-3'-phosphorothioate
  modified_base 21: mod_base = OTHER; note = 2'-O-methyladenosine
agtgccgaacaccatggccaa

SEQ ID NO: 2481 - RNA, 21 nt, synthetic construct
  source 1..21: mol_type = other RNA
  modified_base 1: mod_base = OTHER; note = 2'-O-methyladenosine-3'-phosphorothioate
  modified_base 2: mod_base = OTHER; note = 2'-O-methylguanosine-3'-phosphorothioate
  modified_base 3: mod_base = OTHER; note = 2'-O-methylcytidine-3'-phosphate
  modified_base 4: mod_base = OTHER; note = 2'-O-methylcytidine-3'-phosphate
  modified_base 5: mod_base = OTHER; note = 2'-O-methyluridine-3'-phosphate
  modified_base 6: mod_base = OTHER; note = 2'-O-methylguanosine-3'-phosphate
  modified_base 7: mod_base = OTHER; note = 2'-deoxy-2'-fluoroguanosine-3'-phosphate
  modified_base 8: mod_base = OTHER; note = 2'-O-methyladenosine-3'-phosphate
  modified_base 9: mod_base = OTHER; note = 2'-deoxy-2'-fluorocytidine-3'-phosphate
  modified_base 10: mod_base = OTHER; note = 2'-deoxy-2'-fluorouridine-3'-phosphate
  modified_base 11: mod_base = OTHER; note = 2'-deoxy-2'-fluorouridine-3'-phosphate
  modified_base 12: mod_base = OTHER; note = 2'-O-methylcytidine-3'-phosphate
  modified_base 13: mod_base = OTHER; note = 2'-O-methylguanosine-3'-phosphate
  modified_base 14: mod_base = OTHER; note = 2'-O-methylguanosine-3'-phosphate
  modified_base 15: mod_base = OTHER; note = 2'-O-methylcytidine-3'-phosphate
  modified_base 16: mod_base = OTHER; note = 2'-O-methylcytidine-3'-phosphate
  modified_base 17: mod_base = OTHER; note = 2'-O-methyladenosine-3'-phosphate
  modified_base 18: mod_base = OTHER; note = 2'-O-methylcytidine-3'-phosphate
  modified_base 19: mod_base = OTHER; note = 2'-O-methylcytidine-3'-phosphorothioate
  modified_base 20: mod_base = OTHER; note = 2'-O-methyluridine-3'-phosphorothioate
  modified_base 21: mod_base = OTHER; note = 2'-O-methyladenosine
agcctggacttcggccaccta

SEQ ID NO: 2482 - RNA, 21 nt, synthetic construct
  source 1..21: mol_type = other RNA
  modified_base 1: mod_base = OTHER; note = 2'-O-methyladenosine-3'-phosphorothioate
  modified_base 2: mod_base = OTHER; note = 2'-O-methylcytidine-3'-phosphorothioate
  modified_base 3: mod_base = OTHER; note = 2'-O-methylcytidine-3'-phosphate
  modified_base 4: mod_base = OTHER; note = 2'-O-methylcytidine-3'-phosphate
  modified_base 5: mod_base = OTHER; note = 2'-O-methyladenosine-3'-phosphate
  modified_base 6: mod_base = OTHER; note = 2'-O-methylcytidine-3'-phosphate
  modified_base 7: mod_base = OTHER; note = 2'-deoxy-2'-fluoroadenosine-3'-phosphate
  modified_base 8: mod_base = OTHER; note = 2'-O-methyluridine-3'-phosphate
  modified_base 9: mod_base = OTHER; note = 2'-deoxy-2'-fluorocytidine-3'-phosphate
  modified_base 10: mod_base = OTHER; note = 2'-deoxy-2'-fluoroadenosine-3'-phosphate
  modified_base 11: mod_base = OTHER; note = 2'-deoxy-2'-fluorocytidine-3'-phosphate
  modified_base 12: mod_base = OTHER; note = 2'-O-methyladenosine-3'-phosphate
  modified_base 13: mod_base = OTHER; note = 2'-O-methylguanosine-3'-phosphate
  modified_base 14: mod_base = OTHER; note = 2'-O-methyladenosine-3'-phosphate
  modified_base 15: mod_base = OTHER; note = 2'-O-methylguanosine-3'-phosphate
  modified_base 16: mod_base = OTHER; note = 2'-O-methylcytidine-3'-phosphate
  modified_base 17: mod_base = OTHER; note = 2'-O-methylcytidine-3'-phosphate
  modified_base 18: mod_base = OTHER; note = 2'-O-methyluridine-3'-phosphate
  modified_base 19: mod_base = OTHER; note = 2'-O-methyluridine-3'-phosphorothioate
  modified_base 20: mod_base = OTHER; note = 2'-O-methylcytidine-3'-phosphorothioate
  modified_base 21: mod_base = OTHER; note = 2'-O-methyladenosine
acccacatcacagagccttca

SEQ ID NO: 2483 - RNA, 21 nt, synthetic construct
  source 1..21: mol_type = other RNA
  modified_base 1: mod_base = OTHER; note = 2'-O-methylguanosine-3'-phosphorothioate
  modified_base 2: mod_base = OTHER; note = 2'-O-methylguanosine-3'-phosphorothioate
  modified_base 3: mod_base = OTHER; note = 2'-O-methyluridine-3'-phosphate
  modified_base 4: mod_base = OTHER; note = 2'-O-methylguanosine-3'-phosphate
  modified_base 5: mod_base = OTHER; note = 2'-O-methyladenosine-3'-phosphate
  modified_base 6: mod_base = OTHER; note = 2'-O-methylcytidine-3'-phosphate
  modified_base 7: mod_base = OTHER; note = 2'-deoxy-2'-fluorouridine-3'-phosphate
  modified_base 8: mod_base = OTHER; note = 2'-O-methyluridine-3'-phosphate
  modified_base 9: mod_base = OTHER; note = 2'-deoxy-2'-fluorocytidine-3'-phosphate
  modified_base 10: mod_base = OTHER; note = 2'-deoxy-2'-fluorocytidine-3'-phosphate
  modified_base 11: mod_base = OTHER; note = 2'-deoxy-2'-fluorocytidine-3'-phosphate
  modified_base 12: mod_base = OTHER; note = 2'-O-methyladenosine-3'-phosphate
  modified_base 13: mod_base = OTHER; note = 2'-O-methylcytidine-3'-phosphate
  modified_base 14: mod_base = OTHER; note = 2'-O-methyladenosine-3'-phosphate
  modified_base 15: mod_base = OTHER; note = 2'-O-methylcytidine-3'-phosphate
  modified_base 16: mod_base = OTHER; note = 2'-O-methylcytidine-3'-phosphate
  modified_base 17: mod_base = OTHER; note = 2'-O-methylcytidine-3'-phosphate
  modified_base 18: mod_base = OTHER; note = 2'-O-methyluridine-3'-phosphate
  modified_base 19: mod_base = OTHER; note = 2'-O-methyladenosine-3'-phosphorothioate
  modified_base 20: mod_base = OTHER; note = 2'-O-methylguanosine-3'-phosphorothioate
  modified_base 21: mod_base = OTHER; note = 2'-O-methyladenosine
ggtgacttcccacaccctaga

SEQ ID NO: 2484 - RNA, 21 nt, synthetic construct
  source 1..21: mol_type = other RNA
  modified_base 1: mod_base = OTHER; note = 2'-O-methylcytidine-3'-phosphorothioate
  modified_base 2: mod_base = OTHER; note = 2'-O-methyladenosine-3'-phosphorothioate
  modified_base 3: mod_base = OTHER; note = 2'-O-methyladenosine-3'-phosphate
  modified_base 4: mod_base = OTHER; note = 2'-O-methylcytidine-3'-phosphate
  modified_base 5: mod_base = OTHER; note = 2'-O-methylcytidine-3'-phosphate
  modified_base 6: mod_base = OTHER; note = 2'-O-methyladenosine-3'-phosphate
  modified_base 7: mod_base = OTHER; note = 2'-deoxy-2'-fluorocytidine-3'-phosphate
  modified_base 8: mod_base = OTHER; note = 2'-O-methylcytidine-3'-phosphate
  modified_base 9: mod_base = OTHER; note = 2'-deoxy-2'-fluoroguanosine-3'-phosphate
  modified_base 10: mod_base = OTHER; note = 2'-deoxy-2'-fluoroguanosine-3'-phosphate
  modified_base 11: mod_base = OTHER; note = 2'-deoxy-2'-fluorouridine-3'-phosphate
  modified_base 12: mod_base = OTHER; note = 2'-O-methyladenosine-3'-phosphate
  modified_base 13: mod_base = OTHER; note = 2'-O-methylcytidine-3'-phosphate
  modified_base 14: mod_base = OTHER; note = 2'-O-methylcytidine-3'-phosphate
  modified_base 15: mod_base = OTHER; note = 2'-O-methyladenosine-3'-phosphate
  modified_base 16: mod_base = OTHER; note = 2'-O-methylcytidine-3'-phosphate
  modified_base 17: mod_base = OTHER; note = 2'-O-methylcytidine-3'-phosphate
  modified_base 18: mod_base = OTHER; note = 2'-O-methylcytidine-3'-phosphate
  modified_base 19: mod_base = OTHER; note = 2'-O-methyladenosine-3'-phosphorothioate
  modified_base 20: mod_base = OTHER; note = 2'-O-methylguanosine-3'-phosphorothioate
  modified_base 21: mod_base = OTHER; note = 2'-O-methyladenosine
caaccaccggtaccacccaga

SEQ ID NO: 2485 - RNA, 21 nt, synthetic construct
  source 1..21: mol_type = other RNA
  modified_base 1: mod_base = OTHER; note = 2'-O-methylcytidine-3'-phosphorothioate
  modified_base 2: mod_base = OTHER; note = 2'-O-methylguanosine-3'-phosphorothioate
  modified_base 3: mod_base = OTHER; note = 2'-O-methyladenosine-3'-phosphate
  modified_base 4: mod_base = OTHER; note = 2'-O-methylcytidine-3'-phosphate
  modified_base 5: mod_base = OTHER; note = 2'-O-methyluridine-3'-phosphate
  modified_base 6: mod_base = OTHER; note = 2'-O-methylcytidine-3'-phosphate
  modified_base 7: mod_base = OTHER; note = 2'-deoxy-2'-fluorocytidine-3'-phosphate
  modified_base 8: mod_base = OTHER; note = 2'-O-methyladenosine-3'-phosphate
  modified_base 9: mod_base = OTHER; note = 2'-deoxy-2'-fluoroguanosine-3'-phosphate
  modified_base 10: mod_base = OTHER; note = 2'-deoxy-2'-fluorocytidine-3'-phosphate
  modified_base 11: mod_base = OTHER; note = 2'-deoxy-2'-fluorocytidine-3'-phosphate
  modified_base 12: mod_base = OTHER; note = 2'-O-methylcytidine-3'-phosphate
  modified_base 13: mod_base = OTHER; note = 2'-O-methyluridine-3'-phosphate
  modified_base 14: mod_base = OTHER; note = 2'-O-methyluridine-3'-phosphate
  modified_base 15: mod_base = OTHER; note = 2'-O-methyluridine-3'-phosphate
  modified_base 16: mod_base = OTHER; note = 2'-O-methylcytidine-3'-phosphate
  modified_base 17: mod_base = OTHER; note = 2'-O-methylcytidine-3'-phosphate
  modified_base 18: mod_base = OTHER; note = 2'-O-methyladenosine-3'-phosphate
  modified_base 19: mod_base = OTHER; note = 2'-O-methylguanosine-3'-phosphorothioate
  modified_base 20: mod_base = OTHER; note = 2'-O-methylcytidine-3'-phosphorothioate
  modified_base 21: mod_base = OTHER; note = 2'-O-methyladenosine
cgactccagccctttccagca

SEQ ID NO: 2486 - RNA, 21 nt, synthetic construct
  source 1..21: mol_type = other RNA
  modified_base 1: mod_base = OTHER; note = 2'-O-methyluridine-3'-phosphorothioate
  modified_base 2: mod_base = OTHER; note = 2'-O-methyladenosine-3'-phosphorothioate
  modified_base 3: mod_base = OTHER; note = 2'-O-methylguanosine-3'-phosphate
  modified_base 4: mod_base = OTHER; note = 2'-O-methylcytidine-3'-phosphate
  modified_base 5: mod_base = OTHER; note = 2'-O-methyladenosine-3'-phosphate
  modified_base 6: mod_base = OTHER; note = 2'-O-methylguanosine-3'-phosphate
  modified_base 7: mod_base = OTHER; note = 2'-deoxy-2'-fluorocytidine-3'-phosphate
  modified_base 8: mod_base = OTHER; note = 2'-O-methyladenosine-3'-phosphate
  modified_base 9: mod_base = OTHER; note = 2'-deoxy-2'-fluoroguanosine-3'-phosphate
  modified_base 10: mod_base = OTHER; note = 2'-deoxy-2'-fluoroadenosine-3'-phosphate
  modified_base 11: mod_base = OTHER; note = 2'-deoxy-2'-fluoroadenosine-3'-phosphate
  modified_base 12: mod_base = OTHER; note = 2'-O-methylcytidine-3'-phosphate
  modified_base 13: mod_base = OTHER; note = 2'-O-methylcytidine-3'-phosphate
  modified_base 14: mod_base = OTHER; note = 2'-O-methyladenosine-3'-phosphate
  modified_base 15: mod_base = OTHER; note = 2'-O-methylcytidine-3'-phosphate
  modified_base 16: mod_base = OTHER; note = 2'-O-methylcytidine-3'-phosphate
  modified_base 17: mod_base = OTHER; note = 2'-O-methylguanosine-3'-phosphate
  modified_base 18: mod_base = OTHER; note = 2'-O-methyladenosine-3'-phosphate
  modified_base 19: mod_base = OTHER; note = 2'-O-methylguanosine-3'-phosphorothioate
  modified_base 20: mod_base = OTHER; note = 2'-O-methyluridine-3'-phosphorothioate
  modified_base 21: mod_base = OTHER; note = 2'-O-methyladenosine
tagcagcagaaccaccgagta

SEQ ID NO: 2487 - RNA, 21 nt, synthetic construct
  source 1..21: mol_type = other RNA
  modified_base 1: mod_base = OTHER; note = 2'-O-methyladenosine-3'-phosphorothioate
  modified_base 2: mod_base = OTHER; note = 2'-O-methylcytidine-3'-phosphorothioate
  modified_base 3: mod_base = OTHER; note = 2'-O-methylcytidine-3'-phosphate
  modified_base 4: mod_base = OTHER; note = 2'-O-methylcytidine-3'-phosphate
  modified_base 5: mod_base = OTHER; note = 2'-O-methyladenosine-3'-phosphate
  modified_base 6: mod_base = OTHER; note = 2'-O-methylguanosine-3'-phosphate
  modified_base 7: mod_base = OTHER; note = 2'-deoxy-2'-fluorocytidine-3'-phosphate
  modified_base 8: mod_base = OTHER; note = 2'-O-methyladenosine-3'-phosphate
  modified_base 9: mod_base = OTHER; note = 2'-deoxy-2'-fluoroadenosine-3'-phosphate
  modified_base 10: mod_base = OTHER; note = 2'-deoxy-2'-fluoroguanosine-3'-phosphate
  modified_base 11: mod_base = OTHER; note = 2'-deoxy-2'-fluoroadenosine-3'-phosphate
  modified_base 12: mod_base = OTHER; note = 2'-O-methylcytidine-3'-phosphate
  modified_base 13: mod_base = OTHER; note = 2'-O-methylcytidine-3'-phosphate
  modified_base 14: mod_base = OTHER; note = 2'-O-methylcytidine-3'-phosphate
  modified_base 15: mod_base = OTHER; note = 2'-O-methylguanosine-3'-phosphate
  modified_base 16: mod_base = OTHER; note = 2'-O-methylcytidine-3'-phosphate
  modified_base 17: mod_base = OTHER; note = 2'-O-methyladenosine-3'-phosphate
  modified_base 18: mod_base = OTHER; note = 2'-O-methylcytidine-3'-phosphate
  modified_base 19: mod_base = OTHER; note = 2'-O-methylcytidine-3'-phosphorothioate
  modified_base 20: mod_base = OTHER; note = 2'-O-methyluridine-3'-phosphorothioate
  modified_base 21: mod_base = OTHER; note = 2'-O-methyladenosine
acccagcaagacccgcaccta

SEQ ID NO: 2488 - RNA, 21 nt, synthetic construct
  source 1..21: mol_type = other RNA
  modified_base 1: mod_base = OTHER; note = 2'-O-methylcytidine-3'-phosphorothioate
  modified_base 2: mod_base = OTHER; note = 2'-O-methylguanosine-3'-phosphorothioate
  modified_base 3: mod_base = OTHER; note = 2'-O-methylguanosine-3'-phosphate
  modified_base 4: mod_base = OTHER; note = 2'-O-methyluridine-3'-phosphate
  modified_base 5: mod_base = OTHER; note = 2'-O-methylguanosine-3'-phosphate
  modified_base 6: mod_base = OTHER; note = 2'-O-methylguanosine-3'-phosphate
  modified_base 7: mod_base = OTHER; note = 2'-deoxy-2'-fluorouridine-3'-phosphate
  modified_base 8: mod_base = OTHER; note = 2'-O-methylguanosine-3'-phosphate
  modified_base 9: mod_base = OTHER; note = 2'-deoxy-2'-fluoroadenosine-3'-phosphate
  modified_base 10: mod_base = OTHER; note = 2'-deoxy-2'-fluorocytidine-3'-phosphate
  modified_base 11: mod_base = OTHER; note = 2'-deoxy-2'-fluorocytidine-3'-phosphate
  modified_base 12: mod_base = OTHER; note = 2'-O-methyladenosine-3'-phosphate
  modified_base 13: mod_base = OTHER; note = 2'-O-methyluridine-3'-phosphate
  modified_base 14: mod_base = OTHER; note = 2'-O-methylguanosine-3'-phosphate
  modified_base 15: mod_base = OTHER; note = 2'-O-methylguanosine-3'-phosphate
  modified_base 16: mod_base = OTHER; note = 2'-O-methylguanosine-3'-phosphate
  modified_base 17: mod_base = OTHER; note = 2'-O-methylcytidine-3'-phosphate
  modified_base 18: mod_base = OTHER; note = 2'-O-methyluridine-3'-phosphate
  modified_base 19: mod_base = OTHER; note = 2'-O-methylguanosine-3'-phosphorothioate
  modified_base 20: mod_base = OTHER; note = 2'-O-methyluridine-3'-phosphorothioate
  modified_base 21: mod_base = OTHER; note = 2'-O-methyladenosine
cggtggtgaccatgggctgta

SEQ ID NO: 2489 - RNA, 21 nt, synthetic construct
  source 1..21: mol_type = other RNA
  modified_base 1: mod_base = OTHER; note = 2'-O-methylguanosine-3'-phosphorothioate
  modified_base 2: mod_base = OTHER; note = 2'-O-methyluridine-3'-phosphorothioate
  modified_base 3: mod_base = OTHER; note = 2'-O-methylguanosine-3'-phosphate
  modified_base 4: mod_base = OTHER; note = 2'-O-methylguanosine-3'-phosphate
  modified_base 5: mod_base = OTHER; note = 2'-O-methylcytidine-3'-phosphate
  modified_base 6: mod_base = OTHER; note = 2'-O-methyluridine-3'-phosphate
  modified_base 7: mod_base = OTHER; note = 2'-deoxy-2'-fluoroguanosine-3'-phosphate
  modified_base 8: mod_base = OTHER; note = 2'-O-methylguanosine-3'-phosphate
  modified_base 9: mod_base = OTHER; note = 2'-deoxy-2'-fluoroadenosine-3'-phosphate
  modified_base 10: mod_base = OTHER; note = 2'-deoxy-2'-fluorocytidine-3'-phosphate
  modified_base 11: mod_base = OTHER; note = 2'-deoxy-2'-fluorouridine-3'-phosphate
  modified_base 12: mod_base = OTHER; note = 2'-O-methyladenosine-3'-phosphate
  modified_base 13: mod_base = OTHER; note = 2'-O-methylcytidine-3'-phosphate
  modified_base 14: mod_base = OTHER; note = 2'-O-methyladenosine-3'-phosphate
  modified_base 15: mod_base = OTHER; note = 2'-O-methylguanosine-3'-phosphate
  modified_base 16: mod_base = OTHER; note = 2'-O-methylcytidine-3'-phosphate
  modified_base 17: mod_base = OTHER; note = 2'-O-methyluridine-3'-phosphate
  modified_base 18: mod_base = OTHER; note = 2'-O-methyladenosine-3'-phosphate
  modified_base 19: mod_base = OTHER; note = 2'-O-methylcytidine-3'-phosphorothioate
  modified_base 20: mod_base = OTHER; note = 2'-O-methylcytidine-3'-phosphorothioate
  modified_base 21: mod_base = OTHER; note = 2'-O-methyladenosine
gtggctggactacagctacca

SEQ ID NO: 2490 - RNA, 21 nt, synthetic construct
  source 1..21: mol_type = other RNA
  modified_base 1: mod_base = OTHER; note = 2'-O-methyluridine-3'-phosphorothioate
  modified_base 2: mod_base = OTHER; note = 2'-O-methyluridine-3'-phosphorothioate
  modified_base 3: mod_base = OTHER; note = 2'-O-methylguanosine-3'-phosphate
  modified_base 4: mod_base = OTHER; note = 2'-O-methyladenosine-3'-phosphate
  modified_base 5: mod_base = OTHER; note = 2'-O-methylcytidine-3'-phosphate
  modified_base 6: mod_base = OTHER; note = 2'-O-methyladenosine-3'-phosphate
  modified_base 7: mod_base = OTHER; note = 2'-deoxy-2'-fluorocytidine-3'-phosphate
  modified_base 8: mod_base = OTHER; note = 2'-O-methylcytidine-3'-phosphate
  modified_base 9: mod_base = OTHER; note = 2'-deoxy-2'-fluorouridine-3'-phosphate
  modified_base 10: mod_base = OTHER; note = 2'-deoxy-2'-fluoroadenosine-3'-phosphate
  modified_base 11: mod_base = OTHER; note = 2'-deoxy-2'-fluorocytidine-3'-phosphate
  modified_base 12: mod_base = OTHER; note = 2'-O-methyluridine-3'-phosphate
  modified_base 13: mod_base = OTHER; note = 2'-O-methylcytidine-3'-phosphate
  modified_base 14: mod_base = OTHER; note = 2'-O-methylcytidine-3'-phosphate
  modified_base 15: mod_base = OTHER; note = 2'-O-methyladenosine-3'-phosphate
  modified_base 16: mod_base = OTHER; note = 2'-O-methyladenosine-3'-phosphate
  modified_base 17: mod_base = OTHER; note = 2'-O-methylcytidine-3'-phosphate
  modified_base 18: mod_base = OTHER; note = 2'-O-methyladenosine-3'-phosphate
  modified_base 19: mod_base = OTHER; note = 2'-O-methyluridine-3'-phosphorothioate
  modified_base 20: mod_base = OTHER; note = 2'-O-methylcytidine-3'-phosphorothioate
  modified_base 21: mod_base = OTHER; note = 2'-O-methyladenosine
ttgacacctactccaacatca

SEQ ID NO: 2491 - RNA, 21 nt, synthetic construct
  source 1..21: mol_type = other RNA
  modified_base 1: mod_base = OTHER; note = 2'-O-methyluridine-3'-phosphorothioate
  modified_base 2: mod_base = OTHER; note = 2'-O-methyluridine-3'-phosphorothioate
  modified_base 3: mod_base = OTHER; note = 2'-O-methylguanosine-3'-phosphate
  modified_base 4: mod_base = OTHER; note = 2'-O-methylguanosine-3'-phosphate
  modified_base 5: mod_base = OTHER; note = 2'-O-methylguanosine-3'-phosphate
  modified_base 6: mod_base = OTHER; note = 2'-O-methylcytidine-3'-phosphate
  modified_base 7: mod_base = OTHER; note = 2'-deoxy-2'-fluorocytidine-3'-phosphate
  modified_base 8: mod_base = OTHER; note = 2'-O-methyladenosine-3'-phosphate
  modified_base 9: mod_base = OTHER; note = 2'-deoxy-2'-fluoroguanosine-3'-phosphate
  modified_base 10: mod_base = OTHER; note = 2'-deoxy-2'-fluoroguanosine-3'-phosphate
  modified_base 11: mod_base = OTHER; note = 2'-deoxy-2'-fluorouridine-3'-phosphate
  modified_base 12: mod_base = OTHER; note = 2'-O-methylcytidine-3'-phosphate
  modified_base 13: mod_base = OTHER; note = 2'-O-methylguanosine-3'-phosphate
  modified_base 14: mod_base = OTHER; note = 2'-O-methyluridine-3'-phosphate
  modified_base 15: mod_base = OTHER; note = 2'-O-methylguanosine-3'-phosphate
  modified_base 16: mod_base = OTHER; note = 2'-O-methylguanosine-3'-phosphate
  modified_base 17: mod_base = OTHER; note = 2'-O-methyladenosine-3'-phosphate
  modified_base 18: mod_base = OTHER; note = 2'-O-methyladenosine-3'-phosphate
  modified_base 19: mod_base = OTHER; note = 2'-O-methyluridine-3'-phosphorothioate
  modified_base 20: mod_base = OTHER; note = 2'-O-methylguanosine-3'-phosphorothioate
  modified_base 21: mod_base = OTHER; note = 2'-O-methyladenosine
ttgggccaggtcgtggaatga

SEQ ID NO: 2492 - RNA, 21 nt, synthetic construct
  source 1..21: mol_type = other RNA
  modified_base 1: mod_base = OTHER; note = 2'-O-methylcytidine-3'-phosphorothioate
  modified_base 2: mod_base = OTHER; note = 2'-O-methylcytidine-3'-phosphorothioate
  modified_base 3: mod_base = OTHER; note = 2'-O-methyluridine-3'-phosphate
  modified_base 4: mod_base = OTHER; note = 2'-O-methylguanosine-3'-phosphate
  modified_base 5: mod_base = OTHER; note = 2'-O-methylguanosine-3'-phosphate
  modified_base 6: mod_base = OTHER; note = 2'-O-methyladenosine-3'-phosphate
  modified_base 7: mod_base = OTHER; note = 2'-deoxy-2'-fluorocytidine-3'-phosphate
  modified_base 8: mod_base = OTHER; note = 2'-O-methyluridine-3'-phosphate
  modified_base 9: mod_base = OTHER; note = 2'-deoxy-2'-fluorouridine-3'-phosphate
  modified_base 10: mod_base = OTHER; note = 2'-deoxy-2'-fluorouridine-3'-phosphate
  modified_base 11: mod_base = OTHER; note = 2'-deoxy-2'-fluoroguanosine-3'-phosphate
  modified_base 12: mod_base = OTHER; note = 2'-O-methylguanosine-3'-phosphate
  modified_base 13: mod_base = OTHER; note = 2'-O-methylcytidine-3'-phosphate
  modified_base 14: mod_base = OTHER; note = 2'-O-methylcytidine-3'-phosphate
  modified_base 15: mod_base = OTHER; note = 2'-O-methyluridine-3'-phosphate
  modified_base 16: mod_base = OTHER; note = 2'-O-methylguanosine-3'-phosphate
  modified_base 17: mod_base = OTHER; note = 2'-O-methylguanosine-3'-phosphate
  modified_base 18: mod_base = OTHER; note = 2'-O-methyluridine-3'-phosphate
  modified_base 19: mod_base = OTHER; note = 2'-O-methylcytidine-3'-phosphorothioate
  modified_base 20: mod_base = OTHER; note = 2'-O-methyluridine-3'-phosphorothioate
  modified_base 21: mod_base = OTHER; note = 2'-O-methyladenosine
cctggactttggcctggtcta

SEQ ID NO: 2493 - RNA, 21 nt, synthetic construct
  source 1..21: mol_type = other RNA
  modified_base 1: mod_base = OTHER; note = 2'-O-methyladenosine-3'-phosphorothioate
  modified_base 2: mod_base = OTHER; note = 2'-O-methyluridine-3'-phosphorothioate
  modified_base 3: mod_base = OTHER; note = 2'-O-methylguanosine-3'-phosphate
  modified_base 4: mod_base = OTHER; note = 2'-O-methyluridine-3'-phosphate
  modified_base 5: mod_base = OTHER; note = 2'-O-methylguanosine-3'-phosphate
  modified_base 6: mod_base = OTHER; note = 2'-O-methylcytidine-3'-phosphate
  modified_base 7: mod_base = OTHER; note = 2'-deoxy-2'-fluorouridine-3'-phosphate
  modified_base 8: mod_base = OTHER; note = 2'-O-methyluridine-3'-phosphate
  modified_base 9: mod_base = OTHER; note = 2'-deoxy-2'-fluorocytidine-3'-phosphate
  modified_base 10: mod_base = OTHER; note = 2'-deoxy-2'-fluoroadenosine-3'-phosphate
  modified_base 11: mod_base = OTHER; note = 2'-deoxy-2'-fluoroadenosine-3'-phosphate
  modified_base 12: mod_base = OTHER; note = 2'-O-methylcytidine-3'-phosphate
  modified_base 13: mod_base = OTHER; note = 2'-O-methyluridine-3'-phosphate
  modified_base 14: mod_base = OTHER; note = 2'-O-methyladenosine-3'-phosphate
  modified_base 15: mod_base = OTHER; note = 2'-O-methyluridine-3'-phosphate
  modified_base 16: mod_base = OTHER; note = 2'-O-methylguanosine-3'-phosphate
  modified_base 17: mod_base = OTHER; note = 2'-O-methyladenosine-3'-phosphate
  modified_base 18: mod_base = OTHER; note = 2'-O-methyladenosine-3'-phosphate
  modified_base 19: mod_base = OTHER; note = 2'-O-methyladenosine-3'-phosphorothioate
  modified_base 20: mod_base = OTHER; note = 2'-O-methyluridine-3'-phosphorothioate
  modified_base 21: mod_base = OTHER; note = 2'-O-methyladenosine
atgtgcttcaactatgaaata

SEQ ID NO: 2494 - RNA, 21 nt, synthetic construct
  source 1..21: mol_type = other RNA
  modified_base 1: mod_base = OTHER; note = 2'-O-methyluridine-3'-phosphorothioate
  modified_base 2: mod_base = OTHER; note = 2'-O-methylguanosine-3'-phosphorothioate
  modified_base 3: mod_base = OTHER; note = 2'-O-methyluridine-3'-phosphate
  modified_base 4: mod_base = OTHER; note = 2'-O-methylguanosine-3'-phosphate
  modified_base 5: mod_base = OTHER; note = 2'-O-methyluridine-3'-phosphate
  modified_base 6: mod_base = OTHER; note = 2'-O-methyluridine-3'-phosphate
  modified_base 7: mod_base = OTHER; note = 2'-deoxy-2'-fluorocytidine-3'-phosphate
  modified_base 8: mod_base = OTHER; note = 2'-O-methyluridine-3'-phosphate
  modified_base 9: mod_base = OTHER; note = 2'-deoxy-2'-fluoroguanosine-3'-phosphate
  modified_base 10: mod_base = OTHER; note = 2'-deoxy-2'-fluorocytidine-3'-phosphate
  modified_base 11: mod_base = OTHER; note = 2'-deoxy-2'-fluorouridine-3'-phosphate
  modified_base 12: mod_base = OTHER; note = 2'-O-methylguanosine-3'-phosphate
  modified_base 13: mod_base = OTHER; note = 2'-O-methylcytidine-3'-phosphate
  modified_base 14: mod_base = OTHER; note = 2'-O-methyladenosine-3'-phosphate
  modified_base 15: mod_base = OTHER; note = 2'-O-methyladenosine-3'-phosphate
  modified_base 16: mod_base = OTHER; note = 2'-O-methylcytidine-3'-phosphate
  modified_base 17: mod_base = OTHER; note = 2'-O-methyluridine-3'-phosphate
  modified_base 18: mod_base = OTHER; note = 2'-O-methyladenosine-3'-phosphate
  modified_base 19: mod_base = OTHER; note = 2'-O-methylcytidine-3'-phosphorothioate
  modified_base 20: mod_base = OTHER; note = 2'-O-methylguanosine-3'-phosphorothioate
  modified_base 21: mod_base = OTHER; note = 2'-O-methyladenosine
tgtgttctgctgcaactacga

SEQ ID NO: 2495 - RNA, 21 nt, synthetic construct
  source 1..21: mol_type = other RNA
  modified_base 1: mod_base = OTHER; note = 2'-O-methylcytidine-3'-phosphorothioate
  modified_base 2: mod_base = OTHER; note = 2'-O-methyladenosine-3'-phosphorothioate
  modified_base 3: mod_base = OTHER; note = 2'-O-methylguanosine-3'-phosphate
  modified_base 4: mod_base = OTHER; note = 2'-O-methylcytidine-3'-phosphate
  modified_base 5: mod_base = OTHER; note = 2'-O-methyluridine-3'-phosphate
  modified_base 6: mod_base = OTHER; note = 2'-O-methylcytidine-3'-phosphate
  modified_base 7: mod_base = OTHER; note = 2'-deoxy-2'-fluorouridine-3'-phosphate
  modified_base 8: mod_base = OTHER; note = 2'-O-methyladenosine-3'-phosphate
  modified_base 9: mod_base = OTHER; note = 2'-deoxy-2'-fluorocytidine-3'-phosphate
  modified_base 10: mod_base = OTHER; note = 2'-deoxy-2'-fluoroguanosine-3'-phosphate
  modified_base 11: mod_base = OTHER; note = 2'-deoxy-2'-fluoroguanosine-3'-phosphate
  modified_base 12: mod_base = OTHER; note = 2'-O-methylcytidine-3'-phosphate
  modified_base 13: mod_base = OTHER; note = 2'-O-methylcytidine-3'-phosphate
  modified_base 14: mod_base = OTHER; note = 2'-O-methyladenosine-3'-phosphate
  modified_base 15: mod_base = OTHER; note = 2'-O-methyluridine-3'-phosphate
  modified_base 16: mod_base = OTHER; note = 2'-O-methylguanosine-3'-phosphate
  modified_base 17: mod_base = OTHER; note = 2'-O-methylcytidine-3'-phosphate
  modified_base 18: mod_base = OTHER; note = 2'-O-methylcytidine-3'-phosphate
  modified_base 19: mod_base = OTHER; note = 2'-O-methylcytidine-3'-phosphorothioate
  modified_base 20: mod_base = OTHER; note = 2'-O-methyluridine-3'-phosphorothioate
  modified_base 21: mod_base = OTHER; note = 2'-O-methyladenosine
cagctctacggccatgcccta

SEQ ID NO: 2496 - RNA, 21 nt, synthetic construct
  source 1..21: mol_type = other RNA
  modified_base 1: mod_base = OTHER; note = 2'-O-methyladenosine-3'-phosphorothioate
  modified_base 2: mod_base = OTHER; note = 2'-O-methyluridine-3'-phosphorothioate
  modified_base 3: mod_base = OTHER; note = 2'-O-methylcytidine-3'-phosphate
  modified_base 4: mod_base = OTHER; note = 2'-O-methylcytidine-3'-phosphate
  modified_base 5: mod_base = OTHER; note = 2'-O-methyluridine-3'-phosphate
  modified_base 6: mod_base = OTHER; note = 2'-O-methylcytidine-3'-phosphate
  modified_base 7: mod_base = OTHER; note = 2'-deoxy-2'-fluoroadenosine-3'-phosphate
  modified_base 8: mod_base = OTHER; note = 2'-O-methylcytidine-3'-phosphate
  modified_base 9: mod_base = OTHER; note = 2'-deoxy-2'-fluoroadenosine-3'-phosphate
  modified_base 10: mod_base = OTHER; note = 2'-deoxy-2'-fluoroguanosine-3'-phosphate
  modified_base 11: mod_base = OTHER; note = 2'-deoxy-2'-fluoroadenosine-3'-phosphate
  modified_base 12: mod_base = OTHER; note = 2'-O-methylguanosine-3'-phosphate
  modified_base 13: mod_base = OTHER; note = 2'-O-methylcytidine-3'-phosphate
  modified_base 14: mod_base = OTHER; note = 2'-O-methyluridine-3'-phosphate
  modified_base 15: mod_base = OTHER; note = 2'-O-methylguanosine-3'-phosphate
  modified_base 16: mod_base = OTHER; note = 2'-O-methyladenosine-3'-phosphate
  modified_base 17: mod_base = OTHER; note = 2'-O-methylcytidine-3'-phosphate
  modified_base 18: mod_base = OTHER; note = 2'-O-methylcytidine-3'-phosphate
  modified_base 19: mod_base = OTHER; note = 2'-O-methyladenosine-3'-phosphorothioate
  modified_base 20: mod_base = OTHER; note = 2'-O-methylcytidine-3'-phosphorothioate
  modified_base 21: mod_base = OTHER; note = 2'-O-methyladenosine
atcctcacagagctgaccaca

SEQ ID NO: 2497 - RNA, 21 nt, synthetic construct
  source 1..21: mol_type = other RNA
  modified_base 1: mod_base = OTHER; note = 2'-O-methylcytidine-3'-phosphorothioate
  modified_base 2: mod_base = OTHER; note = 2'-O-methylcytidine-3'-phosphorothioate
  modified_base 3: mod_base = OTHER; note = 2'-O-methyladenosine-3'-phosphate
  modified_base 4: mod_base = OTHER; note = 2'-O-methylcytidine-3'-phosphate
  modified_base 5: mod_base = OTHER; note = 2'-O-methyluridine-3'-phosphate
  modified_base 6: mod_base = OTHER; note = 2'-O-methyladenosine-3'-phosphate
  modified_base 7: mod_base = OTHER; note = 2'-deoxy-2'-fluorocytidine-3'-phosphate
  modified_base 8: mod_base = OTHER; note = 2'-O-methylguanosine-3'-phosphate
  modified_base 9: mod_base = OTHER; note = 2'-deoxy-2'-fluoroadenosine-3'-phosphate
  modified_base 10: mod_base = OTHER; note = 2'-deoxy-2'-fluorocytidine-3'-phosphate
  modified_base 11: mod_base = OTHER; note = 2'-deoxy-2'-fluorouridine-3'-phosphate
  modified_base 12: mod_base = OTHER; note = 2'-O-methylguanosine-3'-phosphate
  modified_base 13: mod_base = OTHER; note = 2'-O-methyladenosine-3'-phosphate
  modified_base 14: mod_base = OTHER; note = 2'-O-methylguanosine-3'-phosphate
  modified_base 15: mod_base = OTHER; note = 2'-O-methyluridine-3'-phosphate
  modified_base 16: mod_base = OTHER; note = 2'-O-methylcytidine-3'-phosphate
  modified_base 17: mod_base = OTHER; note = 2'-O-methylcytidine-3'-phosphate
  modified_base 18: mod_base = OTHER; note = 2'-O-methyladenosine-3'-phosphate
  modified_base 19: mod_base = OTHER; note = 2'-O-methylcytidine-3'-phosphorothioate
  modified_base 20: mod_base = OTHER; note = 2'-O-methyluridine-3'-phosphorothioate
  modified_base 21: mod_base = OTHER; note = 2'-O-methyladenosine
ccactacgactgagtccacta

SEQ ID NO: 2498 - RNA, 21 nt, synthetic construct
  source 1..21: mol_type = other RNA
  modified_base 1: mod_base = OTHER; note = 2'-O-methylguanosine-3'-phosphorothioate
  modified_base 2: mod_base = OTHER; note = 2'-O-methyladenosine-3'-phosphorothioate
  modified_base 3: mod_base = OTHER; note = 2'-O-methylcytidine-3'-phosphate
  modified_base 4: mod_base = OTHER; note = 2'-O-methylcytidine-3'-phosphate
  modified_base 5: mod_base = OTHER; note = 2'-O-methyladenosine-3'-phosphate
  modified_base 6: mod_base = OTHER; note = 2'-O-methylcytidine-3'-phosphate
  modified_base 7: mod_base = OTHER; note = 2'-deoxy-2'-fluorocytidine-3'-phosphate
  modified_base 8: mod_base = OTHER; note = 2'-O-methyluridine-3'-phosphate
  modified_base 9: mod_base = OTHER; note = 2'-deoxy-2'-fluoroguanosine-3'-phosphate
  modified_base 10: mod_base = OTHER; note = 2'-deoxy-2'-fluoroguanosine-3'-phosphate
  modified_base 11: mod_base = OTHER; note = 2'-deoxy-2'-fluoroadenosine-3'-phosphate
  modified_base 12: mod_base = OTHER; note = 2'-O-methyluridine-3'-phosphate
  modified_base 13: mod_base = OTHER; note = 2'-O-methylcytidine-3'-phosphate
  modified_base 14: mod_base = OTHER; note = 2'-O-methylcytidine-3'-phosphate
  modified_base 15: mod_base = OTHER; note = 2'-O-methyluridine-3'-phosphate
  modified_base 16: mod_base = OTHER; note = 2'-O-methylcytidine-3'-phosphate
  modified_base 17: mod_base = OTHER; note = 2'-O-methyladenosine-3'-phosphate
  modified_base 18: mod_base = OTHER; note = 2'-O-methylcytidine-3'-phosphate
  modified_base 19: mod_base = OTHER; note = 2'-O-methyladenosine-3'-phosphorothioate
  modified_base 20: mod_base = OTHER; note = 2'-O-methylguanosine-3'-phosphorothioate
  modified_base 21: mod_base = OTHER; note = 2'-O-methyladenosine
gaccacctggatcctcacaga

SEQ ID NO: 2499 - RNA, 21 nt, synthetic construct
  source 1..21: mol_type = other RNA
  modified_base 1: mod_base = OTHER; note = 2'-O-methylguanosine-3'-phosphorothioate
  modified_base 2: mod_base = OTHER; note = 2'-O-methyladenosine-3'-phosphorothioate
  modified_base 3: mod_base = OTHER; note = 2'-O-methylguanosine-3'-phosphate
  modified_base 4: mod_base = OTHER; note = 2'-O-methylcytidine-3'-phosphate
  modified_base 5: mod_base = OTHER; note = 2'-O-methyladenosine-3'-phosphate
  modified_base 6: mod_base = OTHER; note = 2'-O-methylcytidine-3'-phosphate
  modified_base 7: mod_base = OTHER; note = 2'-deoxy-2'-fluorouridine-3'-phosphate
  modified_base 8: mod_base = OTHER; note = 2'-O-methyladenosine-3'-phosphate
  modified_base 9: mod_base = OTHER; note = 2'-deoxy-2'-fluorocytidine-3'-phosphate
  modified_base 10: mod_base = OTHER; note = 2'-deoxy-2'-fluoroadenosine-3'-phosphate
  modified_base 11: mod_base = OTHER; note = 2'-deoxy-2'-fluoroguanosine-3'-phosphate
  modified_base 12: mod_base = OTHER; note = 2'-O-methylcytidine-3'-phosphate
  modified_base 13: mod_base = OTHER; note = 2'-O-methylcytidine-3'-phosphate
  modified_base 14: mod_base = OTHER; note = 2'-O-methyladenosine-3'-phosphate
  modified_base 15: mod_base = OTHER; note = 2'-O-methylcytidine-3'-phosphate
  modified_base 16: mod_base = OTHER; note = 2'-O-methylcytidine-3'-phosphate
  modified_base 17: mod_base = OTHER; note = 2'-O-methylguanosine-3'-phosphate
  modified_base 18: mod_base = OTHER; note = 2'-O-methyluridine-3'-phosphate
  modified_base 19: mod_base = OTHER; note = 2'-O-methylguanosine-3'-phosphorothioate
  modified_base 20: mod_base = OTHER; note = 2'-O-methyladenosine-3'-phosphorothioate
  modified_base 21: mod_base = OTHER; note = 2'-O-methyladenosine
gagcactacagccaccgtgaa

SEQ ID NO: 2500 - RNA, 21 nt, synthetic construct
  source 1..21: mol_type = other RNA
  modified_base 1: mod_base = OTHER; note = 2'-O-methylcytidine-3'-phosphorothioate
  modified_base 2: mod_base = OTHER; note = 2'-O-methylcytidine-3'-phosphorothioate
  modified_base 3: mod_base = OTHER; note = 2'-O-methyluridine-3'-phosphate
  modified_base 4: mod_base = OTHER; note = 2'-O-methylcytidine-3'-phosphate
  modified_base 5: mod_base = OTHER; note = 2'-O-methylcytidine-3'-phosphate
  modified_base 6: mod_base = OTHER; note = 2'-O-methyladenosine-3'-phosphate
  modified_base 7: mod_base = OTHER; note = 2'-deoxy-2'-fluorocytidine-3'-phosphate
  modified_base 8: mod_base = OTHER; note = 2'-O-methylcytidine-3'-phosphate
  modified_base 9: mod_base = OTHER; note = 2'-deoxy-2'-fluorocytidine-3'-phosphate
  modified_base 10: mod_base = OTHER; note = 2'-deoxy-2'-fluoroadenosine-3'-phosphate
  modified_base 11: mod_base = OTHER; note = 2'-deoxy-2'-fluoroguanosine-3'-phosphate
  modified_base 12: mod_base = OTHER; note = 2'-O-methylguanosine-3'-phosphate
  modified_base 13: mod_base = OTHER; note = 2'-O-methylcytidine-3'-phosphate
  modified_base 14: mod_base = OTHER; note = 2'-O-methyladenosine-3'-phosphate
  modified_base 15: mod_base = OTHER; note = 2'-O-methyladenosine-3'-phosphate
  modified_base 16: mod_base = OTHER; note = 2'-O-methylcytidine-3'-phosphate
  modified_base 17: mod_base = OTHER; note = 2'-O-methyluridine-3'-phosphate
  modified_base 18: mod_base = OTHER; note = 2'-O-methylguanosine-3'-phosphate
  modified_base 19: mod_base = OTHER; note = 2'-O-methylcytidine-3'-phosphorothioate
  modified_base 20: mod_base = OTHER; note = 2'-O-methyluridine-3'-phosphorothioate
  modified_base 21: mod_base = OTHER; note = 2'-O-methyladenosine
cctccacccaggcaactgcta

SEQ ID NO: 2501 - RNA, 21 nt, synthetic construct
  source 1..21: mol_type = other RNA
  modified_base 1: mod_base = OTHER; note = 2'-O-methylguanosine-3'-phosphorothioate
  modified_base 2: mod_base = OTHER; note = 2'-O-methylguanosine-3'-phosphorothioate
  modified_base 3: mod_base = OTHER; note = 2'-O-methylcytidine-3'-phosphate
  modified_base 4: mod_base = OTHER; note = 2'-O-methylcytidine-3'-phosphate
  modified_base 5: mod_base = OTHER; note = 2'-O-methyladenosine-3'-phosphate
  modified_base 6: mod_base = OTHER; note = 2'-O-methylcytidine-3'-phosphate
  modified_base 7: mod_base = OTHER; note = 2'-deoxy-2'-fluoroguanosine-3'-phosphate
  modified_base 8: mod_base = OTHER; note = 2'-O-methyladenosine-3'-phosphate
  modified_base 9: mod_base = OTHER; note = 2'-deoxy-2'-fluorocytidine-3'-phosphate
  modified_base 10: mod_base = OTHER; note = 2'-deoxy-2'-fluoroadenosine-3'-phosphate
  modified_base 11: mod_base = OTHER; note = 2'-deoxy-2'-fluorocytidine-3'-phosphate
  modified_base 12: mod_base = OTHER; note = 2'-O-methylcytidine-3'-phosphate
  modified_base 13: mod_base = OTHER; note = 2'-O-methylcytidine-3'-phosphate
  modified_base 14: mod_base = OTHER; note = 2'-O-methyladenosine-3'-phosphate
  modified_base 15: mod_base = OTHER; note = 2'-O-methylcytidine-3'-phosphate
  modified_base 16: mod_base = OTHER; note = 2'-O-methyladenosine-3'-phosphate
  modified_base 17: mod_base = OTHER; note = 2'-O-methylguanosine-3'-phosphate
  modified_base 18: mod_base = OTHER; note = 2'-O-methyluridine-3'-phosphate
  modified_base 19: mod_base = OTHER; note = 2'-O-methylcytidine-3'-phosphorothioate
  modified_base 20: mod_base = OTHER; note = 2'-O-methyladenosine-3'-phosphorothioate
  modified_base 21: mod_base = OTHER; note = 2'-O-methyladenosine
ggccacgacacccacagtcaa

SEQ ID NO: 2502 - RNA, 21 nt, synthetic construct
  source 1..21: mol_type = other RNA
  modified_base 1: mod_base = OTHER; note = 2'-O-methylguanosine-3'-phosphorothioate
  modified_base 2: mod_base = OTHER; note = 2'-O-methylcytidine-3'-phosphorothioate
  modified_base 3: mod_base = OTHER; note = 2'-O-methyluridine-3'-phosphate
  modified_base 4: mod_base = OTHER; note = 2'-O-methylcytidine-3'-phosphate
  modified_base 5: mod_base = OTHER; note = 2'-O-methylcytidine-3'-phosphate
  modified_base 6: mod_base = OTHER; note = 2'-O-methyladenosine-3'-phosphate
  modified_base 7: mod_base = OTHER; note = 2'-deoxy-2'-fluoroadenosine-3'-phosphate
  modified_base 8: mod_base = OTHER; note = 2'-O-methyladenosine-3'-phosphate
  modified_base 9: mod_base = OTHER; note = 2'-deoxy-2'-fluoroguanosine-3'-phosphate
  modified_base 10: mod_base = OTHER; note = 2'-deoxy-2'-fluorocytidine-3'-phosphate
  modified_base 11: mod_base = OTHER; note = 2'-deoxy-2'-fluorocytidine-3'-phosphate
  modified_base 12: mod_base = OTHER; note = 2'-O-methyladenosine-3'-phosphate
  modified_base 13: mod_base = OTHER; note = 2'-O-methylcytidine-3'-phosphate
  modified_base 14: mod_base = OTHER; note = 2'-O-methyluridine-3'-phosphate
  modified_base 15: mod_base = OTHER; note = 2'-O-methylcytidine-3'-phosphate
  modified_base 16: mod_base = OTHER; note = 2'-O-methylcytidine-3'-phosphate
  modified_base 17: mod_base = OTHER; note = 2'-O-methylcytidine-3'-phosphate
  modified_base 18: mod_base = OTHER; note = 2'-O-methyluridine-3'-phosphate
  modified_base 19: mod_base = OTHER; note = 2'-O-methyluridine-3'-phosphorothioate
  modified_base 20: mod_base = OTHER; note = 2'-O-methylcytidine-3'-phosphorothioate
  modified_base 21: mod_base = OTHER; note = 2'-O-methyladenosine
gctccaaagccactcccttca

SEQ ID NO: 2503 - RNA, 21 nt, synthetic construct
  source 1..21: mol_type = other RNA
  modified_base 1: mod_base = OTHER; note = 2'-O-methyladenosine-3'-phosphorothioate
  modified_base 2: mod_base = OTHER; note = 2'-O-methylcytidine-3'-phosphorothioate
  modified_base 3: mod_base = OTHER; note = 2'-O-methyladenosine-3'-phosphate
  modified_base 4: mod_base = OTHER; note = 2'-O-methylguanosine-3'-phosphate
  modified_base 5: mod_base = OTHER; note = 2'-O-methylcytidine-3'-phosphate
  modified_base 6: mod_base = OTHER; note = 2'-O-methyluridine-3'-phosphate
  modified_base 7: mod_base = OTHER; note = 2'-deoxy-2'-fluoroadenosine-3'-phosphate
  modified_base 8: mod_base = OTHER; note = 2'-O-methylcytidine-3'-phosphate
  modified_base 9: mod_base = OTHER; note = 2'-deoxy-2'-fluorocytidine-3'-phosphate
  modified_base 10: mod_base = OTHER; note = 2'-deoxy-2'-fluoroadenosine-3'-phosphate
  modified_base 11: mod_base = OTHER; note = 2'-deoxy-2'-fluoroguanosine-3'-phosphate
  modified_base 12: mod_base = OTHER; note = 2'-O-methylcytidine-3'-phosphate
  modified_base 13: mod_base = OTHER; note = 2'-O-methyluridine-3'-phosphate
  modified_base 14: mod_base = OTHER; note = 2'-O-methyluridine-3'-phosphate
  modified_base 15: mod_base = OTHER; note = 2'-O-methyluridine-3'-phosphate
  modified_base 16: mod_base = OTHER; note = 2'-O-methyladenosine-3'-phosphate
  modified_base 17: mod_base = OTHER; note = 2'-O-methylcytidine-3'-phosphate
  modified_base 18: mod_base = OTHER; note = 2'-O-methyladenosine-3'-phosphate
  modified_base 19: mod_base = OTHER; note = 2'-O-methylguanosine-3'-phosphorothioate
  modified_base 20: mod_base = OTHER; note = 2'-O-methylcytidine-3'-phosphorothioate
  modified_base 21: mod_base = OTHER; note = 2'-O-methyladenosine
acagctaccagctttacagca

SEQ ID NO: 2504 - RNA, 21 nt, synthetic construct
  source 1..21: mol_type = other RNA
  modified_base 1: mod_base = OTHER; note = 2'-O-methyluridine-3'-phosphorothioate
  modified_base 2: mod_base = OTHER; note = 2'-O-methylcytidine-3'-phosphorothioate
  modified_base 3: mod_base = OTHER; note = 2'-O-methylcytidine-3'-phosphate
  modified_base 4: mod_base = OTHER; note = 2'-O-methyluridine-3'-phosphate
  modified_base 5: mod_base = OTHER; note = 2'-O-methylcytidine-3'-phosphate
  modified_base 6: mod_base = OTHER; note = 2'-O-methylcytidine-3'-phosphate
  modified_base 7: mod_base = OTHER; note = 2'-deoxy-2'-fluoroadenosine-3'-phosphate
  modified_base 8: mod_base = OTHER; note = 2'-O-methylcytidine-3'-phosphate
  modified_base 9: mod_base = OTHER; note = 2'-deoxy-2'-fluorouridine-3'-phosphate
  modified_base 10: mod_base = OTHER; note = 2'-deoxy-2'-fluorocytidine-3'-phosphate
  modified_base 11: mod_base = OTHER; note = 2'-deoxy-2'-fluorocytidine-3'-phosphate
  modified_base 12: mod_base = OTHER; note = 2'-O-methyladenosine-3'-phosphate
  modified_base 13: mod_base = OTHER; note = 2'-O-methylguanosine-3'-phosphate
  modified_base 14: mod_base = OTHER; note = 2'-O-methyladenosine-3'-phosphate
  modified_base 15: mod_base = OTHER; note = 2'-O-methylguanosine-3'-phosphate
  modified_base 16: mod_base = OTHER; note = 2'-O-methyladenosine-3'-phosphate
  modified_base 17: mod_base = OTHER; note = 2'-O-methylcytidine-3'-phosphate
  modified_base 18: mod_base = OTHER; note = 2'-O-methyluridine-3'-phosphate
  modified_base 19: mod_base = OTHER; note = 2'-O-methylguanosine-3'-phosphorothioate
  modified_base 20: mod_base = OTHER; note = 2'-O-methyluridine-3'-phosphorothioate
  modified_base 21: mod_base = OTHER; note = 2'-O-methyladenosine
tcctccactccagagactgta

SEQ ID NO: 2505 - RNA, 21 nt, synthetic construct
  source 1..21: mol_type = other RNA
  modified_base 1: mod_base = OTHER; note = 2'-O-methylcytidine-3'-phosphorothioate
  modified_base 2: mod_base = OTHER; note = 2'-O-methylcytidine-3'-phosphorothioate
  modified_base 3: mod_base = OTHER; note = 2'-O-methyladenosine-3'-phosphate
  modified_base 4: mod_base = OTHER; note = 2'-O-methylcytidine-3'-phosphate
  modified_base 5: mod_base = OTHER; note = 2'-O-methyladenosine-3'-phosphate
  modified_base 6: mod_base = OTHER; note = 2'-O-methylguanosine-3'-phosphate
  modified_base 7: mod_base = OTHER; note = 2'-deoxy-2'-fluorouridine-3'-phosphate
  modified_base 8: mod_base = OTHER; note = 2'-O-methylguanosine-3'-phosphate
  modified_base 9: mod_base = OTHER; note = 2'-deoxy-2'-fluorocytidine-3'-phosphate
  modified_base 10: mod_base = OTHER; note = 2'-deoxy-2'-fluorouridine-3'-phosphate
  modified_base 11: mod_base = OTHER; note = 2'-deoxy-2'-fluorouridine-3'-phosphate
  modified_base 12: mod_base = OTHER; note = 2'-O-methyladenosine-3'-phosphate
  modified_base 13: mod_base = OTHER; note = 2'-O-methylcytidine-3'-phosphate
  modified_base 14: mod_base = OTHER; note = 2'-O-methylcytidine-3'-phosphate
  modified_base 15: mod_base = OTHER; note = 2'-O-methyladenosine-3'-phosphate
  modified_base 16: mod_base = OTHER; note = 2'-O-methylcytidine-3'-phosphate
  modified_base 17: mod_base = OTHER; note = 2'-O-methylcytidine-3'-phosphate
  modified_base 18: mod_base = OTHER; note = 2'-O-methyladenosine-3'-phosphate
  modified_base 19: mod_base = OTHER; note = 2'-O-methylcytidine-3'-phosphorothioate
  modified_base 20: mod_base = OTHER; note = 2'-O-methylguanosine-3'-phosphorothioate
  modified_base 21: mod_base = OTHER; note = 2'-O-methyladenosine
ccacagtgcttaccaccacga

SEQ ID NO: 2506 - RNA, 21 nt, synthetic construct
  source 1..21: mol_type = other RNA
  modified_base 1: mod_base = OTHER; note = 2'-O-methylguanosine-3'-phosphorothioate
  modified_base 2: mod_base = OTHER; note = 2'-O-methylcytidine-3'-phosphorothioate
  modified_base 3: mod_base = OTHER; note = 2'-O-methyluridine-3'-phosphate
  modified_base 4: mod_base = OTHER; note = 2'-O-methylcytidine-3'-phosphate
  modified_base 5: mod_base = OTHER; note = 2'-O-methyladenosine-3'-phosphate
  modified_base 6: mod_base = OTHER; note = 2'-O-methylcytidine-3'-phosphate
  modified_base 7: mod_base = OTHER; note = 2'-deoxy-2'-fluoroadenosine-3'-phosphate
  modified_base 8: mod_base = OTHER; note = 2'-O-methylcytidine-3'-phosphate
  modified_base 9: mod_base = OTHER; note = 2'-deoxy-2'-fluorouridine-3'-phosphate
  modified_base 10: mod_base = OTHER; note = 2'-deoxy-2'-fluoroadenosine-3'-phosphate
  modified_base 11: mod_base = OTHER; note = 2'-deoxy-2'-fluorocytidine-3'-phosphate
  modified_base 12: mod_base = OTHER; note = 2'-O-methylcytidine-3'-phosphate
  modified_base 13: mod_base = OTHER; note = 2'-O-methyladenosine-3'-phosphate
  modified_base 14: mod_base = OTHER; note = 2'-O-methyladenosine-3'-phosphate
  modified_base 15: mod_base = OTHER; note = 2'-O-methyladenosine-3'-phosphate
  modified_base 16: mod_base = OTHER; note = 2'-O-methylguanosine-3'-phosphate
  modified_base 17: mod_base = OTHER; note = 2'-O-methyluridine-3'-phosphate
  modified_base 18: mod_base = OTHER; note = 2'-O-methylguanosine-3'-phosphate
  modified_base 19: mod_base = OTHER; note = 2'-O-methylcytidine-3'-phosphorothioate
  modified_base 20: mod_base = OTHER; note = 2'-O-methyluridine-3'-phosphorothioate
  modified_base 21: mod_base = OTHER; note = 2'-O-methyladenosine
gctcacactaccaaagtgcta

SEQ ID NO: 2507 - RNA, 21 nt, synthetic construct
  source 1..21: mol_type = other RNA
  modified_base 1: mod_base = OTHER; note = 2'-O-methyluridine-3'-phosphorothioate
  modified_base 2: mod_base = OTHER; note = 2'-O-methyladenosine-3'-phosphorothioate
  modified_base 3: mod_base = OTHER; note = 2'-O-methylcytidine-3'-phosphate
  modified_base 4: mod_base = OTHER; note = 2'-O-methylcytidine-3'-phosphate
  modified_base 5: mod_base = OTHER; note = 2'-O-methyladenosine-3'-phosphate
  modified_base 6: mod_base = OTHER; note = 2'-O-methylcytidine-3'-phosphate
  modified_base 7: mod_base = OTHER; note = 2'-deoxy-2'-fluoroadenosine-3'-phosphate
  modified_base 8: mod_base = OTHER; note = 2'-O-methyladenosine-3'-phosphate
  modified_base 9: mod_base = OTHER; note = 2'-deoxy-2'-fluorocytidine-3'-phosphate
  modified_base 10: mod_base = OTHER; note = 2'-deoxy-2'-fluorocytidine-3'-phosphate
  modified_base 11: mod_base = OTHER; note = 2'-deoxy-2'-fluoroadenosine-3'-phosphate
  modified_base 12: mod_base = OTHER; note = 2'-O-methylcytidine-3'-phosphate
  modified_base 13: mod_base = OTHER; note = 2'-O-methylguanosine-3'-phosphate
  modified_base 14: mod_base = OTHER; note = 2'-O-methylguanosine-3'-phosphate
  modified_base 15: mod_base = OTHER; note = 2'-O-methylguanosine-3'-phosphate
  modified_base 16: mod_base = OTHER; note = 2'-O-methylcytidine-3'-phosphate
  modified_base 17: mod_base = OTHER; note = 2'-O-methyluridine-3'-phosphate
  modified_base 18: mod_base = OTHER; note = 2'-O-methyluridine-3'-phosphate
  modified_base 19: mod_base = OTHER; note = 2'-O-methylcytidine-3'-phosphorothioate
  modified_base 20: mod_base = OTHER; note = 2'-O-methyladenosine-3'-phosphorothioate
  modified_base 21: mod_base = OTHER; note = 2'-O-methyladenosine
taccacaaccacgggcttcaa

SEQ ID NO: 2508 - RNA, 21 nt, synthetic construct
  source 1..21: mol_type = other RNA
  modified_base 1: mod_base = OTHER; note = 2'-O-methylcytidine-3'-phosphorothioate
  modified_base 2: mod_base = OTHER; note = 2'-O-methyladenosine-3'-phosphorothioate
  modified_base 3: mod_base = OTHER; note = 2'-O-methylcytidine-3'-phosphate
  modified_base 4: mod_base = OTHER; note = 2'-O-methylguanosine-3'-phosphate
  modified_base 5: mod_base = OTHER; note = 2'-O-methylcytidine-3'-phosphate
  modified_base 6: mod_base = OTHER; note = 2'-O-methyluridine-3'-phosphate
  modified_base 7: mod_base = OTHER; note = 2'-deoxy-2'-fluorouridine-3'-phosphate
  modified_base 8: mod_base = OTHER; note = 2'-O-methylcytidine-3'-phosphate
  modified_base 9: mod_base = OTHER; note = 2'-deoxy-2'-fluorocytidine-3'-phosphate
  modified_base 10: mod_base = OTHER; note = 2'-deoxy-2'-fluoroadenosine-3'-phosphate
  modified_base 11: mod_base = OTHER; note = 2'-deoxy-2'-fluoroguanosine-3'-phosphate
  modified_base 12: mod_base = OTHER; note = 2'-O-methyluridine-3'-phosphate
  modified_base 13: mod_base = OTHER; note = 2'-O-methylguanosine-3'-phosphate
  modified_base 14: mod_base = OTHER; note = 2'-O-methyluridine-3'-phosphate
  modified_base 15: mod_base = OTHER; note = 2'-O-methylguanosine-3'-phosphate
  modified_base 16: mod_base = OTHER; note = 2'-O-methylguanosine-3'-phosphate
  modified_base 17: mod_base = OTHER; note = 2'-O-methyladenosine-3'-phosphate
  modified_base 18: mod_base = OTHER; note = 2'-O-methyluridine-3'-phosphate
  modified_base 19: mod_base = OTHER; note = 2'-O-methylcytidine-3'-phosphorothioate
  modified_base 20: mod_base = OTHER; note = 2'-O-methyladenosine-3'-phosphorothioate
  modified_base 21: mod_base = OTHER; note = 2'-O-methyladenosine
cacgcttccagtgtggatcaa

SEQ ID NO: 2509 - RNA, 21 nt, synthetic construct
  source 1..21: mol_type = other RNA
  modified_base 1: mod_base = OTHER; note = 2'-O-methyladenosine-3'-phosphorothioate
  modified_base 2: mod_base = OTHER; note = 2'-O-methylcytidine-3'-phosphorothioate
  modified_base 3: mod_base = OTHER; note = 2'-O-methylcytidine-3'-phosphate
  modified_base 4: mod_base = OTHER; note = 2'-O-methylcytidine-3'-phosphate
  modified_base 5: mod_base = OTHER; note = 2'-O-methyladenosine-3'-phosphate
  modified_base 6: mod_base = OTHER; note = 2'-O-methylcytidine-3'-phosphate
  modified_base 7: mod_base = OTHER; note = 2'-deoxy-2'-fluoroadenosine-3'-phosphate
  modified_base 8: mod_base = OTHER; note = 2'-O-methyladenosine-3'-phosphate
  modified_base 9: mod_base = OTHER; note = 2'-deoxy-2'-fluorocytidine-3'-phosphate
  modified_base 10: mod_base = OTHER; note = 2'-deoxy-2'-fluorocytidine-3'-phosphate
  modified_base 11: mod_base = OTHER; note = 2'-deoxy-2'-fluoroadenosine-3'-phosphate
  modified_base 12: mod_base = OTHER; note = 2'-O-methylguanosine-3'-phosphate
  modified_base 13: mod_base = OTHER; note = 2'-O-methyladenosine-3'-phosphate
  modified_base 14: mod_base = OTHER; note = 2'-O-methylguanosine-3'-phosphate
  modified_base 15: mod_base = OTHER; note = 2'-O-methylguanosine-3'-phosphate
  modified_base 16: mod_base = OTHER; note = 2'-O-methyluridine-3'-phosphate
  modified_base 17: mod_base = OTHER; note = 2'-O-methyluridine-3'-phosphate
  modified_base 18: mod_base = OTHER; note = 2'-O-methylcytidine-3'-phosphate
  modified_base 19: mod_base = OTHER; note = 2'-O-methylcytidine-3'-phosphorothioate
  modified_base 20: mod_base = OTHER; note = 2'-O-methyladenosine-3'-phosphorothioate
  modified_base 21: mod_base = OTHER; note = 2'-O-methyladenosine
acccacaaccagaggttccaa

SEQ ID NO: 2510 - RNA, 21 nt, synthetic construct
  source 1..21: mol_type = other RNA
  modified_base 1: mod_base = OTHER; note = 2'-O-methyluridine-3'-phosphorothioate
  modified_base 2: mod_base = OTHER; note = 2'-O-methylguanosine-3'-phosphorothioate
  modified_base 3: mod_base = OTHER; note = 2'-O-methyladenosine-3'-phosphate
  modified_base 4: mod_base = OTHER; note = 2'-O-methylcytidine-3'-phosphate
  modified_base 5: mod_base = OTHER; note = 2'-O-methylcytidine-3'-phosphate
  modified_base 6: mod_base = OTHER; note = 2'-O-methyladenosine-3'-phosphate
  modified_base 7: mod_base = OTHER; note = 2'-deoxy-2'-fluorocytidine-3'-phosphate
  modified_base 8: mod_base = OTHER; note = 2'-O-methylcytidine-3'-phosphate
  modified_base 9: mod_base = OTHER; note = 2'-deoxy-2'-fluoroadenosine-3'-phosphate
  modified_base 10: mod_base = OTHER; note = 2'-deoxy-2'-fluorocytidine-3'-phosphate
  modified_base 11: mod_base = OTHER; note = 2'-deoxy-2'-fluorocytidine-3'-phosphate
  modified_base 12: mod_base = OTHER; note = 2'-O-methyladenosine-3'-phosphate
  modified_base 13: mod_base = OTHER; note = 2'-O-methylcytidine-3'-phosphate
  modified_base 14: mod_base = OTHER; note = 2'-O-methylcytidine-3'-phosphate
  modified_base 15: mod_base = OTHER; note = 2'-O-methyladenosine-3'-phosphate
  modified_base 16: mod_base = OTHER; note = 2'-O-methylcytidine-3'-phosphate
  modified_base 17: mod_base = OTHER; note = 2'-O-methyladenosine-3'-phosphate
  modified_base 18: mod_base = OTHER; note = 2'-O-methyladenosine-3'-phosphate
  modified_base 19: mod_base = OTHER; note = 2'-O-methylcytidine-3'-phosphorothioate
  modified_base 20: mod_base = OTHER; note = 2'-O-methyluridine-3'-phosphorothioate
  modified_base 21: mod_base = OTHER; note = 2'-O-methyladenosine
tgaccaccaccaccacaacta

SEQ ID NO: 2511 - RNA, 21 nt, synthetic construct
  source 1..21: mol_type = other RNA
  modified_base 1: mod_base = OTHER; note = 2'-O-methylcytidine-3'-phosphorothioate
  modified_base 2: mod_base = OTHER; note = 2'-O-methyluridine-3'-phosphorothioate
  modified_base 3: mod_base = OTHER; note = 2'-O-methylcytidine-3'-phosphate
  modified_base 4: mod_base = OTHER; note = 2'-O-methylcytidine-3'-phosphate
  modified_base 5: mod_base = OTHER; note = 2'-O-methyluridine-3'-phosphate
  modified_base 6: mod_base = OTHER; note = 2'-O-methylcytidine-3'-phosphate
  modified_base 7: mod_base = OTHER; note = 2'-deoxy-2'-fluoroadenosine-3'-phosphate
  modified_base 8: mod_base = OTHER; note = 2'-O-methyladenosine-3'-phosphate
  modified_base 9: mod_base = OTHER; note = 2'-deoxy-2'-fluorocytidine-3'-phosphate
  modified_base 10: mod_base = OTHER; note = 2'-deoxy-2'-fluorouridine-3'-phosphate
  modified_base 11: mod_base = OTHER; note = 2'-deoxy-2'-fluorocytidine-3'-phosphate
  modified_base 12: mod_base = OTHER; note = 2'-O-methylcytidine-3'-phosphate
  modified_base 13: mod_base = OTHER; note = 2'-O-methyladenosine-3'-phosphate
  modified_base 14: mod_base = OTHER; note = 2'-O-methylguanosine-3'-phosphate
  modified_base 15: mod_base = OTHER; note = 2'-O-methylguanosine-3'-phosphate
  modified_base 16: mod_base = OTHER; note = 2'-O-methylguanosine-3'-phosphate
  modified_base 17: mod_base = OTHER; note = 2'-O-methyladenosine-3'-phosphate
  modified_base 18: mod_base = OTHER; note = 2'-O-methylcytidine-3'-phosphate
  modified_base 19: mod_base = OTHER; note = 2'-O-methyladenosine-3'-phosphorothioate
  modified_base 20: mod_base = OTHER; note = 2'-O-methyladenosine-3'-phosphorothioate
  modified_base 21: mod_base = OTHER; note = 2'-O-methyladenosine
ctcctcaactccagggacaaa

SEQ ID NO: 2512 - RNA, 21 nt, synthetic construct
  source 1..21: mol_type = other RNA
  modified_base 1: mod_base = OTHER; note = 2'-O-methylcytidine-3'-phosphorothioate
  modified_base 2: mod_base = OTHER; note = 2'-O-methyladenosine-3'-phosphorothioate
  modified_base 3: mod_base = OTHER; note = 2'-O-methylguanosine-3'-phosphate
  modified_base 4: mod_base = OTHER; note = 2'-O-methylcytidine-3'-phosphate
  modified_base 5: mod_base = OTHER; note = 2'-O-methyladenosine-3'-phosphate
  modified_base 6: mod_base = OTHER; note = 2'-O-methylguanosine-3'-phosphate
  modified_base 7: mod_base = OTHER; note = 2'-deoxy-2'-fluorocytidine-3'-phosphate
  modified_base 8: mod_base = OTHER; note = 2'-O-methyladenosine-3'-phosphate
  modified_base 9: mod_base = OTHER; note = 2'-deoxy-2'-fluorocytidine-3'-phosphate
  modified_base 10: mod_base = OTHER; note = 2'-deoxy-2'-fluoroadenosine-3'-phosphate
  modified_base 11: mod_base = OTHER; note = 2'-deoxy-2'-fluoroguanosine-3'-phosphate
  modified_base 12: mod_base = OTHER; note = 2'-O-methyluridine-3'-phosphate
  modified_base 13: mod_base = OTHER; note = 2'-O-methylguanosine-3'-phosphate
  modified_base 14: mod_base = OTHER; note = 2'-O-methyladenosine-3'-phosphate
  modified_base 15: mod_base = OTHER; note = 2'-O-methylcytidine-3'-phosphate
  modified_base 16: mod_base = OTHER; note = 2'-O-methyluridine-3'-phosphate
  modified_base 17: mod_base = OTHER; note = 2'-O-methylcytidine-3'-phosphate
  modified_base 18: mod_base = OTHER; note = 2'-O-methylcytidine-3'-phosphate
  modified_base 19: mod_base = OTHER; note = 2'-O-methylcytidine-3'-phosphorothioate
  modified_base 20: mod_base = OTHER; note = 2'-O-methyluridine-3'-phosphorothioate
  modified_base 21: mod_base = OTHER; note = 2'-O-methyladenosine
cagcagcacagtgactcccta

SEQ ID NO: 2513 - RNA, 21 nt, synthetic construct
  source 1..21: mol_type = other RNA
  modified_base 1: mod_base = OTHER; note = 2'-O-methylcytidine-3'-phosphorothioate
  modified_base 2: mod_base = OTHER; note = 2'-O-methyladenosine-3'-phosphorothioate
  modified_base 3: mod_base = OTHER; note = 2'-O-methylcytidine-3'-phosphate
  modified_base 4: mod_base = OTHER; note = 2'-O-methyladenosine-3'-phosphate
  modified_base 5: mod_base = OTHER; note = 2'-O-methylcytidine-3'-phosphate
  modified_base 6: mod_base = OTHER; note = 2'-O-methyladenosine-3'-phosphate
  modified_base 7: mod_base = OTHER; note = 2'-deoxy-2'-fluorocytidine-3'-phosphate
  modified_base 8: mod_base = OTHER; note = 2'-O-methylguanosine-3'-phosphate
  modified_base 9: mod_base = OTHER; note = 2'-deoxy-2'-fluoroguanosine-3'-phosphate
  modified_base 10: mod_base = OTHER; note = 2'-deoxy-2'-fluoroguanosine-3'-phosphate
  modified_base 11: mod_base = OTHER; note = 2'-deoxy-2'-fluorocytidine-3'-phosphate
  modified_base 12: mod_base = OTHER; note = 2'-O-methylguanosine-3'-phosphate
  modified_base 13: mod_base = OTHER; note = 2'-O-methyladenosine-3'-phosphate
  modified_base 14: mod_base = OTHER; note = 2'-O-methyluridine-3'-phosphate
  modified_base 15: mod_base = OTHER; note = 2'-O-methylcytidine-3'-phosphate
  modified_base 16: mod_base = OTHER; note = 2'-O-methylcytidine-3'-phosphate
  modified_base 17: mod_base = OTHER; note = 2'-O-methylcytidine-3'-phosphate
  modified_base 18: mod_base = OTHER; note = 2'-O-methyluridine-3'-phosphate
  modified_base 19: mod_base = OTHER; note = 2'-O-methylguanosine-3'-phosphorothioate
  modified_base 20: mod_base = OTHER; note = 2'-O-methyluridine-3'-phosphorothioate
  modified_base 21: mod_base = OTHER; note = 2'-O-methyladenosine
cacacacgggcgatccctgta

SEQ ID NO: 2514 - RNA, 21 nt, synthetic construct
  source 1..21: mol_type = other RNA
  modified_base 1: mod_base = OTHER; note = 2'-O-methylcytidine-3'-phosphorothioate
  modified_base 2: mod_base = OTHER; note = 2'-O-methylcytidine-3'-phosphorothioate
  modified_base 3: mod_base = OTHER; note = 2'-O-methyladenosine-3'-phosphate
  modified_base 4: mod_base = OTHER; note = 2'-O-methylcytidine-3'-phosphate
  modified_base 5: mod_base = OTHER; note = 2'-O-methylcytidine-3'-phosphate
  modified_base 6: mod_base = OTHER; note = 2'-O-methylcytidine-3'-phosphate
  modified_base 7: mod_base = OTHER; note = 2'-deoxy-2'-fluoroadenosine-3'-phosphate
  modified_base 8: mod_base = OTHER; note = 2'-O-methylguanosine-3'-phosphate
  modified_base 9: mod_base = OTHER; note = 2'-deoxy-2'-fluorocytidine-3'-phosphate
  modified_base 10: mod_base = OTHER; note = 2'-deoxy-2'-fluoroadenosine-3'-phosphate
  modified_base 11: mod_base = OTHER; note = 2'-deoxy-2'-fluorocytidine-3'-phosphate
  modified_base 12: mod_base = OTHER; note = 2'-O-methyluridine-3'-phosphate
  modified_base 13: mod_base = OTHER; note = 2'-O-methylcytidine-3'-phosphate
  modified_base 14: mod_base = OTHER; note = 2'-O-methylguanosine-3'-phosphate
  modified_base 15: mod_base = OTHER; note = 2'-O-methyladenosine-3'-phosphate
  modified_base 16: mod_base = OTHER; note = 2'-O-methylcytidine-3'-phosphate
  modified_base 17: mod_base = OTHER; note = 2'-O-methyluridine-3'-phosphate
  modified_base 18: mod_base = OTHER; note = 2'-O-methylcytidine-3'-phosphate
  modified_base 19: mod_base = OTHER; note = 2'-O-methylcytidine-3'-phosphorothioate
  modified_base 20: mod_base = OTHER; note = 2'-O-methyladenosine-3'-phosphorothioate
  modified_base 21: mod_base = OTHER; note = 2'-O-methyladenosine
ccacccagcactcgactccaa

SEQ ID NO: 2515 - RNA, 21 nt, synthetic construct
  source 1..21: mol_type = other RNA
  modified_base 1: mod_base = OTHER; note = 2'-O-methylcytidine-3'-phosphorothioate
  modified_base 2: mod_base = OTHER; note = 2'-O-methyladenosine-3'-phosphorothioate
  modified_base 3: mod_base = OTHER; note = 2'-O-methylguanosine-3'-phosphate
  modified_base 4: mod_base = OTHER; note = 2'-O-methylcytidine-3'-phosphate
  modified_base 5: mod_base = OTHER; note = 2'-O-methylcytidine-3'-phosphate
  modified_base 6: mod_base = OTHER; note = 2'-O-methylcytidine-3'-phosphate
  modified_base 7: mod_base = OTHER; note = 2'-deoxy-2'-fluorouridine-3'-phosphate
  modified_base 8: mod_base = OTHER; note = 2'-O-methylcytidine-3'-phosphate
  modified_base 9: mod_base = OTHER; note = 2'-deoxy-2'-fluoroadenosine-3'-phosphate
  modified_base 10: mod_base = OTHER; note = 2'-deoxy-2'-fluorocytidine-3'-phosphate
  modified_base 11: mod_base = OTHER; note = 2'-deoxy-2'-fluorocytidine-3'-phosphate
  modified_base 12: mod_base = OTHER; note = 2'-O-methylcytidine-3'-phosphate
  modified_base 13: mod_base = OTHER; note = 2'-O-methyluridine-3'-phosphate
  modified_base 14: mod_base = OTHER; note = 2'-O-methyladenosine-3'-phosphate
  modified_base 15: mod_base = OTHER; note = 2'-O-methylguanosine-3'-phosphate
  modified_base 16: mod_base = OTHER; note = 2'-O-methylcytidine-3'-phosphate
  modified_base 17: mod_base = OTHER; note = 2'-O-methyladenosine-3'-phosphate
  modified_base 18: mod_base = OTHER; note = 2'-O-methylguanosine-3'-phosphate
  modified_base 19: mod_base = OTHER; note = 2'-O-methylcytidine-3'-phosphorothioate
  modified_base 20: mod_base = OTHER; note = 2'-O-methyladenosine-3'-phosphorothioate
  modified_base 21: mod_base = OTHER; note = 2'-O-methyladenosine
cagccctcaccctagcagcaa

SEQ ID NO: 2516 - RNA, 21 nt, synthetic construct
  source 1..21: mol_type = other RNA
  modified_base 1: mod_base = OTHER; note = 2'-O-methylcytidine-3'-phosphorothioate
  modified_base 2: mod_base = OTHER; note = 2'-O-methyluridine-3'-phosphorothioate
  modified_base 3: mod_base = OTHER; note = 2'-O-methylguanosine-3'-phosphate
  modified_base 4: mod_base = OTHER; note = 2'-O-methylguanosine-3'-phosphate
  modified_base 5: mod_base = OTHER; note = 2'-O-methyladenosine-3'-phosphate
  modified_base 6: mod_base = OTHER; note = 2'-O-methyluridine-3'-phosphate
  modified_base 7: mod_base = OTHER; note = 2'-deoxy-2'-fluorocytidine-3'-phosphate
  modified_base 8: mod_base = OTHER; note = 2'-O-methylcytidine-3'-phosphate
  modified_base 9: mod_base = OTHER; note = 2'-deoxy-2'-fluorouridine-3'-phosphate
  modified_base 10: mod_base = OTHER; note = 2'-deoxy-2'-fluorocytidine-3'-phosphate
  modified_base 11: mod_base = OTHER; note = 2'-deoxy-2'-fluoroadenosine-3'-phosphate
  modified_base 12: mod_base = OTHER; note = 2'-O-methylcytidine-3'-phosphate
  modified_base 13: mod_base = OTHER; note = 2'-O-methyladenosine-3'-phosphate
  modified_base 14: mod_base = OTHER; note = 2'-O-methylguanosine-3'-phosphate
  modified_base 15: mod_base = OTHER; note = 2'-O-methyladenosine-3'-phosphate
  modified_base 16: mod_base = OTHER; note = 2'-O-methylguanosine-3'-phosphate
  modified_base 17: mod_base = OTHER; note = 2'-O-methylcytidine-3'-phosphate
  modified_base 18: mod_base = OTHER; note = 2'-O-methyladenosine-3'-phosphate
  modified_base 19: mod_base = OTHER; note = 2'-O-methylguanosine-3'-phosphorothioate
  modified_base 20: mod_base = OTHER; note = 2'-O-methyladenosine-3'-phosphorothioate
  modified_base 21: mod_base = OTHER; note = 2'-O-methyladenosine
ctggatcctcacagagcagaa

SEQ ID NO: 2517 - RNA, 21 nt, synthetic construct
  source 1..21: mol_type = other RNA
  modified_base 1: mod_base = OTHER; note = 2'-O-methylcytidine-3'-phosphorothioate
  modified_base 2: mod_base = OTHER; note = 2'-O-methyladenosine-3'-phosphorothioate
  modified_base 3: mod_base = OTHER; note = 2'-O-methylguanosine-3'-phosphate
  modified_base 4: mod_base = OTHER; note = 2'-O-methylcytidine-3'-phosphate
  modified_base 5: mod_base = OTHER; note = 2'-O-methylcytidine-3'-phosphate
  modified_base 6: mod_base = OTHER; note = 2'-O-methyladenosine-3'-phosphate
  modified_base 7: mod_base = OTHER; note = 2'-deoxy-2'-fluorocytidine-3'-phosphate
  modified_base 8: mod_base = OTHER; note = 2'-O-methyluridine-3'-phosphate
  modified_base 9: mod_base = OTHER; note = 2'-deoxy-2'-fluoroadenosine-3'-phosphate
  modified_base 10: mod_base = OTHER; note = 2'-deoxy-2'-fluorocytidine-3'-phosphate
  modified_base 11: mod_base = OTHER; note = 2'-deoxy-2'-fluoroguanosine-3'-phosphate
  modified_base 12: mod_base = OTHER; note = 2'-O-methyladenosine-3'-phosphate
  modified_base 13: mod_base = OTHER; note = 2'-O-methylcytidine-3'-phosphate
  modified_base 14: mod_base = OTHER; note = 2'-O-methylcytidine-3'-phosphate
  modified_base 15: mod_base = OTHER; note = 2'-O-methylguanosine-3'-phosphate
  modified_base 16: mod_base = OTHER; note = 2'-O-methylcytidine-3'-phosphate
  modified_base 17: mod_base = OTHER; note = 2'-O-methyladenosine-3'-phosphate
  modified_base 18: mod_base = OTHER; note = 2'-O-methyladenosine-3'-phosphate
  modified_base 19: mod_base = OTHER; note = 2'-O-methylcytidine-3'-phosphorothioate
  modified_base 20: mod_base = OTHER; note = 2'-O-methylcytidine-3'-phosphorothioate
  modified_base 21: mod_base = OTHER; note = 2'-O-methyladenosine
cagccactacgaccgcaacca

SEQ ID NO: 2518 - RNA, 21 nt, synthetic construct
  source 1..21: mol_type = other RNA
  modified_base 1: mod_base = OTHER; note = 2'-O-methyluridine-3'-phosphorothioate
  modified_base 2: mod_base = OTHER; note = 2'-O-methylcytidine-3'-phosphorothioate
  modified_base 3: mod_base = OTHER; note = 2'-O-methylcytidine-3'-phosphate
  modified_base 4: mod_base = OTHER; note = 2'-O-methylcytidine-3'-phosphate
  modified_base 5: mod_base = OTHER; note = 2'-O-methyladenosine-3'-phosphate
  modified_base 6: mod_base = OTHER; note = 2'-O-methyladenosine-3'-phosphate
  modified_base 7: mod_base = OTHER; note = 2'-deoxy-2'-fluoroadenosine-3'-phosphate
  modified_base 8: mod_base = OTHER; note = 2'-O-methylguanosine-3'-phosphate
  modified_base 9: mod_base = OTHER; note = 2'-deoxy-2'-fluorouridine-3'-phosphate
  modified_base 10: mod_base = OTHER; note = 2'-deoxy-2'-fluoroguanosine-3'-phosphate
  modified_base 11: mod_base = OTHER; note = 2'-deoxy-2'-fluorocytidine-3'-phosphate
  modified_base 12: mod_base = OTHER; note = 2'-O-methyluridine-3'-phosphate
  modified_base 13: mod_base = OTHER; note = 2'-O-methylguanosine-3'-phosphate
  modified_base 14: mod_base = OTHER; note = 2'-O-methyladenosine-3'-phosphate
  modified_base 15: mod_base = OTHER; note = 2'-O-methylcytidine-3'-phosphate
  modified_base 16: mod_base = OTHER; note = 2'-O-methylcytidine-3'-phosphate
  modified_base 17: mod_base = OTHER; note = 2'-O-methyladenosine-3'-phosphate
  modified_base 18: mod_base = OTHER; note = 2'-O-methylguanosine-3'-phosphate
  modified_base 19: mod_base = OTHER; note = 2'-O-methylcytidine-3'-phosphorothioate
  modified_base 20: mod_base = OTHER; note = 2'-O-methyladenosine-3'-phosphorothioate
  modified_base 21: mod_base = OTHER; note = 2'-O-methyladenosine
tcccaaagtgctgaccagcaa

SEQ ID NO: 2519 - RNA, 21 nt, synthetic construct
  source 1..21: mol_type = other RNA
  modified_base 1: mod_base = OTHER; note = 2'-O-methylcytidine-3'-phosphorothioate
  modified_base 2: mod_base = OTHER; note = 2'-O-methyladenosine-3'-phosphorothioate
  modified_base 3: mod_base = OTHER; note = 2'-O-methylguanosine-3'-phosphate
  modified_base 4: mod_base = OTHER; note = 2'-O-methyluridine-3'-phosphate
  modified_base 5: mod_base = OTHER; note = 2'-O-methyluridine-3'-phosphate
  modified_base 6: mod_base = OTHER; note = 2'-O-methylcytidine-3'-phosphate
  modified_base 7: mod_base = OTHER; note = 2'-deoxy-2'-fluorocytidine-3'-phosphate
  modified_base 8: mod_base = OTHER; note = 2'-O-methyladenosine-3'-phosphate
  modified_base 9: mod_base = OTHER; note = 2'-deoxy-2'-fluoroadenosine-3'-phosphate
  modified_base 10: mod_base = OTHER; note = 2'-deoxy-2'-fluoroadenosine-3'-phosphate
  modified_base 11: mod_base = OTHER; note = 2'-deoxy-2'-fluoroguanosine-3'-phosphate
  modified_base 12: mod_base = OTHER; note = 2'-O-methylcytidine-3'-phosphate
  modified_base 13: mod_base = OTHER; note = 2'-O-methylcytidine-3'-phosphate
  modified_base 14: mod_base = OTHER; note = 2'-O-methyladenosine-3'-phosphate
  modified_base 15: mod_base = OTHER; note = 2'-O-methylcytidine-3'-phosphate
  modified_base 16: mod_base = OTHER; note = 2'-O-methyluridine-3'-phosphate
  modified_base 17: mod_base = OTHER; note = 2'-O-methyluridine-3'-phosphate
  modified_base 18: mod_base = OTHER; note = 2'-O-methylcytidine-3'-phosphate
  modified_base 19: mod_base = OTHER; note = 2'-O-methylcytidine-3'-phosphorothioate
  modified_base 20: mod_base = OTHER; note = 2'-O-methyluridine-3'-phosphorothioate
  modified_base 21: mod_base = OTHER; note = 2'-O-methyladenosine
cagttccaaagccacttccta

SEQ ID NO: 2520 - RNA, 21 nt, synthetic construct
  source 1..21: mol_type = other RNA
  modified_base 1: mod_base = OTHER; note = 2'-O-methylcytidine-3'-phosphorothioate
  modified_base 2: mod_base = OTHER; note = 2'-O-methyladenosine-3'-phosphorothioate
  modified_base 3: mod_base = OTHER; note = 2'-O-methyladenosine-3'-phosphate
  modified_base 4: mod_base = OTHER; note = 2'-O-methylguanosine-3'-phosphate
  modified_base 5: mod_base = OTHER; note = 2'-O-methylguanosine-3'-phosphate
  modified_base 6: mod_base = OTHER; note = 2'-O-methyladenosine-3'-phosphate
  modified_base 7: mod_base = OTHER; note = 2'-deoxy-2'-fluorocytidine-3'-phosphate
  modified_base 8: mod_base = OTHER; note = 2'-O-methyluridine-3'-phosphate
  modified_base 9: mod_base = OTHER; note = 2'-deoxy-2'-fluoroguanosine-3'-phosphate
  modified_base 10: mod_base = OTHER; note = 2'-deoxy-2'-fluorocytidine-3'-phosphate
  modified_base 11: mod_base = OTHER; note = 2'-deoxy-2'-fluoroadenosine-3'-phosphate
  modified_base 12: mod_base = OTHER; note = 2'-O-methyladenosine-3'-phosphate
  modified_base 13: mod_base = OTHER; note = 2'-O-methylcytidine-3'-phosphate
  modified_base 14: mod_base = OTHER; note = 2'-O-methylcytidine-3'-phosphate
  modified_base 15: mod_base = OTHER; note = 2'-O-methyladenosine-3'-phosphate
  modified_base 16: mod_base = OTHER; note = 2'-O-methylcytidine-3'-phosphate
  modified_base 17: mod_base = OTHER; note = 2'-O-methylcytidine-3'-phosphate
  modified_base 18: mod_base = OTHER; note = 2'-O-methylcytidine-3'-phosphate
  modified_base 19: mod_base = OTHER; note = 2'-O-methyluridine-3'-phosphorothioate
  modified_base 20: mod_base = OTHER; note = 2'-O-methyluridine-3'-phosphorothioate
  modified_base 21: mod_base = OTHER; note = 2'-O-methyladenosine
caaggactgcaaccaccctta

SEQ ID NO: 2521 - RNA, 21 nt, synthetic construct
  source 1..21: mol_type = other RNA
  modified_base 1: mod_base = OTHER; note = 2'-O-methylguanosine-3'-phosphorothioate
  modified_base 2: mod_base = OTHER; note = 2'-O-methyluridine-3'-phosphorothioate
  modified_base 3: mod_base = OTHER; note = 2'-O-methylguanosine-3'-phosphate
  modified_base 4: mod_base = OTHER; note = 2'-O-methylcytidine-3'-phosphate
  modified_base 5: mod_base = OTHER; note = 2'-O-methyluridine-3'-phosphate
  modified_base 6: mod_base = OTHER; note = 2'-O-methylguanosine-3'-phosphate
  modified_base 7: mod_base = OTHER; note = 2'-deoxy-2'-fluoroadenosine-3'-phosphate
  modified_base 8: mod_base = OTHER; note = 2'-O-methylcytidine-3'-phosphate
  modified_base 9: mod_base = OTHER; note = 2'-deoxy-2'-fluoroadenosine-3'-phosphate
  modified_base 10: mod_base = OTHER; note = 2'-deoxy-2'-fluoroadenosine-3'-phosphate
  modified_base 11: mod_base = OTHER; note = 2'-deoxy-2'-fluoroguanosine-3'-phosphate
  modified_base 12: mod_base = OTHER; note = 2'-O-methylcytidine-3'-phosphate
  modified_base 13: mod_base = OTHER; note = 2'-O-methyladenosine-3'-phosphate
  modified_base 14: mod_base = OTHER; note = 2'-O-methylcytidine-3'-phosphate
  modified_base 15: mod_base = OTHER; note = 2'-O-methyladenosine-3'-phosphate
  modified_base 16: mod_base = OTHER; note = 2'-O-methylguanosine-3'-phosphate
  modified_base 17: mod_base = OTHER; note = 2'-O-methylcytidine-3'-phosphate
  modified_base 18: mod_base = OTHER; note = 2'-O-methylcytidine-3'-phosphate
  modified_base 19: mod_base = OTHER; note = 2'-O-methyladenosine-3'-phosphorothioate
  modified_base 20: mod_base = OTHER; note = 2'-O-methylcytidine-3'-phosphorothioate
  modified_base 21: mod_base = OTHER; note = 2'-O-methyladenosine
gtgctgacaagcacagccaca

SEQ ID NO: 2522 - RNA, 21 nt, synthetic construct
  source 1..21: mol_type = other RNA
  modified_base 1: mod_base = OTHER; note = 2'-O-methylcytidine-3'-phosphorothioate
  modified_base 2: mod_base = OTHER; note = 2'-O-methyladenosine-3'-phosphorothioate
  modified_base 3: mod_base = OTHER; note = 2'-O-methylcytidine-3'-phosphate
  modified_base 4: mod_base = OTHER; note = 2'-O-methyladenosine-3'-phosphate
  modified_base 5: mod_base = OTHER; note = 2'-O-methylguanosine-3'-phosphate
  modified_base 6: mod_base = OTHER; note = 2'-O-methylcytidine-3'-phosphate
  modified_base 7: mod_base = OTHER; note = 2'-deoxy-2'-fluorouridine-3'-phosphate
  modified_base 8: mod_base = OTHER; note = 2'-O-methyladenosine-3'-phosphate
  modified_base 9: mod_base = OTHER; note = 2'-deoxy-2'-fluorocytidine-3'-phosphate
  modified_base 10: mod_base = OTHER; note = 2'-deoxy-2'-fluorocytidine-3'-phosphate
  modified_base 11: mod_base = OTHER; note = 2'-deoxy-2'-fluoroadenosine-3'-phosphate
  modified_base 12: mod_base = OTHER; note = 2'-O-methylguanosine-3'-phosphate
  modified_base 13: mod_base = OTHER; note = 2'-O-methylcytidine-3'-phosphate
  modified_base 14: mod_base = OTHER; note = 2'-O-methyluridine-3'-phosphate
  modified_base 15: mod_base = OTHER; note = 2'-O-methyluridine-3'-phosphate
  modified_base 16: mod_base = OTHER; note = 2'-O-methyluridine-3'-phosphate
  modified_base 17: mod_base = OTHER; note = 2'-O-methyladenosine-3'-phosphate
  modified_base 18: mod_base = OTHER; note = 2'-O-methylcytidine-3'-phosphate
  modified_base 19: mod_base = OTHER; note = 2'-O-methyladenosine-3'-phosphorothioate
  modified_base 20: mod_base = OTHER; note = 2'-O-methylcytidine-3'-phosphorothioate
  modified_base 21: mod_base = OTHER; note = 2'-O-methyladenosine
cacagctaccagctttacaca

SEQ ID NO: 2523 - RNA, 21 nt, synthetic construct
  source 1..21: mol_type = other RNA
  modified_base 1: mod_base = OTHER; note = 2'-O-methylcytidine-3'-phosphorothioate
  modified_base 2: mod_base = OTHER; note = 2'-O-methyluridine-3'-phosphorothioate
  modified_base 3: mod_base = OTHER; note = 2'-O-methylcytidine-3'-phosphate
  modified_base 4: mod_base = OTHER; note = 2'-O-methylcytidine-3'-phosphate
  modified_base 5: mod_base = OTHER; note = 2'-O-methyluridine-3'-phosphate
  modified_base 6: mod_base = OTHER; note = 2'-O-methyluridine-3'-phosphate
  modified_base 7: mod_base = OTHER; note = 2'-deoxy-2'-fluorocytidine-3'-phosphate
  modified_base 8: mod_base = OTHER; note = 2'-O-methyladenosine-3'-phosphate
  modified_base 9: mod_base = OTHER; note = 2'-deoxy-2'-fluorocytidine-3'-phosphate
  modified_base 10: mod_base = OTHER; note = 2'-deoxy-2'-fluorocytidine-3'-phosphate
  modified_base 11: mod_base = OTHER; note = 2'-deoxy-2'-fluorocytidine-3'-phosphate
  modified_base 12: mod_base = OTHER; note = 2'-O-methyluridine-3'-phosphate
  modified_base 13: mod_base = OTHER; note = 2'-O-methyluridine-3'-phosphate
  modified_base 14: mod_base = OTHER; note = 2'-O-methylguanosine-3'-phosphate
  modified_base 15: mod_base = OTHER; note = 2'-O-methylguanosine-3'-phosphate
  modified_base 16: mod_base = OTHER; note = 2'-O-methylguanosine-3'-phosphate
  modified_base 17: mod_base = OTHER; note = 2'-O-methyladenosine-3'-phosphate
  modified_base 18: mod_base = OTHER; note = 2'-O-methylcytidine-3'-phosphate
  modified_base 19: mod_base = OTHER; note = 2'-O-methylcytidine-3'-phosphorothioate
  modified_base 20: mod_base = OTHER; note = 2'-O-methyladenosine-3'-phosphorothioate
  modified_base 21: mod_base = OTHER; note = 2'-O-methyladenosine
ctccttcacccttgggaccaa

SEQ ID NO: 2524 - RNA, 21 nt, synthetic construct
  source 1..21: mol_type = other RNA
  modified_base 1: mod_base = OTHER; note = 2'-O-methylcytidine-3'-phosphorothioate
  modified_base 2: mod_base = OTHER; note = 2'-O-methylcytidine-3'-phosphorothioate
  modified_base 3: mod_base = OTHER; note = 2'-O-methylcytidine-3'-phosphate
  modified_base 4: mod_base = OTHER; note = 2'-O-methyladenosine-3'-phosphate
  modified_base 5: mod_base = OTHER; note = 2'-O-methylguanosine-3'-phosphate
  modified_base 6: mod_base = OTHER; note = 2'-O-methyladenosine-3'-phosphate
  modified_base 7: mod_base = OTHER; note = 2'-deoxy-2'-fluoroadenosine-3'-phosphate
  modified_base 8: mod_base = OTHER; note = 2'-O-methylcytidine-3'-phosphate
  modified_base 9: mod_base = OTHER; note = 2'-deoxy-2'-fluoroadenosine-3'-phosphate
  modified_base 10: mod_base = OTHER; note = 2'-deoxy-2'-fluoroguanosine-3'-phosphate
  modified_base 11: mod_base = OTHER; note = 2'-deoxy-2'-fluoroadenosine-3'-phosphate
  modified_base 12: mod_base = OTHER; note = 2'-O-methylcytidine-3'-phosphate
  modified_base 13: mod_base = OTHER; note = 2'-O-methylcytidine-3'-phosphate
  modified_base 14: mod_base = OTHER; note = 2'-O-methyladenosine-3'-phosphate
  modified_base 15: mod_base = OTHER; note = 2'-O-methylcytidine-3'-phosphate
  modified_base 16: mod_base = OTHER; note = 2'-O-methylcytidine-3'-phosphate
  modified_base 17: mod_base = OTHER; note = 2'-O-methyladenosine-3'-phosphate
  modified_base 18: mod_base = OTHER; note = 2'-O-methylcytidine-3'-phosphate
  modified_base 19: mod_base = OTHER; note = 2'-O-methyladenosine-3'-phosphorothioate
  modified_base 20: mod_base = OTHER; note = 2'-O-methylcytidine-3'-phosphorothioate
  modified_base 21: mod_base = OTHER; note = 2'-O-methyladenosine
cccagaacagaccaccacaca

SEQ ID NO: 2525 - RNA, 21 nt, synthetic construct
  source 1..21: mol_type = other RNA
  modified_base 1: mod_base = OTHER; note = 2'-O-methylcytidine-3'-phosphorothioate
  modified_base 2: mod_base = OTHER; note = 2'-O-methyladenosine-3'-phosphorothioate
  modified_base 3: mod_base = OTHER; note = 2'-O-methylcytidine-3'-phosphate
  modified_base 4: mod_base = OTHER; note = 2'-O-methylcytidine-3'-phosphate
  modified_base 5: mod_base = OTHER; note = 2'-O-methyladenosine-3'-phosphate
  modified_base 6: mod_base = OTHER; note = 2'-O-methyluridine-3'-phosphate
  modified_base 7: mod_base = OTHER; note = 2'-deoxy-2'-fluoroguanosine-3'-phosphate
  modified_base 8: mod_base = OTHER; note = 2'-O-methyluridine-3'-phosphate
  modified_base 9: mod_base = OTHER; note = 2'-deoxy-2'-fluorocytidine-3'-phosphate
  modified_base 10: mod_base = OTHER; note = 2'-deoxy-2'-fluorocytidine-3'-phosphate
  modified_base 11: mod_base = OTHER; note = 2'-deoxy-2'-fluoroadenosine-3'-phosphate
  modified_base 12: mod_base = OTHER; note = 2'-O-methylcytidine-3'-phosphate
  modified_base 13: mod_base = OTHER; note = 2'-O-methyladenosine-3'-phosphate
  modified_base 14: mod_base = OTHER; note = 2'-O-methyladenosine-3'-phosphate
  modified_base 15: mod_base = OTHER; note = 2'-O-methyluridine-3'-phosphate
  modified_base 16: mod_base = OTHER; note = 2'-O-methylcytidine-3'-phosphate
  modified_base 17: mod_base = OTHER; note = 2'-O-methylcytidine-3'-phosphate
  modified_base 18: mod_base = OTHER; note = 2'-O-methyladenosine-3'-phosphate
  modified_base 19: mod_base = OTHER; note = 2'-O-methylcytidine-3'-phosphorothioate
  modified_base 20: mod_base = OTHER; note = 2'-O-methylcytidine-3'-phosphorothioate
  modified_base 21: mod_base = OTHER; note = 2'-O-methyladenosine
caccatgtccacaatccacca

SEQ ID NO: 2526 - RNA, 21 nt, synthetic construct
  source 1..21: mol_type = other RNA
  modified_base 1: mod_base = OTHER; note = 2'-O-methylcytidine-3'-phosphorothioate
  modified_base 2: mod_base = OTHER; note = 2'-O-methyluridine-3'-phosphorothioate
  modified_base 3: mod_base = OTHER; note = 2'-O-methylcytidine-3'-phosphate
  modified_base 4: mod_base = OTHER; note = 2'-O-methylcytidine-3'-phosphate
  modified_base 5: mod_base = OTHER; note = 2'-O-methyladenosine-3'-phosphate
  modified_base 6: mod_base = OTHER; note = 2'-O-methylcytidine-3'-phosphate
  modified_base 7: mod_base = OTHER; note = 2'-deoxy-2'-fluoroadenosine-3'-phosphate
  modified_base 8: mod_base = OTHER; note = 2'-O-methylguanosine-3'-phosphate
  modified_base 9: mod_base = OTHER; note = 2'-deoxy-2'-fluorouridine-3'-phosphate
  modified_base 10: mod_base = OTHER; note = 2'-deoxy-2'-fluoroguanosine-3'-phosphate
  modified_base 11: mod_base = OTHER; note = 2'-deoxy-2'-fluorocytidine-3'-phosphate
  modified_base 12: mod_base = OTHER; note = 2'-O-methyluridine-3'-phosphate
  modified_base 13: mod_base = OTHER; note = 2'-O-methylguanosine-3'-phosphate
  modified_base 14: mod_base = OTHER; note = 2'-O-methyladenosine-3'-phosphate
  modified_base 15: mod_base = OTHER; note = 2'-O-methylcytidine-3'-phosphate
  modified_base 16: mod_base = OTHER; note = 2'-O-methylcytidine-3'-phosphate
  modified_base 17: mod_base = OTHER; note = 2'-O-methyladenosine-3'-phosphate
  modified_base 18: mod_base = OTHER; note = 2'-O-methylcytidine-3'-phosphate
  modified_base 19: mod_base = OTHER; note = 2'-O-methylguanosine-3'-phosphorothioate
  modified_base 20: mod_base = OTHER; note = 2'-O-methyladenosine-3'-phosphorothioate
  modified_base 21: mod_base = OTHER; note = 2'-O-methyladenosine
ctccacagtgctgaccacgaa

SEQ ID NO: 2527 - RNA, 21 nt, synthetic construct
  source 1..21: mol_type = other RNA
  modified_base 1: mod_base = OTHER; note = 2'-O-methylguanosine-3'-phosphorothioate
  modified_base 2: mod_base = OTHER; note = 2'-O-methylguanosine-3'-phosphorothioate
  modified_base 3: mod_base = OTHER; note = 2'-O-methylcytidine-3'-phosphate
  modified_base 4: mod_base = OTHER; note = 2'-O-methylcytidine-3'-phosphate
  modified_base 5: mod_base = OTHER; note = 2'-O-methyladenosine-3'-phosphate
  modified_base 6: mod_base = OTHER; note = 2'-O-methylcytidine-3'-phosphate
  modified_base 7: mod_base = OTHER; note = 2'-deoxy-2'-fluorocytidine-3'-phosphate
  modified_base 8: mod_base = OTHER; note = 2'-O-methyladenosine-3'-phosphate
  modified_base 9: mod_base = OTHER; note = 2'-deoxy-2'-fluoroguanosine-3'-phosphate
  modified_base 10: mod_base = OTHER; note = 2'-deoxy-2'-fluorouridine-3'-phosphate
  modified_base 11: mod_base = OTHER; note = 2'-deoxy-2'-fluorouridine-3'-phosphate
  modified_base 12: mod_base = OTHER; note = 2'-O-methylcytidine-3'-phosphate
  modified_base 13: mod_base = OTHER; note = 2'-O-methylcytidine-3'-phosphate
  modified_base 14: mod_base = OTHER; note = 2'-O-methyladenosine-3'-phosphate
  modified_base 15: mod_base = OTHER; note = 2'-O-methyluridine-3'-phosphate
  modified_base 16: mod_base = OTHER; note = 2'-O-methylguanosine-3'-phosphate
  modified_base 17: mod_base = OTHER; note = 2'-O-methyluridine-3'-phosphate
  modified_base 18: mod_base = OTHER; note = 2'-O-methylcytidine-3'-phosphate
  modified_base 19: mod_base = OTHER; note = 2'-O-methylcytidine-3'-phosphorothioate
  modified_base 20: mod_base = OTHER; note = 2'-O-methyladenosine-3'-phosphorothioate
  modified_base 21: mod_base = OTHER; note = 2'-O-methyladenosine
ggccaccagttccatgtccaa

SEQ ID NO: 2528 - RNA, 21 nt, synthetic construct
  source 1..21: mol_type = other RNA
  modified_base 1: mod_base = OTHER; note = 2'-O-methylcytidine-3'-phosphorothioate
  modified_base 2: mod_base = OTHER; note = 2'-O-methylcytidine-3'-phosphorothioate
  modified_base 3: mod_base = OTHER; note = 2'-O-methyladenosine-3'-phosphate
  modified_base 4: mod_base = OTHER; note = 2'-O-methylcytidine-3'-phosphate
  modified_base 5: mod_base = OTHER; note = 2'-O-methyluridine-3'-phosphate
  modified_base 6: mod_base = OTHER; note = 2'-O-methyladenosine-3'-phosphate
  modified_base 7: mod_base = OTHER; note = 2'-deoxy-2'-fluorocytidine-3'-phosphate
  modified_base 8: mod_base = OTHER; note = 2'-O-methyladenosine-3'-phosphate
  modified_base 9: mod_base = OTHER; note = 2'-deoxy-2'-fluoroadenosine-3'-phosphate
  modified_base 10: mod_base = OTHER; note = 2'-deoxy-2'-fluorocytidine-3'-phosphate
  modified_base 11: mod_base = OTHER; note = 2'-deoxy-2'-fluorouridine-3'-phosphate
  modified_base 12: mod_base = OTHER; note = 2'-O-methylguanosine-3'-phosphate
  modified_base 13: mod_base = OTHER; note = 2'-O-methylcytidine-3'-phosphate
  modified_base 14: mod_base = OTHER; note = 2'-O-methyladenosine-3'-phosphate
  modified_base 15: mod_base = OTHER; note = 2'-O-methylguanosine-3'-phosphate
  modified_base 16: mod_base = OTHER; note = 2'-O-methylcytidine-3'-phosphate
  modified_base 17: mod_base = OTHER; note = 2'-O-methylcytidine-3'-phosphate
  modified_base 18: mod_base = OTHER; note = 2'-O-methyladenosine-3'-phosphate
  modified_base 19: mod_base = OTHER; note = 2'-O-methylcytidine-3'-phosphorothioate
  modified_base 20: mod_base = OTHER; note = 2'-O-methyluridine-3'-phosphorothioate
  modified_base 21: mod_base = OTHER; note = 2'-O-methyladenosine
ccactacaactgcagccacta

SEQ ID NO: 2529 - RNA, 21 nt, synthetic construct
  source 1..21: mol_type = other RNA
  modified_base 1: mod_base = OTHER; note = 2'-O-methylcytidine-3'-phosphorothioate
  modified_base 2: mod_base = OTHER; note = 2'-O-methyladenosine-3'-phosphorothioate
  modified_base 3: mod_base = OTHER; note = 2'-O-methylguanosine-3'-phosphate
  modified_base 4: mod_base = OTHER; note = 2'-O-methylcytidine-3'-phosphate
  modified_base 5: mod_base = OTHER; note = 2'-O-methyladenosine-3'-phosphate
  modified_base 6: mod_base = OTHER; note = 2'-O-methylcytidine-3'-phosphate
  modified_base 7: mod_base = OTHER; note = 2'-deoxy-2'-fluorouridine-3'-phosphate
  modified_base 8: mod_base = OTHER; note = 2'-O-methyladenosine-3'-phosphate
  modified_base 9: mod_base = OTHER; note = 2'-deoxy-2'-fluorocytidine-3'-phosphate
  modified_base 10: mod_base = OTHER; note = 2'-deoxy-2'-fluoroadenosine-3'-phosphate
  modified_base 11: mod_base = OTHER; note = 2'-deoxy-2'-fluoroguanosine-3'-phosphate
  modified_base 12: mod_base = OTHER; note = 2'-O-methylcytidine-3'-phosphate
  modified_base 13: mod_base = OTHER; note = 2'-O-methylcytidine-3'-phosphate
  modified_base 14: mod_base = OTHER; note = 2'-O-methyladenosine-3'-phosphate
  modified_base 15: mod_base = OTHER; note = 2'-O-methylcytidine-3'-phosphate
  modified_base 16: mod_base = OTHER; note = 2'-O-methylcytidine-3'-phosphate
  modified_base 17: mod_base = OTHER; note = 2'-O-methylguanosine-3'-phosphate
  modified_base 18: mod_base = OTHER; note = 2'-O-methyluridine-3'-phosphate
  modified_base 19: mod_base = OTHER; note = 2'-O-methylguanosine-3'-phosphorothioate
  modified_base 20: mod_base = OTHER; note = 2'-O-methyladenosine-3'-phosphorothioate
  modified_base 21: mod_base = OTHER; note = 2'-O-methyladenosine
cagcactacagccaccgtgaa

SEQ ID NO: 2530 - RNA, 21 nt, synthetic construct
  source 1..21: mol_type = other RNA
  modified_base 1: mod_base = OTHER; note = 2'-O-methyladenosine-3'-phosphorothioate
  modified_base 2: mod_base = OTHER; note = 2'-O-methylcytidine-3'-phosphorothioate
  modified_base 3: mod_base = OTHER; note = 2'-O-methylcytidine-3'-phosphate
  modified_base 4: mod_base = OTHER; note = 2'-O-methylcytidine-3'-phosphate
  modified_base 5: mod_base = OTHER; note = 2'-O-methyluridine-3'-phosphate
  modified_base 6: mod_base = OTHER; note = 2'-O-methylcytidine-3'-phosphate
  modified_base 7: mod_base = OTHER; note = 2'-deoxy-2'-fluoroadenosine-3'-phosphate
  modified_base 8: mod_base = OTHER; note = 2'-O-methyladenosine-3'-phosphate
  modified_base 9: mod_base = OTHER; note = 2'-deoxy-2'-fluoroadenosine-3'-phosphate
  modified_base 10: mod_base = OTHER; note = 2'-deoxy-2'-fluoroguanosine-3'-phosphate
  modified_base 11: mod_base = OTHER; note = 2'-deoxy-2'-fluorouridine-3'-phosphate
  modified_base 12: mod_base = OTHER; note = 2'-O-methylguanosine-3'-phosphate
  modified_base 13: mod_base = OTHER; note = 2'-O-methylcytidine-3'-phosphate
  modified_base 14: mod_base = OTHER; note = 2'-O-methyluridine-3'-phosphate
  modified_base 15: mod_base = OTHER; note = 2'-O-methylguanosine-3'-phosphate
  modified_base 16: mod_base = OTHER; note = 2'-O-methyladenosine-3'-phosphate
  modified_base 17: mod_base = OTHER; note = 2'-O-methylcytidine-3'-phosphate
  modified_base 18: mod_base = OTHER; note = 2'-O-methylcytidine-3'-phosphate
  modified_base 19: mod_base = OTHER; note = 2'-O-methyladenosine-3'-phosphorothioate
  modified_base 20: mod_base = OTHER; note = 2'-O-methylguanosine-3'-phosphorothioate
  modified_base 21: mod_base = OTHER; note = 2'-O-methyladenosine
accctcaaagtgctgaccaga

SEQ ID NO: 2531 - RNA, 21 nt, synthetic construct
  source 1..21: mol_type = other RNA
  modified_base 1: mod_base = OTHER; note = 2'-O-methyladenosine-3'-phosphorothioate
  modified_base 2: mod_base = OTHER; note = 2'-O-methylcytidine-3'-phosphorothioate
  modified_base 3: mod_base = OTHER; note = 2'-O-methylcytidine-3'-phosphate
  modified_base 4: mod_base = OTHER; note = 2'-O-methylcytidine-3'-phosphate
  modified_base 5: mod_base = OTHER; note = 2'-O-methyladenosine-3'-phosphate
  modified_base 6: mod_base = OTHER; note = 2'-O-methylcytidine-3'-phosphate
  modified_base 7: mod_base = OTHER; note = 2'-deoxy-2'-fluoroadenosine-3'-phosphate
  modified_base 8: mod_base = OTHER; note = 2'-O-methylguanosine-3'-phosphate
  modified_base 9: mod_base = OTHER; note = 2'-deoxy-2'-fluorouridine-3'-phosphate
  modified_base 10: mod_base = OTHER; note = 2'-deoxy-2'-fluorocytidine-3'-phosphate
  modified_base 11: mod_base = OTHER; note = 2'-deoxy-2'-fluoroadenosine-3'-phosphate
  modified_base 12: mod_base = OTHER; note = 2'-O-methyluridine-3'-phosphate
  modified_base 13: mod_base = OTHER; note = 2'-O-methylcytidine-3'-phosphate
  modified_base 14: mod_base = OTHER; note = 2'-O-methyladenosine-3'-phosphate
  modified_base 15: mod_base = OTHER; note = 2'-O-methylguanosine-3'-phosphate
  modified_base 16: mod_base = OTHER; note = 2'-O-methylcytidine-3'-phosphate
  modified_base 17: mod_base = OTHER; note = 2'-O-methyluridine-3'-phosphate
  modified_base 18: mod_base = OTHER; note = 2'-O-methylcytidine-3'-phosphate
  modified_base 19: mod_base = OTHER; note = 2'-O-methylcytidine-3'-phosphorothioate
  modified_base 20: mod_base = OTHER; note = 2'-O-methyladenosine-3'-phosphorothioate
  modified_base 21: mod_base = OTHER; note = 2'-O-methyladenosine
acccacagtcatcagctccaa

SEQ ID NO: 2532 - RNA, 21 nt, synthetic construct
  source 1..21: mol_type = other RNA
  modified_base 1: mod_base = OTHER; note = 2'-O-methylcytidine-3'-phosphorothioate
  modified_base 2: mod_base = OTHER; note = 2'-O-methylcytidine-3'-phosphorothioate
  modified_base 3: mod_base = OTHER; note = 2'-O-methyladenosine-3'-phosphate
  modified_base 4: mod_base = OTHER; note = 2'-O-methylcytidine-3'-phosphate
  modified_base 5: mod_base = OTHER; note = 2'-O-methyluridine-3'-phosphate
  modified_base 6: mod_base = OTHER; note = 2'-O-methylcytidine-3'-phosphate
  modified_base 7: mod_base = OTHER; note = 2'-deoxy-2'-fluorocytidine-3'-phosphate
  modified_base 8: mod_base = OTHER; note = 2'-O-methylcytidine-3'-phosphate
  modified_base 9: mod_base = OTHER; note = 2'-deoxy-2'-fluorouridine-3'-phosphate
  modified_base 10: mod_base = OTHER; note = 2'-deoxy-2'-fluorocytidine-3'-phosphate
  modified_base 11: mod_base = OTHER; note = 2'-deoxy-2'-fluorocytidine-3'-phosphate
  modified_base 12: mod_base = OTHER; note = 2'-O-methyluridine-3'-phosphate
  modified_base 13: mod_base = OTHER; note = 2'-O-methylcytidine-3'-phosphate
  modified_base 14: mod_base = OTHER; note = 2'-O-methylcytidine-3'-phosphate
  modified_base 15: mod_base = OTHER; note = 2'-O-methyladenosine-3'-phosphate
  modified_base 16: mod_base = OTHER; note = 2'-O-methylguanosine-3'-phosphate
  modified_base 17: mod_base = OTHER; note = 2'-O-methyluridine-3'-phosphate
  modified_base 18: mod_base = OTHER; note = 2'-O-methylcytidine-3'-phosphate
  modified_base 19: mod_base = OTHER; note = 2'-O-methylcytidine-3'-phosphorothioate
  modified_base 20: mod_base = OTHER; note = 2'-O-methyladenosine-3'-phosphorothioate
  modified_base 21: mod_base = OTHER; note = 2'-O-methyladenosine
ccactccctcctccagtccaa

SEQ ID NO: 2533 - RNA, 21 nt, synthetic construct
  source 1..21: mol_type = other RNA
  modified_base 1: mod_base = OTHER; note = 2'-O-methylcytidine-3'-phosphorothioate
  modified_base 2: mod_base = OTHER; note = 2'-O-methyluridine-3'-phosphorothioate
  modified_base 3: mod_base = OTHER; note = 2'-O-methyladenosine-3'-phosphate
  modified_base 4: mod_base = OTHER; note = 2'-O-methylcytidine-3'-phosphate
  modified_base 5: mod_base = OTHER; note = 2'-O-methylcytidine-3'-phosphate
  modified_base 6: mod_base = OTHER; note = 2'-O-methyladenosine-3'-phosphate
  modified_base 7: mod_base = OTHER; note = 2'-deoxy-2'-fluoroguanosine-3'-phosphate
  modified_base 8: mod_base = OTHER; note = 2'-O-methylcytidine-3'-phosphate
  modified_base 9: mod_base = OTHER; note = 2'-deoxy-2'-fluoroguanosine-3'-phosphate
  modified_base 10: mod_base = OTHER; note = 2'-deoxy-2'-fluorouridine-3'-phosphate
  modified_base 11: mod_base = OTHER; note = 2'-deoxy-2'-fluorouridine-3'-phosphate
  modified_base 12: mod_base = OTHER; note = 2'-O-methyladenosine-3'-phosphate
  modified_base 13: mod_base = OTHER; note = 2'-O-methylcytidine-3'-phosphate
  modified_base 14: mod_base = OTHER; note = 2'-O-methyladenosine-3'-phosphate
  modified_base 15: mod_base = OTHER; note = 2'-O-methylguanosine-3'-phosphate
  modified_base 16: mod_base = OTHER; note = 2'-O-methylcytidine-3'-phosphate
  modified_base 17: mod_base = OTHER; note = 2'-O-methylcytidine-3'-phosphate
  modified_base 18: mod_base = OTHER; note = 2'-O-methyladenosine-3'-phosphate
  modified_base 19: mod_base = OTHER; note = 2'-O-methyluridine-3'-phosphorothioate
  modified_base 20: mod_base = OTHER; note = 2'-O-methylcytidine-3'-phosphorothioate
  modified_base 21: mod_base = OTHER; note = 2'-O-methyladenosine
ctaccagcgttacagccatca

SEQ ID NO: 2534 - RNA, 21 nt, synthetic construct
  source 1..21: mol_type = other RNA
  modified_base 1: mod_base = OTHER; note = 2'-O-methylcytidine-3'-phosphorothioate
  modified_base 2: mod_base = OTHER; note = 2'-O-methylcytidine-3'-phosphorothioate
  modified_base 3: mod_base = OTHER; note = 2'-O-methyluridine-3'-phosphate
  modified_base 4: mod_base = OTHER; note = 2'-O-methylcytidine-3'-phosphate
  modified_base 5: mod_base = OTHER; note = 2'-O-methyluridine-3'-phosphate
  modified_base 6: mod_base = OTHER; note = 2'-O-methyladenosine-3'-phosphate
  modified_base 7: mod_base = OTHER; note = 2'-deoxy-2'-fluorocytidine-3'-phosphate
  modified_base 8: mod_base = OTHER; note = 2'-O-methyluridine-3'-phosphate
  modified_base 9: mod_base = OTHER; note = 2'-deoxy-2'-fluorocytidine-3'-phosphate
  modified_base 10: mod_base = OTHER; note = 2'-deoxy-2'-fluorocytidine-3'-phosphate
  modified_base 11: mod_base = OTHER; note = 2'-deoxy-2'-fluoroadenosine-3'-phosphate
  modified_base 12: mod_base = OTHER; note = 2'-O-methylguanosine-3'-phosphate
  modified_base 13: mod_base = OTHER; note = 2'-O-methyladenosine-3'-phosphate
  modified_base 14: mod_base = OTHER; note = 2'-O-methylguanosine-3'-phosphate
  modified_base 15: mod_base = OTHER; note = 2'-O-methyladenosine-3'-phosphate
  modified_base 16: mod_base = OTHER; note = 2'-O-methylcytidine-3'-phosphate
  modified_base 17: mod_base = OTHER; note = 2'-O-methyluridine-3'-phosphate
  modified_base 18: mod_base = OTHER; note = 2'-O-methylguanosine-3'-phosphate
  modified_base 19: mod_base = OTHER; note = 2'-O-methyluridine-3'-phosphorothioate
  modified_base 20: mod_base = OTHER; note = 2'-O-methylcytidine-3'-phosphorothioate
  modified_base 21: mod_base = OTHER; note = 2'-O-methyladenosine
cctctactccagagactgtca

SEQ ID NO: 2535 - RNA, 21 nt, synthetic construct
  source 1..21: mol_type = other RNA
  modified_base 1: mod_base = OTHER; note = 2'-O-methyladenosine-3'-phosphorothioate
  modified_base 2: mod_base = OTHER; note = 2'-O-methylguanosine-3'-phosphorothioate
  modified_base 3: mod_base = OTHER; note = 2'-O-methylcytidine-3'-phosphate
  modified_base 4: mod_base = OTHER; note = 2'-O-methyluridine-3'-phosphate
  modified_base 5: mod_base = OTHER; note = 2'-O-methylcytidine-3'-phosphate
  modified_base 6: mod_base = OTHER; note = 2'-O-methyladenosine-3'-phosphate
  modified_base 7: mod_base = OTHER; note = 2'-deoxy-2'-fluorocytidine-3'-phosphate
  modified_base 8: mod_base = OTHER; note = 2'-O-methyladenosine-3'-phosphate
  modified_base 9: mod_base = OTHER; note = 2'-deoxy-2'-fluorocytidine-3'-phosphate
  modified_base 10: mod_base = OTHER; note = 2'-deoxy-2'-fluorouridine-3'-phosphate
  modified_base 11: mod_base = OTHER; note = 2'-deoxy-2'-fluoroadenosine-3'-phosphate
  modified_base 12: mod_base = OTHER; note = 2'-O-methylcytidine-3'-phosphate
  modified_base 13: mod_base = OTHER; note = 2'-O-methylcytidine-3'-phosphate
  modified_base 14: mod_base = OTHER; note = 2'-O-methyladenosine-3'-phosphate
  modified_base 15: mod_base = OTHER; note = 2'-O-methyladenosine-3'-phosphate
  modified_base 16: mod_base = OTHER; note = 2'-O-methyladenosine-3'-phosphate
  modified_base 17: mod_base = OTHER; note = 2'-O-methylguanosine-3'-phosphate
  modified_base 18: mod_base = OTHER; note = 2'-O-methyluridine-3'-phosphate
  modified_base 19: mod_base = OTHER; note = 2'-O-methylguanosine-3'-phosphorothioate
  modified_base 20: mod_base = OTHER; note = 2'-O-methylcytidine-3'-phosphorothioate
  modified_base 21: mod_base = OTHER; note = 2'-O-methyladenosine
agctcacactaccaaagtgca

SEQ ID NO: 2536 - RNA, 21 nt, synthetic construct
  source 1..21: mol_type = other RNA
  modified_base 1: mod_base = OTHER; note = 2'-O-methylcytidine-3'-phosphorothioate
  modified_base 2: mod_base = OTHER; note = 2'-O-methyluridine-3'-phosphorothioate
  modified_base 3: mod_base = OTHER; note = 2'-O-methyladenosine-3'-phosphate
  modified_base 4: mod_base = OTHER; note = 2'-O-methylcytidine-3'-phosphate
  modified_base 5: mod_base = OTHER; note = 2'-O-methylcytidine-3'-phosphate
  modified_base 6: mod_base = OTHER; note = 2'-O-methyladenosine-3'-phosphate
  modified_base 7: mod_base = OTHER; note = 2'-deoxy-2'-fluorocytidine-3'-phosphate
  modified_base 8: mod_base = OTHER; note = 2'-O-methyladenosine-3'-phosphate
  modified_base 9: mod_base = OTHER; note = 2'-deoxy-2'-fluoroadenosine-3'-phosphate
  modified_base 10: mod_base = OTHER; note = 2'-deoxy-2'-fluorocytidine-3'-phosphate
  modified_base 11: mod_base = OTHER; note = 2'-deoxy-2'-fluorocytidine-3'-phosphate
  modified_base 12: mod_base = OTHER; note = 2'-O-methyladenosine-3'-phosphate
  modified_base 13: mod_base = OTHER; note = 2'-O-methylcytidine-3'-phosphate
  modified_base 14: mod_base = OTHER; note = 2'-O-methylguanosine-3'-phosphate
  modified_base 15: mod_base = OTHER; note = 2'-O-methylguanosine-3'-phosphate
  modified_base 16: mod_base = OTHER; note = 2'-O-methylguanosine-3'-phosphate
  modified_base 17: mod_base = OTHER; note = 2'-O-methylcytidine-3'-phosphate
  modified_base 18: mod_base = OTHER; note = 2'-O-methyluridine-3'-phosphate
  modified_base 19: mod_base = OTHER; note = 2'-O-methyluridine-3'-phosphorothioate
  modified_base 20: mod_base = OTHER; note = 2'-O-methylcytidine-3'-phosphorothioate
  modified_base 21: mod_base = OTHER; note = 2'-O-methyladenosine
ctaccacaaccacgggcttca

SEQ ID NO: 2537 - RNA, 21 nt, synthetic construct
  source 1..21: mol_type = other RNA
  modified_base 1: mod_base = OTHER; note = 2'-O-methylguanosine-3'-phosphorothioate
  modified_base 2: mod_base = OTHER; note = 2'-O-methylguanosine-3'-phosphorothioate
  modified_base 3: mod_base = OTHER; note = 2'-O-methylcytidine-3'-phosphate
  modified_base 4: mod_base = OTHER; note = 2'-O-methylcytidine-3'-phosphate
  modified_base 5: mod_base = OTHER; note = 2'-O-methyladenosine-3'-phosphate
  modified_base 6: mod_base = OTHER; note = 2'-O-methylcytidine-3'-phosphate
  modified_base 7: mod_base = OTHER; note = 2'-deoxy-2'-fluorouridine-3'-phosphate
  modified_base 8: mod_base = OTHER; note = 2'-O-methyladenosine-3'-phosphate
  modified_base 9: mod_base = OTHER; note = 2'-deoxy-2'-fluorocytidine-3'-phosphate
  modified_base 10: mod_base = OTHER; note = 2'-deoxy-2'-fluoroguanosine-3'-phosphate
  modified_base 11: mod_base = OTHER; note = 2'-deoxy-2'-fluoroadenosine-3'-phosphate
  modified_base 12: mod_base = OTHER; note = 2'-O-methyluridine-3'-phosphate
  modified_base 13: mod_base = OTHER; note = 2'-O-methylcytidine-3'-phosphate
  modified_base 14: mod_base = OTHER; note = 2'-O-methyladenosine-3'-phosphate
  modified_base 15: mod_base = OTHER; note = 2'-O-methylcytidine-3'-phosphate
  modified_base 16: mod_base = OTHER; note = 2'-O-methyladenosine-3'-phosphate
  modified_base 17: mod_base = OTHER; note = 2'-O-methylguanosine-3'-phosphate
  modified_base 18: mod_base = OTHER; note = 2'-O-methylcytidine-3'-phosphate
  modified_base 19: mod_base = OTHER; note = 2'-O-methylcytidine-3'-phosphorothioate
  modified_base 20: mod_base = OTHER; note = 2'-O-methyladenosine-3'-phosphorothioate
  modified_base 21: mod_base = OTHER; note = 2'-O-methyladenosine
ggccactacgatcacagccaa

SEQ ID NO: 2538 - RNA, 21 nt, synthetic construct
  source 1..21: mol_type = other RNA
  modified_base 1: mod_base = OTHER; note = 2'-O-methylcytidine-3'-phosphorothioate
  modified_base 2: mod_base = OTHER; note = 2'-O-methyladenosine-3'-phosphorothioate
  modified_base 3: mod_base = OTHER; note = 2'-O-methylcytidine-3'-phosphate
  modified_base 4: mod_base = OTHER; note = 2'-O-methylcytidine-3'-phosphate
  modified_base 5: mod_base = OTHER; note = 2'-O-methyladenosine-3'-phosphate
  modified_base 6: mod_base = OTHER; note = 2'-O-methylcytidine-3'-phosphate
  modified_base 7: mod_base = OTHER; note = 2'-deoxy-2'-fluoroguanosine-3'-phosphate
  modified_base 8: mod_base = OTHER; note = 2'-O-methylguanosine-3'-phosphate
  modified_base 9: mod_base = OTHER; note = 2'-deoxy-2'-fluorocytidine-3'-phosphate
  modified_base 10: mod_base = OTHER; note = 2'-deoxy-2'-fluorocytidine-3'-phosphate
  modified_base 11: mod_base = OTHER; note = 2'-deoxy-2'-fluoroadenosine-3'-phosphate
  modified_base 12: mod_base = OTHER; note = 2'-O-methylcytidine-3'-phosphate
  modified_base 13: mod_base = OTHER; note = 2'-O-methylcytidine-3'-phosphate
  modified_base 14: mod_base = OTHER; note = 2'-O-methyladenosine-3'-phosphate
  modified_base 15: mod_base = OTHER; note = 2'-O-methylcytidine-3'-phosphate
  modified_base 16: mod_base = OTHER; note = 2'-O-methyladenosine-3'-phosphate
  modified_base 17: mod_base = OTHER; note = 2'-O-methylcytidine-3'-phosphate
  modified_base 18: mod_base = OTHER; note = 2'-O-methyladenosine-3'-phosphate
  modified_base 19: mod_base = OTHER; note = 2'-O-methylcytidine-3'-phosphorothioate
  modified_base 20: mod_base = OTHER; note = 2'-O-methylguanosine-3'-phosphorothioate
  modified_base 21: mod_base = OTHER; note = 2'-O-methyladenosine
caccacggccaccacacacga

SEQ ID NO: 2539 - RNA, 21 nt, synthetic construct
  source 1..21: mol_type = other RNA
  modified_base 1: mod_base = OTHER; note = 2'-O-methylcytidine-3'-phosphorothioate
  modified_base 2: mod_base = OTHER; note = 2'-O-methyladenosine-3'-phosphorothioate
  modified_base 3: mod_base = OTHER; note = 2'-O-methylguanosine-3'-phosphate
  modified_base 4: mod_base = OTHER; note = 2'-O-methylcytidine-3'-phosphate
  modified_base 5: mod_base = OTHER; note = 2'-O-methyladenosine-3'-phosphate
  modified_base 6: mod_base = OTHER; note = 2'-O-methylguanosine-3'-phosphate
  modified_base 7: mod_base = OTHER; note = 2'-deoxy-2'-fluorocytidine-3'-phosphate
  modified_base 8: mod_base = OTHER; note = 2'-O-methyladenosine-3'-phosphate
  modified_base 9: mod_base = OTHER; note = 2'-deoxy-2'-fluoroadenosine-3'-phosphate
  modified_base 10: mod_base = OTHER; note = 2'-deoxy-2'-fluorocytidine-3'-phosphate
  modified_base 11: mod_base = OTHER; note = 2'-deoxy-2'-fluorocytidine-3'-phosphate
  modified_base 12: mod_base = OTHER; note = 2'-O-methyladenosine-3'-phosphate
  modified_base 13: mod_base = OTHER; note = 2'-O-methylcytidine-3'-phosphate
  modified_base 14: mod_base = OTHER; note = 2'-O-methylcytidine-3'-phosphate
  modified_base 15: mod_base = OTHER; note = 2'-O-methyladenosine-3'-phosphate
  modified_base 16: mod_base = OTHER; note = 2'-O-methylguanosine-3'-phosphate
  modified_base 17: mod_base = OTHER; note = 2'-O-methyluridine-3'-phosphate
  modified_base 18: mod_base = OTHER; note = 2'-O-methyladenosine-3'-phosphate
  modified_base 19: mod_base = OTHER; note = 2'-O-methylcytidine-3'-phosphorothioate
  modified_base 20: mod_base = OTHER; note = 2'-O-methylcytidine-3'-phosphorothioate
  modified_base 21: mod_base = OTHER; note = 2'-O-methyladenosine
cagcagcaaccaccagtacca

SEQ ID NO: 2540 - RNA, 21 nt, synthetic construct
  source 1..21: mol_type = other RNA
  modified_base 1: mod_base = OTHER; note = 2'-O-methylcytidine-3'-phosphorothioate
  modified_base 2: mod_base = OTHER; note = 2'-O-methylcytidine-3'-phosphorothioate
  modified_base 3: mod_base = OTHER; note = 2'-O-methyluridine-3'-phosphate
  modified_base 4: mod_base = OTHER; note = 2'-O-methylcytidine-3'-phosphate
  modified_base 5: mod_base = OTHER; note = 2'-O-methylcytidine-3'-phosphate
  modified_base 6: mod_base = OTHER; note = 2'-O-methyladenosine-3'-phosphate
  modified_base 7: mod_base = OTHER; note = 2'-deoxy-2'-fluoroguanosine-3'-phosphate
  modified_base 8: mod_base = OTHER; note = 2'-O-methylguanosine-3'-phosphate
  modified_base 9: mod_base = OTHER; note = 2'-deoxy-2'-fluoroadenosine-3'-phosphate
  modified_base 10: mod_base = OTHER; note = 2'-deoxy-2'-fluorocytidine-3'-phosphate
  modified_base 11: mod_base = OTHER; note = 2'-deoxy-2'-fluorocytidine-3'-phosphate
  modified_base 12: mod_base = OTHER; note = 2'-O-methyladenosine-3'-phosphate
  modified_base 13: mod_base = OTHER; note = 2'-O-methylcytidine-3'-phosphate
  modified_base 14: mod_base = OTHER; note = 2'-O-methyladenosine-3'-phosphate
  modified_base 15: mod_base = OTHER; note = 2'-O-methylguanosine-3'-phosphate
  modified_base 16: mod_base = OTHER; note = 2'-O-methylcytidine-3'-phosphate
  modified_base 17: mod_base = OTHER; note = 2'-O-methylcytidine-3'-phosphate
  modified_base 18: mod_base = OTHER; note = 2'-O-methyladenosine-3'-phosphate
  modified_base 19: mod_base = OTHER; note = 2'-O-methylcytidine-3'-phosphorothioate
  modified_base 20: mod_base = OTHER; note = 2'-O-methyladenosine-3'-phosphorothioate
  modified_base 21: mod_base = OTHER; note = 2'-O-methyladenosine
cctccaggaccacagccacaa

SEQ ID NO: 2541 - RNA, 21 nt, synthetic construct
  source 1..21: mol_type = other RNA
  modified_base 1: mod_base = OTHER; note = 2'-O-methyladenosine-3'-phosphorothioate
  modified_base 2: mod_base = OTHER; note = 2'-O-methylcytidine-3'-phosphorothioate
  modified_base 3: mod_base = OTHER; note = 2'-O-methylcytidine-3'-phosphate
  modified_base 4: mod_base = OTHER; note = 2'-O-methyladenosine-3'-phosphate
  modified_base 5: mod_base = OTHER; note = 2'-O-methylcytidine-3'-phosphate
  modified_base 6: mod_base = OTHER; note = 2'-O-methylguanosine-3'-phosphate
  modified_base 7: mod_base = OTHER; note = 2'-deoxy-2'-fluoroguanosine-3'-phosphate
  modified_base 8: mod_base = OTHER; note = 2'-O-methyluridine-3'-phosphate
  modified_base 9: mod_base = OTHER; note = 2'-deoxy-2'-fluoroguanosine-3'-phosphate
  modified_base 10: mod_base = OTHER; note = 2'-deoxy-2'-fluoroguanosine-3'-phosphate
  modified_base 11: mod_base = OTHER; note = 2'-deoxy-2'-fluorouridine-3'-phosphate
  modified_base 12: mod_base = OTHER; note = 2'-O-methylguanosine-3'-phosphate
  modified_base 13: mod_base = OTHER; note = 2'-O-methyladenosine-3'-phosphate
  modified_base 14: mod_base = OTHER; note = 2'-O-methylcytidine-3'-phosphate
  modified_base 15: mod_base = OTHER; note = 2'-O-methylcytidine-3'-phosphate
  modified_base 16: mod_base = OTHER; note = 2'-O-methyladenosine-3'-phosphate
  modified_base 17: mod_base = OTHER; note = 2'-O-methylcytidine-3'-phosphate
  modified_base 18: mod_base = OTHER; note = 2'-O-methylguanosine-3'-phosphate
  modified_base 19: mod_base = OTHER; note = 2'-O-methylguanosine-3'-phosphorothioate
  modified_base 20: mod_base = OTHER; note = 2'-O-methylguanosine-3'-phosphorothioate
  modified_base 21: mod_base = OTHER; note = 2'-O-methyladenosine
accacggtggtgaccacggga

SEQ ID NO: 2542 - RNA, 21 nt, synthetic construct
  source 1..21: mol_type = other RNA
  modified_base 1: mod_base = OTHER; note = 2'-O-methylcytidine-3'-phosphorothioate
  modified_base 2: mod_base = OTHER; note = 2'-O-methylguanosine-3'-phosphorothioate
  modified_base 3: mod_base = OTHER; note = 2'-O-methylguanosine-3'-phosphate
  modified_base 4: mod_base = OTHER; note = 2'-O-methylcytidine-3'-phosphate
  modified_base 5: mod_base = OTHER; note = 2'-O-methylcytidine-3'-phosphate
  modified_base 6: mod_base = OTHER; note = 2'-O-methyladenosine-3'-phosphate
  modified_base 7: mod_base = OTHER; note = 2'-deoxy-2'-fluorocytidine-3'-phosphate
  modified_base 8: mod_base = OTHER; note = 2'-O-methylguanosine-3'-phosphate
  modified_base 9: mod_base = OTHER; note = 2'-deoxy-2'-fluorocytidine-3'-phosphate
  modified_base 10: mod_base = OTHER; note = 2'-deoxy-2'-fluorocytidine-3'-phosphate
  modified_base 11: mod_base = OTHER; note = 2'-deoxy-2'-fluorocytidine-3'-phosphate
  modified_base 12: mod_base = OTHER; note = 2'-O-methyluridine-3'-phosphate
  modified_base 13: mod_base = OTHER; note = 2'-O-methylcytidine-3'-phosphate
  modified_base 14: mod_base = OTHER; note = 2'-O-methylcytidine-3'-phosphate
  modified_base 15: mod_base = OTHER; note = 2'-O-methyluridine-3'-phosphate
  modified_base 16: mod_base = OTHER; note = 2'-O-methylcytidine-3'-phosphate
  modified_base 17: mod_base = OTHER; note = 2'-O-methyladenosine-3'-phosphate
  modified_base 18: mod_base = OTHER; note = 2'-O-methyladenosine-3'-phosphate
  modified_base 19: mod_base = OTHER; note = 2'-O-methylcytidine-3'-phosphorothioate
  modified_base 20: mod_base = OTHER; note = 2'-O-methyluridine-3'-phosphorothioate
  modified_base 21: mod_base = OTHER; note = 2'-O-methyladenosine
cggccacgccctcctcaacta

SEQ ID NO: 2543 - RNA, 21 nt, synthetic construct
  source 1..21: mol_type = other RNA
  modified_base 1: mod_base = OTHER; note = 2'-O-methylcytidine-3'-phosphorothioate
  modified_base 2: mod_base = OTHER; note = 2'-O-methyluridine-3'-phosphorothioate
  modified_base 3: mod_base = OTHER; note = 2'-O-methylguanosine-3'-phosphate
  modified_base 4: mod_base = OTHER; note = 2'-O-methylguanosine-3'-phosphate
  modified_base 5: mod_base = OTHER; note = 2'-O-methyladenosine-3'-phosphate
  modified_base 6: mod_base = OTHER; note = 2'-O-methyluridine-3'-phosphate
  modified_base 7: mod_base = OTHER; note = 2'-deoxy-2'-fluorocytidine-3'-phosphate
  modified_base 8: mod_base = OTHER; note = 2'-O-methylcytidine-3'-phosphate
  modified_base 9: mod_base = OTHER; note = 2'-deoxy-2'-fluorouridine-3'-phosphate
  modified_base 10: mod_base = OTHER; note = 2'-deoxy-2'-fluorocytidine-3'-phosphate
  modified_base 11: mod_base = OTHER; note = 2'-deoxy-2'-fluoroadenosine-3'-phosphate
  modified_base 12: mod_base = OTHER; note = 2'-O-methylcytidine-3'-phosphate
  modified_base 13: mod_base = OTHER; note = 2'-O-methyladenosine-3'-phosphate
  modified_base 14: mod_base = OTHER; note = 2'-O-methyladenosine-3'-phosphate
  modified_base 15: mod_base = OTHER; note = 2'-O-methyladenosine-3'-phosphate
  modified_base 16: mod_base = OTHER; note = 2'-O-methylguanosine-3'-phosphate
  modified_base 17: mod_base = OTHER; note = 2'-O-methylcytidine-3'-phosphate
  modified_base 18: mod_base = OTHER; note = 2'-O-methyluridine-3'-phosphate
  modified_base 19: mod_base = OTHER; note = 2'-O-methylguanosine-3'-phosphorothioate
  modified_base 20: mod_base = OTHER; note = 2'-O-methyladenosine-3'-phosphorothioate
  modified_base 21: mod_base = OTHER; note = 2'-O-methyladenosine
ctggatcctcacaaagctgaa

SEQ ID NO: 2544 - RNA, 21 nt, synthetic construct
  source 1..21: mol_type = other RNA
  modified_base 1: mod_base = OTHER; note = 2'-O-methyladenosine-3'-phosphorothioate
  modified_base 2: mod_base = OTHER; note = 2'-O-methylcytidine-3'-phosphorothioate
  modified_base 3: mod_base = OTHER; note = 2'-O-methylcytidine-3'-phosphate
  modified_base 4: mod_base = OTHER; note = 2'-O-methylcytidine-3'-phosphate
  modified_base 5: mod_base = OTHER; note = 2'-O-methyladenosine-3'-phosphate
  modified_base 6: mod_base = OTHER; note = 2'-O-methylcytidine-3'-phosphate
  modified_base 7: mod_base = OTHER; note = 2'-deoxy-2'-fluoroadenosine-3'-phosphate
  modified_base 8: mod_base = OTHER; note = 2'-O-methyladenosine-3'-phosphate
  modified_base 9: mod_base = OTHER; note = 2'-deoxy-2'-fluorocytidine-3'-phosphate
  modified_base 10: mod_base = OTHER; note = 2'-deoxy-2'-fluorocytidine-3'-phosphate
  modified_base 11: mod_base = OTHER; note = 2'-deoxy-2'-fluoroadenosine-3'-phosphate
  modified_base 12: mod_base = OTHER; note = 2'-O-methylguanosine-3'-phosphate
  modified_base 13: mod_base = OTHER; note = 2'-O-methyluridine-3'-phosphate
  modified_base 14: mod_base = OTHER; note = 2'-O-methylguanosine-3'-phosphate
  modified_base 15: mod_base = OTHER; note = 2'-O-methylguanosine-3'-phosphate
  modified_base 16: mod_base = OTHER; note = 2'-O-methylcytidine-3'-phosphate
  modified_base 17: mod_base = OTHER; note = 2'-O-methyluridine-3'-phosphate
  modified_base 18: mod_base = OTHER; note = 2'-O-methylcytidine-3'-phosphate
  modified_base 19: mod_base = OTHER; note = 2'-O-methylcytidine-3'-phosphorothioate
  modified_base 20: mod_base = OTHER; note = 2'-O-methyladenosine-3'-phosphorothioate
  modified_base 21: mod_base = OTHER; note = 2'-O-methyladenosine
acccacaaccagtggctccaa

SEQ ID NO: 2545 - RNA, 21 nt, synthetic construct
  source 1..21: mol_type = other RNA
  modified_base 1: mod_base = OTHER; note = 2'-O-methylguanosine-3'-phosphorothioate
  modified_base 2: mod_base = OTHER; note = 2'-O-methyladenosine-3'-phosphorothioate
  modified_base 3: mod_base = OTHER; note = 2'-O-methylcytidine-3'-phosphate
  modified_base 4: mod_base = OTHER; note = 2'-O-methylguanosine-3'-phosphate
  modified_base 5: mod_base = OTHER; note = 2'-O-methyladenosine-3'-phosphate
  modified_base 6: mod_base = OTHER; note = 2'-O-methylcytidine-3'-phosphate
  modified_base 7: mod_base = OTHER; note = 2'-deoxy-2'-fluorocytidine-3'-phosphate
  modified_base 8: mod_base = OTHER; note = 2'-O-methyluridine-3'-phosphate
  modified_base 9: mod_base = OTHER; note = 2'-deoxy-2'-fluoroguanosine-3'-phosphate
  modified_base 10: mod_base = OTHER; note = 2'-deoxy-2'-fluoroguanosine-3'-phosphate
  modified_base 11: mod_base = OTHER; note = 2'-deoxy-2'-fluoroadenosine-3'-phosphate
  modified_base 12: mod_base = OTHER; note = 2'-O-methyluridine-3'-phosphate
  modified_base 13: mod_base = OTHER; note = 2'-O-methylcytidine-3'-phosphate
  modified_base 14: mod_base = OTHER; note = 2'-O-methylcytidine-3'-phosphate
  modified_base 15: mod_base = OTHER; note = 2'-O-methyluridine-3'-phosphate
  modified_base 16: mod_base = OTHER; note = 2'-O-methylcytidine-3'-phosphate
  modified_base 17: mod_base = OTHER; note = 2'-O-methyladenosine-3'-phosphate
  modified_base 18: mod_base = OTHER; note = 2'-O-methylcytidine-3'-phosphate
  modified_base 19: mod_base = OTHER; note = 2'-O-methyladenosine-3'-phosphorothioate
  modified_base 20: mod_base = OTHER; note = 2'-O-methylguanosine-3'-phosphorothioate
  modified_base 21: mod_base = OTHER; note = 2'-O-methyladenosine
gacgacctggatcctcacaga

SEQ ID NO: 2546 - RNA, 21 nt, synthetic construct
  source 1..21: mol_type = other RNA
  modified_base 1: mod_base = OTHER; note = 2'-O-methyluridine-3'-phosphorothioate
  modified_base 2: mod_base = OTHER; note = 2'-O-methylguanosine-3'-phosphorothioate
  modified_base 3: mod_base = OTHER; note = 2'-O-methyladenosine-3'-phosphate
  modified_base 4: mod_base = OTHER; note = 2'-O-methylcytidine-3'-phosphate
  modified_base 5: mod_base = OTHER; note = 2'-O-methylcytidine-3'-phosphate
  modified_base 6: mod_base = OTHER; note = 2'-O-methyladenosine-3'-phosphate
  modified_base 7: mod_base = OTHER; note = 2'-deoxy-2'-fluorocytidine-3'-phosphate
  modified_base 8: mod_base = OTHER; note = 2'-O-methyladenosine-3'-phosphate
  modified_base 9: mod_base = OTHER; note = 2'-deoxy-2'-fluoroadenosine-3'-phosphate
  modified_base 10: mod_base = OTHER; note = 2'-deoxy-2'-fluorocytidine-3'-phosphate
  modified_base 11: mod_base = OTHER; note = 2'-deoxy-2'-fluoroadenosine-3'-phosphate
  modified_base 12: mod_base = OTHER; note = 2'-O-methylguanosine-3'-phosphate
  modified_base 13: mod_base = OTHER; note = 2'-O-methylcytidine-3'-phosphate
  modified_base 14: mod_base = OTHER; note = 2'-O-methylcytidine-3'-phosphate
  modified_base 15: mod_base = OTHER; note = 2'-O-methyladenosine-3'-phosphate
  modified_base 16: mod_base = OTHER; note = 2'-O-methylcytidine-3'-phosphate
  modified_base 17: mod_base = OTHER; note = 2'-O-methyluridine-3'-phosphate
  modified_base 18: mod_base = OTHER; note = 2'-O-methyladenosine-3'-phosphate
  modified_base 19: mod_base = OTHER; note = 2'-O-methylcytidine-3'-phosphorothioate
  modified_base 20: mod_base = OTHER; note = 2'-O-methylguanosine-3'-phosphorothioate
  modified_base 21: mod_base = OTHER; note = 2'-O-methyladenosine
tgaccacaacagccactacga

SEQ ID NO: 2547 - RNA, 21 nt, synthetic construct
  source 1..21: mol_type = other RNA
  modified_base 1: mod_base = OTHER; note = 2'-O-methyladenosine-3'-phosphorothioate
  modified_base 2: mod_base = OTHER; note = 2'-O-methyluridine-3'-phosphorothioate
  modified_base 3: mod_base = OTHER; note = 2'-O-methylcytidine-3'-phosphate
  modified_base 4: mod_base = OTHER; note = 2'-O-methylcytidine-3'-phosphate
  modified_base 5: mod_base = OTHER; note = 2'-O-methyladenosine-3'-phosphate
  modified_base 6: mod_base = OTHER; note = 2'-O-methylcytidine-3'-phosphate
  modified_base 7: mod_base = OTHER; note = 2'-deoxy-2'-fluorouridine-3'-phosphate
  modified_base 8: mod_base = OTHER; note = 2'-O-methylguanosine-3'-phosphate
  modified_base 9: mod_base = OTHER; note = 2'-deoxy-2'-fluoroguanosine-3'-phosphate
  modified_base 10: mod_base = OTHER; note = 2'-deoxy-2'-fluoroadenosine-3'-phosphate
  modified_base 11: mod_base = OTHER; note = 2'-deoxy-2'-fluorouridine-3'-phosphate
  modified_base 12: mod_base = OTHER; note = 2'-O-methylcytidine-3'-phosphate
  modified_base 13: mod_base = OTHER; note = 2'-O-methylcytidine-3'-phosphate
  modified_base 14: mod_base = OTHER; note = 2'-O-methyladenosine-3'-phosphate
  modified_base 15: mod_base = OTHER; note = 2'-O-methylcytidine-3'-phosphate
  modified_base 16: mod_base = OTHER; note = 2'-O-methylguanosine-3'-phosphate
  modified_base 17: mod_base = OTHER; note = 2'-O-methylguanosine-3'-phosphate
  modified_base 18: mod_base = OTHER; note = 2'-O-methylcytidine-3'-phosphate
  modified_base 19: mod_base = OTHER; note = 2'-O-methylcytidine-3'-phosphorothioate
  modified_base 20: mod_base = OTHER; note = 2'-O-methyladenosine-3'-phosphorothioate
  modified_base 21: mod_base = OTHER; note = 2'-O-methyladenosine
atccactggatccacggccaa

SEQ ID NO: 2548 - RNA, 21 nt, synthetic construct
  source 1..21: mol_type = other RNA
  modified_base 1: mod_base = OTHER; note = 2'-O-methylcytidine-3'-phosphorothioate
  modified_base 2: mod_base = OTHER; note = 2'-O-methyluridine-3'-phosphorothioate
  modified_base 3: mod_base = OTHER; note = 2'-O-methylcytidine-3'-phosphate
  modified_base 4: mod_base = OTHER; note = 2'-O-methylcytidine-3'-phosphate
  modified_base 5: mod_base = OTHER; note = 2'-O-methylcytidine-3'-phosphate
  modified_base 6: mod_base = OTHER; note = 2'-O-methyladenosine-3'-phosphate
  modified_base 7: mod_base = OTHER; note = 2'-deoxy-2'-fluoroadenosine-3'-phosphate
  modified_base 8: mod_base = OTHER; note = 2'-O-methyladenosine-3'-phosphate
  modified_base 9: mod_base = OTHER; note = 2'-deoxy-2'-fluoroguanosine-3'-phosphate
  modified_base 10: mod_base = OTHER; note = 2'-deoxy-2'-fluorouridine-3'-phosphate
  modified_base 11: mod_base = OTHER; note = 2'-deoxy-2'-fluoroguanosine-3'-phosphate
  modified_base 12: mod_base = OTHER; note = 2'-O-methylcytidine-3'-phosphate
  modified_base 13: mod_base = OTHER; note = 2'-O-methyluridine-3'-phosphate
  modified_base 14: mod_base = OTHER; note = 2'-O-methylguanosine-3'-phosphate
  modified_base 15: mod_base = OTHER; note = 2'-O-methyladenosine-3'-phosphate
  modified_base 16: mod_base = OTHER; note = 2'-O-methylcytidine-3'-phosphate
  modified_base 17: mod_base = OTHER; note = 2'-O-methylcytidine-3'-phosphate
  modified_base 18: mod_base = OTHER; note = 2'-O-methyladenosine-3'-phosphate
  modified_base 19: mod_base = OTHER; note = 2'-O-methylguanosine-3'-phosphorothioate
  modified_base 20: mod_base = OTHER; note = 2'-O-methylcytidine-3'-phosphorothioate
  modified_base 21: mod_base = OTHER; note = 2'-O-methyladenosine
ctcccaaagtgctgaccagca

SEQ ID NO: 2549 - RNA, 21 nt, synthetic construct
  source 1..21: mol_type = other RNA
  modified_base 1: mod_base = OTHER; note = 2'-O-methylcytidine-3'-phosphorothioate
  modified_base 2: mod_base = OTHER; note = 2'-O-methylcytidine-3'-phosphorothioate
  modified_base 3: mod_base = OTHER; note = 2'-O-methyladenosine-3'-phosphate
  modified_base 4: mod_base = OTHER; note = 2'-O-methylcytidine-3'-phosphate
  modified_base 5: mod_base = OTHER; note = 2'-O-methylcytidine-3'-phosphate
  modified_base 6: mod_base = OTHER; note = 2'-O-methyladenosine-3'-phosphate
  modified_base 7: mod_base = OTHER; note = 2'-deoxy-2'-fluoroadenosine-3'-phosphate
  modified_base 8: mod_base = OTHER; note = 2'-O-methyladenosine-3'-phosphate
  modified_base 9: mod_base = OTHER; note = 2'-deoxy-2'-fluorouridine-3'-phosphate
  modified_base 10: mod_base = OTHER; note = 2'-deoxy-2'-fluorocytidine-3'-phosphate
  modified_base 11: mod_base = OTHER; note = 2'-deoxy-2'-fluorocytidine-3'-phosphate
  modified_base 12: mod_base = OTHER; note = 2'-O-methyladenosine-3'-phosphate
  modified_base 13: mod_base = OTHER; note = 2'-O-methylcytidine-3'-phosphate
  modified_base 14: mod_base = OTHER; note = 2'-O-methyladenosine-3'-phosphate
  modified_base 15: mod_base = OTHER; note = 2'-O-methylguanosine-3'-phosphate
  modified_base 16: mod_base = OTHER; note = 2'-O-methylcytidine-3'-phosphate
  modified_base 17: mod_base = OTHER; note = 2'-O-methyluridine-3'-phosphate
  modified_base 18: mod_base = OTHER; note = 2'-O-methyladenosine-3'-phosphate
  modified_base 19: mod_base = OTHER; note = 2'-O-methylcytidine-3'-phosphorothioate
  modified_base 20: mod_base = OTHER; note = 2'-O-methylcytidine-3'-phosphorothioate
  modified_base 21: mod_base = OTHER; note = 2'-O-methyladenosine
ccaccaaatccacagctacca

SEQ ID NO: 2550 - RNA, 21 nt, synthetic construct
  source 1..21: mol_type = other RNA
  modified_base 1: mod_base = OTHER; note = 2'-O-methylguanosine-3'-phosphorothioate
  modified_base 2: mod_base = OTHER; note = 2'-O-methylguanosine-3'-phosphorothioate
  modified_base 3: mod_base = OTHER; note = 2'-O-methylcytidine-3'-phosphate
  modified_base 4: mod_base = OTHER; note = 2'-O-methylcytidine-3'-phosphate
  modified_base 5: mod_base = OTHER; note = 2'-O-methyladenosine-3'-phosphate
  modified_base 6: mod_base = OTHER; note = 2'-O-methylcytidine-3'-phosphate
  modified_base 7: mod_base = OTHER; note = 2'-deoxy-2'-fluorocytidine-3'-phosphate
  modified_base 8: mod_base = OTHER; note = 2'-O-methyladenosine-3'-phosphate
  modified_base 9: mod_base = OTHER; note = 2'-deoxy-2'-fluoroguanosine-3'-phosphate
  modified_base 10: mod_base = OTHER; note = 2'-deoxy-2'-fluorouridine-3'-phosphate
  modified_base 11: mod_base = OTHER; note = 2'-deoxy-2'-fluorouridine-3'-phosphate
  modified_base 12: mod_base = OTHER; note = 2'-O-methylcytidine-3'-phosphate
  modified_base 13: mod_base = OTHER; note = 2'-O-methylcytidine-3'-phosphate
  modified_base 14: mod_base = OTHER; note = 2'-O-methyladenosine-3'-phosphate
  modified_base 15: mod_base = OTHER; note = 2'-O-methylcytidine-3'-phosphate
  modified_base 16: mod_base = OTHER; note = 2'-O-methylguanosine-3'-phosphate
  modified_base 17: mod_base = OTHER; note = 2'-O-methyluridine-3'-phosphate
  modified_base 18: mod_base = OTHER; note = 2'-O-methylcytidine-3'-phosphate
  modified_base 19: mod_base = OTHER; note = 2'-O-methylcytidine-3'-phosphorothioate
  modified_base 20: mod_base = OTHER; note = 2'-O-methyladenosine-3'-phosphorothioate
  modified_base 21: mod_base = OTHER; note = 2'-O-methyladenosine
ggccaccagttccacgtccaa

SEQ ID NO: 2551 - RNA, 21 nt, synthetic construct
  source 1..21: mol_type = other RNA
  modified_base 1: mod_base = OTHER; note = 2'-O-methyluridine-3'-phosphorothioate
  modified_base 2: mod_base = OTHER; note = 2'-O-methylguanosine-3'-phosphorothioate
  modified_base 3: mod_base = OTHER; note = 2'-O-methyladenosine-3'-phosphate
  modified_base 4: mod_base = OTHER; note = 2'-O-methylguanosine-3'-phosphate
  modified_base 5: mod_base = OTHER; note = 2'-O-methylcytidine-3'-phosphate
  modified_base 6: mod_base = OTHER; note = 2'-O-methyladenosine-3'-phosphate
  modified_base 7: mod_base = OTHER; note = 2'-deoxy-2'-fluorocytidine-3'-phosphate
  modified_base 8: mod_base = OTHER; note = 2'-O-methylcytidine-3'-phosphate
  modified_base 9: mod_base = OTHER; note = 2'-deoxy-2'-fluoroadenosine-3'-phosphate
  modified_base 10: mod_base = OTHER; note = 2'-deoxy-2'-fluorocytidine-3'-phosphate
  modified_base 11: mod_base = OTHER; note = 2'-deoxy-2'-fluoroguanosine-3'-phosphate
  modified_base 12: mod_base = OTHER; note = 2'-O-methylguanosine-3'-phosphate
  modified_base 13: mod_base = OTHER; note = 2'-O-methylcytidine-3'-phosphate
  modified_base 14: mod_base = OTHER; note = 2'-O-methylcytidine-3'-phosphate
  modified_base 15: mod_base = OTHER; note = 2'-O-methyladenosine-3'-phosphate
  modified_base 16: mod_base = OTHER; note = 2'-O-methylcytidine-3'-phosphate
  modified_base 17: mod_base = OTHER; note = 2'-O-methylguanosine-3'-phosphate
  modified_base 18: mod_base = OTHER; note = 2'-O-methyladenosine-3'-phosphate
  modified_base 19: mod_base = OTHER; note = 2'-O-methylcytidine-3'-phosphorothioate
  modified_base 20: mod_base = OTHER; note = 2'-O-methyladenosine-3'-phosphorothioate
  modified_base 21: mod_base = OTHER; note = 2'-O-methyladenosine
tgagcaccacggccacgacaa

SEQ ID NO: 2552 - RNA, 21 nt, synthetic construct
  source 1..21: mol_type = other RNA
  modified_base 1: mod_base = OTHER; note = 2'-O-methylcytidine-3'-phosphorothioate
  modified_base 2: mod_base = OTHER; note = 2'-O-methylcytidine-3'-phosphorothioate
  modified_base 3: mod_base = OTHER; note = 2'-O-methyladenosine-3'-phosphate
  modified_base 4: mod_base = OTHER; note = 2'-O-methylguanosine-3'-phosphate
  modified_base 5: mod_base = OTHER; note = 2'-O-methylguanosine-3'-phosphate
  modified_base 6: mod_base = OTHER; note = 2'-O-methylguanosine-3'-phosphate
  modified_base 7: mod_base = OTHER; note = 2'-deoxy-2'-fluoroadenosine-3'-phosphate
  modified_base 8: mod_base = OTHER; note = 2'-O-methylcytidine-3'-phosphate
  modified_base 9: mod_base = OTHER; note = 2'-deoxy-2'-fluorouridine-3'-phosphate
  modified_base 10: mod_base = OTHER; note = 2'-deoxy-2'-fluoroguanosine-3'-phosphate
  modified_base 11: mod_base = OTHER; note = 2'-deoxy-2'-fluorocytidine-3'-phosphate
  modified_base 12: mod_base = OTHER; note = 2'-O-methyladenosine-3'-phosphate
  modified_base 13: mod_base = OTHER; note = 2'-O-methyladenosine-3'-phosphate
  modified_base 14: mod_base = OTHER; note = 2'-O-methylcytidine-3'-phosphate
  modified_base 15: mod_base = OTHER; note = 2'-O-methyluridine-3'-phosphate
  modified_base 16: mod_base = OTHER; note = 2'-O-methylguanosine-3'-phosphate
  modified_base 17: mod_base = OTHER; note = 2'-O-methylcytidine-3'-phosphate
  modified_base 18: mod_base = OTHER; note = 2'-O-methylcytidine-3'-phosphate
  modified_base 19: mod_base = OTHER; note = 2'-O-methylcytidine-3'-phosphorothioate
  modified_base 20: mod_base = OTHER; note = 2'-O-methyluridine-3'-phosphorothioate
  modified_base 21: mod_base = OTHER; note = 2'-O-methyladenosine
ccagggactgcaactgcccta

SEQ ID NO: 2553 - RNA, 21 nt, synthetic construct
  source 1..21: mol_type = other RNA
  modified_base 1: mod_base = OTHER; note = 2'-O-methylcytidine-3'-phosphorothioate
  modified_base 2: mod_base = OTHER; note = 2'-O-methylguanosine-3'-phosphorothioate
  modified_base 3: mod_base = OTHER; note = 2'-O-methylcytidine-3'-phosphate
  modified_base 4: mod_base = OTHER; note = 2'-O-methylcytidine-3'-phosphate
  modified_base 5: mod_base = OTHER; note = 2'-O-methyladenosine-3'-phosphate
  modified_base 6: mod_base = OTHER; note = 2'-O-methylguanosine-3'-phosphate
  modified_base 7: mod_base = OTHER; note = 2'-deoxy-2'-fluoroadenosine-3'-phosphate
  modified_base 8: mod_base = OTHER; note = 2'-O-methylguanosine-3'-phosphate
  modified_base 9: mod_base = OTHER; note = 2'-deoxy-2'-fluorouridine-3'-phosphate
  modified_base 10: mod_base = OTHER; note = 2'-deoxy-2'-fluoroguanosine-3'-phosphate
  modified_base 11: mod_base = OTHER; note = 2'-deoxy-2'-fluorocytidine-3'-phosphate
  modified_base 12: mod_base = OTHER; note = 2'-O-methyluridine-3'-phosphate
  modified_base 13: mod_base = OTHER; note = 2'-O-methylguanosine-3'-phosphate
  modified_base 14: mod_base = OTHER; note = 2'-O-methyladenosine-3'-phosphate
  modified_base 15: mod_base = OTHER; note = 2'-O-methylcytidine-3'-phosphate
  modified_base 16: mod_base = OTHER; note = 2'-O-methylcytidine-3'-phosphate
  modified_base 17: mod_base = OTHER; note = 2'-O-methyladenosine-3'-phosphate
  modified_base 18: mod_base = OTHER; note = 2'-O-methylcytidine-3'-phosphate
  modified_base 19: mod_base = OTHER; note = 2'-O-methylcytidine-3'-phosphorothioate
  modified_base 20: mod_base = OTHER; note = 2'-O-methyladenosine-3'-phosphorothioate
  modified_base 21: mod_base = OTHER; note = 2'-O-methyladenosine
cgccagagtgctgaccaccaa

SEQ ID NO: 2554 - RNA, 21 nt, synthetic construct
  source 1..21: mol_type = other RNA
  modified_base 1: mod_base = OTHER; note = 2'-O-methylcytidine-3'-phosphorothioate
  modified_base 2: mod_base = OTHER; note = 2'-O-methyladenosine-3'-phosphorothioate
  modified_base 3: mod_base = OTHER; note = 2'-O-methylguanosine-3'-phosphate
  modified_base 4: mod_base = OTHER; note = 2'-O-methylguanosine-3'-phosphate
  modified_base 5: mod_base = OTHER; note = 2'-O-methylguanosine-3'-phosphate
  modified_base 6: mod_base = OTHER; note = 2'-O-methyladenosine-3'-phosphate
  modified_base 7: mod_base = OTHER; note = 2'-deoxy-2'-fluorocytidine-3'-phosphate
  modified_base 8: mod_base = OTHER; note = 2'-O-methyladenosine-3'-phosphate
  modified_base 9: mod_base = OTHER; note = 2'-deoxy-2'-fluoroadenosine-3'-phosphate
  modified_base 10: mod_base = OTHER; note = 2'-deoxy-2'-fluorocytidine-3'-phosphate
  modified_base 11: mod_base = OTHER; note = 2'-deoxy-2'-fluoroadenosine-3'-phosphate
  modified_base 12: mod_base = OTHER; note = 2'-O-methylcytidine-3'-phosphate
  modified_base 13: mod_base = OTHER; note = 2'-O-methylcytidine-3'-phosphate
  modified_base 14: mod_base = OTHER; note = 2'-O-methylcytidine-3'-phosphate
  modified_base 15: mod_base = OTHER; note = 2'-O-methyladenosine-3'-phosphate
  modified_base 16: mod_base = OTHER; note = 2'-O-methyluridine-3'-phosphate
  modified_base 17: mod_base = OTHER; note = 2'-O-methylcytidine-3'-phosphate
  modified_base 18: mod_base = OTHER; note = 2'-O-methyladenosine-3'-phosphate
  modified_base 19: mod_base = OTHER; note = 2'-O-methylcytidine-3'-phosphorothioate
  modified_base 20: mod_base = OTHER; note = 2'-O-methylcytidine-3'-phosphorothioate
  modified_base 21: mod_base = OTHER; note = 2'-O-methyladenosine
cagggacaacacccatcacca

SEQ ID NO: 2555 - RNA, 21 nt, synthetic construct
  source 1..21: mol_type = other RNA
  modified_base 1: mod_base = OTHER; note = 2'-O-methylcytidine-3'-phosphorothioate
  modified_base 2: mod_base = OTHER; note = 2'-O-methyluridine-3'-phosphorothioate
  modified_base 3: mod_base = OTHER; note = 2'-O-methylcytidine-3'-phosphate
  modified_base 4: mod_base = OTHER; note = 2'-O-methylcytidine-3'-phosphate
  modified_base 5: mod_base = OTHER; note = 2'-O-methyladenosine-3'-phosphate
  modified_base 6: mod_base = OTHER; note = 2'-O-methyladenosine-3'-phosphate
  modified_base 7: mod_base = OTHER; note = 2'-deoxy-2'-fluoroadenosine-3'-phosphate
  modified_base 8: mod_base = OTHER; note = 2'-O-methylguanosine-3'-phosphate
  modified_base 9: mod_base = OTHER; note = 2'-deoxy-2'-fluorocytidine-3'-phosphate
  modified_base 10: mod_base = OTHER; note = 2'-deoxy-2'-fluorocytidine-3'-phosphate
  modified_base 11: mod_base = OTHER; note = 2'-deoxy-2'-fluoroadenosine-3'-phosphate
  modified_base 12: mod_base = OTHER; note = 2'-O-methylcytidine-3'-phosphate
  modified_base 13: mod_base = OTHER; note = 2'-O-methyluridine-3'-phosphate
  modified_base 14: mod_base = OTHER; note = 2'-O-methyluridine-3'-phosphate
  modified_base 15: mod_base = OTHER; note = 2'-O-methylcytidine-3'-phosphate
  modified_base 16: mod_base = OTHER; note = 2'-O-methylcytidine-3'-phosphate
  modified_base 17: mod_base = OTHER; note = 2'-O-methyluridine-3'-phosphate
  modified_base 18: mod_base = OTHER; note = 2'-O-methylcytidine-3'-phosphate
  modified_base 19: mod_base = OTHER; note = 2'-O-methylcytidine-3'-phosphorothioate
  modified_base 20: mod_base = OTHER; note = 2'-O-methyluridine-3'-phosphorothioate
  modified_base 21: mod_base = OTHER; note = 2'-O-methyladenosine
ctccaaagccacttcctccta

SEQ ID NO: 2556 - RNA, 21 nt, synthetic construct
  source 1..21: mol_type = other RNA
  modified_base 1: mod_base = OTHER; note = 2'-O-methyluridine-3'-phosphorothioate
  modified_base 2: mod_base = OTHER; note = 2'-O-methylguanosine-3'-phosphorothioate
  modified_base 3: mod_base = OTHER; note = 2'-O-methylcytidine-3'-phosphate
  modified_base 4: mod_base = OTHER; note = 2'-O-methyluridine-3'-phosphate
  modified_base 5: mod_base = OTHER; note = 2'-O-methylguanosine-3'-phosphate
  modified_base 6: mod_base = OTHER; note = 2'-O-methyladenosine-3'-phosphate
  modified_base 7: mod_base = OTHER; note = 2'-deoxy-2'-fluorocytidine-3'-phosphate
  modified_base 8: mod_base = OTHER; note = 2'-O-methyladenosine-3'-phosphate
  modified_base 9: mod_base = OTHER; note = 2'-deoxy-2'-fluoroadenosine-3'-phosphate
  modified_base 10: mod_base = OTHER; note = 2'-deoxy-2'-fluoroguanosine-3'-phosphate
  modified_base 11: mod_base = OTHER; note = 2'-deoxy-2'-fluorocytidine-3'-phosphate
  modified_base 12: mod_base = OTHER; note = 2'-O-methyladenosine-3'-phosphate
  modified_base 13: mod_base = OTHER; note = 2'-O-methylcytidine-3'-phosphate
  modified_base 14: mod_base = OTHER; note = 2'-O-methyladenosine-3'-phosphate
  modified_base 15: mod_base = OTHER; note = 2'-O-methylguanosine-3'-phosphate
  modified_base 16: mod_base = OTHER; note = 2'-O-methylcytidine-3'-phosphate
  modified_base 17: mod_base = OTHER; note = 2'-O-methylcytidine-3'-phosphate
  modified_base 18: mod_base = OTHER; note = 2'-O-methyladenosine-3'-phosphate
  modified_base 19: mod_base = OTHER; note = 2'-O-methylcytidine-3'-phosphorothioate
  modified_base 20: mod_base = OTHER; note = 2'-O-methyladenosine-3'-phosphorothioate
  modified_base 21: mod_base = OTHER; note = 2'-O-methyladenosine
tgctgacaagcacagccacaa

SEQ ID NO: 2557 - RNA, 21 nt, synthetic construct
  source 1..21: mol_type = other RNA
  modified_base 1: mod_base = OTHER; note = 2'-O-methylcytidine-3'-phosphorothioate
  modified_base 2: mod_base = OTHER; note = 2'-O-methyluridine-3'-phosphorothioate
  modified_base 3: mod_base = OTHER; note = 2'-O-methylcytidine-3'-phosphate
  modified_base 4: mod_base = OTHER; note = 2'-O-methylcytidine-3'-phosphate
  modified_base 5: mod_base = OTHER; note = 2'-O-methyladenosine-3'-phosphate
  modified_base 6: mod_base = OTHER; note = 2'-O-methylcytidine-3'-phosphate
  modified_base 7: mod_base = OTHER; note = 2'-deoxy-2'-fluorocytidine-3'-phosphate
  modified_base 8: mod_base = OTHER; note = 2'-O-methylcytidine-3'-phosphate
  modified_base 9: mod_base = OTHER; note = 2'-deoxy-2'-fluorouridine-3'-phosphate
  modified_base 10: mod_base = OTHER; note = 2'-deoxy-2'-fluoroguanosine-3'-phosphate
  modified_base 11: mod_base = OTHER; note = 2'-deoxy-2'-fluorouridine-3'-phosphate
  modified_base 12: mod_base = OTHER; note = 2'-O-methylguanosine-3'-phosphate
  modified_base 13: mod_base = OTHER; note = 2'-O-methylguanosine-3'-phosphate
  modified_base 14: mod_base = OTHER; note = 2'-O-methyladenosine-3'-phosphate
  modified_base 15: mod_base = OTHER; note = 2'-O-methylcytidine-3'-phosphate
  modified_base 16: mod_base = OTHER; note = 2'-O-methylcytidine-3'-phosphate
  modified_base 17: mod_base = OTHER; note = 2'-O-methyladenosine-3'-phosphate
  modified_base 18: mod_base = OTHER; note = 2'-O-methylcytidine-3'-phosphate
  modified_base 19: mod_base = OTHER; note = 2'-O-methylguanosine-3'-phosphorothioate
  modified_base 20: mod_base = OTHER; note = 2'-O-methyluridine-3'-phosphorothioate
  modified_base 21: mod_base = OTHER; note = 2'-O-methyladenosine
ctccaccctgtggaccacgta

SEQ ID NO: 2558 - RNA, 21 nt, synthetic construct
  source 1..21: mol_type = other RNA
  modified_base 1: mod_base = OTHER; note = 2'-O-methylcytidine-3'-phosphorothioate
  modified_base 2: mod_base = OTHER; note = 2'-O-methylcytidine-3'-phosphorothioate
  modified_base 3: mod_base = OTHER; note = 2'-O-methylcytidine-3'-phosphate
  modified_base 4: mod_base = OTHER; note = 2'-O-methyladenosine-3'-phosphate
  modified_base 5: mod_base = OTHER; note = 2'-O-methylguanosine-3'-phosphate
  modified_base 6: mod_base = OTHER; note = 2'-O-methylcytidine-3'-phosphate
  modified_base 7: mod_base = OTHER; note = 2'-deoxy-2'-fluoroadenosine-3'-phosphate
  modified_base 8: mod_base = OTHER; note = 2'-O-methylcytidine-3'-phosphate
  modified_base 9: mod_base = OTHER; note = 2'-deoxy-2'-fluoroadenosine-3'-phosphate
  modified_base 10: mod_base = OTHER; note = 2'-deoxy-2'-fluoroguanosine-3'-phosphate
  modified_base 11: mod_base = OTHER; note = 2'-deoxy-2'-fluoroadenosine-3'-phosphate
  modified_base 12: mod_base = OTHER; note = 2'-O-methylcytidine-3'-phosphate
  modified_base 13: mod_base = OTHER; note = 2'-O-methylcytidine-3'-phosphate
  modified_base 14: mod_base = OTHER; note = 2'-O-methyladenosine-3'-phosphate
  modified_base 15: mod_base = OTHER; note = 2'-O-methylcytidine-3'-phosphate
  modified_base 16: mod_base = OTHER; note = 2'-O-methylcytidine-3'-phosphate
  modified_base 17: mod_base = OTHER; note = 2'-O-methyladenosine-3'-phosphate
  modified_base 18: mod_base = OTHER; note = 2'-O-methylcytidine-3'-phosphate
  modified_base 19: mod_base = OTHER; note = 2'-O-methyladenosine-3'-phosphorothioate
  modified_base 20: mod_base = OTHER; note = 2'-O-methylcytidine-3'-phosphorothioate
  modified_base 21: mod_base = OTHER; note = 2'-O-methyladenosine
cccagcacagaccaccacaca

SEQ ID NO: 2559 - RNA, 21 nt, synthetic construct
  source 1..21: mol_type = other RNA
  modified_base 1: mod_base = OTHER; note = 2'-O-methylguanosine-3'-phosphorothioate
  modified_base 2: mod_base = OTHER; note = 2'-O-methyluridine-3'-phosphorothioate
  modified_base 3: mod_base = OTHER; note = 2'-O-methylcytidine-3'-phosphate
  modified_base 4: mod_base = OTHER; note = 2'-O-methylcytidine-3'-phosphate
  modified_base 5: mod_base = OTHER; note = 2'-O-methyladenosine-3'-phosphate
  modified_base 6: mod_base = OTHER; note = 2'-O-methylcytidine-3'-phosphate
  modified_base 7: mod_base = OTHER; note = 2'-deoxy-2'-fluorocytidine-3'-phosphate
  modified_base 8: mod_base = OTHER; note = 2'-O-methyladenosine-3'-phosphate
  modified_base 9: mod_base = OTHER; note = 2'-deoxy-2'-fluorouridine-3'-phosphate
  modified_base 10: mod_base = OTHER; note = 2'-deoxy-2'-fluoroguanosine-3'-phosphate
  modified_base 11: mod_base = OTHER; note = 2'-deoxy-2'-fluorouridine-3'-phosphate
  modified_base 12: mod_base = OTHER; note = 2'-O-methylcytidine-3'-phosphate
  modified_base 13: mod_base = OTHER; note = 2'-O-methylcytidine-3'-phosphate
  modified_base 14: mod_base = OTHER; note = 2'-O-methyladenosine-3'-phosphate
  modified_base 15: mod_base = OTHER; note = 2'-O-methylcytidine-3'-phosphate
  modified_base 16: mod_base = OTHER; note = 2'-O-methyladenosine-3'-phosphate
  modified_base 17: mod_base = OTHER; note = 2'-O-methyladenosine-3'-phosphate
  modified_base 18: mod_base = OTHER; note = 2'-O-methyluridine-3'-phosphate
  modified_base 19: mod_base = OTHER; note = 2'-O-methylcytidine-3'-phosphorothioate
  modified_base 20: mod_base = OTHER; note = 2'-O-methylcytidine-3'-phosphorothioate
  modified_base 21: mod_base = OTHER; note = 2'-O-methyladenosine
gtccaccatgtccacaatcca

SEQ ID NO: 2560 - RNA, 21 nt, synthetic construct
  source 1..21: mol_type = other RNA
  modified_base 1: mod_base = OTHER; note = 2'-O-methylcytidine-3'-phosphorothioate
  modified_base 2: mod_base = OTHER; note = 2'-O-methyluridine-3'-phosphorothioate
  modified_base 3: mod_base = OTHER; note = 2'-O-methylcytidine-3'-phosphate
  modified_base 4: mod_base = OTHER; note = 2'-O-methylcytidine-3'-phosphate
  modified_base 5: mod_base = OTHER; note = 2'-O-methyluridine-3'-phosphate
  modified_base 6: mod_base = OTHER; note = 2'-O-methylcytidine-3'-phosphate
  modified_base 7: mod_base = OTHER; note = 2'-deoxy-2'-fluorouridine-3'-phosphate
  modified_base 8: mod_base = OTHER; note = 2'-O-methyladenosine-3'-phosphate
  modified_base 9: mod_base = OTHER; note = 2'-deoxy-2'-fluorocytidine-3'-phosphate
  modified_base 10: mod_base = OTHER; note = 2'-deoxy-2'-fluorouridine-3'-phosphate
  modified_base 11: mod_base = OTHER; note = 2'-deoxy-2'-fluorocytidine-3'-phosphate
  modified_base 12: mod_base = OTHER; note = 2'-O-methylcytidine-3'-phosphate
  modified_base 13: mod_base = OTHER; note = 2'-O-methyladenosine-3'-phosphate
  modified_base 14: mod_base = OTHER; note = 2'-O-methylguanosine-3'-phosphate
  modified_base 15: mod_base = OTHER; note = 2'-O-methyladenosine-3'-phosphate
  modified_base 16: mod_base = OTHER; note = 2'-O-methylguanosine-3'-phosphate
  modified_base 17: mod_base = OTHER; note = 2'-O-methyladenosine-3'-phosphate
  modified_base 18: mod_base = OTHER; note = 2'-O-methylcytidine-3'-phosphate
  modified_base 19: mod_base = OTHER; note = 2'-O-methylcytidine-3'-phosphorothioate
  modified_base 20: mod_base = OTHER; note = 2'-O-methyladenosine-3'-phosphorothioate
  modified_base 21: mod_base = OTHER; note = 2'-O-methyladenosine
ctcctctactccagagaccaa

SEQ ID NO: 2561 - RNA, 21 nt, synthetic construct
  source 1..21: mol_type = other RNA
  modified_base 1: mod_base = OTHER; note = 2'-O-methylcytidine-3'-phosphorothioate
  modified_base 2: mod_base = OTHER; note = 2'-O-methyluridine-3'-phosphorothioate
  modified_base 3: mod_base = OTHER; note = 2'-O-methylcytidine-3'-phosphate
  modified_base 4: mod_base = OTHER; note = 2'-O-methylcytidine-3'-phosphate
  modified_base 5: mod_base = OTHER; note = 2'-O-methyladenosine-3'-phosphate
  modified_base 6: mod_base = OTHER; note = 2'-O-methylcytidine-3'-phosphate
  modified_base 7: mod_base = OTHER; note = 2'-deoxy-2'-fluoroadenosine-3'-phosphate
  modified_base 8: mod_base = OTHER; note = 2'-O-methylguanosine-3'-phosphate
  modified_base 9: mod_base = OTHER; note = 2'-deoxy-2'-fluorouridine-3'-phosphate
  modified_base 10: mod_base = OTHER; note = 2'-deoxy-2'-fluoroguanosine-3'-phosphate
  modified_base 11: mod_base = OTHER; note = 2'-deoxy-2'-fluorocytidine-3'-phosphate
  modified_base 12: mod_base = OTHER; note = 2'-O-methyluridine-3'-phosphate
  modified_base 13: mod_base = OTHER; note = 2'-O-methylguanosine-3'-phosphate
  modified_base 14: mod_base = OTHER; note = 2'-O-methyladenosine-3'-phosphate
  modified_base 15: mod_base = OTHER; note = 2'-O-methylcytidine-3'-phosphate
  modified_base 16: mod_base = OTHER; note = 2'-O-methylcytidine-3'-phosphate
  modified_base 17: mod_base = OTHER; note = 2'-O-methyladenosine-3'-phosphate
  modified_base 18: mod_base = OTHER; note = 2'-O-methylcytidine-3'-phosphate
  modified_base 19: mod_base = OTHER; note = 2'-O-methylcytidine-3'-phosphorothioate
  modified_base 20: mod_base = OTHER; note = 2'-O-methyladenosine-3'-phosphorothioate
  modified_base 21: mod_base = OTHER; note = 2'-O-methyladenosine
ctccacagtgctgaccaccaa

SEQ ID NO: 2562 - RNA, 21 nt, synthetic construct
  source 1..21: mol_type = other RNA
  modified_base 1: mod_base = OTHER; note = 2'-O-methylguanosine-3'-phosphorothioate
  modified_base 2: mod_base = OTHER; note = 2'-O-methylguanosine-3'-phosphorothioate
  modified_base 3: mod_base = OTHER; note = 2'-O-methylcytidine-3'-phosphate
  modified_base 4: mod_base = OTHER; note = 2'-O-methylcytidine-3'-phosphate
  modified_base 5: mod_base = OTHER; note = 2'-O-methyladenosine-3'-phosphate
  modified_base 6: mod_base = OTHER; note = 2'-O-methylcytidine-3'-phosphate
  modified_base 7: mod_base = OTHER; note = 2'-deoxy-2'-fluorocytidine-3'-phosphate
  modified_base 8: mod_base = OTHER; note = 2'-O-methyladenosine-3'-phosphate
  modified_base 9: mod_base = OTHER; note = 2'-deoxy-2'-fluoroadenosine-3'-phosphate
  modified_base 10: mod_base = OTHER; note = 2'-deoxy-2'-fluorouridine-3'-phosphate
  modified_base 11: mod_base = OTHER; note = 2'-deoxy-2'-fluorouridine-3'-phosphate
  modified_base 12: mod_base = OTHER; note = 2'-O-methylcytidine-3'-phosphate
  modified_base 13: mod_base = OTHER; note = 2'-O-methylcytidine-3'-phosphate
  modified_base 14: mod_base = OTHER; note = 2'-O-methyladenosine-3'-phosphate
  modified_base 15: mod_base = OTHER; note = 2'-O-methylcytidine-3'-phosphate
  modified_base 16: mod_base = OTHER; note = 2'-O-methylguanosine-3'-phosphate
  modified_base 17: mod_base = OTHER; note = 2'-O-methylguanosine-3'-phosphate
  modified_base 18: mod_base = OTHER; note = 2'-O-methylcytidine-3'-phosphate
  modified_base 19: mod_base = OTHER; note = 2'-O-methylcytidine-3'-phosphorothioate
  modified_base 20: mod_base = OTHER; note = 2'-O-methyladenosine-3'-phosphorothioate
  modified_base 21: mod_base = OTHER; note = 2'-O-methyladenosine
ggccaccaattccacggccaa

SEQ ID NO: 2563 - RNA, 21 nt, synthetic construct
  source 1..21: mol_type = other RNA
  modified_base 1: mod_base = OTHER; note = 2'-O-methyluridine-3'-phosphorothioate
  modified_base 2: mod_base = OTHER; note = 2'-O-methylguanosine-3'-phosphorothioate
  modified_base 3: mod_base = OTHER; note = 2'-O-methyladenosine-3'-phosphate
  modified_base 4: mod_base = OTHER; note = 2'-O-methylcytidine-3'-phosphate
  modified_base 5: mod_base = OTHER; note = 2'-O-methylcytidine-3'-phosphate
  modified_base 6: mod_base = OTHER; note = 2'-O-methyladenosine-3'-phosphate
  modified_base 7: mod_base = OTHER; note = 2'-deoxy-2'-fluorocytidine-3'-phosphate
  modified_base 8: mod_base = OTHER; note = 2'-O-methyladenosine-3'-phosphate
  modified_base 9: mod_base = OTHER; note = 2'-deoxy-2'-fluoroadenosine-3'-phosphate
  modified_base 10: mod_base = OTHER; note = 2'-deoxy-2'-fluorocytidine-3'-phosphate
  modified_base 11: mod_base = OTHER; note = 2'-deoxy-2'-fluoroadenosine-3'-phosphate
  modified_base 12: mod_base = OTHER; note = 2'-O-methylguanosine-3'-phosphate
  modified_base 13: mod_base = OTHER; note = 2'-O-methylcytidine-3'-phosphate
  modified_base 14: mod_base = OTHER; note = 2'-O-methylcytidine-3'-phosphate
  modified_base 15: mod_base = OTHER; note = 2'-O-methyladenosine-3'-phosphate
  modified_base 16: mod_base = OTHER; note = 2'-O-methylcytidine-3'-phosphate
  modified_base 17: mod_base = OTHER; note = 2'-O-methyluridine-3'-phosphate
  modified_base 18: mod_base = OTHER; note = 2'-O-methyladenosine-3'-phosphate
  modified_base 19: mod_base = OTHER; note = 2'-O-methylcytidine-3'-phosphorothioate
  modified_base 20: mod_base = OTHER; note = 2'-O-methyladenosine-3'-phosphorothioate
  modified_base 21: mod_base = OTHER; note = 2'-O-methyladenosine
tgaccacaacagccactacaa

SEQ ID NO: 2564 - RNA, 21 nt, synthetic construct
  source 1..21: mol_type = other RNA
  modified_base 1: mod_base = OTHER; note = 2'-O-methyluridine-3'-phosphorothioate
  modified_base 2: mod_base = OTHER; note = 2'-O-methylguanosine-3'-phosphorothioate
  modified_base 3: mod_base = OTHER; note = 2'-O-methylguanosine-3'-phosphate
  modified_base 4: mod_base = OTHER; note = 2'-O-methyladenosine-3'-phosphate
  modified_base 5: mod_base = OTHER; note = 2'-O-methyluridine-3'-phosphate
  modified_base 6: mod_base = OTHER; note = 2'-O-methylcytidine-3'-phosphate
  modified_base 7: mod_base = OTHER; note = 2'-deoxy-2'-fluorocytidine-3'-phosphate
  modified_base 8: mod_base = OTHER; note = 2'-O-methyladenosine-3'-phosphate
  modified_base 9: mod_base = OTHER; note = 2'-deoxy-2'-fluorocytidine-3'-phosphate
  modified_base 10: mod_base = OTHER; note = 2'-deoxy-2'-fluoroguanosine-3'-phosphate
  modified_base 11: mod_base = OTHER; note = 2'-deoxy-2'-fluoroguanosine-3'-phosphate
  modified_base 12: mod_base = OTHER; note = 2'-O-methylcytidine-3'-phosphate
  modified_base 13: mod_base = OTHER; note = 2'-O-methylcytidine-3'-phosphate
  modified_base 14: mod_base = OTHER; note = 2'-O-methyladenosine-3'-phosphate
  modified_base 15: mod_base = OTHER; note = 2'-O-methylcytidine-3'-phosphate
  modified_base 16: mod_base = OTHER; note = 2'-O-methylcytidine-3'-phosphate
  modified_base 17: mod_base = OTHER; note = 2'-O-methylcytidine-3'-phosphate
  modified_base 18: mod_base = OTHER; note = 2'-O-methyluridine-3'-phosphate
  modified_base 19: mod_base = OTHER; note = 2'-O-methylguanosine-3'-phosphorothioate
  modified_base 20: mod_base = OTHER; note = 2'-O-methyluridine-3'-phosphorothioate
  modified_base 21: mod_base = OTHER; note = 2'-O-methyladenosine
tggatccacggccaccctgta

SEQ ID NO: 2565 - RNA, 21 nt, synthetic construct
  source 1..21: mol_type = other RNA
  modified_base 1: mod_base = OTHER; note = 2'-O-methylguanosine-3'-phosphorothioate
  modified_base 2: mod_base = OTHER; note = 2'-O-methyladenosine-3'-phosphorothioate
  modified_base 3: mod_base = OTHER; note = 2'-O-methylguanosine-3'-phosphate
  modified_base 4: mod_base = OTHER; note = 2'-O-methylcytidine-3'-phosphate
  modified_base 5: mod_base = OTHER; note = 2'-O-methyladenosine-3'-phosphate
  modified_base 6: mod_base = OTHER; note = 2'-O-methylcytidine-3'-phosphate
  modified_base 7: mod_base = OTHER; note = 2'-deoxy-2'-fluorouridine-3'-phosphate
  modified_base 8: mod_base = OTHER; note = 2'-O-methyladenosine-3'-phosphate
  modified_base 9: mod_base = OTHER; note = 2'-deoxy-2'-fluorouridine-3'-phosphate
  modified_base 10: mod_base = OTHER; note = 2'-deoxy-2'-fluoroadenosine-3'-phosphate
  modified_base 11: mod_base = OTHER; note = 2'-deoxy-2'-fluoroguanosine-3'-phosphate
  modified_base 12: mod_base = OTHER; note = 2'-O-methylcytidine-3'-phosphate
  modified_base 13: mod_base = OTHER; note = 2'-O-methylcytidine-3'-phosphate
  modified_base 14: mod_base = OTHER; note = 2'-O-methyladenosine-3'-phosphate
  modified_base 15: mod_base = OTHER; note = 2'-O-methylcytidine-3'-phosphate
  modified_base 16: mod_base = OTHER; note = 2'-O-methylcytidine-3'-phosphate
  modified_base 17: mod_base = OTHER; note = 2'-O-methylguanosine-3'-phosphate
  modified_base 18: mod_base = OTHER; note = 2'-O-methyluridine-3'-phosphate
  modified_base 19: mod_base = OTHER; note = 2'-O-methylguanosine-3'-phosphorothioate
  modified_base 20: mod_base = OTHER; note = 2'-O-methyladenosine-3'-phosphorothioate
  modified_base 21: mod_base = OTHER; note = 2'-O-methyladenosine
gagcactatagccaccgtgaa

SEQ ID NO: 2566 - RNA, 21 nt, synthetic construct
  source 1..21: mol_type = other RNA
  modified_base 1: mod_base = OTHER; note = 2'-O-methylcytidine-3'-phosphorothioate
  modified_base 2: mod_base = OTHER; note = 2'-O-methylcytidine-3'-phosphorothioate
  modified_base 3: mod_base = OTHER; note = 2'-O-methyladenosine-3'-phosphate
  modified_base 4: mod_base = OTHER; note = 2'-O-methylcytidine-3'-phosphate
  modified_base 5: mod_base = OTHER; note = 2'-O-methyluridine-3'-phosphate
  modified_base 6: mod_base = OTHER; note = 2'-O-methylcytidine-3'-phosphate
  modified_base 7: mod_base = OTHER; note = 2'-deoxy-2'-fluorouridine-3'-phosphate
  modified_base 8: mod_base = OTHER; note = 2'-O-methylguanosine-3'-phosphate
  modified_base 9: mod_base = OTHER; note = 2'-deoxy-2'-fluoroguanosine-3'-phosphate
  modified_base 10: mod_base = OTHER; note = 2'-deoxy-2'-fluoroguanosine-3'-phosphate
  modified_base 11: mod_base = OTHER; note = 2'-deoxy-2'-fluoroadenosine-3'-phosphate
  modified_base 12: mod_base = OTHER; note = 2'-O-methyladenosine-3'-phosphate
  modified_base 13: mod_base = OTHER; note = 2'-O-methylcytidine-3'-phosphate
  modified_base 14: mod_base = OTHER; note = 2'-O-methyladenosine-3'-phosphate
  modified_base 15: mod_base = OTHER; note = 2'-O-methylguanosine-3'-phosphate
  modified_base 16: mod_base = OTHER; note = 2'-O-methylcytidine-3'-phosphate
  modified_base 17: mod_base = OTHER; note = 2'-O-methyluridine-3'-phosphate
  modified_base 18: mod_base = OTHER; note = 2'-O-methylcytidine-3'-phosphate
  modified_base 19: mod_base = OTHER; note = 2'-O-methyladenosine-3'-phosphorothioate
  modified_base 20: mod_base = OTHER; note = 2'-O-methylcytidine-3'-phosphorothioate
  modified_base 21: mod_base = OTHER; note = 2'-O-methyladenosine
ccactctgggaacagctcaca

SEQ ID NO: 2567 - RNA, 21 nt, synthetic construct
  source 1..21: mol_type = other RNA
  modified_base 1: mod_base = OTHER; note = 2'-O-methylcytidine-3'-phosphorothioate
  modified_base 2: mod_base = OTHER; note = 2'-O-methyladenosine-3'-phosphorothioate
  modified_base 3: mod_base = OTHER; note = 2'-O-methyluridine-3'-phosphate
  modified_base 4: mod_base = OTHER; note = 2'-O-methylguanosine-3'-phosphate
  modified_base 5: mod_base = OTHER; note = 2'-O-methylguanosine-3'-phosphate
  modified_base 6: mod_base = OTHER; note = 2'-O-methylcytidine-3'-phosphate
  modified_base 7: mod_base = OTHER; note = 2'-deoxy-2'-fluorocytidine-3'-phosphate
  modified_base 8: mod_base = OTHER; note = 2'-O-methyladenosine-3'-phosphate
  modified_base 9: mod_base = OTHER; note = 2'-deoxy-2'-fluorocytidine-3'-phosphate
  modified_base 10: mod_base = OTHER; note = 2'-deoxy-2'-fluorouridine-3'-phosphate
  modified_base 11: mod_base = OTHER; note = 2'-deoxy-2'-fluoroadenosine-3'-phosphate
  modified_base 12: mod_base = OTHER; note = 2'-O-methyluridine-3'-phosphate
  modified_base 13: mod_base = OTHER; note = 2'-O-methylguanosine-3'-phosphate
  modified_base 14: mod_base = OTHER; note = 2'-O-methylcytidine-3'-phosphate
  modified_base 15: mod_base = OTHER; note = 2'-O-methylcytidine-3'-phosphate
  modified_base 16: mod_base = OTHER; note = 2'-O-methylcytidine-3'-phosphate
  modified_base 17: mod_base = OTHER; note = 2'-O-methyladenosine-3'-phosphate
  modified_base 18: mod_base = OTHER; note = 2'-O-methylcytidine-3'-phosphate
  modified_base 19: mod_base = OTHER; note = 2'-O-methyladenosine-3'-phosphorothioate
  modified_base 20: mod_base = OTHER; note = 2'-O-methylguanosine-3'-phosphorothioate
  modified_base 21: mod_base = OTHER; note = 2'-O-methyladenosine
catggccactatgcccacaga

SEQ ID NO: 2568 - RNA, 21 nt, synthetic construct
  source 1..21: mol_type = other RNA
  modified_base 1: mod_base = OTHER; note = 2'-O-methyluridine-3'-phosphorothioate
  modified_base 2: mod_base = OTHER; note = 2'-O-methylguanosine-3'-phosphorothioate
  modified_base 3: mod_base = OTHER; note = 2'-O-methylcytidine-3'-phosphate
  modified_base 4: mod_base = OTHER; note = 2'-O-methylcytidine-3'-phosphate
  modified_base 5: mod_base = OTHER; note = 2'-O-methyluridine-3'-phosphate
  modified_base 6: mod_base = OTHER; note = 2'-O-methylcytidine-3'-phosphate
  modified_base 7: mod_base = OTHER; note = 2'-deoxy-2'-fluorocytidine-3'-phosphate
  modified_base 8: mod_base = OTHER; note = 2'-O-methyladenosine-3'-phosphate
  modified_base 9: mod_base = OTHER; note = 2'-deoxy-2'-fluorocytidine-3'-phosphate
  modified_base 10: mod_base = OTHER; note = 2'-deoxy-2'-fluoroguanosine-3'-phosphate
  modified_base 11: mod_base = OTHER; note = 2'-deoxy-2'-fluoroguanosine-3'-phosphate
  modified_base 12: mod_base = OTHER; note = 2'-O-methyluridine-3'-phosphate
  modified_base 13: mod_base = OTHER; note = 2'-O-methyluridine-3'-phosphate
  modified_base 14: mod_base = OTHER; note = 2'-O-methylcytidine-3'-phosphate
  modified_base 15: mod_base = OTHER; note = 2'-O-methylcytidine-3'-phosphate
  modified_base 16: mod_base = OTHER; note = 2'-O-methylcytidine-3'-phosphate
  modified_base 17: mod_base = OTHER; note = 2'-O-methyladenosine-3'-phosphate
  modified_base 18: mod_base = OTHER; note = 2'-O-methylguanosine-3'-phosphate
  modified_base 19: mod_base = OTHER; note = 2'-O-methylcytidine-3'-phosphorothioate
  modified_base 20: mod_base = OTHER; note = 2'-O-methyluridine-3'-phosphorothioate
  modified_base 21: mod_base = OTHER; note = 2'-O-methyladenosine
tgcctccacggttcccagcta

SEQ ID NO: 2569 - RNA, 21 nt, synthetic construct
  source 1..21: mol_type = other RNA
  modified_base 1: mod_base = OTHER; note = 2'-O-methylguanosine-3'-phosphorothioate
  modified_base 2: mod_base = OTHER; note = 2'-O-methylcytidine-3'-phosphorothioate
  modified_base 3: mod_base = OTHER; note = 2'-O-methylcytidine-3'-phosphate
  modified_base 4: mod_base = OTHER; note = 2'-O-methyladenosine-3'-phosphate
  modified_base 5: mod_base = OTHER; note = 2'-O-methyladenosine-3'-phosphate
  modified_base 6: mod_base = OTHER; note = 2'-O-methylcytidine-3'-phosphate
  modified_base 7: mod_base = OTHER; note = 2'-deoxy-2'-fluorocytidine-3'-phosphate
  modified_base 8: mod_base = OTHER; note = 2'-O-methyluridine-3'-phosphate
  modified_base 9: mod_base = OTHER; note = 2'-deoxy-2'-fluorouridine-3'-phosphate
  modified_base 10: mod_base = OTHER; note = 2'-deoxy-2'-fluorocytidine-3'-phosphate
  modified_base 11: mod_base = OTHER; note = 2'-deoxy-2'-fluoroadenosine-3'-phosphate
  modified_base 12: mod_base = OTHER; note = 2'-O-methylguanosine-3'-phosphate
  modified_base 13: mod_base = OTHER; note = 2'-O-methylcytidine-3'-phosphate
  modified_base 14: mod_base = OTHER; note = 2'-O-methylguanosine-3'-phosphate
  modified_base 15: mod_base = OTHER; note = 2'-O-methyluridine-3'-phosphate
  modified_base 16: mod_base = OTHER; note = 2'-O-methylguanosine-3'-phosphate
  modified_base 17: mod_base = OTHER; note = 2'-O-methyluridine-3'-phosphate
  modified_base 18: mod_base = OTHER; note = 2'-O-methylcytidine-3'-phosphate
  modified_base 19: mod_base = OTHER; note = 2'-O-methylcytidine-3'-phosphorothioate
  modified_base 20: mod_base = OTHER; note = 2'-O-methyladenosine-3'-phosphorothioate
  modified_base 21: mod_base = OTHER; note = 2'-O-methyladenosine
gccaaccttcagcgtgtccaa

SEQ ID NO: 2570 - RNA, 21 nt, synthetic construct
  source 1..21: mol_type = other RNA
  modified_base 1: mod_base = OTHER; note = 2'-O-methyluridine-3'-phosphorothioate
  modified_base 2: mod_base = OTHER; note = 2'-O-methylcytidine-3'-phosphorothioate
  modified_base 3: mod_base = OTHER; note = 2'-O-methylcytidine-3'-phosphate
  modified_base 4: mod_base = OTHER; note = 2'-O-methyluridine-3'-phosphate
  modified_base 5: mod_base = OTHER; note = 2'-O-methylcytidine-3'-phosphate
  modified_base 6: mod_base = OTHER; note = 2'-O-methylcytidine-3'-phosphate
  modified_base 7: mod_base = OTHER; note = 2'-deoxy-2'-fluorouridine-3'-phosphate
  modified_base 8: mod_base = OTHER; note = 2'-O-methylcytidine-3'-phosphate
  modified_base 9: mod_base = OTHER; note = 2'-deoxy-2'-fluoroadenosine-3'-phosphate
  modified_base 10: mod_base = OTHER; note = 2'-deoxy-2'-fluoroguanosine-3'-phosphate
  modified_base 11: mod_base = OTHER; note = 2'-deoxy-2'-fluorouridine-3'-phosphate
  modified_base 12: mod_base = OTHER; note = 2'-O-methylcytidine-3'-phosphate
  modified_base 13: mod_base = OTHER; note = 2'-O-methylcytidine-3'-phosphate
  modified_base 14: mod_base = OTHER; note = 2'-O-methyluridine-3'-phosphate
  modified_base 15: mod_base = OTHER; note = 2'-O-methylcytidine-3'-phosphate
  modified_base 16: mod_base = OTHER; note = 2'-O-methyladenosine-3'-phosphate
  modified_base 17: mod_base = OTHER; note = 2'-O-methylcytidine-3'-phosphate
  modified_base 18: mod_base = OTHER; note = 2'-O-methylcytidine-3'-phosphate
  modified_base 19: mod_base = OTHER; note = 2'-O-methyladenosine-3'-phosphorothioate
  modified_base 20: mod_base = OTHER; note = 2'-O-methylcytidine-3'-phosphorothioate
  modified_base 21: mod_base = OTHER; note = 2'-O-methyladenosine
tcctcctcagtcctcaccaca

SEQ ID NO: 2571 - RNA, 21 nt, synthetic construct
  source 1..21: mol_type = other RNA
  modified_base 1: mod_base = OTHER; note = 2'-O-methyluridine-3'-phosphorothioate
  modified_base 2: mod_base = OTHER; note = 2'-O-methylcytidine-3'-phosphorothioate
  modified_base 3: mod_base = OTHER; note = 2'-O-methylcytidine-3'-phosphate
  modified_base 4: mod_base = OTHER; note = 2'-O-methylcytidine-3'-phosphate
  modified_base 5: mod_base = OTHER; note = 2'-O-methyladenosine-3'-phosphate
  modified_base 6: mod_base = OTHER; note = 2'-O-methylcytidine-3'-phosphate
  modified_base 7: mod_base = OTHER; note = 2'-deoxy-2'-fluorouridine-3'-phosphate
  modified_base 8: mod_base = OTHER; note = 2'-O-methyluridine-3'-phosphate
  modified_base 9: mod_base = OTHER; note = 2'-deoxy-2'-fluorocytidine-3'-phosphate
  modified_base 10: mod_base = OTHER; note = 2'-deoxy-2'-fluorouridine-3'-phosphate
  modified_base 11: mod_base = OTHER; note = 2'-deoxy-2'-fluorocytidine-3'-phosphate
  modified_base 12: mod_base = OTHER; note = 2'-O-methyluridine-3'-phosphate
  modified_base 13: mod_base = OTHER; note = 2'-O-methyladenosine-3'-phosphate
  modified_base 14: mod_base = OTHER; note = 2'-O-methylcytidine-3'-phosphate
  modified_base 15: mod_base = OTHER; note = 2'-O-methyluridine-3'-phosphate
  modified_base 16: mod_base = OTHER; note = 2'-O-methylcytidine-3'-phosphate
  modified_base 17: mod_base = OTHER; note = 2'-O-methylcytidine-3'-phosphate
  modified_base 18: mod_base = OTHER; note = 2'-O-methylcytidine-3'-phosphate
  modified_base 19: mod_base = OTHER; note = 2'-O-methyluridine-3'-phosphorothioate
  modified_base 20: mod_base = OTHER; note = 2'-O-methylguanosine-3'-phosphorothioate
  modified_base 21: mod_base = OTHER; note = 2'-O-methyladenosine
tcccacttctctactccctga

SEQ ID NO: 2572 - RNA, 21 nt, synthetic construct
  source 1..21: mol_type = other RNA
  modified_base 1: mod_base = OTHER; note = 2'-O-methylguanosine-3'-phosphorothioate
  modified_base 2: mod_base = OTHER; note = 2'-O-methylcytidine-3'-phosphorothioate
  modified_base 3: mod_base = OTHER; note = 2'-O-methyladenosine-3'-phosphate
  modified_base 4: mod_base = OTHER; note = 2'-O-methyluridine-3'-phosphate
  modified_base 5: mod_base = OTHER; note = 2'-O-methyluridine-3'-phosphate
  modified_base 6: mod_base = OTHER; note = 2'-O-methyluridine-3'-phosphate
  modified_base 7: mod_base = OTHER; note = 2'-deoxy-2'-fluoroguanosine-3'-phosphate
  modified_base 8: mod_base = OTHER; note = 2'-O-methylguanosine-3'-phosphate
  modified_base 9: mod_base = OTHER; note = 2'-deoxy-2'-fluoroadenosine-3'-phosphate
  modified_base 10: mod_base = OTHER; note = 2'-deoxy-2'-fluorocytidine-3'-phosphate
  modified_base 11: mod_base = OTHER; note = 2'-deoxy-2'-fluoroadenosine-3'-phosphate
  modified_base 12: mod_base = OTHER; note = 2'-O-methylguanosine-3'-phosphate
  modified_base 13: mod_base = OTHER; note = 2'-O-methyluridine-3'-phosphate
  modified_base 14: mod_base = OTHER; note = 2'-O-methyluridine-3'-phosphate
  modified_base 15: mod_base = OTHER; note = 2'-O-methyluridine-3'-phosphate
  modified_base 16: mod_base = OTHER; note = 2'-O-methyluridine-3'-phosphate
  modified_base 17: mod_base = OTHER; note = 2'-O-methyluridine-3'-phosphate
  modified_base 18: mod_base = OTHER; note = 2'-O-methylcytidine-3'-phosphate
  modified_base 19: mod_base = OTHER; note = 2'-O-methyluridine-3'-phosphorothioate
  modified_base 20: mod_base = OTHER; note = 2'-O-methylcytidine-3'-phosphorothioate
  modified_base 21: mod_base = OTHER; note = 2'-O-methyladenosine
gcatttggacagtttttctca

SEQ ID NO: 2573 - RNA, 21 nt, synthetic construct
  source 1..21: mol_type = other RNA
  modified_base 1: mod_base = OTHER; note = 2'-O-methylguanosine-3'-phosphorothioate
  modified_base 2: mod_base = OTHER; note = 2'-O-methyladenosine-3'-phosphorothioate
  modified_base 3: mod_base = OTHER; note = 2'-O-methyladenosine-3'-phosphate
  modified_base 4: mod_base = OTHER; note = 2'-O-methylguanosine-3'-phosphate
  modified_base 5: mod_base = OTHER; note = 2'-O-methyluridine-3'-phosphate
  modified_base 6: mod_base = OTHER; note = 2'-O-methylcytidine-3'-phosphate
  modified_base 7: mod_base = OTHER; note = 2'-deoxy-2'-fluoroadenosine-3'-phosphate
  modified_base 8: mod_base = OTHER; note = 2'-O-methyluridine-3'-phosphate
  modified_base 9: mod_base = OTHER; note = 2'-deoxy-2'-fluorocytidine-3'-phosphate
  modified_base 10: mod_base = OTHER; note = 2'-deoxy-2'-fluorouridine-3'-phosphate
  modified_base 11: mod_base = OTHER; note = 2'-deoxy-2'-fluoroadenosine-3'-phosphate
  modified_base 12: mod_base = OTHER; note = 2'-O-methylcytidine-3'-phosphate
  modified_base 13: mod_base = OTHER; note = 2'-O-methyladenosine-3'-phosphate
  modified_base 14: mod_base = OTHER; note = 2'-O-methyladenosine-3'-phosphate
  modified_base 15: mod_base = OTHER; note = 2'-O-methyluridine-3'-phosphate
  modified_base 16: mod_base = OTHER; note = 2'-O-methyladenosine-3'-phosphate
  modified_base 17: mod_base = OTHER; note = 2'-O-methyladenosine-3'-phosphate
  modified_base 18: mod_base = OTHER; note = 2'-O-methylguanosine-3'-phosphate
  modified_base 19: mod_base = OTHER; note = 2'-O-methyladenosine-3'-phosphorothioate
  modified_base 20: mod_base = OTHER; note = 2'-O-methylcytidine-3'-phosphorothioate
  modified_base 21: mod_base = OTHER; note = 2'-O-methyladenosine
gaagtcatctacaataagaca

SEQ ID NO: 2574 - RNA, 21 nt, synthetic construct
  source 1..21: mol_type = other RNA
  modified_base 1: mod_base = OTHER; note = 2'-O-methylcytidine-3'-phosphorothioate
  modified_base 2: mod_base = OTHER; note = 2'-O-methyluridine-3'-phosphorothioate
  modified_base 3: mod_base = OTHER; note = 2'-O-methylguanosine-3'-phosphate
  modified_base 4: mod_base = OTHER; note = 2'-O-methylcytidine-3'-phosphate
  modified_base 5: mod_base = OTHER; note = 2'-O-methylcytidine-3'-phosphate
  modified_base 6: mod_base = OTHER; note = 2'-O-methyladenosine-3'-phosphate
  modified_base 7: mod_base = OTHER; note = 2'-deoxy-2'-fluorouridine-3'-phosphate
  modified_base 8: mod_base = OTHER; note = 2'-O-methyluridine-3'-phosphate
  modified_base 9: mod_base = OTHER; note = 2'-deoxy-2'-fluorouridine-3'-phosphate
  modified_base 10: mod_base = OTHER; note = 2'-deoxy-2'-fluorocytidine-3'-phosphate
  modified_base 11: mod_base = OTHER; note = 2'-deoxy-2'-fluorouridine-3'-phosphate
  modified_base 12: mod_base = OTHER; note = 2'-O-methyladenosine-3'-phosphate
  modified_base 13: mod_base = OTHER; note = 2'-O-methylcytidine-3'-phosphate
  modified_base 14: mod_base = OTHER; note = 2'-O-methylguanosine-3'-phosphate
  modified_base 15: mod_base = OTHER; note = 2'-O-methylcytidine-3'-phosphate
  modified_base 16: mod_base = OTHER; note = 2'-O-methyladenosine-3'-phosphate
  modified_base 17: mod_base = OTHER; note = 2'-O-methylguanosine-3'-phosphate
  modified_base 18: mod_base = OTHER; note = 2'-O-methyluridine-3'-phosphate
  modified_base 19: mod_base = OTHER; note = 2'-O-methylguanosine-3'-phosphorothioate
  modified_base 20: mod_base = OTHER; note = 2'-O-methyluridine-3'-phosphorothioate
  modified_base 21: mod_base = OTHER; note = 2'-O-methyladenosine
ctgccatttctacgcagtgta

SEQ ID NO: 2575 - RNA, 21 nt, synthetic construct
  source 1..21: mol_type = other RNA
  modified_base 1: mod_base = OTHER; note = 2'-O-methylcytidine-3'-phosphorothioate
  modified_base 2: mod_base = OTHER; note = 2'-O-methyladenosine-3'-phosphorothioate
  modified_base 3: mod_base = OTHER; note = 2'-O-methylcytidine-3'-phosphate
  modified_base 4: mod_base = OTHER; note = 2'-O-methyluridine-3'-phosphate
  modified_base 5: mod_base = OTHER; note = 2'-O-methylguanosine-3'-phosphate
  modified_base 6: mod_base = OTHER; note = 2'-O-methyluridine-3'-phosphate
  modified_base 7: mod_base = OTHER; note = 2'-deoxy-2'-fluoroguanosine-3'-phosphate
  modified_base 8: mod_base = OTHER; note = 2'-O-methyladenosine-3'-phosphate
  modified_base 9: mod_base = OTHER; note = 2'-deoxy-2'-fluorocytidine-3'-phosphate
  modified_base 10: mod_base = OTHER; note = 2'-deoxy-2'-fluoroadenosine-3'-phosphate
  modified_base 11: mod_base = OTHER; note = 2'-deoxy-2'-fluorouridine-3'-phosphate
  modified_base 12: mod_base = OTHER; note = 2'-O-methyluridine-3'-phosphate
  modified_base 13: mod_base = OTHER; note = 2'-O-methylguanosine-3'-phosphate
  modified_base 14: mod_base = OTHER; note = 2'-O-methyladenosine-3'-phosphate
  modified_base 15: mod_base = OTHER; note = 2'-O-methylcytidine-3'-phosphate
  modified_base 16: mod_base = OTHER; note = 2'-O-methylcytidine-3'-phosphate
  modified_base 17: mod_base = OTHER; note = 2'-O-methylguanosine-3'-phosphate
  modified_base 18: mod_base = OTHER; note = 2'-O-methylcytidine-3'-phosphate
  modified_base 19: mod_base = OTHER; note = 2'-O-methyluridine-3'-phosphorothioate
  modified_base 20: mod_base = OTHER; note = 2'-O-methyluridine-3'-phosphorothioate
  modified_base 21: mod_base = OTHER; note = 2'-O-methyladenosine
cactgtgacattgaccgctta

SEQ ID NO: 2576 - RNA, 21 nt, synthetic construct
  source 1..21: mol_type = other RNA
  modified_base 1: mod_base = OTHER; note = 2'-O-methyluridine-3'-phosphorothioate
  modified_base 2: mod_base = OTHER; note = 2'-O-methylguanosine-3'-phosphorothioate
  modified_base 3: mod_base = OTHER; note = 2'-O-methyluridine-3'-phosphate
  modified_base 4: mod_base = OTHER; note = 2'-O-methylguanosine-3'-phosphate
  modified_base 5: mod_base = OTHER; note = 2'-O-methyladenosine-3'-phosphate
  modified_base 6: mod_base = OTHER; note = 2'-O-methylcytidine-3'-phosphate
  modified_base 7: mod_base = OTHER; note = 2'-deoxy-2'-fluoroadenosine-3'-phosphate
  modified_base 8: mod_base = OTHER; note = 2'-O-methyladenosine-3'-phosphate
  modified_base 9: mod_base = OTHER; note = 2'-deoxy-2'-fluorouridine-3'-phosphate
  modified_base 10: mod_base = OTHER; note = 2'-deoxy-2'-fluoroguanosine-3'-phosphate
  modified_base 11: mod_base = OTHER; note = 2'-deoxy-2'-fluorocytidine-3'-phosphate
  modified_base 12: mod_base = OTHER; note = 2'-O-methylcytidine-3'-phosphate
  modified_base 13: mod_base = OTHER; note = 2'-O-methyladenosine-3'-phosphate
  modified_base 14: mod_base = OTHER; note = 2'-O-methyluridine-3'-phosphate
  modified_base 15: mod_base = OTHER; note = 2'-O-methylcytidine-3'-phosphate
  modified_base 16: mod_base = OTHER; note = 2'-O-methylcytidine-3'-phosphate
  modified_base 17: mod_base = OTHER; note = 2'-O-methylcytidine-3'-phosphate
  modified_base 18: mod_base = OTHER; note = 2'-O-methyluridine-3'-phosphate
  modified_base 19: mod_base = OTHER; note = 2'-O-methylcytidine-3'-phosphorothioate
  modified_base 20: mod_base = OTHER; note = 2'-O-methyluridine-3'-phosphorothioate
  modified_base 21: mod_base = OTHER; note = 2'-O-methyladenosine
tgtgacaatgccatccctcta

SEQ ID NO: 2577 - RNA, 21 nt, synthetic construct
  source 1..21: mol_type = other RNA
  modified_base 1: mod_base = OTHER; note = 2'-O-methyladenosine-3'-phosphorothioate
  modified_base 2: mod_base = OTHER; note = 2'-O-methylcytidine-3'-phosphorothioate
  modified_base 3: mod_base = OTHER; note = 2'-O-methylcytidine-3'-phosphate
  modified_base 4: mod_base = OTHER; note = 2'-O-methylcytidine-3'-phosphate
  modified_base 5: mod_base = OTHER; note = 2'-O-methyluridine-3'-phosphate
  modified_base 6: mod_base = OTHER; note = 2'-O-methylguanosine-3'-phosphate
  modified_base 7: mod_base = OTHER; note = 2'-deoxy-2'-fluoroguanosine-3'-phosphate
  modified_base 8: mod_base = OTHER; note = 2'-O-methyladenosine-3'-phosphate
  modified_base 9: mod_base = OTHER; note = 2'-deoxy-2'-fluoroguanosine-3'-phosphate
  modified_base 10: mod_base = OTHER; note = 2'-deoxy-2'-fluoroadenosine-3'-phosphate
  modified_base 11: mod_base = OTHER; note = 2'-deoxy-2'-fluoroadenosine-3'-phosphate
  modified_base 12: mod_base = OTHER; note = 2'-O-methylcytidine-3'-phosphate
  modified_base 13: mod_base = OTHER; note = 2'-O-methyluridine-3'-phosphate
  modified_base 14: mod_base = OTHER; note = 2'-O-methylguanosine-3'-phosphate
  modified_base 15: mod_base = OTHER; note = 2'-O-methylcytidine-3'-phosphate
  modified_base 16: mod_base = OTHER; note = 2'-O-methyladenosine-3'-phosphate
  modified_base 17: mod_base = OTHER; note = 2'-O-methylcytidine-3'-phosphate
  modified_base 18: mod_base = OTHER; note = 2'-O-methylguanosine-3'-phosphate
  modified_base 19: mod_base = OTHER; note = 2'-O-methylguanosine-3'-phosphorothioate
  modified_base 20: mod_base = OTHER; note = 2'-O-methyluridine-3'-phosphorothioate
  modified_base 21: mod_base = OTHER; note = 2'-O-methyladenosine
accctggagaactgcacggta

SEQ ID NO: 2578 - RNA, 21 nt, synthetic construct
  source 1..21: mol_type = other RNA
  modified_base 1: mod_base = OTHER; note = 2'-O-methylguanosine-3'-phosphorothioate
  modified_base 2: mod_base = OTHER; note = 2'-O-methyluridine-3'-phosphorothioate
  modified_base 3: mod_base = OTHER; note = 2'-O-methylguanosine-3'-phosphate
  modified_base 4: mod_base = OTHER; note = 2'-O-methylguanosine-3'-phosphate
  modified_base 5: mod_base = OTHER; note = 2'-O-methylguanosine-3'-phosphate
  modified_base 6: mod_base = OTHER; note = 2'-O-methyluridine-3'-phosphate
  modified_base 7: mod_base = OTHER; note = 2'-deoxy-2'-fluoroguanosine-3'-phosphate
  modified_base 8: mod_base = OTHER; note = 2'-O-methyladenosine-3'-phosphate
  modified_base 9: mod_base = OTHER; note = 2'-deoxy-2'-fluorocytidine-3'-phosphate
  modified_base 10: mod_base = OTHER; note = 2'-deoxy-2'-fluoroadenosine-3'-phosphate
  modified_base 11: mod_base = OTHER; note = 2'-deoxy-2'-fluoroadenosine-3'-phosphate
  modified_base 12: mod_base = OTHER; note = 2'-O-methylcytidine-3'-phosphate
  modified_base 13: mod_base = OTHER; note = 2'-O-methylcytidine-3'-phosphate
  modified_base 14: mod_base = OTHER; note = 2'-O-methylguanosine-3'-phosphate
  modified_base 15: mod_base = OTHER; note = 2'-O-methyluridine-3'-phosphate
  modified_base 16: mod_base = OTHER; note = 2'-O-methylguanosine-3'-phosphate
  modified_base 17: mod_base = OTHER; note = 2'-O-methyluridine-3'-phosphate
  modified_base 18: mod_base = OTHER; note = 2'-O-methylcytidine-3'-phosphate
  modified_base 19: mod_base = OTHER; note = 2'-O-methylguanosine-3'-phosphorothioate
  modified_base 20: mod_base = OTHER; note = 2'-O-methyluridine-3'-phosphorothioate
  modified_base 21: mod_base = OTHER; note = 2'-O-methyladenosine
gtgggtgacaaccgtgtcgta

SEQ ID NO: 2579 - RNA, 21 nt, synthetic construct
  source 1..21: mol_type = other RNA
  modified_base 1: mod_base = OTHER; note = 2'-O-methylguanosine-3'-phosphorothioate
  modified_base 2: mod_base = OTHER; note = 2'-O-methyladenosine-3'-phosphorothioate
  modified_base 3: mod_base = OTHER; note = 2'-O-methylcytidine-3'-phosphate
  modified_base 4: mod_base = OTHER; note = 2'-O-methylcytidine-3'-phosphate
  modified_base 5: mod_base = OTHER; note = 2'-O-methylcytidine-3'-phosphate
  modified_base 6: mod_base = OTHER; note = 2'-O-methyladenosine-3'-phosphate
  modified_base 7: mod_base = OTHER; note = 2'-deoxy-2'-fluoroadenosine-3'-phosphate
  modified_base 8: mod_base = OTHER; note = 2'-O-methyladenosine-3'-phosphate
  modified_base 9: mod_base = OTHER; note = 2'-deoxy-2'-fluoroguanosine-3'-phosphate
  modified_base 10: mod_base = OTHER; note = 2'-deoxy-2'-fluorocytidine-3'-phosphate
  modified_base 11: mod_base = OTHER; note = 2'-deoxy-2'-fluorocytidine-3'-phosphate
  modified_base 12: mod_base = OTHER; note = 2'-O-methyluridine-3'-phosphate
  modified_base 13: mod_base = OTHER; note = 2'-O-methylguanosine-3'-phosphate
  modified_base 14: mod_base = OTHER; note = 2'-O-methyluridine-3'-phosphate
  modified_base 15: mod_base = OTHER; note = 2'-O-methylguanosine-3'-phosphate
  modified_base 16: mod_base = OTHER; note = 2'-O-methylguanosine-3'-phosphate
  modified_base 17: mod_base = OTHER; note = 2'-O-methylcytidine-3'-phosphate
  modified_base 18: mod_base = OTHER; note = 2'-O-methylcytidine-3'-phosphate
  modified_base 19: mod_base = OTHER; note = 2'-O-methyladenosine-3'-phosphorothioate
  modified_base 20: mod_base = OTHER; note = 2'-O-methyladenosine-3'-phosphorothioate
  modified_base 21: mod_base = OTHER; note = 2'-O-methyladenosine
gacccaaagcctgtggccaaa

SEQ ID NO: 2580 - RNA, 21 nt, synthetic construct
  source 1..21: mol_type = other RNA
  modified_base 1: mod_base = OTHER; note = 2'-O-methylcytidine-3'-phosphorothioate
  modified_base 2: mod_base = OTHER; note = 2'-O-methyluridine-3'-phosphorothioate
  modified_base 3: mod_base = OTHER; note = 2'-O-methylguanosine-3'-phosphate
  modified_base 4: mod_base = OTHER; note = 2'-O-methylcytidine-3'-phosphate
  modified_base 5: mod_base = OTHER; note = 2'-O-methylguanosine-3'-phosphate
  modified_base 6: mod_base = OTHER; note = 2'-O-methyluridine-3'-phosphate
  modified_base 7: mod_base = OTHER; note = 2'-deoxy-2'-fluoroguanosine-3'-phosphate
  modified_base 8: mod_base = OTHER; note = 2'-O-methyladenosine-3'-phosphate
  modified_base 9: mod_base = OTHER; note = 2'-deoxy-2'-fluoroadenosine-3'-phosphate
  modified_base 10: mod_base = OTHER; note = 2'-deoxy-2'-fluorocytidine-3'-phosphate
  modified_base 11: mod_base = OTHER; note = 2'-deoxy-2'-fluoroadenosine-3'-phosphate
  modified_base 12: mod_base = OTHER; note = 2'-O-methyladenosine-3'-phosphate
  modified_base 13: mod_base = OTHER; note = 2'-O-methylguanosine-3'-phosphate
  modified_base 14: mod_base = OTHER; note = 2'-O-methylcytidine-3'-phosphate
  modified_base 15: mod_base = OTHER; note = 2'-O-methyladenosine-3'-phosphate
  modified_base 16: mod_base = OTHER; note = 2'-O-methylcytidine-3'-phosphate
  modified_base 17: mod_base = OTHER; note = 2'-O-methylcytidine-3'-phosphate
  modified_base 18: mod_base = OTHER; note = 2'-O-methyluridine-3'-phosphate
  modified_base 19: mod_base = OTHER; note = 2'-O-methylguanosine-3'-phosphorothioate
  modified_base 20: mod_base = OTHER; note = 2'-O-methylcytidine-3'-phosphorothioate
  modified_base 21: mod_base = OTHER; note = 2'-O-methyladenosine
ctgcgtgaacaagcacctgca

SEQ ID NO: 2581 - RNA, 21 nt, synthetic construct
  source 1..21: mol_type = other RNA
  modified_base 1: mod_base = OTHER; note = 2'-O-methyluridine-3'-phosphorothioate
  modified_base 2: mod_base = OTHER; note = 2'-O-methylcytidine-3'-phosphorothioate
  modified_base 3: mod_base = OTHER; note = 2'-O-methyladenosine-3'-phosphate
  modified_base 4: mod_base = OTHER; note = 2'-O-methyladenosine-3'-phosphate
  modified_base 5: mod_base = OTHER; note = 2'-O-methyladenosine-3'-phosphate
  modified_base 6: mod_base = OTHER; note = 2'-O-methylguanosine-3'-phosphate
  modified_base 7: mod_base = OTHER; note = 2'-deoxy-2'-fluorouridine-3'-phosphate
  modified_base 8: mod_base = OTHER; note = 2'-O-methylguanosine-3'-phosphate
  modified_base 9: mod_base = OTHER; note = 2'-deoxy-2'-fluorouridine-3'-phosphate
  modified_base 10: mod_base = OTHER; note = 2'-deoxy-2'-fluorocytidine-3'-phosphate
  modified_base 11: mod_base = OTHER; note = 2'-deoxy-2'-fluoroguanosine-3'-phosphate
  modified_base 12: mod_base = OTHER; note = 2'-O-methylguanosine-3'-phosphate
  modified_base 13: mod_base = OTHER; note = 2'-O-methyladenosine-3'-phosphate
  modified_base 14: mod_base = OTHER; note = 2'-O-methylcytidine-3'-phosphate
  modified_base 15: mod_base = OTHER; note = 2'-O-methylcytidine-3'-phosphate
  modified_base 16: mod_base = OTHER; note = 2'-O-methylcytidine-3'-phosphate
  modified_base 17: mod_base = OTHER; note = 2'-O-methylguanosine-3'-phosphate
  modified_base 18: mod_base = OTHER; note = 2'-O-methyladenosine-3'-phosphate
  modified_base 19: mod_base = OTHER; note = 2'-O-methylguanosine-3'-phosphorothioate
  modified_base 20: mod_base = OTHER; note = 2'-O-methylcytidine-3'-phosphorothioate
  modified_base 21: mod_base = OTHER; note = 2'-O-methyladenosine
tcaaagtgtcggacccgagca

SEQ ID NO: 2582 - RNA, 21 nt, synthetic construct
  source 1..21: mol_type = other RNA
  modified_base 1: mod_base = OTHER; note = 2'-O-methylcytidine-3'-phosphorothioate
  modified_base 2: mod_base = OTHER; note = 2'-O-methylcytidine-3'-phosphorothioate
  modified_base 3: mod_base = OTHER; note = 2'-O-methyluridine-3'-phosphate
  modified_base 4: mod_base = OTHER; note = 2'-O-methylguanosine-3'-phosphate
  modified_base 5: mod_base = OTHER; note = 2'-O-methyluridine-3'-phosphate
  modified_base 6: mod_base = OTHER; note = 2'-O-methylguanosine-3'-phosphate
  modified_base 7: mod_base = OTHER; note = 2'-deoxy-2'-fluoroadenosine-3'-phosphate
  modified_base 8: mod_base = OTHER; note = 2'-O-methylcytidine-3'-phosphate
  modified_base 9: mod_base = OTHER; note = 2'-deoxy-2'-fluorouridine-3'-phosphate
  modified_base 10: mod_base = OTHER; note = 2'-deoxy-2'-fluorouridine-3'-phosphate
  modified_base 11: mod_base = OTHER; note = 2'-deoxy-2'-fluorocytidine-3'-phosphate
  modified_base 12: mod_base = OTHER; note = 2'-O-methylcytidine-3'-phosphate
  modified_base 13: mod_base = OTHER; note = 2'-O-methyladenosine-3'-phosphate
  modified_base 14: mod_base = OTHER; note = 2'-O-methylcytidine-3'-phosphate
  modified_base 15: mod_base = OTHER; note = 2'-O-methyluridine-3'-phosphate
  modified_base 16: mod_base = OTHER; note = 2'-O-methyladenosine-3'-phosphate
  modified_base 17: mod_base = OTHER; note = 2'-O-methyluridine-3'-phosphate
  modified_base 18: mod_base = OTHER; note = 2'-O-methylguanosine-3'-phosphate
  modified_base 19: mod_base = OTHER; note = 2'-O-methyladenosine-3'-phosphorothioate
  modified_base 20: mod_base = OTHER; note = 2'-O-methylguanosine-3'-phosphorothioate
  modified_base 21: mod_base = OTHER; note = 2'-O-methyladenosine
cctgtgacttccactatgaga

SEQ ID NO: 2583 - RNA, 21 nt, synthetic construct
  source 1..21: mol_type = other RNA
  modified_base 1: mod_base = OTHER; note = 2'-O-methylguanosine-3'-phosphorothioate
  modified_base 2: mod_base = OTHER; note = 2'-O-methyladenosine-3'-phosphorothioate
  modified_base 3: mod_base = OTHER; note = 2'-O-methylguanosine-3'-phosphate
  modified_base 4: mod_base = OTHER; note = 2'-O-methyluridine-3'-phosphate
  modified_base 5: mod_base = OTHER; note = 2'-O-methylguanosine-3'-phosphate
  modified_base 6: mod_base = OTHER; note = 2'-O-methylcytidine-3'-phosphate
  modified_base 7: mod_base = OTHER; note = 2'-deoxy-2'-fluoroadenosine-3'-phosphate
  modified_base 8: mod_base = OTHER; note = 2'-O-methyluridine-3'-phosphate
  modified_base 9: mod_base = OTHER; note = 2'-deoxy-2'-fluorocytidine-3'-phosphate
  modified_base 10: mod_base = OTHER; note = 2'-deoxy-2'-fluorouridine-3'-phosphate
  modified_base 11: mod_base = OTHER; note = 2'-deoxy-2'-fluoroguanosine-3'-phosphate
  modified_base 12: mod_base = OTHER; note = 2'-O-methylcytidine-3'-phosphate
  modified_base 13: mod_base = OTHER; note = 2'-O-methyladenosine-3'-phosphate
  modified_base 14: mod_base = OTHER; note = 2'-O-methylguanosine-3'-phosphate
  modified_base 15: mod_base = OTHER; note = 2'-O-methylcytidine-3'-phosphate
  modified_base 16: mod_base = OTHER; note = 2'-O-methyladenosine-3'-phosphate
  modified_base 17: mod_base = OTHER; note = 2'-O-methyluridine-3'-phosphate
  modified_base 18: mod_base = OTHER; note = 2'-O-methylguanosine-3'-phosphate
  modified_base 19: mod_base = OTHER; note = 2'-O-methyluridine-3'-phosphorothioate
  modified_base 20: mod_base = OTHER; note = 2'-O-methylguanosine-3'-phosphorothioate
  modified_base 21: mod_base = OTHER; note = 2'-O-methyladenosine
gagtgcatctgcagcatgtga

SEQ ID NO: 2584 - RNA, 21 nt, synthetic construct
  source 1..21: mol_type = other RNA
  modified_base 1: mod_base = OTHER; note = 2'-O-methylcytidine-3'-phosphorothioate
  modified_base 2: mod_base = OTHER; note = 2'-O-methylcytidine-3'-phosphorothioate
  modified_base 3: mod_base = OTHER; note = 2'-O-methylcytidine-3'-phosphate
  modified_base 4: mod_base = OTHER; note = 2'-O-methyladenosine-3'-phosphate
  modified_base 5: mod_base = OTHER; note = 2'-O-methylcytidine-3'-phosphate
  modified_base 6: mod_base = OTHER; note = 2'-O-methyluridine-3'-phosphate
  modified_base 7: mod_base = OTHER; note = 2'-deoxy-2'-fluoroadenosine-3'-phosphate
  modified_base 8: mod_base = OTHER; note = 2'-O-methyluridine-3'-phosphate
  modified_base 9: mod_base = OTHER; note = 2'-deoxy-2'-fluorouridine-3'-phosphate
  modified_base 10: mod_base = OTHER; note = 2'-deoxy-2'-fluorocytidine-3'-phosphate
  modified_base 11: mod_base = OTHER; note = 2'-deoxy-2'-fluorocytidine-3'-phosphate
  modified_base 12: mod_base = OTHER; note = 2'-O-methyladenosine-3'-phosphate
  modified_base 13: mod_base = OTHER; note = 2'-O-methylcytidine-3'-phosphate
  modified_base 14: mod_base = OTHER; note = 2'-O-methylcytidine-3'-phosphate
  modified_base 15: mod_base = OTHER; note = 2'-O-methyluridine-3'-phosphate
  modified_base 16: mod_base = OTHER; note = 2'-O-methyluridine-3'-phosphate
  modified_base 17: mod_base = OTHER; note = 2'-O-methyluridine-3'-phosphate
  modified_base 18: mod_base = OTHER; note = 2'-O-methylguanosine-3'-phosphate
  modified_base 19: mod_base = OTHER; note = 2'-O-methyladenosine-3'-phosphorothioate
  modified_base 20: mod_base = OTHER; note = 2'-O-methylcytidine-3'-phosphorothioate
  modified_base 21: mod_base = OTHER; note = 2'-O-methyladenosine
cccactattccacctttgaca

SEQ ID NO: 2585 - RNA, 21 nt, synthetic construct
  source 1..21: mol_type = other RNA
  modified_base 1: mod_base = OTHER; note = 2'-O-methyladenosine-3'-phosphorothioate
  modified_base 2: mod_base = OTHER; note = 2'-O-methylcytidine-3'-phosphorothioate
  modified_base 3: mod_base = OTHER; note = 2'-O-methylcytidine-3'-phosphate
  modified_base 4: mod_base = OTHER; note = 2'-O-methyluridine-3'-phosphate
  modified_base 5: mod_base = OTHER; note = 2'-O-methyladenosine-3'-phosphate
  modified_base 6: mod_base = OTHER; note = 2'-O-methyluridine-3'-phosphate
  modified_base 7: mod_base = OTHER; note = 2'-deoxy-2'-fluoroguanosine-3'-phosphate
  modified_base 8: mod_base = OTHER; note = 2'-O-methyluridine-3'-phosphate
  modified_base 9: mod_base = OTHER; note = 2'-deoxy-2'-fluorocytidine-3'-phosphate
  modified_base 10: mod_base = OTHER; note = 2'-deoxy-2'-fluorocytidine-3'-phosphate
  modified_base 11: mod_base = OTHER; note = 2'-deoxy-2'-fluorouridine-3'-phosphate
  modified_base 12: mod_base = OTHER; note = 2'-O-methylcytidine-3'-phosphate
  modified_base 13: mod_base = OTHER; note = 2'-O-methyladenosine-3'-phosphate
  modified_base 14: mod_base = OTHER; note = 2'-O-methyluridine-3'-phosphate
  modified_base 15: mod_base = OTHER; note = 2'-O-methylguanosine-3'-phosphate
  modified_base 16: mod_base = OTHER; note = 2'-O-methyladenosine-3'-phosphate
  modified_base 17: mod_base = OTHER; note = 2'-O-methylguanosine-3'-phosphate
  modified_base 18: mod_base = OTHER; note = 2'-O-methyladenosine-3'-phosphate
  modified_base 19: mod_base = OTHER; note = 2'-O-methylguanosine-3'-phosphorothioate
  modified_base 20: mod_base = OTHER; note = 2'-O-methyladenosine-3'-phosphorothioate
  modified_base 21: mod_base = OTHER; note = 2'-O-methyladenosine
acctatgtcctcatgagagaa

SEQ ID NO: 2586 - RNA, 21 nt, synthetic construct
  source 1..21: mol_type = other RNA
  modified_base 1: mod_base = OTHER; note = 2'-O-methylcytidine-3'-phosphorothioate
  modified_base 2: mod_base = OTHER; note = 2'-O-methyladenosine-3'-phosphorothioate
  modified_base 3: mod_base = OTHER; note = 2'-O-methylcytidine-3'-phosphate
  modified_base 4: mod_base = OTHER; note = 2'-O-methylguanosine-3'-phosphate
  modified_base 5: mod_base = OTHER; note = 2'-O-methylcytidine-3'-phosphate
  modified_base 6: mod_base = OTHER; note = 2'-O-methyluridine-3'-phosphate
  modified_base 7: mod_base = OTHER; note = 2'-deoxy-2'-fluorouridine-3'-phosphate
  modified_base 8: mod_base = OTHER; note = 2'-O-methyluridine-3'-phosphate
  modified_base 9: mod_base = OTHER; note = 2'-deoxy-2'-fluoroguanosine-3'-phosphate
  modified_base 10: mod_base = OTHER; note = 2'-deoxy-2'-fluoroguanosine-3'-phosphate
  modified_base 11: mod_base = OTHER; note = 2'-deoxy-2'-fluoroguanosine-3'-phosphate
  modified_base 12: mod_base = OTHER; note = 2'-O-methyladenosine-3'-phosphate
  modified_base 13: mod_base = OTHER; note = 2'-O-methyladenosine-3'-phosphate
  modified_base 14: mod_base = OTHER; note = 2'-O-methyluridine-3'-phosphate
  modified_base 15: mod_base = OTHER; note = 2'-O-methylcytidine-3'-phosphate
  modified_base 16: mod_base = OTHER; note = 2'-O-methyluridine-3'-phosphate
  modified_base 17: mod_base = OTHER; note = 2'-O-methylcytidine-3'-phosphate
  modified_base 18: mod_base = OTHER; note = 2'-O-methyladenosine-3'-phosphate
  modified_base 19: mod_base = OTHER; note = 2'-O-methylguanosine-3'-phosphorothioate
  modified_base 20: mod_base = OTHER; note = 2'-O-methylcytidine-3'-phosphorothioate
  modified_base 21: mod_base = OTHER; note = 2'-O-methyladenosine
cacgctttgggaatctcagca

SEQ ID NO: 2587 - RNA, 21 nt, synthetic construct
  source 1..21: mol_type = other RNA
  modified_base 1: mod_base = OTHER; note = 2'-O-methylcytidine-3'-phosphorothioate
  modified_base 2: mod_base = OTHER; note = 2'-O-methyluridine-3'-phosphorothioate
  modified_base 3: mod_base = OTHER; note = 2'-O-methylguanosine-3'-phosphate
  modified_base 4: mod_base = OTHER; note = 2'-O-methylguanosine-3'-phosphate
  modified_base 5: mod_base = OTHER; note = 2'-O-methyladenosine-3'-phosphate
  modified_base 6: mod_base = OTHER; note = 2'-O-methylcytidine-3'-phosphate
  modified_base 7: mod_base = OTHER; note = 2'-deoxy-2'-fluoroadenosine-3'-phosphate
  modified_base 8: mod_base = OTHER; note = 2'-O-methyladenosine-3'-phosphate
  modified_base 9: mod_base = OTHER; note = 2'-deoxy-2'-fluorocytidine-3'-phosphate
  modified_base 10: mod_base = OTHER; note = 2'-deoxy-2'-fluorocytidine-3'-phosphate
  modified_base 11: mod_base = OTHER; note = 2'-deoxy-2'-fluoroadenosine-3'-phosphate
  modified_base 12: mod_base = OTHER; note = 2'-O-methylcytidine-3'-phosphate
  modified_base 13: mod_base = OTHER; note = 2'-O-methyluridine-3'-phosphate
  modified_base 14: mod_base = OTHER; note = 2'-O-methyladenosine-3'-phosphate
  modified_base 15: mod_base = OTHER; note = 2'-O-methylcytidine-3'-phosphate
  modified_base 16: mod_base = OTHER; note = 2'-O-methyluridine-3'-phosphate
  modified_base 17: mod_base = OTHER; note = 2'-O-methylguanosine-3'-phosphate
  modified_base 18: mod_base = OTHER; note = 2'-O-methylcytidine-3'-phosphate
  modified_base 19: mod_base = OTHER; note = 2'-O-methyladenosine-3'-phosphorothioate
  modified_base 20: mod_base = OTHER; note = 2'-O-methylcytidine-3'-phosphorothioate
  modified_base 21: mod_base = OTHER; note = 2'-O-methyladenosine
ctggacaaccactactgcaca

SEQ ID NO: 2588 - RNA, 21 nt, synthetic construct
  source 1..21: mol_type = other RNA
  modified_base 1: mod_base = OTHER; note = 2'-O-methylcytidine-3'-phosphorothioate
  modified_base 2: mod_base = OTHER; note = 2'-O-methyluridine-3'-phosphorothioate
  modified_base 3: mod_base = OTHER; note = 2'-O-methylcytidine-3'-phosphate
  modified_base 4: mod_base = OTHER; note = 2'-O-methyladenosine-3'-phosphate
  modified_base 5: mod_base = OTHER; note = 2'-O-methylguanosine-3'-phosphate
  modified_base 6: mod_base = OTHER; note = 2'-O-methylcytidine-3'-phosphate
  modified_base 7: mod_base = OTHER; note = 2'-deoxy-2'-fluoroadenosine-3'-phosphate
  modified_base 8: mod_base = OTHER; note = 2'-O-methyluridine-3'-phosphate
  modified_base 9: mod_base = OTHER; note = 2'-deoxy-2'-fluorocytidine-3'-phosphate
  modified_base 10: mod_base = OTHER; note = 2'-deoxy-2'-fluorocytidine-3'-phosphate
  modified_base 11: mod_base = OTHER; note = 2'-deoxy-2'-fluoroadenosine-3'-phosphate
  modified_base 12: mod_base = OTHER; note = 2'-O-methylcytidine-3'-phosphate
  modified_base 13: mod_base = OTHER; note = 2'-O-methyluridine-3'-phosphate
  modified_base 14: mod_base = OTHER; note = 2'-O-methyladenosine-3'-phosphate
  modified_base 15: mod_base = OTHER; note = 2'-O-methylcytidine-3'-phosphate
  modified_base 16: mod_base = OTHER; note = 2'-O-methyladenosine-3'-phosphate
  modified_base 17: mod_base = OTHER; note = 2'-O-methyladenosine-3'-phosphate
  modified_base 18: mod_base = OTHER; note = 2'-O-methylguanosine-3'-phosphate
  modified_base 19: mod_base = OTHER; note = 2'-O-methyluridine-3'-phosphorothioate
  modified_base 20: mod_base = OTHER; note = 2'-O-methylcytidine-3'-phosphorothioate
  modified_base 21: mod_base = OTHER; note = 2'-O-methyladenosine
ctcagcatccactacaagtca

SEQ ID NO: 2589 - RNA, 21 nt, synthetic construct
  source 1..21: mol_type = other RNA
  modified_base 1: mod_base = OTHER; note = 2'-O-methylguanosine-3'-phosphorothioate
  modified_base 2: mod_base = OTHER; note = 2'-O-methyluridine-3'-phosphorothioate
  modified_base 3: mod_base = OTHER; note = 2'-O-methylcytidine-3'-phosphate
  modified_base 4: mod_base = OTHER; note = 2'-O-methylcytidine-3'-phosphate
  modified_base 5: mod_base = OTHER; note = 2'-O-methyluridine-3'-phosphate
  modified_base 6: mod_base = OTHER; note = 2'-O-methylcytidine-3'-phosphate
  modified_base 7: mod_base = OTHER; note = 2'-deoxy-2'-fluoroadenosine-3'-phosphate
  modified_base 8: mod_base = OTHER; note = 2'-O-methylcytidine-3'-phosphate
  modified_base 9: mod_base = OTHER; note = 2'-deoxy-2'-fluorouridine-3'-phosphate
  modified_base 10: mod_base = OTHER; note = 2'-deoxy-2'-fluoroguanosine-3'-phosphate
  modified_base 11: mod_base = OTHER; note = 2'-deoxy-2'-fluorouridine-3'-phosphate
  modified_base 12: mod_base = OTHER; note = 2'-O-methylcytidine-3'-phosphate
  modified_base 13: mod_base = OTHER; note = 2'-O-methyladenosine-3'-phosphate
  modified_base 14: mod_base = OTHER; note = 2'-O-methylcytidine-3'-phosphate
  modified_base 15: mod_base = OTHER; note = 2'-O-methylcytidine-3'-phosphate
  modified_base 16: mod_base = OTHER; note = 2'-O-methyladenosine-3'-phosphate
  modified_base 17: mod_base = OTHER; note = 2'-O-methyluridine-3'-phosphate
  modified_base 18: mod_base = OTHER; note = 2'-O-methylguanosine-3'-phosphate
  modified_base 19: mod_base = OTHER; note = 2'-O-methylguanosine-3'-phosphorothioate
  modified_base 20: mod_base = OTHER; note = 2'-O-methyluridine-3'-phosphorothioate
  modified_base 21: mod_base = OTHER; note = 2'-O-methyladenosine
gtcctcactgtcaccatggta

SEQ ID NO: 2590 - RNA, 21 nt, synthetic construct
  source 1..21: mol_type = other RNA
  modified_base 1: mod_base = OTHER; note = 2'-O-methylcytidine-3'-phosphorothioate
  modified_base 2: mod_base = OTHER; note = 2'-O-methylcytidine-3'-phosphorothioate
  modified_base 3: mod_base = OTHER; note = 2'-O-methyluridine-3'-phosphate
  modified_base 4: mod_base = OTHER; note = 2'-O-methylguanosine-3'-phosphate
  modified_base 5: mod_base = OTHER; note = 2'-O-methyladenosine-3'-phosphate
  modified_base 6: mod_base = OTHER; note = 2'-O-methyluridine-3'-phosphate
  modified_base 7: mod_base = OTHER; note = 2'-deoxy-2'-fluorocytidine-3'-phosphate
  modified_base 8: mod_base = OTHER; note = 2'-O-methylcytidine-3'-phosphate
  modified_base 9: mod_base = OTHER; note = 2'-deoxy-2'-fluorouridine-3'-phosphate
  modified_base 10: mod_base = OTHER; note = 2'-deoxy-2'-fluoroguanosine-3'-phosphate
  modified_base 11: mod_base = OTHER; note = 2'-deoxy-2'-fluorouridine-3'-phosphate
  modified_base 12: mod_base = OTHER; note = 2'-O-methyluridine-3'-phosphate
  modified_base 13: mod_base = OTHER; note = 2'-O-methyluridine-3'-phosphate
  modified_base 14: mod_base = OTHER; note = 2'-O-methylguanosine-3'-phosphate
  modified_base 15: mod_base = OTHER; note = 2'-O-methyladenosine-3'-phosphate
  modified_base 16: mod_base = OTHER; note = 2'-O-methylcytidine-3'-phosphate
  modified_base 17: mod_base = OTHER; note = 2'-O-methylcytidine-3'-phosphate
  modified_base 18: mod_base = OTHER; note = 2'-O-methyladenosine-3'-phosphate
  modified_base 19: mod_base = OTHER; note = 2'-O-methyladenosine-3'-phosphorothioate
  modified_base 20: mod_base = OTHER; note = 2'-O-methyladenosine-3'-phosphorothioate
  modified_base 21: mod_base = OTHER; note = 2'-O-methyladenosine
cctgatcctgtttgaccaaaa

SEQ ID NO: 2591 - RNA, 21 nt, synthetic construct
  source 1..21: mol_type = other RNA
  modified_base 1: mod_base = OTHER; note = 2'-O-methyladenosine-3'-phosphorothioate
  modified_base 2: mod_base = OTHER; note = 2'-O-methylguanosine-3'-phosphorothioate
  modified_base 3: mod_base = OTHER; note = 2'-O-methylcytidine-3'-phosphate
  modified_base 4: mod_base = OTHER; note = 2'-O-methylguanosine-3'-phosphate
  modified_base 5: mod_base = OTHER; note = 2'-O-methylguanosine-3'-phosphate
  modified_base 6: mod_base = OTHER; note = 2'-O-methyluridine-3'-phosphate
  modified_base 7: mod_base = OTHER; note = 2'-deoxy-2'-fluorouridine-3'-phosphate
  modified_base 8: mod_base = OTHER; note = 2'-O-methyluridine-3'-phosphate
  modified_base 9: mod_base = OTHER; note = 2'-deoxy-2'-fluorocytidine-3'-phosphate
  modified_base 10: mod_base = OTHER; note = 2'-deoxy-2'-fluoroadenosine-3'-phosphate
  modified_base 11: mod_base = OTHER; note = 2'-deoxy-2'-fluoroguanosine-3'-phosphate
  modified_base 12: mod_base = OTHER; note = 2'-O-methylcytidine-3'-phosphate
  modified_base 13: mod_base = OTHER; note = 2'-O-methyladenosine-3'-phosphate
  modified_base 14: mod_base = OTHER; note = 2'-O-methyladenosine-3'-phosphate
  modified_base 15: mod_base = OTHER; note = 2'-O-methylguanosine-3'-phosphate
  modified_base 16: mod_base = OTHER; note = 2'-O-methyladenosine-3'-phosphate
  modified_base 17: mod_base = OTHER; note = 2'-O-methyladenosine-3'-phosphate
  modified_base 18: mod_base = OTHER; note = 2'-O-methylcytidine-3'-phosphate
  modified_base 19: mod_base = OTHER; note = 2'-O-methylguanosine-3'-phosphorothioate
  modified_base 20: mod_base = OTHER; note = 2'-O-methylguanosine-3'-phosphorothioate
  modified_base 21: mod_base = OTHER; note = 2'-O-methyladenosine
agcggtttcagcaagaacgga

SEQ ID NO: 2592 - RNA, 21 nt, synthetic construct
  source 1..21: mol_type = other RNA
  modified_base 1: mod_base = OTHER; note = 2'-O-methylcytidine-3'-phosphorothioate
  modified_base 2: mod_base = OTHER; note = 2'-O-methylguanosine-3'-phosphorothioate
  modified_base 3: mod_base = OTHER; note = 2'-O-methyluridine-3'-phosphate
  modified_base 4: mod_base = OTHER; note = 2'-O-methylguanosine-3'-phosphate
  modified_base 5: mod_base = OTHER; note = 2'-O-methyluridine-3'-phosphate
  modified_base 6: mod_base = OTHER; note = 2'-O-methylguanosine-3'-phosphate
  modified_base 7: mod_base = OTHER; note = 2'-deoxy-2'-fluoroguanosine-3'-phosphate
  modified_base 8: mod_base = OTHER; note = 2'-O-methyladenosine-3'-phosphate
  modified_base 9: mod_base = OTHER; note = 2'-deoxy-2'-fluorocytidine-3'-phosphate
  modified_base 10: mod_base = OTHER; note = 2'-deoxy-2'-fluoroadenosine-3'-phosphate
  modified_base 11: mod_base = OTHER; note = 2'-deoxy-2'-fluorouridine-3'-phosphate
  modified_base 12: mod_base = OTHER; note = 2'-O-methyluridine-3'-phosphate
  modified_base 13: mod_base = OTHER; note = 2'-O-methylcytidine-3'-phosphate
  modified_base 14: mod_base = OTHER; note = 2'-O-methylcytidine-3'-phosphate
  modified_base 15: mod_base = OTHER; note = 2'-O-methyluridine-3'-phosphate
  modified_base 16: mod_base = OTHER; note = 2'-O-methylguanosine-3'-phosphate
  modified_base 17: mod_base = OTHER; note = 2'-O-methylcytidine-3'-phosphate
  modified_base 18: mod_base = OTHER; note = 2'-O-methylcytidine-3'-phosphate
  modified_base 19: mod_base = OTHER; note = 2'-O-methylcytidine-3'-phosphorothioate
  modified_base 20: mod_base = OTHER; note = 2'-O-methyluridine-3'-phosphorothioate
  modified_base 21: mod_base = OTHER; note = 2'-O-methyladenosine
cgtgtggacattcctgcccta

SEQ ID NO: 2593 - RNA, 21 nt, synthetic construct
  source 1..21: mol_type = other RNA
  modified_base 1: mod_base = OTHER; note = 2'-O-methylguanosine-3'-phosphorothioate
  modified_base 2: mod_base = OTHER; note = 2'-O-methyluridine-3'-phosphorothioate
  modified_base 3: mod_base = OTHER; note = 2'-O-methylguanosine-3'-phosphate
  modified_base 4: mod_base = OTHER; note = 2'-O-methyladenosine-3'-phosphate
  modified_base 5: mod_base = OTHER; note = 2'-O-methylguanosine-3'-phosphate
  modified_base 6: mod_base = OTHER; note = 2'-O-methylcytidine-3'-phosphate
  modified_base 7: mod_base = OTHER; note = 2'-deoxy-2'-fluoroguanosine-3'-phosphate
  modified_base 8: mod_base = OTHER; note = 2'-O-methyluridine-3'-phosphate
  modified_base 9: mod_base = OTHER; note = 2'-deoxy-2'-fluorocytidine-3'-phosphate
  modified_base 10: mod_base = OTHER; note = 2'-deoxy-2'-fluoroadenosine-3'-phosphate
  modified_base 11: mod_base = OTHER; note = 2'-deoxy-2'-fluorocytidine-3'-phosphate
  modified_base 12: mod_base = OTHER; note = 2'-O-methylcytidine-3'-phosphate
  modified_base 13: mod_base = OTHER; note = 2'-O-methyluridine-3'-phosphate
  modified_base 14: mod_base = OTHER; note = 2'-O-methyluridine-3'-phosphate
  modified_base 15: mod_base = OTHER; note = 2'-O-methylcytidine-3'-phosphate
  modified_base 16: mod_base = OTHER; note = 2'-O-methyladenosine-3'-phosphate
  modified_base 17: mod_base = OTHER; note = 2'-O-methyladenosine-3'-phosphate
  modified_base 18: mod_base = OTHER; note = 2'-O-methyluridine-3'-phosphate
  modified_base 19: mod_base = OTHER; note = 2'-O-methylguanosine-3'-phosphorothioate
  modified_base 20: mod_base = OTHER; note = 2'-O-methylguanosine-3'-phosphorothioate
  modified_base 21: mod_base = OTHER; note = 2'-O-methyladenosine
gtgagcgtcaccttcaatgga

SEQ ID NO: 2594 - RNA, 21 nt, synthetic construct
  source 1..21: mol_type = other RNA
  modified_base 1: mod_base = OTHER; note = 2'-O-methyladenosine-3'-phosphorothioate
  modified_base 2: mod_base = OTHER; note = 2'-O-methylguanosine-3'-phosphorothioate
  modified_base 3: mod_base = OTHER; note = 2'-O-methylcytidine-3'-phosphate
  modified_base 4: mod_base = OTHER; note = 2'-O-methylcytidine-3'-phosphate
  modified_base 5: mod_base = OTHER; note = 2'-O-methyluridine-3'-phosphate
  modified_base 6: mod_base = OTHER; note = 2'-O-methylcytidine-3'-phosphate
  modified_base 7: mod_base = OTHER; note = 2'-deoxy-2'-fluorouridine-3'-phosphate
  modified_base 8: mod_base = OTHER; note = 2'-O-methyluridine-3'-phosphate
  modified_base 9: mod_base = OTHER; note = 2'-deoxy-2'-fluorocytidine-3'-phosphate
  modified_base 10: mod_base = OTHER; note = 2'-deoxy-2'-fluorocytidine-3'-phosphate
  modified_base 11: mod_base = OTHER; note = 2'-deoxy-2'-fluoroadenosine-3'-phosphate
  modified_base 12: mod_base = OTHER; note = 2'-O-methylcytidine-3'-phosphate
  modified_base 13: mod_base = OTHER; note = 2'-O-methyladenosine-3'-phosphate
  modified_base 14: mod_base = OTHER; note = 2'-O-methyladenosine-3'-phosphate
  modified_base 15: mod_base = OTHER; note = 2'-O-methylcytidine-3'-phosphate
  modified_base 16: mod_base = OTHER; note = 2'-O-methyladenosine-3'-phosphate
  modified_base 17: mod_base = OTHER; note = 2'-O-methyladenosine-3'-phosphate
  modified_base 18: mod_base = OTHER; note = 2'-O-methylcytidine-3'-phosphate
  modified_base 19: mod_base = OTHER; note = 2'-O-methyladenosine-3'-phosphorothioate
  modified_base 20: mod_base = OTHER; note = 2'-O-methylcytidine-3'-phosphorothioate
  modified_base 21: mod_base = OTHER; note = 2'-O-methyladenosine
agcctcttccacaacaacaca

SEQ ID NO: 2595 - RNA, 21 nt, synthetic construct
  source 1..21: mol_type = other RNA
  modified_base 1: mod_base = OTHER; note = 2'-O-methyluridine-3'-phosphorothioate
  modified_base 2: mod_base = OTHER; note = 2'-O-methylguanosine-3'-phosphorothioate
  modified_base 3: mod_base = OTHER; note = 2'-O-methylcytidine-3'-phosphate
  modified_base 4: mod_base = OTHER; note = 2'-O-methyladenosine-3'-phosphate
  modified_base 5: mod_base = OTHER; note = 2'-O-methylcytidine-3'-phosphate
  modified_base 6: mod_base = OTHER; note = 2'-O-methylcytidine-3'-phosphate
  modified_base 7: mod_base = OTHER; note = 2'-deoxy-2'-fluoroadenosine-3'-phosphate
  modified_base 8: mod_base = OTHER; note = 2'-O-methyladenosine-3'-phosphate
  modified_base 9: mod_base = OTHER; note = 2'-deoxy-2'-fluorocytidine-3'-phosphate
  modified_base 10: mod_base = OTHER; note = 2'-deoxy-2'-fluoroadenosine-3'-phosphate
  modified_base 11: mod_base = OTHER; note = 2'-deoxy-2'-fluoroadenosine-3'-phosphate
  modified_base 12: mod_base = OTHER; note = 2'-O-methylcytidine-3'-phosphate
  modified_base 13: mod_base = OTHER; note = 2'-O-methylcytidine-3'-phosphate
  modified_base 14: mod_base = OTHER; note = 2'-O-methyladenosine-3'-phosphate
  modified_base 15: mod_base = OTHER; note = 2'-O-methylguanosine-3'-phosphate
  modified_base 16: mod_base = OTHER; note = 2'-O-methyladenosine-3'-phosphate
  modified_base 17: mod_base = OTHER; note = 2'-O-methylguanosine-3'-phosphate
  modified_base 18: mod_base = OTHER; note = 2'-O-methylguanosine-3'-phosphate
  modified_base 19: mod_base = OTHER; note = 2'-O-methylguanosine-3'-phosphorothioate
  modified_base 20: mod_base = OTHER; note = 2'-O-methyladenosine-3'-phosphorothioate
  modified_base 21: mod_base = OTHER; note = 2'-O-methyladenosine
tgcaccaacaaccagagggaa

SEQ ID NO: 2596 - RNA, 21 nt, synthetic construct
  source 1..21: mol_type = other RNA
  modified_base 1: mod_base = OTHER; note = 2'-O-methyluridine-3'-phosphorothioate
  modified_base 2: mod_base = OTHER; note = 2'-O-methylguanosine-3'-phosphorothioate
  modified_base 3: mod_base = OTHER; note = 2'-O-methyluridine-3'-phosphate
  modified_base 4: mod_base = OTHER; note = 2'-O-methylcytidine-3'-phosphate
  modified_base 5: mod_base = OTHER; note = 2'-O-methyluridine-3'-phosphate
  modified_base 6: mod_base = OTHER; note = 2'-O-methylcytidine-3'-phosphate
  modified_base 7: mod_base = OTHER; note = 2'-deoxy-2'-fluorocytidine-3'-phosphate
  modified_base 8: mod_base = OTHER; note = 2'-O-methyladenosine-3'-phosphate
  modified_base 9: mod_base = OTHER; note = 2'-deoxy-2'-fluoroguanosine-3'-phosphate
  modified_base 10: mod_base = OTHER; note = 2'-deoxy-2'-fluorocytidine-3'-phosphate
  modified_base 11: mod_base = OTHER; note = 2'-deoxy-2'-fluoroguanosine-3'-phosphate
  modified_base 12: mod_base = OTHER; note = 2'-O-methylguanosine-3'-phosphate
  modified_base 13: mod_base = OTHER; note = 2'-O-methylguanosine-3'-phosphate
  modified_base 14: mod_base = OTHER; note = 2'-O-methyladenosine-3'-phosphate
  modified_base 15: mod_base = OTHER; note = 2'-O-methylcytidine-3'-phosphate
  modified_base 16: mod_base = OTHER; note = 2'-O-methylguanosine-3'-phosphate
  modified_base 17: mod_base = OTHER; note = 2'-O-methylguanosine-3'-phosphate
  modified_base 18: mod_base = OTHER; note = 2'-O-methyladenosine-3'-phosphate
  modified_base 19: mod_base = OTHER; note = 2'-O-methyladenosine-3'-phosphorothioate
  modified_base 20: mod_base = OTHER; note = 2'-O-methylcytidine-3'-phosphorothioate
  modified_base 21: mod_base = OTHER; note = 2'-O-methyladenosine
tgtctccagcgggacggaaca

SEQ ID NO: 2597 - RNA, 21 nt, synthetic construct
  source 1..21: mol_type = other RNA
  modified_base 1: mod_base = OTHER; note = 2'-O-methylcytidine-3'-phosphorothioate
  modified_base 2: mod_base = OTHER; note = 2'-O-methylguanosine-3'-phosphorothioate
  modified_base 3: mod_base = OTHER; note = 2'-O-methylcytidine-3'-phosphate
  modified_base 4: mod_base = OTHER; note = 2'-O-methylcytidine-3'-phosphate
  modified_base 5: mod_base = OTHER; note = 2'-O-methyladenosine-3'-phosphate
  modified_base 6: mod_base = OTHER; note = 2'-O-methylguanosine-3'-phosphate
  modified_base 7: mod_base = OTHER; note = 2'-deoxy-2'-fluorouridine-3'-phosphate
  modified_base 8: mod_base = OTHER; note = 2'-O-methyluridine-3'-phosphate
  modified_base 9: mod_base = OTHER; note = 2'-deoxy-2'-fluoroguanosine-3'-phosphate
  modified_base 10: mod_base = OTHER; note = 2'-deoxy-2'-fluorocytidine-3'-phosphate
  modified_base 11: mod_base = OTHER; note = 2'-deoxy-2'-fluoroadenosine-3'-phosphate
  modified_base 12: mod_base = OTHER; note = 2'-O-methyladenosine-3'-phosphate
  modified_base 13: mod_base = OTHER; note = 2'-O-methylguanosine-3'-phosphate
  modified_base 14: mod_base = OTHER; note = 2'-O-methylguanosine-3'-phosphate
  modified_base 15: mod_base = OTHER; note = 2'-O-methyladenosine-3'-phosphate
  modified_base 16: mod_base = OTHER; note = 2'-O-methylcytidine-3'-phosphate
  modified_base 17: mod_base = OTHER; note = 2'-O-methyladenosine-3'-phosphate
  modified_base 18: mod_base = OTHER; note = 2'-O-methyluridine-3'-phosphate
  modified_base 19: mod_base = OTHER; note = 2'-O-methylguanosine-3'-phosphorothioate
  modified_base 20: mod_base = OTHER; note = 2'-O-methylguanosine-3'-phosphorothioate
  modified_base 21: mod_base = OTHER; note = 2'-O-methyladenosine
cgccagttgcaaggacatgga

SEQ ID NO: 2598 - RNA, 21 nt, synthetic construct
  source 1..21: mol_type = other RNA
  modified_base 1: mod_base = OTHER; note = 2'-O-methylcytidine-3'-phosphorothioate
  modified_base 2: mod_base = OTHER; note = 2'-O-methylguanosine-3'-phosphorothioate
  modified_base 3: mod_base = OTHER; note = 2'-O-methyladenosine-3'-phosphate
  modified_base 4: mod_base = OTHER; note = 2'-O-methylcytidine-3'-phosphate
  modified_base 5: mod_base = OTHER; note = 2'-O-methyladenosine-3'-phosphate
  modified_base 6: mod_base = OTHER; note = 2'-O-methylguanosine-3'-phosphate
  modified_base 7: mod_base = OTHER; note = 2'-deoxy-2'-fluorocytidine-3'-phosphate
  modified_base 8: mod_base = OTHER; note = 2'-O-methyladenosine-3'-phosphate
  modified_base 9: mod_base = OTHER; note = 2'-deoxy-2'-fluoroguanosine-3'-phosphate
  modified_base 10: mod_base = OTHER; note = 2'-deoxy-2'-fluoroadenosine-3'-phosphate
  modified_base 11: mod_base = OTHER; note = 2'-deoxy-2'-fluoroadenosine-3'-phosphate
  modified_base 12: mod_base = OTHER; note = 2'-O-methyladenosine-3'-phosphate
  modified_base 13: mod_base = OTHER; note = 2'-O-methylguanosine-3'-phosphate
  modified_base 14: mod_base = OTHER; note = 2'-O-methylguanosine-3'-phosphate
  modified_base 15: mod_base = OTHER; note = 2'-O-methyladenosine-3'-phosphate
  modified_base 16: mod_base = OTHER; note = 2'-O-methyluridine-3'-phosphate
  modified_base 17: mod_base = OTHER; note = 2'-O-methylguanosine-3'-phosphate
  modified_base 18: mod_base = OTHER; note = 2'-O-methylguanosine-3'-phosphate
  modified_base 19: mod_base = OTHER; note = 2'-O-methylcytidine-3'-phosphorothioate
  modified_base 20: mod_base = OTHER; note = 2'-O-methyluridine-3'-phosphorothioate
  modified_base 21: mod_base = OTHER; note = 2'-O-methyladenosine
cgacagcagaaaggatggcta

SEQ ID NO: 2599 - RNA, 21 nt, synthetic construct
  source 1..21: mol_type = other RNA
  modified_base 1: mod_base = OTHER; note = 2'-O-methylcytidine-3'-phosphorothioate
  modified_base 2: mod_base = OTHER; note = 2'-O-methylcytidine-3'-phosphorothioate
  modified_base 3: mod_base = OTHER; note = 2'-O-methylguanosine-3'-phosphate
  modified_base 4: mod_base = OTHER; note = 2'-O-methylcytidine-3'-phosphate
  modified_base 5: mod_base = OTHER; note = 2'-O-methyluridine-3'-phosphate
  modified_base 6: mod_base = OTHER; note = 2'-O-methylcytidine-3'-phosphate
  modified_base 7: mod_base = OTHER; note = 2'-deoxy-2'-fluorouridine-3'-phosphate
  modified_base 8: mod_base = OTHER; note = 2'-O-methylguanosine-3'-phosphate
  modified_base 9: mod_base = OTHER; note = 2'-deoxy-2'-fluorouridine-3'-phosphate
  modified_base 10: mod_base = OTHER; note = 2'-deoxy-2'-fluoroguanosine-3'-phosphate
  modified_base 11: mod_base = OTHER; note = 2'-deoxy-2'-fluoroadenosine-3'-phosphate
  modified_base 12: mod_base = OTHER; note = 2'-O-methyluridine-3'-phosphate
  modified_base 13: mod_base = OTHER; note = 2'-O-methylcytidine-3'-phosphate
  modified_base 14: mod_base = OTHER; note = 2'-O-methyluridine-3'-phosphate
  modified_base 15: mod_base = OTHER; note = 2'-O-methylguanosine-3'-phosphate
  modified_base 16: mod_base = OTHER; note = 2'-O-methyladenosine-3'-phosphate
  modified_base 17: mod_base = OTHER; note = 2'-O-methyluridine-3'-phosphate
  modified_base 18: mod_base = OTHER; note = 2'-O-methylguanosine-3'-phosphate
  modified_base 19: mod_base = OTHER; note = 2'-O-methylcytidine-3'-phosphorothioate
  modified_base 20: mod_base = OTHER; note = 2'-O-methyluridine-3'-phosphorothioate
  modified_base 21: mod_base = OTHER; note = 2'-O-methyladenosine
ccgctctgtgatctgatgcta

SEQ ID NO: 2600 - RNA, 21 nt, synthetic construct
  source 1..21: mol_type = other RNA
  modified_base 1: mod_base = OTHER; note = 2'-O-methylcytidine-3'-phosphorothioate
  modified_base 2: mod_base = OTHER; note = 2'-O-methyladenosine-3'-phosphorothioate
  modified_base 3: mod_base = OTHER; note = 2'-O-methylguanosine-3'-phosphate
  modified_base 4: mod_base = OTHER; note = 2'-O-methylguanosine-3'-phosphate
  modified_base 5: mod_base = OTHER; note = 2'-O-methyluridine-3'-phosphate
  modified_base 6: mod_base = OTHER; note = 2'-O-methylcytidine-3'-phosphate
  modified_base 7: mod_base = OTHER; note = 2'-deoxy-2'-fluorouridine-3'-phosphate
  modified_base 8: mod_base = OTHER; note = 2'-O-methyluridine-3'-phosphate
  modified_base 9: mod_base = OTHER; note = 2'-deoxy-2'-fluorouridine-3'-phosphate
  modified_base 10: mod_base = OTHER; note = 2'-deoxy-2'-fluoroguanosine-3'-phosphate
  modified_base 11: mod_base = OTHER; note = 2'-deoxy-2'-fluorocytidine-3'-phosphate
  modified_base 12: mod_base = OTHER; note = 2'-O-methyluridine-3'-phosphate
  modified_base 13: mod_base = OTHER; note = 2'-O-methylguanosine-3'-phosphate
  modified_base 14: mod_base = OTHER; note = 2'-O-methyladenosine-3'-phosphate
  modified_base 15: mod_base = OTHER; note = 2'-O-methylguanosine-3'-phosphate
  modified_base 16: mod_base = OTHER; note = 2'-O-methyluridine-3'-phosphate
  modified_base 17: mod_base = OTHER; note = 2'-O-methylguanosine-3'-phosphate
  modified_base 18: mod_base = OTHER; note = 2'-O-methylcytidine-3'-phosphate
  modified_base 19: mod_base = OTHER; note = 2'-O-methylcytidine-3'-phosphorothioate
  modified_base 20: mod_base = OTHER; note = 2'-O-methyladenosine-3'-phosphorothioate
  modified_base 21: mod_base = OTHER; note = 2'-O-methyladenosine
caggtctttgctgagtgccaa

SEQ ID NO: 2601 - RNA, 21 nt, synthetic construct
  source 1..21: mol_type = other RNA
  modified_base 1: mod_base = OTHER; note = 2'-O-methylguanosine-3'-phosphorothioate
  modified_base 2: mod_base = OTHER; note = 2'-O-methylguanosine-3'-phosphorothioate
  modified_base 3: mod_base = OTHER; note = 2'-O-methylguanosine-3'-phosphate
  modified_base 4: mod_base = OTHER; note = 2'-O-methylcytidine-3'-phosphate
  modified_base 5: mod_base = OTHER; note = 2'-O-methylcytidine-3'-phosphate
  modified_base 6: mod_base = OTHER; note = 2'-O-methylcytidine-3'-phosphate
  modified_base 7: mod_base = OTHER; note = 2'-deoxy-2'-fluoroadenosine-3'-phosphate
  modified_base 8: mod_base = OTHER; note = 2'-O-methyluridine-3'-phosphate
  modified_base 9: mod_base = OTHER; note = 2'-deoxy-2'-fluorouridine-3'-phosphate
  modified_base 10: mod_base = OTHER; note = 2'-deoxy-2'-fluorocytidine-3'-phosphate
  modified_base 11: mod_base = OTHER; note = 2'-deoxy-2'-fluorouridine-3'-phosphate
  modified_base 12: mod_base = OTHER; note = 2'-O-methyluridine-3'-phosphate
  modified_base 13: mod_base = OTHER; note = 2'-O-methylcytidine-3'-phosphate
  modified_base 14: mod_base = OTHER; note = 2'-O-methyladenosine-3'-phosphate
  modified_base 15: mod_base = OTHER; note = 2'-O-methyladenosine-3'-phosphate
  modified_base 16: mod_base = OTHER; note = 2'-O-methylcytidine-3'-phosphate
  modified_base 17: mod_base = OTHER; note = 2'-O-methylguanosine-3'-phosphate
  modified_base 18: mod_base = OTHER; note = 2'-O-methylcytidine-3'-phosphate
  modified_base 19: mod_base = OTHER; note = 2'-O-methylcytidine-3'-phosphorothioate
  modified_base 20: mod_base = OTHER; note = 2'-O-methyluridine-3'-phosphorothioate
  modified_base 21: mod_base = OTHER; note = 2'-O-methyladenosine
gggcccattcttcaacgccta

SEQ ID NO: 2602 - RNA, 21 nt, synthetic construct
  source 1..21: mol_type = other RNA
  modified_base 1: mod_base = OTHER; note = 2'-O-methylguanosine-3'-phosphorothioate
  modified_base 2: mod_base = OTHER; note = 2'-O-methyladenosine-3'-phosphorothioate
  modified_base 3: mod_base = OTHER; note = 2'-O-methylguanosine-3'-phosphate
  modified_base 4: mod_base = OTHER; note = 2'-O-methylguanosine-3'-phosphate
  modified_base 5: mod_base = OTHER; note = 2'-O-methylcytidine-3'-phosphate
  modified_base 6: mod_base = OTHER; note = 2'-O-methyluridine-3'-phosphate
  modified_base 7: mod_base = OTHER; note = 2'-deoxy-2'-fluorouridine-3'-phosphate
  modified_base 8: mod_base = OTHER; note = 2'-O-methyladenosine-3'-phosphate
  modified_base 9: mod_base = OTHER; note = 2'-deoxy-2'-fluorocytidine-3'-phosphate
  modified_base 10: mod_base = OTHER; note = 2'-deoxy-2'-fluoroguanosine-3'-phosphate
  modified_base 11: mod_base = OTHER; note = 2'-deoxy-2'-fluorocytidine-3'-phosphate
  modified_base 12: mod_base = OTHER; note = 2'-O-methyladenosine-3'-phosphate
  modified_base 13: mod_base = OTHER; note = 2'-O-methylguanosine-3'-phosphate
  modified_base 14: mod_base = OTHER; note = 2'-O-methyladenosine-3'-phosphate
  modified_base 15: mod_base = OTHER; note = 2'-O-methylguanosine-3'-phosphate
  modified_base 16: mod_base = OTHER; note = 2'-O-methylcytidine-3'-phosphate
  modified_base 17: mod_base = OTHER; note = 2'-O-methyluridine-3'-phosphate
  modified_base 18: mod_base = OTHER; note = 2'-O-methylcytidine-3'-phosphate
  modified_base 19: mod_base = OTHER; note = 2'-O-methyluridine-3'-phosphorothioate
  modified_base 20: mod_base = OTHER; note = 2'-O-methylguanosine-3'-phosphorothioate
  modified_base 21: mod_base = OTHER; note = 2'-O-methyladenosine
gaggcttacgcagagctctga

SEQ ID NO: 2603 - RNA, 21 nt, synthetic construct
  source 1..21: mol_type = other RNA
  modified_base 1: mod_base = OTHER; note = 2'-O-methyladenosine-3'-phosphorothioate
  modified_base 2: mod_base = OTHER; note = 2'-O-methylguanosine-3'-phosphorothioate
  modified_base 3: mod_base = OTHER; note = 2'-O-methyluridine-3'-phosphate
  modified_base 4: mod_base = OTHER; note = 2'-O-methylguanosine-3'-phosphate
  modified_base 5: mod_base = OTHER; note = 2'-O-methyluridine-3'-phosphate
  modified_base 6: mod_base = OTHER; note = 2'-O-methylguanosine-3'-phosphate
  modified_base 7: mod_base = OTHER; note = 2'-deoxy-2'-fluorocytidine-3'-phosphate
  modified_base 8: mod_base = OTHER; note = 2'-O-methyladenosine-3'-phosphate
  modified_base 9: mod_base = OTHER; note = 2'-deoxy-2'-fluoroguanosine-3'-phosphate
  modified_base 10: mod_base = OTHER; note = 2'-deoxy-2'-fluorouridine-3'-phosphate
  modified_base 11: mod_base = OTHER; note = 2'-deoxy-2'-fluoroguanosine-3'-phosphate
  modified_base 12: mod_base = OTHER; note = 2'-O-methyladenosine-3'-phosphate
  modified_base 13: mod_base = OTHER; note = 2'-O-methylcytidine-3'-phosphate
  modified_base 14: mod_base = OTHER; note = 2'-O-methyluridine-3'-phosphate
  modified_base 15: mod_base = OTHER; note = 2'-O-methylguanosine-3'-phosphate
  modified_base 16: mod_base = OTHER; note = 2'-O-methylguanosine-3'-phosphate
  modified_base 17: mod_base = OTHER; note = 2'-O-methylcytidine-3'-phosphate
  modified_base 18: mod_base = OTHER; note = 2'-O-methylguanosine-3'-phosphate
  modified_base 19: mod_base = OTHER; note = 2'-O-methyladenosine-3'-phosphorothioate
  modified_base 20: mod_base = OTHER; note = 2'-O-methylguanosine-3'-phosphorothioate
  modified_base 21: mod_base = OTHER; note = 2'-O-methyladenosine
agtgtgcagtgactggcgaga

SEQ ID NO: 2604 - RNA, 21 nt, synthetic construct
  source 1..21: mol_type = other RNA
  modified_base 1: mod_base = OTHER; note = 2'-O-methylcytidine-3'-phosphorothioate
  modified_base 2: mod_base = OTHER; note = 2'-O-methylcytidine-3'-phosphorothioate
  modified_base 3: mod_base = OTHER; note = 2'-O-methyladenosine-3'-phosphate
  modified_base 4: mod_base = OTHER; note = 2'-O-methylcytidine-3'-phosphate
  modified_base 5: mod_base = OTHER; note = 2'-O-methylcytidine-3'-phosphate
  modified_base 6: mod_base = OTHER; note = 2'-O-methyladenosine-3'-phosphate
  modified_base 7: mod_base = OTHER; note = 2'-deoxy-2'-fluoroadenosine-3'-phosphate
  modified_base 8: mod_base = OTHER; note = 2'-O-methyladenosine-3'-phosphate
  modified_base 9: mod_base = OTHER; note = 2'-deoxy-2'-fluoroguanosine-3'-phosphate
  modified_base 10: mod_base = OTHER; note = 2'-deoxy-2'-fluorouridine-3'-phosphate
  modified_base 11: mod_base = OTHER; note = 2'-deoxy-2'-fluoroguanosine-3'-phosphate
  modified_base 12: mod_base = OTHER; note = 2'-O-methyluridine-3'-phosphate
  modified_base 13: mod_base = OTHER; note = 2'-O-methyladenosine-3'-phosphate
  modified_base 14: mod_base = OTHER; note = 2'-O-methylcytidine-3'-phosphate
  modified_base 15: mod_base = OTHER; note = 2'-O-methyladenosine-3'-phosphate
  modified_base 16: mod_base = OTHER; note = 2'-O-methyladenosine-3'-phosphate
  modified_base 17: mod_base = OTHER; note = 2'-O-methylguanosine-3'-phosphate
  modified_base 18: mod_base = OTHER; note = 2'-O-methylcytidine-3'-phosphate
  modified_base 19: mod_base = OTHER; note = 2'-O-methylcytidine-3'-phosphorothioate
  modified_base 20: mod_base = OTHER; note = 2'-O-methyladenosine-3'-phosphorothioate
  modified_base 21: mod_base = OTHER; note = 2'-O-methyladenosine
ccaccaaagtgtacaagccaa

SEQ ID NO: 2605 - RNA, 21 nt, synthetic construct
  source 1..21: mol_type = other RNA
  modified_base 1: mod_base = OTHER; note = 2'-O-methylcytidine-3'-phosphorothioate
  modified_base 2: mod_base = OTHER; note = 2'-O-methyluridine-3'-phosphorothioate
  modified_base 3: mod_base = OTHER; note = 2'-O-methylguanosine-3'-phosphate
  modified_base 4: mod_base = OTHER; note = 2'-O-methylcytidine-3'-phosphate
  modified_base 5: mod_base = OTHER; note = 2'-O-methyladenosine-3'-phosphate
  modified_base 6: mod_base = OTHER; note = 2'-O-methyladenosine-3'-phosphate
  modified_base 7: mod_base = OTHER; note = 2'-deoxy-2'-fluorocytidine-3'-phosphate
  modified_base 8: mod_base = OTHER; note = 2'-O-methyluridine-3'-phosphate
  modified_base 9: mod_base = OTHER; note = 2'-deoxy-2'-fluorocytidine-3'-phosphate
  modified_base 10: mod_base = OTHER; note = 2'-deoxy-2'-fluorouridine-3'-phosphate
  modified_base 11: mod_base = OTHER; note = 2'-deoxy-2'-fluoroadenosine-3'-phosphate
  modified_base 12: mod_base = OTHER; note = 2'-O-methylguanosine-3'-phosphate
  modified_base 13: mod_base = OTHER; note = 2'-O-methylguanosine-3'-phosphate
  modified_base 14: mod_base = OTHER; note = 2'-O-methyladenosine-3'-phosphate
  modified_base 15: mod_base = OTHER; note = 2'-O-methyladenosine-3'-phosphate
  modified_base 16: mod_base = OTHER; note = 2'-O-methylcytidine-3'-phosphate
  modified_base 17: mod_base = OTHER; note = 2'-O-methylcytidine-3'-phosphate
  modified_base 18: mod_base = OTHER; note = 2'-O-methyladenosine-3'-phosphate
  modified_base 19: mod_base = OTHER; note = 2'-O-methylguanosine-3'-phosphorothioate
  modified_base 20: mod_base = OTHER; note = 2'-O-methyladenosine-3'-phosphorothioate
  modified_base 21: mod_base = OTHER; note = 2'-O-methyladenosine
ctgcaactctaggaaccagaa

SEQ ID NO: 2606 - RNA, 21 nt, synthetic construct
  source 1..21: mol_type = other RNA
  modified_base 1: mod_base = OTHER; note = 2'-O-methylcytidine-3'-phosphorothioate
  modified_base 2: mod_base = OTHER; note = 2'-O-methyladenosine-3'-phosphorothioate
  modified_base 3: mod_base = OTHER; note = 2'-O-methylguanosine-3'-phosphate
  modified_base 4: mod_base = OTHER; note = 2'-O-methyladenosine-3'-phosphate
  modified_base 5: mod_base = OTHER; note = 2'-O-methyluridine-3'-phosphate
  modified_base 6: mod_base = OTHER; note = 2'-O-methylcytidine-3'-phosphate
  modified_base 7: mod_base = OTHER; note = 2'-deoxy-2'-fluorocytidine-3'-phosphate
  modified_base 8: mod_base = OTHER; note = 2'-O-methyluridine-3'-phosphate
  modified_base 9: mod_base = OTHER; note = 2'-deoxy-2'-fluorocytidine-3'-phosphate
  modified_base 10: mod_base = OTHER; note = 2'-deoxy-2'-fluorouridine-3'-phosphate
  modified_base 11: mod_base = OTHER; note = 2'-deoxy-2'-fluorouridine-3'-phosphate
  modified_base 12: mod_base = OTHER; note = 2'-O-methylcytidine-3'-phosphate
  modified_base 13: mod_base = OTHER; note = 2'-O-methyladenosine-3'-phosphate
  modified_base 14: mod_base = OTHER; note = 2'-O-methyladenosine-3'-phosphate
  modified_base 15: mod_base = OTHER; note = 2'-O-methylcytidine-3'-phosphate
  modified_base 16: mod_base = OTHER; note = 2'-O-methylguanosine-3'-phosphate
  modified_base 17: mod_base = OTHER; note = 2'-O-methylcytidine-3'-phosphate
  modified_base 18: mod_base = OTHER; note = 2'-O-methyladenosine-3'-phosphate
  modified_base 19: mod_base = OTHER; note = 2'-O-methylcytidine-3'-phosphorothioate
  modified_base 20: mod_base = OTHER; note = 2'-O-methyladenosine-3'-phosphorothioate
  modified_base 21: mod_base = OTHER; note = 2'-O-methyladenosine
cagatcctcttcaacgcacaa

SEQ ID NO: 2607 - RNA, 21 nt, synthetic construct
  source 1..21: mol_type = other RNA
  modified_base 1: mod_base = OTHER; note = 2'-O-methylguanosine-3'-phosphorothioate
  modified_base 2: mod_base = OTHER; note = 2'-O-methylguanosine-3'-phosphorothioate
  modified_base 3: mod_base = OTHER; note = 2'-O-methylguanosine-3'-phosphate
  modified_base 4: mod_base = OTHER; note = 2'-O-methylcytidine-3'-phosphate
  modified_base 5: mod_base = OTHER; note = 2'-O-methyladenosine-3'-phosphate
  modified_base 6: mod_base = OTHER; note = 2'-O-methyluridine-3'-phosphate
  modified_base 7: mod_base = OTHER; note = 2'-deoxy-2'-fluorocytidine-3'-phosphate
  modified_base 8: mod_base = OTHER; note = 2'-O-methyluridine-3'-phosphate
  modified_base 9: mod_base = OTHER; note = 2'-deoxy-2'-fluoroguanosine-3'-phosphate
  modified_base 10: mod_base = OTHER; note = 2'-deoxy-2'-fluorocytidine-3'-phosphate
  modified_base 11: mod_base = OTHER; note = 2'-deoxy-2'-fluoroguanosine-3'-phosphate
  modified_base 12: mod_base = OTHER; note = 2'-O-methyluridine-3'-phosphate
  modified_base 13: mod_base = OTHER; note = 2'-O-methylguanosine-3'-phosphate
  modified_base 14: mod_base = OTHER; note = 2'-O-methylcytidine-3'-phosphate
  modified_base 15: mod_base = OTHER; note = 2'-O-methyladenosine-3'-phosphate
  modified_base 16: mod_base = OTHER; note = 2'-O-methylguanosine-3'-phosphate
  modified_base 17: mod_base = OTHER; note = 2'-O-methylguanosine-3'-phosphate
  modified_base 18: mod_base = OTHER; note = 2'-O-methylcytidine-3'-phosphate
  modified_base 19: mod_base = OTHER; note = 2'-O-methylcytidine-3'-phosphorothioate
  modified_base 20: mod_base = OTHER; note = 2'-O-methyluridine-3'-phosphorothioate
  modified_base 21: mod_base = OTHER; note = 2'-O-methyladenosine
gggcatctgcgtgcaggccta

SEQ ID NO: 2608 - RNA, 21 nt, synthetic construct
  source 1..21: mol_type = other RNA
  modified_base 1: mod_base = OTHER; note = 2'-O-methylcytidine-3'-phosphorothioate
  modified_base 2: mod_base = OTHER; note = 2'-O-methylguanosine-3'-phosphorothioate
  modified_base 3: mod_base = OTHER; note = 2'-O-methyladenosine-3'-phosphate
  modified_base 4: mod_base = OTHER; note = 2'-O-methyluridine-3'-phosphate
  modified_base 5: mod_base = OTHER; note = 2'-O-methylguanosine-3'-phosphate
  modified_base 6: mod_base = OTHER; note = 2'-O-methylguanosine-3'-phosphate
  modified_base 7: mod_base = OTHER; note = 2'-deoxy-2'-fluoroguanosine-3'-phosphate
  modified_base 8: mod_base = OTHER; note = 2'-O-methyluridine-3'-phosphate
  modified_base 9: mod_base = OTHER; note = 2'-deoxy-2'-fluorouridine-3'-phosphate
  modified_base 10: mod_base = OTHER; note = 2'-deoxy-2'-fluorouridine-3'-phosphate
  modified_base 11: mod_base = OTHER; note = 2'-deoxy-2'-fluorocytidine-3'-phosphate
  modified_base 12: mod_base = OTHER; note = 2'-O-methylcytidine-3'-phosphate
  modified_base 13: mod_base = OTHER; note = 2'-O-methyluridine-3'-phosphate
  modified_base 14: mod_base = OTHER; note = 2'-O-methyladenosine-3'-phosphate
  modified_base 15: mod_base = OTHER; note = 2'-O-methyladenosine-3'-phosphate
  modified_base 16: mod_base = OTHER; note = 2'-O-methyladenosine-3'-phosphate
  modified_base 17: mod_base = OTHER; note = 2'-O-methyluridine-3'-phosphate
  modified_base 18: mod_base = OTHER; note = 2'-O-methyluridine-3'-phosphate
  modified_base 19: mod_base = OTHER; note = 2'-O-methyluridine-3'-phosphorothioate
  modified_base 20: mod_base = OTHER; note = 2'-O-methylcytidine-3'-phosphorothioate
  modified_base 21: mod_base = OTHER; note = 2'-O-methyladenosine
cgatgggtttcctaaatttca

SEQ ID NO: 2609 - RNA, 21 nt, synthetic construct
  source 1..21: mol_type = other RNA
  modified_base 1: mod_base = OTHER; note = 2'-O-methylguanosine-3'-phosphorothioate
  modified_base 2: mod_base = OTHER; note = 2'-O-methylguanosine-3'-phosphorothioate
  modified_base 3: mod_base = OTHER; note = 2'-O-methyluridine-3'-phosphate
  modified_base 4: mod_base = OTHER; note = 2'-O-methylcytidine-3'-phosphate
  modified_base 5: mod_base = OTHER; note = 2'-O-methyladenosine-3'-phosphate
  modified_base 6: mod_base = OTHER; note = 2'-O-methylguanosine-3'-phosphate
  modified_base 7: mod_base = OTHER; note = 2'-deoxy-2'-fluorocytidine-3'-phosphate
  modified_base 8: mod_base = OTHER; note = 2'-O-methyladenosine-3'-phosphate
  modified_base 9: mod_base = OTHER; note = 2'-deoxy-2'-fluoroadenosine-3'-phosphate
  modified_base 10: mod_base = OTHER; note = 2'-deoxy-2'-fluorocytidine-3'-phosphate
  modified_base 11: mod_base = OTHER; note = 2'-deoxy-2'-fluorouridine-3'-phosphate
  modified_base 12: mod_base = OTHER; note = 2'-O-methylguanosine-3'-phosphate
  modified_base 13: mod_base = OTHER; note = 2'-O-methylcytidine-3'-phosphate
  modified_base 14: mod_base = OTHER; note = 2'-O-methylcytidine-3'-phosphate
  modified_base 15: mod_base = OTHER; note = 2'-O-methyladenosine-3'-phosphate
  modified_base 16: mod_base = OTHER; note = 2'-O-methylguanosine-3'-phosphate
  modified_base 17: mod_base = OTHER; note = 2'-O-methyluridine-3'-phosphate
  modified_base 18: mod_base = OTHER; note = 2'-O-methylcytidine-3'-phosphate
  modified_base 19: mod_base = OTHER; note = 2'-O-methylcytidine-3'-phosphorothioate
  modified_base 20: mod_base = OTHER; note = 2'-O-methyluridine-3'-phosphorothioate
  modified_base 21: mod_base = OTHER; note = 2'-O-methyladenosine
ggtcagcaactgccagtccta

SEQ ID NO: 2610 - RNA, 21 nt, synthetic construct
  source 1..21: mol_type = other RNA
  modified_base 1: mod_base = OTHER; note = 2'-O-methylguanosine-3'-phosphorothioate
  modified_base 2: mod_base = OTHER; note = 2'-O-methyladenosine-3'-phosphorothioate
  modified_base 3: mod_base = OTHER; note = 2'-O-methylguanosine-3'-phosphate
  modified_base 4: mod_base = OTHER; note = 2'-O-methylguanosine-3'-phosphate
  modified_base 5: mod_base = OTHER; note = 2'-O-methylguanosine-3'-phosphate
  modified_base 6: mod_base = OTHER; note = 2'-O-methyluridine-3'-phosphate
  modified_base 7: mod_base = OTHER; note = 2'-deoxy-2'-fluorouridine-3'-phosphate
  modified_base 8: mod_base = OTHER; note = 2'-O-methylcytidine-3'-phosphate
  modified_base 9: mod_base = OTHER; note = 2'-deoxy-2'-fluoroadenosine-3'-phosphate
  modified_base 10: mod_base = OTHER; note = 2'-deoxy-2'-fluoroguanosine-3'-phosphate
  modified_base 11: mod_base = OTHER; note = 2'-deoxy-2'-fluorouridine-3'-phosphate
  modified_base 12: mod_base = OTHER; note = 2'-O-methylguanosine-3'-phosphate
  modified_base 13: mod_base = OTHER; note = 2'-O-methyluridine-3'-phosphate
  modified_base 14: mod_base = OTHER; note = 2'-O-methylcytidine-3'-phosphate
  modified_base 15: mod_base = OTHER; note = 2'-O-methylguanosine-3'-phosphate
  modified_base 16: mod_base = OTHER; note = 2'-O-methylguanosine-3'-phosphate
  modified_base 17: mod_base = OTHER; note = 2'-O-methyluridine-3'-phosphate
  modified_base 18: mod_base = OTHER; note = 2'-O-methylguanosine-3'-phosphate
  modified_base 19: mod_base = OTHER; note = 2'-O-methylcytidine-3'-phosphorothioate
  modified_base 20: mod_base = OTHER; note = 2'-O-methyladenosine-3'-phosphorothioate
  modified_base 21: mod_base = OTHER; note = 2'-O-methyladenosine
gagggttcagtgtcggtgcaa

SEQ ID NO: 2611 - RNA, 21 nt, synthetic construct
  source 1..21: mol_type = other RNA
  modified_base 1: mod_base = OTHER; note = 2'-O-methylcytidine-3'-phosphorothioate
  modified_base 2: mod_base = OTHER; note = 2'-O-methylguanosine-3'-phosphorothioate
  modified_base 3: mod_base = OTHER; note = 2'-O-methylguanosine-3'-phosphate
  modified_base 4: mod_base = OTHER; note = 2'-O-methylcytidine-3'-phosphate
  modified_base 5: mod_base = OTHER; note = 2'-O-methyluridine-3'-phosphate
  modified_base 6: mod_base = OTHER; note = 2'-O-methyluridine-3'-phosphate
  modified_base 7: mod_base = OTHER; note = 2'-deoxy-2'-fluorocytidine-3'-phosphate
  modified_base 8: mod_base = OTHER; note = 2'-O-methylguanosine-3'-phosphate
  modified_base 9: mod_base = OTHER; note = 2'-deoxy-2'-fluorouridine-3'-phosphate
  modified_base 10: mod_base = OTHER; note = 2'-deoxy-2'-fluoroadenosine-3'-phosphate
  modified_base 11: mod_base = OTHER; note = 2'-deoxy-2'-fluoroadenosine-3'-phosphate
  modified_base 12: mod_base = OTHER; note = 2'-O-methylcytidine-3'-phosphate
  modified_base 13: mod_base = OTHER; note = 2'-O-methylcytidine-3'-phosphate
  modified_base 14: mod_base = OTHER; note = 2'-O-methylguanosine-3'-phosphate
  modified_base 15: mod_base = OTHER; note = 2'-O-methyluridine-3'-phosphate
  modified_base 16: mod_base = OTHER; note = 2'-O-methylguanosine-3'-phosphate
  modified_base 17: mod_base = OTHER; note = 2'-O-methyladenosine-3'-phosphate
  modified_base 18: mod_base = OTHER; note = 2'-O-methylcytidine-3'-phosphate
  modified_base 19: mod_base = OTHER; note = 2'-O-methylcytidine-3'-phosphorothioate
  modified_base 20: mod_base = OTHER; note = 2'-O-methyladenosine-3'-phosphorothioate
  modified_base 21: mod_base = OTHER; note = 2'-O-methyladenosine
cggcttcgtaaccgtgaccaa

SEQ ID NO: 2612 - RNA, 21 nt, synthetic construct
  source 1..21: mol_type = other RNA
  modified_base 1: mod_base = OTHER; note = 2'-O-methylcytidine-3'-phosphorothioate
  modified_base 2: mod_base = OTHER; note = 2'-O-methylguanosine-3'-phosphorothioate
  modified_base 3: mod_base = OTHER; note = 2'-O-methyluridine-3'-phosphate
  modified_base 4: mod_base = OTHER; note = 2'-O-methylguanosine-3'-phosphate
  modified_base 5: mod_base = OTHER; note = 2'-O-methyluridine-3'-phosphate
  modified_base 6: mod_base = OTHER; note = 2'-O-methylguanosine-3'-phosphate
  modified_base 7: mod_base = OTHER; note = 2'-deoxy-2'-fluorocytidine-3'-phosphate
  modified_base 8: mod_base = OTHER; note = 2'-O-methyladenosine-3'-phosphate
  modified_base 9: mod_base = OTHER; note = 2'-deoxy-2'-fluoroadenosine-3'-phosphate
  modified_base 10: mod_base = OTHER; note = 2'-deoxy-2'-fluorocytidine-3'-phosphate
  modified_base 11: mod_base = OTHER; note = 2'-deoxy-2'-fluoroadenosine-3'-phosphate
  modified_base 12: mod_base = OTHER; note = 2'-O-methylcytidine-3'-phosphate
  modified_base 13: mod_base = OTHER; note = 2'-O-methyladenosine-3'-phosphate
  modified_base 14: mod_base = OTHER; note = 2'-O-methyladenosine-3'-phosphate
  modified_base 15: mod_base = OTHER; note = 2'-O-methylcytidine-3'-phosphate
  modified_base 16: mod_base = OTHER; note = 2'-O-methylcytidine-3'-phosphate
  modified_base 17: mod_base = OTHER; note = 2'-O-methyladenosine-3'-phosphate
  modified_base 18: mod_base = OTHER; note = 2'-O-methylcytidine-3'-phosphate
  modified_base 19: mod_base = OTHER; note = 2'-O-methylcytidine-3'-phosphorothioate
  modified_base 20: mod_base = OTHER; note = 2'-O-methyluridine-3'-phosphorothioate
  modified_base 21: mod_base = OTHER; note = 2'-O-methyladenosine
cgtgtgcaacacaaccaccta

SEQ ID NO: 2613 - RNA, 21 nt, synthetic construct
  source 1..21: mol_type = other RNA
  modified_base 1: mod_base = OTHER; note = 2'-O-methylcytidine-3'-phosphorothioate
  modified_base 2: mod_base = OTHER; note = 2'-O-methyladenosine-3'-phosphorothioate
  modified_base 3: mod_base = OTHER; note = 2'-O-methylguanosine-3'-phosphate
  modified_base 4: mod_base = OTHER; note = 2'-O-methylguanosine-3'-phosphate
  modified_base 5: mod_base = OTHER; note = 2'-O-methyladenosine-3'-phosphate
  modified_base 6: mod_base = OTHER; note = 2'-O-methylguanosine-3'-phosphate
  modified_base 7: mod_base = OTHER; note = 2'-deoxy-2'-fluorouridine-3'-phosphate
  modified_base 8: mod_base = OTHER; note = 2'-O-methylcytidine-3'-phosphate
  modified_base 9: mod_base = OTHER; note = 2'-deoxy-2'-fluorocytidine-3'-phosphate
  modified_base 10: mod_base = OTHER; note = 2'-deoxy-2'-fluoroadenosine-3'-phosphate
  modified_base 11: mod_base = OTHER; note = 2'-deoxy-2'-fluorouridine-3'-phosphate
  modified_base 12: mod_base = OTHER; note = 2'-O-methylcytidine-3'-phosphate
  modified_base 13: mod_base = OTHER; note = 2'-O-methyluridine-3'-phosphate
  modified_base 14: mod_base = OTHER; note = 2'-O-methylguanosine-3'-phosphate
  modified_base 15: mod_base = OTHER; note = 2'-O-methylcytidine-3'-phosphate
  modified_base 16: mod_base = OTHER; note = 2'-O-methyladenosine-3'-phosphate
  modified_base 17: mod_base = OTHER; note = 2'-O-methylcytidine-3'-phosphate
  modified_base 18: mod_base = OTHER; note = 2'-O-methylcytidine-3'-phosphate
  modified_base 19: mod_base = OTHER; note = 2'-O-methylcytidine-3'-phosphorothioate
  modified_base 20: mod_base = OTHER; note = 2'-O-methyladenosine-3'-phosphorothioate
  modified_base 21: mod_base = OTHER; note = 2'-O-methyladenosine
caggagtccatctgcacccaa

SEQ ID NO: 2614 - RNA, 21 nt, synthetic construct
  source 1..21: mol_type = other RNA
  modified_base 1: mod_base = OTHER; note = 2'-O-methylcytidine-3'-phosphorothioate
  modified_base 2: mod_base = OTHER; note = 2'-O-methyluridine-3'-phosphorothioate
  modified_base 3: mod_base = OTHER; note = 2'-O-methylguanosine-3'-phosphate
  modified_base 4: mod_base = OTHER; note = 2'-O-methyluridine-3'-phosphate
  modified_base 5: mod_base = OTHER; note = 2'-O-methylcytidine-3'-phosphate
  modified_base 6: mod_base = OTHER; note = 2'-O-methylcytidine-3'-phosphate
  modified_base 7: mod_base = OTHER; note = 2'-deoxy-2'-fluorocytidine-3'-phosphate
  modified_base 8: mod_base = OTHER; note = 2'-O-methyladenosine-3'-phosphate
  modified_base 9: mod_base = OTHER; note = 2'-deoxy-2'-fluorocytidine-3'-phosphate
  modified_base 10: mod_base = OTHER; note = 2'-deoxy-2'-fluorocytidine-3'-phosphate
  modified_base 11: mod_base = OTHER; note = 2'-deoxy-2'-fluorouridine-3'-phosphate
  modified_base 12: mod_base = OTHER; note = 2'-O-methyluridine-3'-phosphate
  modified_base 13: mod_base = OTHER; note = 2'-O-methylcytidine-3'-phosphate
  modified_base 14: mod_base = OTHER; note = 2'-O-methylcytidine-3'-phosphate
  modified_base 15: mod_base = OTHER; note = 2'-O-methylguanosine-3'-phosphate
  modified_base 16: mod_base = OTHER; note = 2'-O-methylcytidine-3'-phosphate
  modified_base 17: mod_base = OTHER; note = 2'-O-methyluridine-3'-phosphate
  modified_base 18: mod_base = OTHER; note = 2'-O-methylguanosine-3'-phosphate
  modified_base 19: mod_base = OTHER; note = 2'-O-methylcytidine-3'-phosphorothioate
  modified_base 20: mod_base = OTHER; note = 2'-O-methyladenosine-3'-phosphorothioate
  modified_base 21: mod_base = OTHER; note = 2'-O-methyladenosine
ctgtcccaccttccgctgcaa

SEQ ID NO: 2615 - RNA, 21 nt, synthetic construct
  source 1..21: mol_type = other RNA
  modified_base 1: mod_base = OTHER; note = 2'-O-methyluridine-3'-phosphorothioate
  modified_base 2: mod_base = OTHER; note = 2'-O-methylcytidine-3'-phosphorothioate
  modified_base 3: mod_base = OTHER; note = 2'-O-methyladenosine-3'-phosphate
  modified_base 4: mod_base = OTHER; note = 2'-O-methylguanosine-3'-phosphate
  modified_base 5: mod_base = OTHER; note = 2'-O-methylcytidine-3'-phosphate
  modified_base 6: mod_base = OTHER; note = 2'-O-methyluridine-3'-phosphate
  modified_base 7: mod_base = OTHER; note = 2'-deoxy-2'-fluoroguanosine-3'-phosphate
  modified_base 8: mod_base = OTHER; note = 2'-O-methyluridine-3'-phosphate
  modified_base 9: mod_base = OTHER; note = 2'-deoxy-2'-fluoroguanosine-3'-phosphate
  modified_base 10: mod_base = OTHER; note = 2'-deoxy-2'-fluorouridine-3'-phosphate
  modified_base 11: mod_base = OTHER; note = 2'-deoxy-2'-fluorouridine-3'-phosphate
  modified_base 12: mod_base = OTHER; note = 2'-O-methylcytidine-3'-phosphate
  modified_base 13: mod_base = OTHER; note = 2'-O-methylguanosine-3'-phosphate
  modified_base 14: mod_base = OTHER; note = 2'-O-methyluridine-3'-phosphate
  modified_base 15: mod_base = OTHER; note = 2'-O-methyladenosine-3'-phosphate
  modified_base 16: mod_base = OTHER; note = 2'-O-methylcytidine-3'-phosphate
  modified_base 17: mod_base = OTHER; note = 2'-O-methyladenosine-3'-phosphate
  modified_base 18: mod_base = OTHER; note = 2'-O-methyladenosine-3'-phosphate
  modified_base 19: mod_base = OTHER; note = 2'-O-methyluridine-3'-phosphorothioate
  modified_base 20: mod_base = OTHER; note = 2'-O-methylguanosine-3'-phosphorothioate
  modified_base 21: mod_base = OTHER; note = 2'-O-methyladenosine
tcagctgtgttcgtacaatga

SEQ ID NO: 2616 - RNA, 21 nt, synthetic construct
  source 1..21: mol_type = other RNA
  modified_base 1: mod_base = OTHER; note = 2'-O-methyluridine-3'-phosphorothioate
  modified_base 2: mod_base = OTHER; note = 2'-O-methyluridine-3'-phosphorothioate
  modified_base 3: mod_base = OTHER; note = 2'-O-methylguanosine-3'-phosphate
  modified_base 4: mod_base = OTHER; note = 2'-O-methylguanosine-3'-phosphate
  modified_base 5: mod_base = OTHER; note = 2'-O-methyluridine-3'-phosphate
  modified_base 6: mod_base = OTHER; note = 2'-O-methylguanosine-3'-phosphate
  modified_base 7: mod_base = OTHER; note = 2'-deoxy-2'-fluorocytidine-3'-phosphate
  modified_base 8: mod_base = OTHER; note = 2'-O-methyladenosine-3'-phosphate
  modified_base 9: mod_base = OTHER; note = 2'-deoxy-2'-fluoroadenosine-3'-phosphate
  modified_base 10: mod_base = OTHER; note = 2'-deoxy-2'-fluorocytidine-3'-phosphate
  modified_base 11: mod_base = OTHER; note = 2'-deoxy-2'-fluorocytidine-3'-phosphate
  modified_base 12: mod_base = OTHER; note = 2'-O-methyluridine-3'-phosphate
  modified_base 13: mod_base = OTHER; note = 2'-O-methyluridine-3'-phosphate
  modified_base 14: mod_base = OTHER; note = 2'-O-methylcytidine-3'-phosphate
  modified_base 15: mod_base = OTHER; note = 2'-O-methylcytidine-3'-phosphate
  modified_base 16: mod_base = OTHER; note = 2'-O-methylcytidine-3'-phosphate
  modified_base 17: mod_base = OTHER; note = 2'-O-methyladenosine-3'-phosphate
  modified_base 18: mod_base = OTHER; note = 2'-O-methylguanosine-3'-phosphate
  modified_base 19: mod_base = OTHER; note = 2'-O-methylguanosine-3'-phosphorothioate
  modified_base 20: mod_base = OTHER; note = 2'-O-methylcytidine-3'-phosphorothioate
  modified_base 21: mod_base = OTHER; note = 2'-O-methyladenosine
ttggtgcaaccttcccaggca

SEQ ID NO: 2617 - RNA, 21 nt, synthetic construct
  source 1..21: mol_type = other RNA
  modified_base 1: mod_base = OTHER; note = 2'-O-methyluridine-3'-phosphorothioate
  modified_base 2: mod_base = OTHER; note = 2'-O-methylcytidine-3'-phosphorothioate
  modified_base 3: mod_base = OTHER; note = 2'-O-methylcytidine-3'-phosphate
  modified_base 4: mod_base = OTHER; note = 2'-O-methylcytidine-3'-phosphate
  modified_base 5: mod_base = OTHER; note = 2'-O-methyluridine-3'-phosphate
  modified_base 6: mod_base = OTHER; note = 2'-O-methylguanosine-3'-phosphate
  modified_base 7: mod_base = OTHER; note = 2'-deoxy-2'-fluorocytidine-3'-phosphate
  modified_base 8: mod_base = OTHER; note = 2'-O-methylcytidine-3'-phosphate
  modified_base 9: mod_base = OTHER; note = 2'-deoxy-2'-fluoroadenosine-3'-phosphate
  modified_base 10: mod_base = OTHER; note = 2'-deoxy-2'-fluorocytidine-3'-phosphate
  modified_base 11: mod_base = OTHER; note = 2'-deoxy-2'-fluoroadenosine-3'-phosphate
  modified_base 12: mod_base = OTHER; note = 2'-O-methyluridine-3'-phosphate
  modified_base 13: mod_base = OTHER; note = 2'-O-methylguanosine-3'-phosphate
  modified_base 14: mod_base = OTHER; note = 2'-O-methyluridine-3'-phosphate
  modified_base 15: mod_base = OTHER; note = 2'-O-methylguanosine-3'-phosphate
  modified_base 16: mod_base = OTHER; note = 2'-O-methyluridine-3'-phosphate
  modified_base 17: mod_base = OTHER; note = 2'-O-methyladenosine-3'-phosphate
  modified_base 18: mod_base = OTHER; note = 2'-O-methylcytidine-3'-phosphate
  modified_base 19: mod_base = OTHER; note = 2'-O-methylcytidine-3'-phosphorothioate
  modified_base 20: mod_base = OTHER; note = 2'-O-methyluridine-3'-phosphorothioate
  modified_base 21: mod_base = OTHER; note = 2'-O-methyladenosine
tccctgccacatgtgtaccta

SEQ ID NO: 2618 - RNA, 21 nt, synthetic construct
  source 1..21: mol_type = other RNA
  modified_base 1: mod_base = OTHER; note = 2'-O-methyladenosine-3'-phosphorothioate
  modified_base 2: mod_base = OTHER; note = 2'-O-methylcytidine-3'-phosphorothioate
  modified_base 3: mod_base = OTHER; note = 2'-O-methylguanosine-3'-phosphate
  modified_base 4: mod_base = OTHER; note = 2'-O-methylguanosine-3'-phosphate
  modified_base 5: mod_base = OTHER; note = 2'-O-methyluridine-3'-phosphate
  modified_base 6: mod_base = OTHER; note = 2'-O-methylguanosine-3'-phosphate
  modified_base 7: mod_base = OTHER; note = 2'-deoxy-2'-fluorocytidine-3'-phosphate
  modified_base 8: mod_base = OTHER; note = 2'-O-methyladenosine-3'-phosphate
  modified_base 9: mod_base = OTHER; note = 2'-deoxy-2'-fluoroadenosine-3'-phosphate
  modified_base 10: mod_base = OTHER; note = 2'-deoxy-2'-fluorouridine-3'-phosphate
  modified_base 11: mod_base = OTHER; note = 2'-deoxy-2'-fluoroguanosine-3'-phosphate
  modified_base 12: mod_base = OTHER; note = 2'-O-methyluridine-3'-phosphate
  modified_base 13: mod_base = OTHER; note = 2'-O-methylcytidine-3'-phosphate
  modified_base 14: mod_base = OTHER; note = 2'-O-methyladenosine-3'-phosphate
  modified_base 15: mod_base = OTHER; note = 2'-O-methylguanosine-3'-phosphate
  modified_base 16: mod_base = OTHER; note = 2'-O-methylguanosine-3'-phosphate
  modified_base 17: mod_base = OTHER; note = 2'-O-methyladenosine-3'-phosphate
  modified_base 18: mod_base = OTHER; note = 2'-O-methylguanosine-3'-phosphate
  modified_base 19: mod_base = OTHER; note = 2'-O-methylguanosine-3'-phosphorothioate
  modified_base 20: mod_base = OTHER; note = 2'-O-methyladenosine-3'-phosphorothioate
  modified_base 21: mod_base = OTHER; note = 2'-O-methyladenosine
acggtgcaatgtcaggaggaa

SEQ ID NO: 2619 - RNA, 21 nt, synthetic construct
  source 1..21: mol_type = other RNA
  modified_base 1: mod_base = OTHER; note = 2'-O-methylcytidine-3'-phosphorothioate
  modified_base 2: mod_base = OTHER; note = 2'-O-methyluridine-3'-phosphorothioate
  modified_base 3: mod_base = OTHER; note = 2'-O-methylguanosine-3'-phosphate
  modified_base 4: mod_base = OTHER; note = 2'-O-methylcytidine-3'-phosphate
  modified_base 5: mod_base = OTHER; note = 2'-O-methyladenosine-3'-phosphate
  modified_base 6: mod_base = OTHER; note = 2'-O-methyladenosine-3'-phosphate
  modified_base 7: mod_base = OTHER; note = 2'-deoxy-2'-fluorocytidine-3'-phosphate
  modified_base 8: mod_base = OTHER; note = 2'-O-methyladenosine-3'-phosphate
  modified_base 9: mod_base = OTHER; note = 2'-deoxy-2'-fluoroadenosine-3'-phosphate
  modified_base 10: mod_base = OTHER; note = 2'-deoxy-2'-fluorouridine-3'-phosphate
  modified_base 11: mod_base = OTHER; note = 2'-deoxy-2'-fluoroadenosine-3'-phosphate
  modified_base 12: mod_base = OTHER; note = 2'-O-methylcytidine-3'-phosphate
  modified_base 13: mod_base = OTHER; note = 2'-O-methyluridine-3'-phosphate
  modified_base 14: mod_base = OTHER; note = 2'-O-methyladenosine-3'-phosphate
  modified_base 15: mod_base = OTHER; note = 2'-O-methylcytidine-3'-phosphate
  modified_base 16: mod_base = OTHER; note = 2'-O-methylcytidine-3'-phosphate
  modified_base 17: mod_base = OTHER; note = 2'-O-methyluridine-3'-phosphate
  modified_base 18: mod_base = OTHER; note = 2'-O-methylguanosine-3'-phosphate
  modified_base 19: mod_base = OTHER; note = 2'-O-methyluridine-3'-phosphorothioate
  modified_base 20: mod_base = OTHER; note = 2'-O-methylcytidine-3'-phosphorothioate
  modified_base 21: mod_base = OTHER; note = 2'-O-methyladenosine
ctgcaacaatactacctgtca

SEQ ID NO: 2620 - RNA, 21 nt, synthetic construct
  source 1..21: mol_type = other RNA
  modified_base 1: mod_base = OTHER; note = 2'-O-methylguanosine-3'-phosphorothioate
  modified_base 2: mod_base = OTHER; note = 2'-O-methylguanosine-3'-phosphorothioate
  modified_base 3: mod_base = OTHER; note = 2'-O-methylguanosine-3'-phosphate
  modified_base 4: mod_base = OTHER; note = 2'-O-methylcytidine-3'-phosphate
  modified_base 5: mod_base = OTHER; note = 2'-O-methyluridine-3'-phosphate
  modified_base 6: mod_base = OTHER; note = 2'-O-methyluridine-3'-phosphate
  modified_base 7: mod_base = OTHER; note = 2'-deoxy-2'-fluorouridine-3'-phosphate
  modified_base 8: mod_base = OTHER; note = 2'-O-methylguanosine-3'-phosphate
  modified_base 9: mod_base = OTHER; note = 2'-deoxy-2'-fluoroadenosine-3'-phosphate
  modified_base 10: mod_base = OTHER; note = 2'-deoxy-2'-fluoroguanosine-3'-phosphate
  modified_base 11: mod_base = OTHER; note = 2'-deoxy-2'-fluorouridine-3'-phosphate
  modified_base 12: mod_base = OTHER; note = 2'-O-methyladenosine-3'-phosphate
  modified_base 13: mod_base = OTHER; note = 2'-O-methylcytidine-3'-phosphate
  modified_base 14: mod_base = OTHER; note = 2'-O-methyladenosine-3'-phosphate
  modified_base 15: mod_base = OTHER; note = 2'-O-methyladenosine-3'-phosphate
  modified_base 16: mod_base = OTHER; note = 2'-O-methylguanosine-3'-phosphate
  modified_base 17: mod_base = OTHER; note = 2'-O-methyladenosine-3'-phosphate
  modified_base 18: mod_base = OTHER; note = 2'-O-methylguanosine-3'-phosphate
  modified_base 19: mod_base = OTHER; note = 2'-O-methyladenosine-3'-phosphorothioate
  modified_base 20: mod_base = OTHER; note = 2'-O-methylguanosine-3'-phosphorothioate
  modified_base 21: mod_base = OTHER; note = 2'-O-methyladenosine
gggctttgagtacaagagaga

SEQ ID NO: 2621 - RNA, 21 nt, synthetic construct
  source 1..21: mol_type = other RNA
  modified_base 1: mod_base = OTHER; note = 2'-O-methylguanosine-3'-phosphorothioate
  modified_base 2: mod_base = OTHER; note = 2'-O-methyluridine-3'-phosphorothioate
  modified_base 3: mod_base = OTHER; note = 2'-O-methylcytidine-3'-phosphate
  modified_base 4: mod_base = OTHER; note = 2'-O-methylcytidine-3'-phosphate
  modified_base 5: mod_base = OTHER; note = 2'-O-methyladenosine-3'-phosphate
  modified_base 6: mod_base = OTHER; note = 2'-O-methylguanosine-3'-phosphate
  modified_base 7: mod_base = OTHER; note = 2'-deoxy-2'-fluorocytidine-3'-phosphate
  modified_base 8: mod_base = OTHER; note = 2'-O-methyluridine-3'-phosphate
  modified_base 9: mod_base = OTHER; note = 2'-deoxy-2'-fluoroguanosine-3'-phosphate
  modified_base 10: mod_base = OTHER; note = 2'-deoxy-2'-fluoroadenosine-3'-phosphate
  modified_base 11: mod_base = OTHER; note = 2'-deoxy-2'-fluoroadenosine-3'-phosphate
  modified_base 12: mod_base = OTHER; note = 2'-O-methyluridine-3'-phosphate
  modified_base 13: mod_base = OTHER; note = 2'-O-methylguanosine-3'-phosphate
  modified_base 14: mod_base = OTHER; note = 2'-O-methyladenosine-3'-phosphate
  modified_base 15: mod_base = OTHER; note = 2'-O-methyladenosine-3'-phosphate
  modified_base 16: mod_base = OTHER; note = 2'-O-methyladenosine-3'-phosphate
  modified_base 17: mod_base = OTHER; note = 2'-O-methylcytidine-3'-phosphate
  modified_base 18: mod_base = OTHER; note = 2'-O-methylcytidine-3'-phosphate
  modified_base 19: mod_base = OTHER; note = 2'-O-methyluridine-3'-phosphorothioate
  modified_base 20: mod_base = OTHER; note = 2'-O-methylguanosine-3'-phosphorothioate
  modified_base 21: mod_base = OTHER; note = 2'-O-methyladenosine
gtccagctgaatgaaacctga

SEQ ID NO: 2622 - RNA, 21 nt, synthetic construct
  source 1..21: mol_type = other RNA
  modified_base 1: mod_base = OTHER; note = 2'-O-methylcytidine-3'-phosphorothioate
  modified_base 2: mod_base = OTHER; note = 2'-O-methyladenosine-3'-phosphorothioate
  modified_base 3: mod_base = OTHER; note = 2'-O-methyladenosine-3'-phosphate
  modified_base 4: mod_base = OTHER; note = 2'-O-methylcytidine-3'-phosphate
  modified_base 5: mod_base = OTHER; note = 2'-O-methyladenosine-3'-phosphate
  modified_base 6: mod_base = OTHER; note = 2'-O-methylguanosine-3'-phosphate
  modified_base 7: mod_base = OTHER; note = 2'-deoxy-2'-fluorocytidine-3'-phosphate
  modified_base 8: mod_base = OTHER; note = 2'-O-methylcytidine-3'-phosphate
  modified_base 9: mod_base = OTHER; note = 2'-deoxy-2'-fluoroadenosine-3'-phosphate
  modified_base 10: mod_base = OTHER; note = 2'-deoxy-2'-fluorouridine-3'-phosphate
  modified_base 11: mod_base = OTHER; note = 2'-deoxy-2'-fluoroguanosine-3'-phosphate
  modified_base 12: mod_base = OTHER; note = 2'-O-methyluridine-3'-phosphate
  modified_base 13: mod_base = OTHER; note = 2'-O-methylguanosine-3'-phosphate
  modified_base 14: mod_base = OTHER; note = 2'-O-methylguanosine-3'-phosphate
  modified_base 15: mod_base = OTHER; note = 2'-O-methyladenosine-3'-phosphate
  modified_base 16: mod_base = OTHER; note = 2'-O-methylcytidine-3'-phosphate
  modified_base 17: mod_base = OTHER; note = 2'-O-methyladenosine-3'-phosphate
  modified_base 18: mod_base = OTHER; note = 2'-O-methyladenosine-3'-phosphate
  modified_base 19: mod_base = OTHER; note = 2'-O-methylcytidine-3'-phosphorothioate
  modified_base 20: mod_base = OTHER; note = 2'-O-methyluridine-3'-phosphorothioate
  modified_base 21: mod_base = OTHER; note = 2'-O-methyladenosine
caacagccatgtggacaacta

SEQ ID NO: 2623 - RNA, 21 nt, synthetic construct
  source 1..21: mol_type = other RNA
  modified_base 1: mod_base = OTHER; note = 2'-O-methylcytidine-3'-phosphorothioate
  modified_base 2: mod_base = OTHER; note = 2'-O-methylcytidine-3'-phosphorothioate
  modified_base 3: mod_base = OTHER; note = 2'-O-methylguanosine-3'-phosphate
  modified_base 4: mod_base = OTHER; note = 2'-O-methyluridine-3'-phosphate
  modified_base 5: mod_base = OTHER; note = 2'-O-methylguanosine-3'-phosphate
  modified_base 6: mod_base = OTHER; note = 2'-O-methyluridine-3'-phosphate
  modified_base 7: mod_base = OTHER; note = 2'-deoxy-2'-fluoroadenosine-3'-phosphate
  modified_base 8: mod_base = OTHER; note = 2'-O-methylcytidine-3'-phosphate
  modified_base 9: mod_base = OTHER; note = 2'-deoxy-2'-fluorocytidine-3'-phosphate
  modified_base 10: mod_base = OTHER; note = 2'-deoxy-2'-fluorouridine-3'-phosphate
  modified_base 11: mod_base = OTHER; note = 2'-deoxy-2'-fluorocytidine-3'-phosphate
  modified_base 12: mod_base = OTHER; note = 2'-O-methyluridine-3'-phosphate
  modified_base 13: mod_base = OTHER; note = 2'-O-methylguanosine-3'-phosphate
  modified_base 14: mod_base = OTHER; note = 2'-O-methyluridine-3'-phosphate
  modified_base 15: mod_base = OTHER; note = 2'-O-methylguanosine-3'-phosphate
  modified_base 16: mod_base = OTHER; note = 2'-O-methyladenosine-3'-phosphate
  modified_base 17: mod_base = OTHER; note = 2'-O-methylguanosine-3'-phosphate
  modified_base 18: mod_base = OTHER; note = 2'-O-methylguanosine-3'-phosphate
  modified_base 19: mod_base = OTHER; note = 2'-O-methylcytidine-3'-phosphorothioate
  modified_base 20: mod_base = OTHER; note = 2'-O-methyluridine-3'-phosphorothioate
  modified_base 21: mod_base = OTHER; note = 2'-O-methyladenosine
ccgtgtacctctgtgaggcta

SEQ ID NO: 2624 - RNA, 21 nt, synthetic construct
  source 1..21: mol_type = other RNA
  modified_base 1: mod_base = OTHER; note = 2'-O-methylguanosine-3'-phosphorothioate
  modified_base 2: mod_base = OTHER; note = 2'-O-methylguanosine-3'-phosphorothioate
  modified_base 3: mod_base = OTHER; note = 2'-O-methyluridine-3'-phosphate
  modified_base 4: mod_base = OTHER; note = 2'-O-methylguanosine-3'-phosphate
  modified_base 5: mod_base = OTHER; note = 2'-O-methylguanosine-3'-phosphate
  modified_base 6: mod_base = OTHER; note = 2'-O-methyladenosine-3'-phosphate
  modified_base 7: mod_base = OTHER; note = 2'-deoxy-2'-fluoroguanosine-3'-phosphate
  modified_base 8: mod_base = OTHER; note = 2'-O-methyluridine-3'-phosphate
  modified_base 9: mod_base = OTHER; note = 2'-deoxy-2'-fluorocytidine-3'-phosphate
  modified_base 10: mod_base = OTHER; note = 2'-deoxy-2'-fluorocytidine-3'-phosphate
  modified_base 11: mod_base = OTHER; note = 2'-deoxy-2'-fluoroadenosine-3'-phosphate
  modified_base 12: mod_base = OTHER; note = 2'-O-methyluridine-3'-phosphate
  modified_base 13: mod_base = OTHER; note = 2'-O-methyluridine-3'-phosphate
  modified_base 14: mod_base = OTHER; note = 2'-O-methyluridine-3'-phosphate
  modified_base 15: mod_base = OTHER; note = 2'-O-methylguanosine-3'-phosphate
  modified_base 16: mod_base = OTHER; note = 2'-O-methylcytidine-3'-phosphate
  modified_base 17: mod_base = OTHER; note = 2'-O-methyluridine-3'-phosphate
  modified_base 18: mod_base = OTHER; note = 2'-O-methylguanosine-3'-phosphate
  modified_base 19: mod_base = OTHER; note = 2'-O-methyladenosine-3'-phosphorothioate
  modified_base 20: mod_base = OTHER; note = 2'-O-methylcytidine-3'-phosphorothioate
  modified_base 21: mod_base = OTHER; note = 2'-O-methyladenosine
ggtggagtccatttgctgaca

SEQ ID NO: 2625 - RNA, 21 nt, synthetic construct
  source 1..21: mol_type = other RNA
  modified_base 1: mod_base = OTHER; note = 2'-O-methylcytidine-3'-phosphorothioate
  modified_base 2: mod_base = OTHER; note = 2'-O-methyluridine-3'-phosphorothioate
  modified_base 3: mod_base = OTHER; note = 2'-O-methylguanosine-3'-phosphate
  modified_base 4: mod_base = OTHER; note = 2'-O-methylcytidine-3'-phosphate
  modified_base 5: mod_base = OTHER; note = 2'-O-methylcytidine-3'-phosphate
  modified_base 6: mod_base = OTHER; note = 2'-O-methylcytidine-3'-phosphate
  modified_base 7: mod_base = OTHER; note = 2'-deoxy-2'-fluoroadenosine-3'-phosphate
  modified_base 8: mod_base = OTHER; note = 2'-O-methylguanosine-3'-phosphate
  modified_base 9: mod_base = OTHER; note = 2'-deoxy-2'-fluoroadenosine-3'-phosphate
  modified_base 10: mod_base = OTHER; note = 2'-deoxy-2'-fluorouridine-3'-phosphate
  modified_base 11: mod_base = OTHER; note = 2'-deoxy-2'-fluoroguanosine-3'-phosphate
  modified_base 12: mod_base = OTHER; note = 2'-O-methyluridine-3'-phosphate
  modified_base 13: mod_base = OTHER; note = 2'-O-methylguanosine-3'-phosphate
  modified_base 14: mod_base = OTHER; note = 2'-O-methyluridine-3'-phosphate
  modified_base 15: mod_base = OTHER; note = 2'-O-methylcytidine-3'-phosphate
  modified_base 16: mod_base = OTHER; note = 2'-O-methylcytidine-3'-phosphate
  modified_base 17: mod_base = OTHER; note = 2'-O-methyladenosine-3'-phosphate
  modified_base 18: mod_base = OTHER; note = 2'-O-methylguanosine-3'-phosphate
  modified_base 19: mod_base = OTHER; note = 2'-O-methylcytidine-3'-phosphorothioate
  modified_base 20: mod_base = OTHER; note = 2'-O-methyluridine-3'-phosphorothioate
  modified_base 21: mod_base = OTHER; note = 2'-O-methyladenosine
ctgcccagatgtgtccagcta

SEQ ID NO: 2626 - RNA, 21 nt, synthetic construct
  source 1..21: mol_type = other RNA
  modified_base 1: mod_base = OTHER; note = 2'-O-methylguanosine-3'-phosphorothioate
  modified_base 2: mod_base = OTHER; note = 2'-O-methylcytidine-3'-phosphorothioate
  modified_base 3: mod_base = OTHER; note = 2'-O-methyluridine-3'-phosphate
  modified_base 4: mod_base = OTHER; note = 2'-O-methylguanosine-3'-phosphate
  modified_base 5: mod_base = OTHER; note = 2'-O-methylcytidine-3'-phosphate
  modified_base 6: mod_base = OTHER; note = 2'-O-methyluridine-3'-phosphate
  modified_base 7: mod_base = OTHER; note = 2'-deoxy-2'-fluoroadenosine-3'-phosphate
  modified_base 8: mod_base = OTHER; note = 2'-O-methylcytidine-3'-phosphate
  modified_base 9: mod_base = OTHER; note = 2'-deoxy-2'-fluorouridine-3'-phosphate
  modified_base 10: mod_base = OTHER; note = 2'-deoxy-2'-fluorocytidine-3'-phosphate
  modified_base 11: mod_base = OTHER; note = 2'-deoxy-2'-fluorocytidine-3'-phosphate
  modified_base 12: mod_base = OTHER; note = 2'-O-methyluridine-3'-phosphate
  modified_base 13: mod_base = OTHER; note = 2'-O-methylguanosine-3'-phosphate
  modified_base 14: mod_base = OTHER; note = 2'-O-methyluridine-3'-phosphate
  modified_base 15: mod_base = OTHER; note = 2'-O-methylguanosine-3'-phosphate
  modified_base 16: mod_base = OTHER; note = 2'-O-methyladenosine-3'-phosphate
  modified_base 17: mod_base = OTHER; note = 2'-O-methylguanosine-3'-phosphate
  modified_base 18: mod_base = OTHER; note = 2'-O-methylguanosine-3'-phosphate
  modified_base 19: mod_base = OTHER; note = 2'-O-methyladenosine-3'-phosphorothioate
  modified_base 20: mod_base = OTHER; note = 2'-O-methylguanosine-3'-phosphorothioate
  modified_base 21: mod_base = OTHER; note = 2'-O-methyladenosine
gctgctactcctgtgaggaga

SEQ ID NO: 2627 - RNA, 21 nt, synthetic construct
  source 1..21: mol_type = other RNA
  modified_base 1: mod_base = OTHER; note = 2'-O-methyluridine-3'-phosphorothioate
  modified_base 2: mod_base = OTHER; note = 2'-O-methylcytidine-3'-phosphorothioate
  modified_base 3: mod_base = OTHER; note = 2'-O-methylcytidine-3'-phosphate
  modified_base 4: mod_base = OTHER; note = 2'-O-methyluridine-3'-phosphate
  modified_base 5: mod_base = OTHER; note = 2'-O-methylguanosine-3'-phosphate
  modified_base 6: mod_base = OTHER; note = 2'-O-methyluridine-3'-phosphate
  modified_base 7: mod_base = OTHER; note = 2'-deoxy-2'-fluorocytidine-3'-phosphate
  modified_base 8: mod_base = OTHER; note = 2'-O-methyladenosine-3'-phosphate
  modified_base 9: mod_base = OTHER; note = 2'-deoxy-2'-fluoroadenosine-3'-phosphate
  modified_base 10: mod_base = OTHER; note = 2'-deoxy-2'-fluoroguanosine-3'-phosphate
  modified_base 11: mod_base = OTHER; note = 2'-deoxy-2'-fluorouridine-3'-phosphate
  modified_base 12: mod_base = OTHER; note = 2'-O-methylcytidine-3'-phosphate
  modified_base 13: mod_base = OTHER; note = 2'-O-methylcytidine-3'-phosphate
  modified_base 14: mod_base = OTHER; note = 2'-O-methylguanosine-3'-phosphate
  modified_base 15: mod_base = OTHER; note = 2'-O-methylcytidine-3'-phosphate
  modified_base 16: mod_base = OTHER; note = 2'-O-methyladenosine-3'-phosphate
  modified_base 17: mod_base = OTHER; note = 2'-O-methyluridine-3'-phosphate
  modified_base 18: mod_base = OTHER; note = 2'-O-methylcytidine-3'-phosphate
  modified_base 19: mod_base = OTHER; note = 2'-O-methyladenosine-3'-phosphorothioate
  modified_base 20: mod_base = OTHER; note = 2'-O-methyladenosine-3'-phosphorothioate
  modified_base 21: mod_base = OTHER; note = 2'-O-methyladenosine
tcctgtcaagtccgcatcaaa

SEQ ID NO: 2628 - RNA, 21 nt, synthetic construct
  source 1..21: mol_type = other RNA
  modified_base 1: mod_base = OTHER; note = 2'-O-methylguanosine-3'-phosphorothioate
  modified_base 2: mod_base = OTHER; note = 2'-O-methyladenosine-3'-phosphorothioate
  modified_base 3: mod_base = OTHER; note = 2'-O-methylcytidine-3'-phosphate
  modified_base 4: mod_base = OTHER; note = 2'-O-methylcytidine-3'-phosphate
  modified_base 5: mod_base = OTHER; note = 2'-O-methyladenosine-3'-phosphate
  modified_base 6: mod_base = OTHER; note = 2'-O-methyluridine-3'-phosphate
  modified_base 7: mod_base = OTHER; note = 2'-deoxy-2'-fluorocytidine-3'-phosphate
  modified_base 8: mod_base = OTHER; note = 2'-O-methylcytidine-3'-phosphate
  modified_base 9: mod_base = OTHER; note = 2'-deoxy-2'-fluorouridine-3'-phosphate
  modified_base 10: mod_base = OTHER; note = 2'-deoxy-2'-fluoroguanosine-3'-phosphate
  modified_base 11: mod_base = OTHER; note = 2'-deoxy-2'-fluorouridine-3'-phosphate
  modified_base 12: mod_base = OTHER; note = 2'-O-methylguanosine-3'-phosphate
  modified_base 13: mod_base = OTHER; note = 2'-O-methylguanosine-3'-phosphate
  modified_base 14: mod_base = OTHER; note = 2'-O-methylcytidine-3'-phosphate
  modified_base 15: mod_base = OTHER; note = 2'-O-methyladenosine-3'-phosphate
  modified_base 16: mod_base = OTHER; note = 2'-O-methylcytidine-3'-phosphate
  modified_base 17: mod_base = OTHER; note = 2'-O-methylcytidine-3'-phosphate
  modified_base 18: mod_base = OTHER; note = 2'-O-methyladenosine-3'-phosphate
  modified_base 19: mod_base = OTHER; note = 2'-O-methylguanosine-3'-phosphorothioate
  modified_base 20: mod_base = OTHER; note = 2'-O-methylguanosine-3'-phosphorothioate
  modified_base 21: mod_base = OTHER; note = 2'-O-methyladenosine
gaccatcctgtggcaccagga

SEQ ID NO: 2629 - RNA, 21 nt, synthetic construct
  source 1..21: mol_type = other RNA
  modified_base 1: mod_base = OTHER; note = 2'-O-methylguanosine-3'-phosphorothioate
  modified_base 2: mod_base = OTHER; note = 2'-O-methylguanosine-3'-phosphorothioate
  modified_base 3: mod_base = OTHER; note = 2'-O-methyluridine-3'-phosphate
  modified_base 4: mod_base = OTHER; note = 2'-O-methylcytidine-3'-phosphate
  modified_base 5: mod_base = OTHER; note = 2'-O-methyladenosine-3'-phosphate
  modified_base 6: mod_base = OTHER; note = 2'-O-methyladenosine-3'-phosphate
  modified_base 7: mod_base = OTHER; note = 2'-deoxy-2'-fluorocytidine-3'-phosphate
  modified_base 8: mod_base = OTHER; note = 2'-O-methyladenosine-3'-phosphate
  modified_base 9: mod_base = OTHER; note = 2'-deoxy-2'-fluorouridine-3'-phosphate
  modified_base 10: mod_base = OTHER; note = 2'-deoxy-2'-fluorocytidine-3'-phosphate
  modified_base 11: mod_base = OTHER; note = 2'-deoxy-2'-fluoroadenosine-3'-phosphate
  modified_base 12: mod_base = OTHER; note = 2'-O-methylcytidine-3'-phosphate
  modified_base 13: mod_base = OTHER; note = 2'-O-methylcytidine-3'-phosphate
  modified_base 14: mod_base = OTHER; note = 2'-O-methyluridine-3'-phosphate
  modified_base 15: mod_base = OTHER; note = 2'-O-methyluridine-3'-phosphate
  modified_base 16: mod_base = OTHER; note = 2'-O-methylcytidine-3'-phosphate
  modified_base 17: mod_base = OTHER; note = 2'-O-methyluridine-3'-phosphate
  modified_base 18: mod_base = OTHER; note = 2'-O-methylguanosine-3'-phosphate
  modified_base 19: mod_base = OTHER; note = 2'-O-methylcytidine-3'-phosphorothioate
  modified_base 20: mod_base = OTHER; note = 2'-O-methylguanosine-3'-phosphorothioate
  modified_base 21: mod_base = OTHER; note = 2'-O-methyladenosine
ggtcaacatcaccttctgcga

SEQ ID NO: 2630 - RNA, 21 nt, synthetic construct
  source 1..21: mol_type = other RNA
  modified_base 1: mod_base = OTHER; note = 2'-O-methylcytidine-3'-phosphorothioate
  modified_base 2: mod_base = OTHER; note = 2'-O-methylguanosine-3'-phosphorothioate
  modified_base 3: mod_base = OTHER; note = 2'-O-methyluridine-3'-phosphate
  modified_base 4: mod_base = OTHER; note = 2'-O-methylcytidine-3'-phosphate
  modified_base 5: mod_base = OTHER; note = 2'-O-methylcytidine-3'-phosphate
  modified_base 6: mod_base = OTHER; note = 2'-O-methyladenosine-3'-phosphate
  modified_base 7: mod_base = OTHER; note = 2'-deoxy-2'-fluoroadenosine-3'-phosphate
  modified_base 8: mod_base = OTHER; note = 2'-O-methylguanosine-3'-phosphate
  modified_base 9: mod_base = OTHER; note = 2'-deoxy-2'-fluorouridine-3'-phosphate
  modified_base 10: mod_base = OTHER; note = 2'-deoxy-2'-fluoroadenosine-3'-phosphate
  modified_base 11: mod_base = OTHER; note = 2'-deoxy-2'-fluorocytidine-3'-phosphate
  modified_base 12: mod_base = OTHER; note = 2'-O-methyluridine-3'-phosphate
  modified_base 13: mod_base = OTHER; note = 2'-O-methylcytidine-3'-phosphate
  modified_base 14: mod_base = OTHER; note = 2'-O-methyladenosine-3'-phosphate
  modified_base 15: mod_base = OTHER; note = 2'-O-methylguanosine-3'-phosphate
  modified_base 16: mod_base = OTHER; note = 2'-O-methylcytidine-3'-phosphate
  modified_base 17: mod_base = OTHER; note = 2'-O-methyladenosine-3'-phosphate
  modified_base 18: mod_base = OTHER; note = 2'-O-methylguanosine-3'-phosphate
  modified_base 19: mod_base = OTHER; note = 2'-O-methyladenosine-3'-phosphorothioate
  modified_base 20: mod_base = OTHER; note = 2'-O-methylguanosine-3'-phosphorothioate
  modified_base 21: mod_base = OTHER; note = 2'-O-methyladenosine
cgtccaagtactcagcagaga

SEQ ID NO: 2631 - RNA, 21 nt, synthetic construct
  source 1..21: mol_type = other RNA
  modified_base 1: mod_base = OTHER; note = 2'-O-methyladenosine-3'-phosphorothioate
  modified_base 2: mod_base = OTHER; note = 2'-O-methyluridine-3'-phosphorothioate
  modified_base 3: mod_base = OTHER; note = 2'-O-methylguanosine-3'-phosphate
  modified_base 4: mod_base = OTHER; note = 2'-O-methylcytidine-3'-phosphate
  modified_base 5: mod_base = OTHER; note = 2'-O-methyladenosine-3'-phosphate
  modified_base 6: mod_base = OTHER; note = 2'-O-methylguanosine-3'-phosphate
  modified_base 7: mod_base = OTHER; note = 2'-deoxy-2'-fluorocytidine-3'-phosphate
  modified_base 8: mod_base = OTHER; note = 2'-O-methyladenosine-3'-phosphate
  modified_base 9: mod_base = OTHER; note = 2'-deoxy-2'-fluorocytidine-3'-phosphate
  modified_base 10: mod_base = OTHER; note = 2'-deoxy-2'-fluorocytidine-3'-phosphate
  modified_base 11: mod_base = OTHER; note = 2'-deoxy-2'-fluoroadenosine-3'-phosphate
  modified_base 12: mod_base = OTHER; note = 2'-O-methylguanosine-3'-phosphate
  modified_base 13: mod_base = OTHER; note = 2'-O-methyluridine-3'-phosphate
  modified_base 14: mod_base = OTHER; note = 2'-O-methylguanosine-3'-phosphate
  modified_base 15: mod_base = OTHER; note = 2'-O-methylcytidine-3'-phosphate
  modified_base 16: mod_base = OTHER; note = 2'-O-methyladenosine-3'-phosphate
  modified_base 17: mod_base = OTHER; note = 2'-O-methylcytidine-3'-phosphate
  modified_base 18: mod_base = OTHER; note = 2'-O-methylcytidine-3'-phosphate
  modified_base 19: mod_base = OTHER; note = 2'-O-methyluridine-3'-phosphorothioate
  modified_base 20: mod_base = OTHER; note = 2'-O-methylguanosine-3'-phosphorothioate
  modified_base 21: mod_base = OTHER; note = 2'-O-methyladenosine
atgcagcaccagtgcacctga

SEQ ID NO: 2632 - RNA, 21 nt, synthetic construct
  source 1..21: mol_type = other RNA
  modified_base 1: mod_base = OTHER; note = 2'-O-methylguanosine-3'-phosphorothioate
  modified_base 2: mod_base = OTHER; note = 2'-O-methylcytidine-3'-phosphorothioate
  modified_base 3: mod_base = OTHER; note = 2'-O-methylcytidine-3'-phosphate
  modified_base 4: mod_base = OTHER; note = 2'-O-methylcytidine-3'-phosphate
  modified_base 5: mod_base = OTHER; note = 2'-O-methyluridine-3'-phosphate
  modified_base 6: mod_base = OTHER; note = 2'-O-methyluridine-3'-phosphate
  modified_base 7: mod_base = OTHER; note = 2'-deoxy-2'-fluoroguanosine-3'-phosphate
  modified_base 8: mod_base = OTHER; note = 2'-O-methylcytidine-3'-phosphate
  modified_base 9: mod_base = OTHER; note = 2'-deoxy-2'-fluoroadenosine-3'-phosphate
  modified_base 10: mod_base = OTHER; note = 2'-deoxy-2'-fluorocytidine-3'-phosphate
  modified_base 11: mod_base = OTHER; note = 2'-deoxy-2'-fluorouridine-3'-phosphate
  modified_base 12: mod_base = OTHER; note = 2'-O-methylguanosine-3'-phosphate
  modified_base 13: mod_base = OTHER; note = 2'-O-methyluridine-3'-phosphate
  modified_base 14: mod_base = OTHER; note = 2'-O-methylcytidine-3'-phosphate
  modified_base 15: mod_base = OTHER; note = 2'-O-methylcytidine-3'-phosphate
  modified_base 16: mod_base = OTHER; note = 2'-O-methyluridine-3'-phosphate
  modified_base 17: mod_base = OTHER; note = 2'-O-methyladenosine-3'-phosphate
  modified_base 18: mod_base = OTHER; note = 2'-O-methyladenosine-3'-phosphate
  modified_base 19: mod_base = OTHER; note = 2'-O-methylcytidine-3'-phosphorothioate
  modified_base 20: mod_base = OTHER; note = 2'-O-methylguanosine-3'-phosphorothioate
  modified_base 21: mod_base = OTHER; note = 2'-O-methyladenosine
gcccttgcactgtcctaacga

SEQ ID NO: 2633 - RNA, 21 nt, synthetic construct
  source 1..21: mol_type = other RNA
  modified_base 1: mod_base = OTHER; note = 2'-O-methylcytidine-3'-phosphorothioate
  modified_base 2: mod_base = OTHER; note = 2'-O-methyluridine-3'-phosphorothioate
  modified_base 3: mod_base = OTHER; note = 2'-O-methylguanosine-3'-phosphate
  modified_base 4: mod_base = OTHER; note = 2'-O-methylcytidine-3'-phosphate
  modified_base 5: mod_base = OTHER; note = 2'-O-methyladenosine-3'-phosphate
  modified_base 6: mod_base = OTHER; note = 2'-O-methylcytidine-3'-phosphate
  modified_base 7: mod_base = OTHER; note = 2'-deoxy-2'-fluoroadenosine-3'-phosphate
  modified_base 8: mod_base = OTHER; note = 2'-O-methylcytidine-3'-phosphate
  modified_base 9: mod_base = OTHER; note = 2'-deoxy-2'-fluorocytidine-3'-phosphate
  modified_base 10: mod_base = OTHER; note = 2'-deoxy-2'-fluorouridine-3'-phosphate
  modified_base 11: mod_base = OTHER; note = 2'-deoxy-2'-fluoroadenosine-3'-phosphate
  modified_base 12: mod_base = OTHER; note = 2'-O-methylcytidine-3'-phosphate
  modified_base 13: mod_base = OTHER; note = 2'-O-methyladenosine-3'-phosphate
  modified_base 14: mod_base = OTHER; note = 2'-O-methylcytidine-3'-phosphate
  modified_base 15: mod_base = OTHER; note = 2'-O-methylcytidine-3'-phosphate
  modified_base 16: mod_base = OTHER; note = 2'-O-methylcytidine-3'-phosphate
  modified_base 17: mod_base = OTHER; note = 2'-O-methyladenosine-3'-phosphate
  modified_base 18: mod_base = OTHER; note = 2'-O-methylcytidine-3'-phosphate
  modified_base 19: mod_base = OTHER; note = 2'-O-methylguanosine-3'-phosphorothioate
  modified_base 20: mod_base = OTHER; note = 2'-O-methyluridine-3'-phosphorothioate
  modified_base 21: mod_base = OTHER; note = 2'-O-methyladenosine
ctgcacacctacacccacgta

SEQ ID NO: 2634 - RNA, 21 nt, synthetic construct
  source 1..21: mol_type = other RNA
  modified_base 1: mod_base = OTHER; note = 2'-O-methylguanosine-3'-phosphorothioate
  modified_base 2: mod_base = OTHER; note = 2'-O-methylcytidine-3'-phosphorothioate
  modified_base 3: mod_base = OTHER; note = 2'-O-methyladenosine-3'-phosphate
  modified_base 4: mod_base = OTHER; note = 2'-O-methylcytidine-3'-phosphate
  modified_base 5: mod_base = OTHER; note = 2'-O-methylguanosine-3'-phosphate
  modified_base 6: mod_base = OTHER; note = 2'-O-methylcytidine-3'-phosphate
  modified_base 7: mod_base = OTHER; note = 2'-deoxy-2'-fluorocytidine-3'-phosphate
  modified_base 8: mod_base = OTHER; note = 2'-O-methylcytidine-3'-phosphate
  modified_base 9: mod_base = OTHER; note = 2'-deoxy-2'-fluorouridine-3'-phosphate
  modified_base 10: mod_base = OTHER; note = 2'-deoxy-2'-fluorouridine-3'-phosphate
  modified_base 11: mod_base = OTHER; note = 2'-deoxy-2'-fluorocytidine-3'-phosphate
  modified_base 12: mod_base = OTHER; note = 2'-O-methyluridine-3'-phosphate
  modified_base 13: mod_base = OTHER; note = 2'-O-methylguanosine-3'-phosphate
  modified_base 14: mod_base = OTHER; note = 2'-O-methyluridine-3'-phosphate
  modified_base 15: mod_base = OTHER; note = 2'-O-methylguanosine-3'-phosphate
  modified_base 16: mod_base = OTHER; note = 2'-O-methyluridine-3'-phosphate
  modified_base 17: mod_base = OTHER; note = 2'-O-methylcytidine-3'-phosphate
  modified_base 18: mod_base = OTHER; note = 2'-O-methylcytidine-3'-phosphate
  modified_base 19: mod_base = OTHER; note = 2'-O-methylcytidine-3'-phosphorothioate
  modified_base 20: mod_base = OTHER; note = 2'-O-methyluridine-3'-phosphorothioate
  modified_base 21: mod_base = OTHER; note = 2'-O-methyladenosine
gcacgcccttctgtgtcccta

SEQ ID NO: 2635 - RNA, 21 nt, synthetic construct
  source 1..21: mol_type = other RNA
  modified_base 1: mod_base = OTHER; note = 2'-O-methyladenosine-3'-phosphorothioate
  modified_base 2: mod_base = OTHER; note = 2'-O-methylcytidine-3'-phosphorothioate
  modified_base 3: mod_base = OTHER; note = 2'-O-methyluridine-3'-phosphate
  modified_base 4: mod_base = OTHER; note = 2'-O-methylguanosine-3'-phosphate
  modified_base 5: mod_base = OTHER; note = 2'-O-methylcytidine-3'-phosphate
  modified_base 6: mod_base = OTHER; note = 2'-O-methyluridine-3'-phosphate
  modified_base 7: mod_base = OTHER; note = 2'-deoxy-2'-fluoroguanosine-3'-phosphate
  modified_base 8: mod_base = OTHER; note = 2'-O-methyluridine-3'-phosphate
  modified_base 9: mod_base = OTHER; note = 2'-deoxy-2'-fluorocytidine-3'-phosphate
  modified_base 10: mod_base = OTHER; note = 2'-deoxy-2'-fluorouridine-3'-phosphate
  modified_base 11: mod_base = OTHER; note = 2'-deoxy-2'-fluoroguanosine-3'-phosphate
  modified_base 12: mod_base = OTHER; note = 2'-O-methyladenosine-3'-phosphate
  modified_base 13: mod_base = OTHER; note = 2'-O-methylguanosine-3'-phosphate
  modified_base 14: mod_base = OTHER; note = 2'-O-methyladenosine-3'-phosphate
  modified_base 15: mod_base = OTHER; note = 2'-O-methyladenosine-3'-phosphate
  modified_base 16: mod_base = OTHER; note = 2'-O-methylcytidine-3'-phosphate
  modified_base 17: mod_base = OTHER; note = 2'-O-methylguanosine-3'-phosphate
  modified_base 18: mod_base = OTHER; note = 2'-O-methyluridine-3'-phosphate
  modified_base 19: mod_base = OTHER; note = 2'-O-methyluridine-3'-phosphorothioate
  modified_base 20: mod_base = OTHER; note = 2'-O-methylcytidine-3'-phosphorothioate
  modified_base 21: mod_base = OTHER; note = 2'-O-methyladenosine
actgctgtctgagaacgttca

SEQ ID NO: 2636 - RNA, 21 nt, synthetic construct
  source 1..21: mol_type = other RNA
  modified_base 1: mod_base = OTHER; note = 2'-O-methylcytidine-3'-phosphorothioate
  modified_base 2: mod_base = OTHER; note = 2'-O-methyladenosine-3'-phosphorothioate
  modified_base 3: mod_base = OTHER; note = 2'-O-methyluridine-3'-phosphate
  modified_base 4: mod_base = OTHER; note = 2'-O-methylguanosine-3'-phosphate
  modified_base 5: mod_base = OTHER; note = 2'-O-methylcytidine-3'-phosphate
  modified_base 6: mod_base = OTHER; note = 2'-O-methyluridine-3'-phosphate
  modified_base 7: mod_base = OTHER; note = 2'-deoxy-2'-fluorocytidine-3'-phosphate
  modified_base 8: mod_base = OTHER; note = 2'-O-methyluridine-3'-phosphate
  modified_base 9: mod_base = OTHER; note = 2'-deoxy-2'-fluoroguanosine-3'-phosphate
  modified_base 10: mod_base = OTHER; note = 2'-deoxy-2'-fluorouridine-3'-phosphate
  modified_base 11: mod_base = OTHER; note = 2'-deoxy-2'-fluorocytidine-3'-phosphate
  modified_base 12: mod_base = OTHER; note = 2'-O-methylcytidine-3'-phosphate
  modified_base 13: mod_base = OTHER; note = 2'-O-methyladenosine-3'-phosphate
  modified_base 14: mod_base = OTHER; note = 2'-O-methylcytidine-3'-phosphate
  modified_base 15: mod_base = OTHER; note = 2'-O-methylcytidine-3'-phosphate
  modified_base 16: mod_base = OTHER; note = 2'-O-methyluridine-3'-phosphate
  modified_base 17: mod_base = OTHER; note = 2'-O-methylguanosine-3'-phosphate
  modified_base 18: mod_base = OTHER; note = 2'-O-methylguanosine-3'-phosphate
  modified_base 19: mod_base = OTHER; note = 2'-O-methyladenosine-3'-phosphorothioate
  modified_base 20: mod_base = OTHER; note = 2'-O-methylguanosine-3'-phosphorothioate
  modified_base 21: mod_base = OTHER; note = 2'-O-methyladenosine
catgctctgtccacctggaga

SEQ ID NO: 2637 - RNA, 21 nt, synthetic construct
  source 1..21: mol_type = other RNA
  modified_base 1: mod_base = OTHER; note = 2'-O-methylguanosine-3'-phosphorothioate
  modified_base 2: mod_base = OTHER; note = 2'-O-methylcytidine-3'-phosphorothioate
  modified_base 3: mod_base = OTHER; note = 2'-O-methyladenosine-3'-phosphate
  modified_base 4: mod_base = OTHER; note = 2'-O-methyluridine-3'-phosphate
  modified_base 5: mod_base = OTHER; note = 2'-O-methyluridine-3'-phosphate
  modified_base 6: mod_base = OTHER; note = 2'-O-methylguanosine-3'-phosphate
  modified_base 7: mod_base = OTHER; note = 2'-deoxy-2'-fluorouridine-3'-phosphate
  modified_base 8: mod_base = OTHER; note = 2'-O-methylcytidine-3'-phosphate
  modified_base 9: mod_base = OTHER; note = 2'-deoxy-2'-fluorouridine-3'-phosphate
  modified_base 10: mod_base = OTHER; note = 2'-deoxy-2'-fluoroguanosine-3'-phosphate
  modified_base 11: mod_base = OTHER; note = 2'-deoxy-2'-fluoroadenosine-3'-phosphate
  modified_base 12: mod_base = OTHER; note = 2'-O-methyluridine-3'-phosphate
  modified_base 13: mod_base = OTHER; note = 2'-O-methylcytidine-3'-phosphate
  modified_base 14: mod_base = OTHER; note = 2'-O-methyladenosine-3'-phosphate
  modified_base 15: mod_base = OTHER; note = 2'-O-methyluridine-3'-phosphate
  modified_base 16: mod_base = OTHER; note = 2'-O-methylguanosine-3'-phosphate
  modified_base 17: mod_base = OTHER; note = 2'-O-methyladenosine-3'-phosphate
  modified_base 18: mod_base = OTHER; note = 2'-O-methyladenosine-3'-phosphate
  modified_base 19: mod_base = OTHER; note = 2'-O-methyladenosine-3'-phosphorothioate
  modified_base 20: mod_base = OTHER; note = 2'-O-methyladenosine-3'-phosphorothioate
  modified_base 21: mod_base = OTHER; note = 2'-O-methyladenosine
gcattgtctgatcatgaaaaa

SEQ ID NO: 2638 - RNA, 21 nt, synthetic construct
  source 1..21: mol_type = other RNA
  modified_base 1: mod_base = OTHER; note = 2'-O-methylguanosine-3'-phosphorothioate
  modified_base 2: mod_base = OTHER; note = 2'-O-methylguanosine-3'-phosphorothioate
  modified_base 3: mod_base = OTHER; note = 2'-O-methylcytidine-3'-phosphate
  modified_base 4: mod_base = OTHER; note = 2'-O-methylguanosine-3'-phosphate
  modified_base 5: mod_base = OTHER; note = 2'-O-methylcytidine-3'-phosphate
  modified_base 6: mod_base = OTHER; note = 2'-O-methylcytidine-3'-phosphate
  modified_base 7: mod_base = OTHER; note = 2'-deoxy-2'-fluoroadenosine-3'-phosphate
  modified_base 8: mod_base = OTHER; note = 2'-O-methylcytidine-3'-phosphate
  modified_base 9: mod_base = OTHER; note = 2'-deoxy-2'-fluorouridine-3'-phosphate
  modified_base 10: mod_base = OTHER; note = 2'-deoxy-2'-fluorocytidine-3'-phosphate
  modified_base 11: mod_base = OTHER; note = 2'-deoxy-2'-fluoroadenosine-3'-phosphate
  modified_base 12: mod_base = OTHER; note = 2'-O-methylguanosine-3'-phosphate
  modified_base 13: mod_base = OTHER; note = 2'-O-methylguanosine-3'-phosphate
  modified_base 14: mod_base = OTHER; note = 2'-O-methyladenosine-3'-phosphate
  modified_base 15: mod_base = OTHER; note = 2'-O-methylguanosine-3'-phosphate
  modified_base 16: mod_base = OTHER; note = 2'-O-methyluridine-3'-phosphate
  modified_base 17: mod_base = OTHER; note = 2'-O-methylcytidine-3'-phosphate
  modified_base 18: mod_base = OTHER; note = 2'-O-methylcytidine-3'-phosphate
  modified_base 19: mod_base = OTHER; note = 2'-O-methyluridine-3'-phosphorothioate
  modified_base 20: mod_base = OTHER; note = 2'-O-methyladenosine-3'-phosphorothioate
  modified_base 21: mod_base = OTHER; note = 2'-O-methyladenosine
ggcgccactcaggagtcctaa

SEQ ID NO: 2639 - RNA, 21 nt, synthetic construct
  source 1..21: mol_type = other RNA
  modified_base 1: mod_base = OTHER; note = 2'-O-methylcytidine-3'-phosphorothioate
  modified_base 2: mod_base = OTHER; note = 2'-O-methyluridine-3'-phosphorothioate
  modified_base 3: mod_base = OTHER; note = 2'-O-methylcytidine-3'-phosphate
  modified_base 4: mod_base = OTHER; note = 2'-O-methylcytidine-3'-phosphate
  modified_base 5: mod_base = OTHER; note = 2'-O-methylcytidine-3'-phosphate
  modified_base 6: mod_base = OTHER; note = 2'-O-methyluridine-3'-phosphate
  modified_base 7: mod_base = OTHER; note = 2'-deoxy-2'-fluoroguanosine-3'-phosphate
  modified_base 8: mod_base = OTHER; note = 2'-O-methyladenosine-3'-phosphate
  modified_base 9: mod_base = OTHER; note = 2'-deoxy-2'-fluorouridine-3'-phosphate
  modified_base 10: mod_base = OTHER; note = 2'-deoxy-2'-fluoroguanosine-3'-phosphate
  modified_base 11: mod_base = OTHER; note = 2'-deoxy-2'-fluorouridine-3'-phosphate
  modified_base 12: mod_base = OTHER; note = 2'-O-methylcytidine-3'-phosphate
  modified_base 13: mod_base = OTHER; note = 2'-O-methyladenosine-3'-phosphate
  modified_base 14: mod_base = OTHER; note = 2'-O-methylcytidine-3'-phosphate
  modified_base 15: mod_base = OTHER; note = 2'-O-methyluridine-3'-phosphate
  modified_base 16: mod_base = OTHER; note = 2'-O-methylguanosine-3'-phosphate
  modified_base 17: mod_base = OTHER; note = 2'-O-methylguanosine-3'-phosphate
  modified_base 18: mod_base = OTHER; note = 2'-O-methylguanosine-3'-phosphate
  modified_base 19: mod_base = OTHER; note = 2'-O-methyladenosine-3'-phosphorothioate
  modified_base 20: mod_base = OTHER; note = 2'-O-methylcytidine-3'-phosphorothioate
  modified_base 21: mod_base = OTHER; note = 2'-O-methyladenosine
ctccctgatgtcactgggaca

SEQ ID NO: 2640 - RNA, 21 nt, synthetic construct
  source 1..21: mol_type = other RNA
  modified_base 1: mod_base = OTHER; note = 2'-O-methylcytidine-3'-phosphorothioate
  modified_base 2: mod_base = OTHER; note = 2'-O-methyluridine-3'-phosphorothioate
  modified_base 3: mod_base = OTHER; note = 2'-O-methylguanosine-3'-phosphate
  modified_base 4: mod_base = OTHER; note = 2'-O-methylguanosine-3'-phosphate
  modified_base 5: mod_base = OTHER; note = 2'-O-methyladenosine-3'-phosphate
  modified_base 6: mod_base = OTHER; note = 2'-O-methyladenosine-3'-phosphate
  modified_base 7: mod_base = OTHER; note = 2'-deoxy-2'-fluorocytidine-3'-phosphate
  modified_base 8: mod_base = OTHER; note = 2'-O-methyladenosine-3'-phosphate
  modified_base 9: mod_base = OTHER; note = 2'-deoxy-2'-fluoroadenosine-3'-phosphate
  modified_base 10: mod_base = OTHER; note = 2'-deoxy-2'-fluoroadenosine-3'-phosphate
  modified_base 11: mod_base = OTHER; note = 2'-deoxy-2'-fluorocytidine-3'-phosphate
  modified_base 12: mod_base = OTHER; note = 2'-O-methyluridine-3'-phosphate
  modified_base 13: mod_base = OTHER; note = 2'-O-methyladenosine-3'-phosphate
  modified_base 14: mod_base = OTHER; note = 2'-O-methyladenosine-3'-phosphate
  modified_base 15: mod_base = OTHER; note = 2'-O-methylguanosine-3'-phosphate
  modified_base 16: mod_base = OTHER; note = 2'-O-methylcytidine-3'-phosphate
  modified_base 17: mod_base = OTHER; note = 2'-O-methyladenosine-3'-phosphate
  modified_base 18: mod_base = OTHER; note = 2'-O-methyluridine-3'-phosphate
  modified_base 19: mod_base = OTHER; note = 2'-O-methylguanosine-3'-phosphorothioate
  modified_base 20: mod_base = OTHER; note = 2'-O-methyluridine-3'-phosphorothioate
  modified_base 21: mod_base = OTHER; note = 2'-O-methyladenosine
ctggaacaaactaagcatgta

SEQ ID NO: 2641 - RNA, 21 nt, synthetic construct
  source 1..21: mol_type = other RNA
  modified_base 1: mod_base = OTHER; note = 2'-O-methylguanosine-3'-phosphorothioate
  modified_base 2: mod_base = OTHER; note = 2'-O-methylcytidine-3'-phosphorothioate
  modified_base 3: mod_base = OTHER; note = 2'-O-methyladenosine-3'-phosphate
  modified_base 4: mod_base = OTHER; note = 2'-O-methylcytidine-3'-phosphate
  modified_base 5: mod_base = OTHER; note = 2'-O-methylguanosine-3'-phosphate
  modified_base 6: mod_base = OTHER; note = 2'-O-methylguanosine-3'-phosphate
  modified_base 7: mod_base = OTHER; note = 2'-deoxy-2'-fluoroadenosine-3'-phosphate
  modified_base 8: mod_base = OTHER; note = 2'-O-methyluridine-3'-phosphate
  modified_base 9: mod_base = OTHER; note = 2'-deoxy-2'-fluorouridine-3'-phosphate
  modified_base 10: mod_base = OTHER; note = 2'-deoxy-2'-fluorocytidine-3'-phosphate
  modified_base 11: mod_base = OTHER; note = 2'-deoxy-2'-fluorocytidine-3'-phosphate
  modified_base 12: mod_base = OTHER; note = 2'-O-methyladenosine-3'-phosphate
  modified_base 13: mod_base = OTHER; note = 2'-O-methylguanosine-3'-phosphate
  modified_base 14: mod_base = OTHER; note = 2'-O-methylcytidine-3'-phosphate
  modified_base 15: mod_base = OTHER; note = 2'-O-methyluridine-3'-phosphate
  modified_base 16: mod_base = OTHER; note = 2'-O-methylguanosine-3'-phosphate
  modified_base 17: mod_base = OTHER; note = 2'-O-methylguanosine-3'-phosphate
  modified_base 18: mod_base = OTHER; note = 2'-O-methylcytidine-3'-phosphate
  modified_base 19: mod_base = OTHER; note = 2'-O-methylcytidine-3'-phosphorothioate
  modified_base 20: mod_base = OTHER; note = 2'-O-methyladenosine-3'-phosphorothioate
  modified_base 21: mod_base = OTHER; note = 2'-O-methyladenosine
gcacggattccagctggccaa

SEQ ID NO: 2642 - RNA, 21 nt, synthetic construct
  source 1..21: mol_type = other RNA
  modified_base 1: mod_base = OTHER; note = 2'-O-methylguanosine-3'-phosphorothioate
  modified_base 2: mod_base = OTHER; note = 2'-O-methyladenosine-3'-phosphorothioate
  modified_base 3: mod_base = OTHER; note = 2'-O-methylcytidine-3'-phosphate
  modified_base 4: mod_base = OTHER; note = 2'-O-methyladenosine-3'-phosphate
  modified_base 5: mod_base = OTHER; note = 2'-O-methylguanosine-3'-phosphate
  modified_base 6: mod_base = OTHER; note = 2'-O-methylguanosine-3'-phosphate
  modified_base 7: mod_base = OTHER; note = 2'-deoxy-2'-fluorocytidine-3'-phosphate
  modified_base 8: mod_base = OTHER; note = 2'-O-methyluridine-3'-phosphate
  modified_base 9: mod_base = OTHER; note = 2'-deoxy-2'-fluoroguanosine-3'-phosphate
  modified_base 10: mod_base = OTHER; note = 2'-deoxy-2'-fluoroguanosine-3'-phosphate
  modified_base 11: mod_base = OTHER; note = 2'-deoxy-2'-fluorouridine-3'-phosphate
  modified_base 12: mod_base = OTHER; note = 2'-O-methylcytidine-3'-phosphate
  modified_base 13: mod_base = OTHER; note = 2'-O-methylcytidine-3'-phosphate
  modified_base 14: mod_base = OTHER; note = 2'-O-methyladenosine-3'-phosphate
  modified_base 15: mod_base = OTHER; note = 2'-O-methylguanosine-3'-phosphate
  modified_base 16: mod_base = OTHER; note = 2'-O-methylguanosine-3'-phosphate
  modified_base 17: mod_base = OTHER; note = 2'-O-methylcytidine-3'-phosphate
  modified_base 18: mod_base = OTHER; note = 2'-O-methyladenosine-3'-phosphate
  modified_base 19: mod_base = OTHER; note = 2'-O-methyladenosine-3'-phosphorothioate
  modified_base 20: mod_base = OTHER; note = 2'-O-methylguanosine-3'-phosphorothioate
  modified_base 21: mod_base = OTHER; note = 2'-O-methyladenosine
gacaggctggtccaggcaaga

SEQ ID NO: 2643 - RNA, 21 nt, synthetic construct
  source 1..21: mol_type = other RNA
  modified_base 1: mod_base = OTHER; note = 2'-O-methylguanosine-3'-phosphorothioate
  modified_base 2: mod_base = OTHER; note = 2'-O-methylcytidine-3'-phosphorothioate
  modified_base 3: mod_base = OTHER; note = 2'-O-methyluridine-3'-phosphate
  modified_base 4: mod_base = OTHER; note = 2'-O-methylguanosine-3'-phosphate
  modified_base 5: mod_base = OTHER; note = 2'-O-methylcytidine-3'-phosphate
  modified_base 6: mod_base = OTHER; note = 2'-O-methylcytidine-3'-phosphate
  modified_base 7: mod_base = OTHER; note = 2'-deoxy-2'-fluoroadenosine-3'-phosphate
  modified_base 8: mod_base = OTHER; note = 2'-O-methylguanosine-3'-phosphate
  modified_base 9: mod_base = OTHER; note = 2'-deoxy-2'-fluoroguanosine-3'-phosphate
  modified_base 10: mod_base = OTHER; note = 2'-deoxy-2'-fluoroadenosine-3'-phosphate
  modified_base 11: mod_base = OTHER; note = 2'-deoxy-2'-fluoroadenosine-3'-phosphate
  modified_base 12: mod_base = OTHER; note = 2'-O-methylguanosine-3'-phosphate
  modified_base 13: mod_base = OTHER; note = 2'-O-methylcytidine-3'-phosphate
  modified_base 14: mod_base = OTHER; note = 2'-O-methyluridine-3'-phosphate
  modified_base 15: mod_base = OTHER; note = 2'-O-methylguanosine-3'-phosphate
  modified_base 16: mod_base = OTHER; note = 2'-O-methylcytidine-3'-phosphate
  modified_base 17: mod_base = OTHER; note = 2'-O-methylguanosine-3'-phosphate
  modified_base 18: mod_base = OTHER; note = 2'-O-methyladenosine-3'-phosphate
  modified_base 19: mod_base = OTHER; note = 2'-O-methylcytidine-3'-phosphorothioate
  modified_base 20: mod_base = OTHER; note = 2'-O-methyladenosine-3'-phosphorothioate
  modified_base 21: mod_base = OTHER; note = 2'-O-methyladenosine
gctgccaggaagctgcgacaa

SEQ ID NO: 2644 - RNA, 21 nt, synthetic construct
  source 1..21: mol_type = other RNA
  modified_base 1: mod_base = OTHER; note = 2'-O-methylguanosine-3'-phosphorothioate
  modified_base 2: mod_base = OTHER; note = 2'-O-methylcytidine-3'-phosphorothioate
  modified_base 3: mod_base = OTHER; note = 2'-O-methyladenosine-3'-phosphate
  modified_base 4: mod_base = OTHER; note = 2'-O-methylguanosine-3'-phosphate
  modified_base 5: mod_base = OTHER; note = 2'-O-methylguanosine-3'-phosphate
  modified_base 6: mod_base = OTHER; note = 2'-O-methylguanosine-3'-phosphate
  modified_base 7: mod_base = OTHER; note = 2'-deoxy-2'-fluorouridine-3'-phosphate
  modified_base 8: mod_base = OTHER; note = 2'-O-methyladenosine-3'-phosphate
  modified_base 9: mod_base = OTHER; note = 2'-deoxy-2'-fluoroadenosine-3'-phosphate
  modified_base 10: mod_base = OTHER; note = 2'-deoxy-2'-fluorocytidine-3'-phosphate
  modified_base 11: mod_base = OTHER; note = 2'-deoxy-2'-fluorouridine-3'-phosphate
  modified_base 12: mod_base = OTHER; note = 2'-O-methylcytidine-3'-phosphate
  modified_base 13: mod_base = OTHER; note = 2'-O-methyladenosine-3'-phosphate
  modified_base 14: mod_base = OTHER; note = 2'-O-methylguanosine-3'-phosphate
  modified_base 15: mod_base = OTHER; note = 2'-O-methylguanosine-3'-phosphate
  modified_base 16: mod_base = OTHER; note = 2'-O-methylguanosine-3'-phosphate
  modified_base 17: mod_base = OTHER; note = 2'-O-methylcytidine-3'-phosphate
  modified_base 18: mod_base = OTHER; note = 2'-O-methyluridine-3'-phosphate
  modified_base 19: mod_base = OTHER; note = 2'-O-methylguanosine-3'-phosphorothioate
  modified_base 20: mod_base = OTHER; note = 2'-O-methyladenosine-3'-phosphorothioate
  modified_base 21: mod_base = OTHER; note = 2'-O-methyladenosine
gcagggtaactcagggctgaa

SEQ ID NO: 2645 - RNA, 21 nt, synthetic construct
  source 1..21: mol_type = other RNA
  modified_base 1: mod_base = OTHER; note = 2'-O-methylguanosine-3'-phosphorothioate
  modified_base 2: mod_base = OTHER; note = 2'-O-methylcytidine-3'-phosphorothioate
  modified_base 3: mod_base = OTHER; note = 2'-O-methyladenosine-3'-phosphate
  modified_base 4: mod_base = OTHER; note = 2'-O-methyladenosine-3'-phosphate
  modified_base 5: mod_base = OTHER; note = 2'-O-methylcytidine-3'-phosphate
  modified_base 6: mod_base = OTHER; note = 2'-O-methylguanosine-3'-phosphate
  modified_base 7: mod_base = OTHER; note = 2'-deoxy-2'-fluoroguanosine-3'-phosphate
  modified_base 8: mod_base = OTHER; note = 2'-O-methylcytidine-3'-phosphate
  modified_base 9: mod_base = OTHER; note = 2'-deoxy-2'-fluorocytidine-3'-phosphate
  modified_base 10: mod_base = OTHER; note = 2'-deoxy-2'-fluoroadenosine-3'-phosphate
  modified_base 11: mod_base = OTHER; note = 2'-deoxy-2'-fluoroguanosine-3'-phosphate
  modified_base 12: mod_base = OTHER; note = 2'-O-methylguanosine-3'-phosphate
  modified_base 13: mod_base = OTHER; note = 2'-O-methyluridine-3'-phosphate
  modified_base 14: mod_base = OTHER; note = 2'-O-methylcytidine-3'-phosphate
  modified_base 15: mod_base = OTHER; note = 2'-O-methyladenosine-3'-phosphate
  modified_base 16: mod_base = OTHER; note = 2'-O-methylguanosine-3'-phosphate
  modified_base 17: mod_base = OTHER; note = 2'-O-methyladenosine-3'-phosphate
  modified_base 18: mod_base = OTHER; note = 2'-O-methylguanosine-3'-phosphate
  modified_base 19: mod_base = OTHER; note = 2'-O-methyladenosine-3'-phosphorothioate
  modified_base 20: mod_base = OTHER; note = 2'-O-methylguanosine-3'-phosphorothioate
  modified_base 21: mod_base = OTHER; note = 2'-O-methyladenosine
gcaacggccaggtcagagaga

SEQ ID NO: 2646 - RNA, 21 nt, synthetic construct
  source 1..21: mol_type = other RNA
  modified_base 1: mod_base = OTHER; note = 2'-O-methyladenosine-3'-phosphorothioate
  modified_base 2: mod_base = OTHER; note = 2'-O-methylguanosine-3'-phosphorothioate
  modified_base 3: mod_base = OTHER; note = 2'-O-methylcytidine-3'-phosphate
  modified_base 4: mod_base = OTHER; note = 2'-O-methylcytidine-3'-phosphate
  modified_base 5: mod_base = OTHER; note = 2'-O-methylcytidine-3'-phosphate
  modified_base 6: mod_base = OTHER; note = 2'-O-methyladenosine-3'-phosphate
  modified_base 7: mod_base = OTHER; note = 2'-deoxy-2'-fluoroguanosine-3'-phosphate
  modified_base 8: mod_base = OTHER; note = 2'-O-methyluridine-3'-phosphate
  modified_base 9: mod_base = OTHER; note = 2'-deoxy-2'-fluorouridine-3'-phosphate
  modified_base 10: mod_base = OTHER; note = 2'-deoxy-2'-fluorouridine-3'-phosphate
  modified_base 11: mod_base = OTHER; note = 2'-deoxy-2'-fluorouridine-3'-phosphate
  modified_base 12: mod_base = OTHER; note = 2'-O-methylguanosine-3'-phosphate
  modified_base 13: mod_base = OTHER; note = 2'-O-methylcytidine-3'-phosphate
  modified_base 14: mod_base = OTHER; note = 2'-O-methyladenosine-3'-phosphate
  modified_base 15: mod_base = OTHER; note = 2'-O-methyladenosine-3'-phosphate
  modified_base 16: mod_base = OTHER; note = 2'-O-methyladenosine-3'-phosphate
  modified_base 17: mod_base = OTHER; note = 2'-O-methyluridine-3'-phosphate
  modified_base 18: mod_base = OTHER; note = 2'-O-methyladenosine-3'-phosphate
  modified_base 19: mod_base = OTHER; note = 2'-O-methyladenosine-3'-phosphorothioate
  modified_base 20: mod_base = OTHER; note = 2'-O-methyladenosine-3'-phosphorothioate
  modified_base 21: mod_base = OTHER; note = 2'-O-methyladenosine
agcccagttttgcaaataaaa

SEQ ID NO: 2647 - RNA, 23 nt, synthetic construct
  source 1..23: mol_type = other RNA
  modified_base 1: mod_base = OTHER; note = 2'-O-methyluridine-3'-phosphorothioate 5'-(E)-Vinylphosphonate
  modified_base 2: mod_base = OTHER; note = 2'-deoxy-2'-fluoroadenosine-3'-phosphorothioate
  modified_base 3: mod_base = OTHER; note = 2'-O-methylguanosine-3'-phosphate
  modified_base 4: mod_base = OTHER; note = 2'-O-methylcytidine-3'-phosphate
  modified_base 5: mod_base = OTHER; note = 2'-O-methyladenosine-3'-phosphate
  modified_base 6: mod_base = OTHER; note = 2'-deoxy-2'-fluorouridine-3'-phosphate
  modified_base 7: mod_base = OTHER; note = 2'-O-methylguanosine-3'-phosphate
  modified_base 8: mod_base = OTHER; note = 2'-deoxy-2'-fluoroguanosine-3'-phosphate
  modified_base 9: mod_base = OTHER; note = 2'-deoxy-2'-fluorocytidine-3'-phosphate
  modified_base 10: mod_base = OTHER; note = 2'-O-methylcytidine-3'-phosphate
  modified_base 11: mod_base = OTHER; note = 2'-O-methylguanosine-3'-phosphate
  modified_base 12: mod_base = OTHER; note = 2'-O-methylcytidine-3'-phosphate
  modified_base 13: mod_base = OTHER; note = 2'-O-methylcytidine-3'-phosphate
  modified_base 14: mod_base = OTHER; note = 2'-deoxy-2'-fluoroadenosine-3'-phosphate
  modified_base 15: mod_base = OTHER; note = 2'-O-methylguanosine-3'-phosphate
  modified_base 16: mod_base = OTHER; note = 2'-deoxy-2'-fluoroadenosine-3'-phosphate
  modified_base 17: mod_base = OTHER; note = 2'-O-methylguanosine-3'-phosphate
  modified_base 18: mod_base = OTHER; note = 2'-O-methylcytidine-3'-phosphate
  modified_base 19: mod_base = OTHER; note = 2'-O-methylcytidine-3'-phosphate
  modified_base 20: mod_base = OTHER; note = 2'-O-methyladenosine-3'-phosphate
  modified_base 21: mod_base = OTHER; note = 2'-O-methyladenosine-3'-phosphorothioate
  modified_base 22: mod_base = OTHER; note = 2'-O-methylcytidine-3'-phosphorothioate
  modified_base 23: mod_base = OTHER; note = 2'-O-methyladenosine
tagcatggccgccagagccaaca

SEQ ID NO: 2648 - RNA, 23 nt, synthetic construct
  source 1..23: mol_type = other RNA
  modified_base 1: mod_base = OTHER; note = 2'-O-methyluridine-3'-phosphorothioate 5'-(E)-Vinylphosphonate
  modified_base 2: mod_base = OTHER; note = 2'-deoxy-2'-fluorouridine-3'-phosphorothioate
  modified_base 3: mod_base = OTHER; note = 2'-O-methylguanosine-3'-phosphate
  modified_base 4: mod_base = OTHER; note = 2'-O-methyluridine-3'-phosphate
  modified_base 5: mod_base = OTHER; note = 2'-O-methylguanosine-3'-phosphate
  modified_base 6: mod_base = OTHER; note = 2'-deoxy-2'-fluorocytidine-3'-phosphate
  modified_base 7: mod_base = OTHER; note = 2'-O-methylcytidine-3'-phosphate
  modified_base 8: mod_base = OTHER; note = 2'-deoxy-2'-fluorocytidine-3'-phosphate
  modified_base 9: mod_base = OTHER; note = 2'-deoxy-2'-fluorouridine-3'-phosphate
  modified_base 10: mod_base = OTHER; note = 2'-O-methylguanosine-3'-phosphate
  modified_base 11: mod_base = OTHER; note = 2'-O-methylcytidine-3'-phosphate
  modified_base 12: mod_base = OTHER; note = 2'-O-methyladenosine-3'-phosphate
  modified_base 13: mod_base = OTHER; note = 2'-O-methyluridine-3'-phosphate
  modified_base 14: mod_base = OTHER; note = 2'-deoxy-2'-fluorouridine-3'-phosphate
  modified_base 15: mod_base = OTHER; note = 2'-O-methylcytidine-3'-phosphate
  modified_base 16: mod_base = OTHER; note = 2'-deoxy-2'-fluorouridine-3'-phosphate
  modified_base 17: mod_base = OTHER; note = 2'-O-methylcytidine-3'-phosphate
  modified_base 18: mod_base = OTHER; note = 2'-O-methylcytidine-3'-phosphate
  modified_base 19: mod_base = OTHER; note = 2'-O-methylcytidine-3'-phosphate
  modified_base 20: mod_base = OTHER; note = 2'-O-methyladenosine-3'-phosphate
  modified_base 21: mod_base = OTHER; note = 2'-O-methylguanosine-3'-phosphorothioate
  modified_base 22: mod_base = OTHER; note = 2'-O-methylcytidine-3'-phosphorothioate
  modified_base 23: mod_base = OTHER; note = 2'-O-methyluridine
ttgtgccctgcattctcccagct

SEQ ID NO: 2649 - RNA, 23 nt, synthetic construct
  source 1..23: mol_type = other RNA
  modified_base 1: mod_base = OTHER; note = 2'-O-methyluridine-3'-phosphorothioate 5'-(E)-Vinylphosphonate
  modified_base 2: mod_base = OTHER; note = 2'-deoxy-2'-fluoroguanosine-3'-phosphorothioate
  modified_base 3: mod_base = OTHER; note = 2'-O-methyluridine-3'-phosphate
  modified_base 4: mod_base = OTHER; note = 2'-O-methylguanosine-3'-phosphate
  modified_base 5: mod_base = OTHER; note = 2'-O-methylguanosine-3'-phosphate
  modified_base 6: mod_base = OTHER; note = 2'-deoxy-2'-fluoroadenosine-3'-phosphate
  modified_base 7: mod_base = OTHER; note = 2'-O-methyladenosine-3'-phosphate
  modified_base 8: mod_base = OTHER; note = 2'-deoxy-2'-fluorocytidine-3'-phosphate
  modified_base 9: mod_base = OTHER; note = 2'-deoxy-2'-fluoroadenosine-3'-phosphate
  modified_base 10: mod_base = OTHER; note = 2'-O-methyladenosine-3'-phosphate
  modified_base 11: mod_base = OTHER; note = 2'-O-methyladenosine-3'-phosphate
  modified_base 12: mod_base = OTHER; note = 2'-O-methylguanosine-3'-phosphate
  modified_base 13: mod_base = OTHER; note = 2'-O-methylcytidine-3'-phosphate
  modified_base 14: mod_base = OTHER; note = 2'-deoxy-2'-fluorouridine-3'-phosphate
  modified_base 15: mod_base = OTHER; note = 2'-O-methylcytidine-3'-phosphate
  modified_base 16: mod_base = OTHER; note = 2'-deoxy-2'-fluoroadenosine-3'-phosphate
  modified_base 17: mod_base = OTHER; note = 2'-O-methylcytidine-3'-phosphate
  modified_base 18: mod_base = OTHER; note = 2'-O-methylguanosine-3'-phosphate
  modified_base 19: mod_base = OTHER; note = 2'-O-methylcytidine-3'-phosphate
  modified_base 20: mod_base = OTHER; note = 2'-O-methylguanosine-3'-phosphate
  modified_base 21: mod_base = OTHER; note = 2'-O-methylcytidine-3'-phosphorothioate
  modified_base 22: mod_base = OTHER; note = 2'-O-methylcytidine-3'-phosphorothioate
  modified_base 23: mod_base = OTHER; note = 2'-O-methylguanosine
tgtggaacaaagctcacgcgccg

SEQ ID NO: 2650 - RNA, 23 nt, synthetic construct
  source 1..23: mol_type = other RNA
  modified_base 1: mod_base = OTHER; note = 2'-O-methyluridine-3'-phosphorothioate 5'-(E)-Vinylphosphonate
  modified_base 2: mod_base = OTHER; note = 2'-deoxy-2'-fluoroadenosine-3'-phosphorothioate
  modified_base 3: mod_base = OTHER; note = 2'-O-methylguanosine-3'-phosphate
  modified_base 4: mod_base = OTHER; note = 2'-O-methylguanosine-3'-phosphate
  modified_base 5: mod_base = OTHER; note = 2'-O-methyluridine-3'-phosphate
  modified_base 6: mod_base = OTHER; note = 2'-deoxy-2'-fluoroguanosine-3'-phosphate
  modified_base 7: mod_base = OTHER; note = 2'-O-methylcytidine-3'-phosphate
  modified_base 8: mod_base = OTHER; note = 2'-deoxy-2'-fluorouridine-3'-phosphate
  modified_base 9: mod_base = OTHER; note = 2'-deoxy-2'-fluoroguanosine-3'-phosphate
  modified_base 10: mod_base = OTHER; note = 2'-O-methylcytidine-3'-phosphate
  modified_base 11: mod_base = OTHER; note = 2'-O-methyladenosine-3'-phosphate
  modified_base 12: mod_base = OTHER; note = 2'-O-methylcytidine-3'-phosphate
  modified_base 13: mod_base = OTHER; note = 2'-O-methyladenosine-3'-phosphate
  modified_base 14: mod_base = OTHER; note = 2'-deoxy-2'-fluorocytidine-3'-phosphate
  modified_base 15: mod_base = OTHER; note = 2'-O-methylcytidine-3'-phosphate
  modified_base 16: mod_base = OTHER; note = 2'-deoxy-2'-fluorocytidine-3'-phosphate
  modified_base 17: mod_base = OTHER; note = 2'-O-methylguanosine-3'-phosphate
  modified_base 18: mod_base = OTHER; note = 2'-O-methylcytidine-3'-phosphate
  modified_base 19: mod_base = OTHER; note = 2'-O-methylcytidine-3'-phosphate
  modified_base 20: mod_base = OTHER; note = 2'-O-methylcytidine-3'-phosphate
  modified_base 21: mod_base = OTHER; note = 2'-O-methyladenosine-3'-phosphorothioate
  modified_base 22: mod_base = OTHER; note = 2'-O-methyluridine-3'-phosphorothioate
  modified_base 23: mod_base = OTHER; note = 2'-O-methyluridine
taggtgctgcacacccgcccatt

SEQ ID NO: 2651 - RNA, 23 nt, synthetic construct
  source 1..23: mol_type = other RNA
  modified_base 1: mod_base = OTHER; note = 2'-O-methyluridine-3'-phosphorothioate 5'-(E)-Vinylphosphonate
  modified_base 2: mod_base = OTHER; note = 2'-deoxy-2'-fluorocytidine-3'-phosphorothioate
  modified_base 3: mod_base = OTHER; note = 2'-O-methylguanosine-3'-phosphate
  modified_base 4: mod_base = OTHER; note = 2'-O-methyluridine-3'-phosphate
  modified_base 5: mod_base = OTHER; note = 2'-O-methylcytidine-3'-phosphate
  modified_base 6: mod_base = OTHER; note = 2'-deoxy-2'-fluoroguanosine-3'-phosphate
  modified_base 7: mod_base = OTHER; note = 2'-O-methyladenosine-3'-phosphate
  modified_base 8: mod_base = OTHER; note = 2'-deoxy-2'-fluoroadenosine-3'-phosphate
  modified_base 9: mod_base = OTHER; note = 2'-deoxy-2'-fluoroguanosine-3'-phosphate
  modified_base 10: mod_base = OTHER; note = 2'-O-methylguanosine-3'-phosphate
  modified_base 11: mod_base = OTHER; note = 2'-O-methyluridine-3'-phosphate
  modified_base 12: mod_base = OTHER; note = 2'-O-methylcytidine-3'-phosphate
  modified_base 13: mod_base = OTHER; note = 2'-O-methyluridine-3'-phosphate
  modified_base 14: mod_base = OTHER; note = 2'-deoxy-2'-fluorouridine-3'-phosphate
  modified_base 15: mod_base = OTHER; note = 2'-O-methylguanosine-3'-phosphate
  modified_base 16: mod_base = OTHER; note = 2'-deoxy-2'-fluorouridine-3'-phosphate
  modified_base 17: mod_base = OTHER; note = 2'-O-methyladenosine-3'-phosphate
  modified_base 18: mod_base = OTHER; note = 2'-O-methylguanosine-3'-phosphate
  modified_base 19: mod_base = OTHER; note = 2'-O-methyluridine-3'-phosphate
  modified_base 20: mod_base = OTHER; note = 2'-O-methylguanosine-3'-phosphate
  modified_base 21: mod_base = OTHER; note = 2'-O-methylguanosine-3'-phosphorothioate
  modified_base 22: mod_base = OTHER; note = 2'-O-methyladenosine-3'-phosphorothioate
  modified_base 23: mod_base = OTHER; note = 2'-O-methyladenosine
tcgtcgaaggtcttgtagtggaa

SEQ ID NO: 2652 - RNA, 23 nt, synthetic construct
  source 1..23: mol_type = other RNA
  modified_base 1: mod_base = OTHER; note = 2'-O-methyluridine-3'-phosphorothioate 5'-(E)-Vinylphosphonate
  modified_base 2: mod_base = OTHER; note = 2'-deoxy-2'-fluoroadenosine-3'-phosphorothioate
  modified_base 3: mod_base = OTHER; note = 2'-O-methylguanosine-3'-phosphate
  modified_base 4: mod_base = OTHER; note = 2'-O-methyladenosine-3'-phosphate
  modified_base 5: mod_base = OTHER; note = 2'-O-methyladenosine-3'-phosphate
  modified_base 6: mod_base = OTHER; note = 2'-deoxy-2'-fluorocytidine-3'-phosphate
  modified_base 7: mod_base = OTHER; note = 2'-O-methyladenosine-3'-phosphate
  modified_base 8: mod_base = OTHER; note = 2'-deoxy-2'-fluorocytidine-3'-phosphate
  modified_base 9: mod_base = OTHER; note = 2'-deoxy-2'-fluoroguanosine-3'-phosphate
  modified_base 10: mod_base = OTHER; note = 2'-O-methyluridine-3'-phosphate
  modified_base 11: mod_base = OTHER; note = 2'-O-methyladenosine-3'-phosphate
  modified_base 12: mod_base = OTHER; note = 2'-O-methylguanosine-3'-phosphate
  modified_base 13: mod_base = OTHER; note = 2'-O-methyluridine-3'-phosphate
  modified_base 14: mod_base = OTHER; note = 2'-deoxy-2'-fluorouridine-3'-phosphate
  modified_base 15: mod_base = OTHER; note = 2'-O-methylguanosine-3'-phosphate
  modified_base 16: mod_base = OTHER; note = 2'-deoxy-2'-fluorocytidine-3'-phosphate
  modified_base 17: mod_base = OTHER; note = 2'-O-methyladenosine-3'-phosphate
  modified_base 18: mod_base = OTHER; note = 2'-O-methyladenosine-3'-phosphate
  modified_base 19: mod_base = OTHER; note = 2'-O-methyladenosine-3'-phosphate
  modified_base 20: mod_base = OTHER; note = 2'-O-methylguanosine-3'-phosphate
  modified_base 21: mod_base = OTHER; note = 2'-O-methylguanosine-3'-phosphorothioate
  modified_base 22: mod_base = OTHER; note = 2'-O-methylcytidine-3'-phosphorothioate
  modified_base 23: mod_base = OTHER; note = 2'-O-methylcytidine
tagaacacgtagttgcaaaggcc

SEQ ID NO: 2653 - RNA, 23 nt, synthetic construct
  source 1..23: mol_type = other RNA
  modified_base 1: mod_base = OTHER; note = 2'-O-methyluridine-3'-phosphorothioate 5'-(E)-Vinylphosphonate
  modified_base 2: mod_base = OTHER; note = 2'-deoxy-2'-fluoroadenosine-3'-phosphorothioate
  modified_base 3: mod_base = OTHER; note = 2'-O-methylguanosine-3'-phosphate
  modified_base 4: mod_base = OTHER; note = 2'-O-methylcytidine-3'-phosphate
  modified_base 5: mod_base = OTHER; note = 2'-O-methyluridine-3'-phosphate
  modified_base 6: mod_base = OTHER; note = 2'-deoxy-2'-fluoroguanosine-3'-phosphate
  modified_base 7: mod_base = OTHER; note = 2'-O-methylguanosine-3'-phosphate
  modified_base 8: mod_base = OTHER; note = 2'-deoxy-2'-fluoroadenosine-3'-phosphate
  modified_base 9: mod_base = OTHER; note = 2'-deoxy-2'-fluorocytidine-3'-phosphate
  modified_base 10: mod_base = OTHER; note = 2'-O-methylguanosine-3'-phosphate
  modified_base 11: mod_base = OTHER; note = 2'-O-methyluridine-3'-phosphate
  modified_base 12: mod_base = OTHER; note = 2'-O-methyluridine-3'-phosphate
  modified_base 13: mod_base = OTHER; note = 2'-O-methylguanosine-3'-phosphate
  modified_base 14: mod_base = OTHER; note = 2'-deoxy-2'-fluoroadenosine-3'-phosphate
  modified_base 15: mod_base = OTHER; note = 2'-O-methyladenosine-3'-phosphate
  modified_base 16: mod_base = OTHER; note = 2'-deoxy-2'-fluoroguanosine-3'-phosphate
  modified_base 17: mod_base = OTHER; note = 2'-O-methyluridine-3'-phosphate
  modified_base 18: mod_base = OTHER; note = 2'-O-methylcytidine-3'-phosphate
  modified_base 19: mod_base = OTHER; note = 2'-O-methylcytidine-3'-phosphate
  modified_base 20: mod_base = OTHER; note = 2'-O-methyluridine-3'-phosphate
  modified_base 21: mod_base = OTHER; note = 2'-O-methylcytidine-3'-phosphorothioate
  modified_base 22: mod_base = OTHER; note = 2'-O-methylguanosine-3'-phosphorothioate
  modified_base 23: mod_base = OTHER; note = 2'-O-methyluridine
tagctggacgttgaagtcctcgt

SEQ ID NO: 2654 - RNA, 23 nt, synthetic construct
  source 1..23: mol_type = other RNA
  modified_base 1: mod_base = OTHER; note = 2'-O-methyluridine-3'-phosphorothioate 5'-(E)-Vinylphosphonate
  modified_base 2: mod_base = OTHER; note = 2'-deoxy-2'-fluoroguanosine-3'-phosphorothioate
  modified_base 3: mod_base = OTHER; note = 2'-O-methylcytidine-3'-phosphate
  modified_base 4: mod_base = OTHER; note = 2'-O-methylcytidine-3'-phosphate
  modified_base 5: mod_base = OTHER; note = 2'-O-methyluridine-3'-phosphate
  modified_base 6: mod_base = OTHER; note = 2'-deoxy-2'-fluorouridine-3'-phosphate
  modified_base 7: mod_base = OTHER; note = 2'-O-methylguanosine-3'-phosphate
  modified_base 8: mod_base = OTHER; note = 2'-deoxy-2'-fluoroadenosine-3'-phosphate
  modified_base 9: mod_base = OTHER; note = 2'-deoxy-2'-fluorouridine-3'-phosphate
  modified_base 10: mod_base = OTHER; note = 2'-O-methylguanosine-3'-phosphate
  modified_base 11: mod_base = OTHER; note = 2'-O-methyladenosine-3'-phosphate
  modified_base 12: mod_base = OTHER; note = 2'-O-methylcytidine-3'-phosphate
  modified_base 13: mod_base = OTHER; note = 2'-O-methyladenosine-3'-phosphate
  modified_base 14: mod_base = OTHER; note = 2'-deoxy-2'-fluoroadenosine-3'-phosphate
  modified_base 15: mod_base = OTHER; note = 2'-O-methylcytidine-3'-phosphate
  modified_base 16: mod_base = OTHER; note = 2'-deoxy-2'-fluoroadenosine-3'-phosphate
  modified_base 17: mod_base = OTHER; note = 2'-O-methylcytidine-3'-phosphate
  modified_base 18: mod_base = OTHER; note = 2'-O-methylguanosine-3'-phosphate
  modified_base 19: mod_base = OTHER; note = 2'-O-methylguanosine-3'-phosphate
  modified_base 20: mod_base = OTHER; note = 2'-O-methylguanosine-3'-phosphate
  modified_base 21: mod_base = OTHER; note = 2'-O-methyluridine-3'-phosphorothioate
  modified_base 22: mod_base = OTHER; note = 2'-O-methylguanosine-3'-phosphorothioate
  modified_base 23: mod_base = OTHER; note = 2'-O-methyladenosine
tgccttgatgacaacacgggtga

SEQ ID NO: 2655 - RNA, 23 nt, synthetic construct
  source 1..23: mol_type = other RNA
  modified_base 1: mod_base = OTHER; note = 2'-O-methyluridine-3'-phosphorothioate 5'-(E)-Vinylphosphonate
  modified_base 2: mod_base = OTHER; note = 2'-deoxy-2'-fluorocytidine-3'-phosphorothioate
  modified_base 3: mod_base = OTHER; note = 2'-O-methylcytidine-3'-phosphate
  modified_base 4: mod_base = OTHER; note = 2'-O-methyladenosine-3'-phosphate
  modified_base 5: mod_base = OTHER; note = 2'-O-methyluridine-3'-phosphate
  modified_base 6: mod_base = OTHER; note = 2'-deoxy-2'-fluorouridine-3'-phosphate
  modified_base 7: mod_base = OTHER; note = 2'-O-methylguanosine-3'-phosphate
  modified_base 8: mod_base = OTHER; note = 2'-deoxy-2'-fluoroadenosine-3'-phosphate
  modified_base 9: mod_base = OTHER; note = 2'-deoxy-2'-fluorouridine-3'-phosphate
  modified_base 10: mod_base = OTHER; note = 2'-O-methylguanosine-3'-phosphate
  modified_base 11: mod_base = OTHER; note = 2'-O-methyladenosine-3'-phosphate
  modified_base 12: mod_base = OTHER; note = 2'-O-methylguanosine-3'-phosphate
  modified_base 13: mod_base = OTHER; note = 2'-O-methylguanosine-3'-phosphate
  modified_base 14: mod_base = OTHER; note = 2'-deoxy-2'-fluoroadenosine-3'-phosphate
  modified_base 15: mod_base = OTHER; note = 2'-O-methylcytidine-3'-phosphate
  modified_base 16: mod_base = OTHER; note = 2'-deoxy-2'-fluoroguanosine-3'-phosphate
  modified_base 17: mod_base = OTHER; note = 2'-O-methylguanosine-3'-phosphate
  modified_base 18: mod_base = OTHER; note = 2'-O-methyladenosine-3'-phosphate
  modified_base 19: mod_base = OTHER; note = 2'-O-methylguanosine-3'-phosphate
  modified_base 20: mod_base = OTHER; note = 2'-O-methylcytidine-3'-phosphate
  modified_base 21: mod_base = OTHER; note = 2'-O-methylcytidine-3'-phosphorothioate
  modified_base 22: mod_base = OTHER; note = 2'-O-methylguanosine-3'-phosphorothioate
  modified_base 23: mod_base = OTHER; note = 2'-O-methyluridine
tccattgatgaggacggagccgt

SEQ ID NO: 2656 - RNA, 23 nt, synthetic construct
  source 1..23: mol_type = other RNA
  modified_base 1: mod_base = OTHER; note = 2'-O-methyluridine-3'-phosphorothioate 5'-(E)-Vinylphosphonate
  modified_base 2: mod_base = OTHER; note = 2'-deoxy-2'-fluorocytidine-3'-phosphorothioate
  modified_base 3: mod_base = OTHER; note = 2'-O-methyladenosine-3'-phosphate
  modified_base 4: mod_base = OTHER; note = 2'-O-methylguanosine-3'-phosphate
  modified_base 5: mod_base = OTHER; note = 2'-O-methyluridine-3'-phosphate
  modified_base 6: mod_base = OTHER; note = 2'-deoxy-2'-fluoroguanosine-3'-phosphate
  modified_base 7: mod_base = OTHER; note = 2'-O-methylcytidine-3'-phosphate
  modified_base 8: mod_base = OTHER; note = 2'-deoxy-2'-fluoroguanosine-3'-phosphate
  modified_base 9: mod_base = OTHER; note = 2'-deoxy-2'-fluoroguanosine-3'-phosphate
  modified_base 10: mod_base = OTHER; note = 2'-O-methylcytidine-3'-phosphate
  modified_base 11: mod_base = OTHER; note = 2'-O-methyluridine-3'-phosphate
  modified_base 12: mod_base = OTHER; note = 2'-O-methylguanosine-3'-phosphate
  modified_base 13: mod_base = OTHER; note = 2'-O-methyluridine-3'-phosphate
  modified_base 14: mod_base = OTHER; note = 2'-deoxy-2'-fluoroadenosine-3'-phosphate
  modified_base 15: mod_base = OTHER; note = 2'-O-methyladenosine-3'-phosphate
  modified_base 16: mod_base = OTHER; note = 2'-deoxy-2'-fluoroguanosine-3'-phosphate
  modified_base 17: mod_base = OTHER; note = 2'-O-methylguanosine-3'-phosphate
  modified_base 18: mod_base = OTHER; note = 2'-O-methylcytidine-3'-phosphate
  modified_base 19: mod_base = OTHER; note = 2'-O-methyladenosine-3'-phosphate
  modified_base 20: mod_base = OTHER; note = 2'-O-methylguanosine-3'-phosphate
  modified_base 21: mod_base = OTHER; note = 2'-O-methylcytidine-3'-phosphorothioate
  modified_base 22: mod_base = OTHER; note = 2'-O-methyluridine-3'-phosphorothioate
  modified_base 23: mod_base = OTHER; note = 2'-O-methylcytidine
tcagtgcggctgtaaggcagctc

SEQ ID NO: 2657 - RNA, 23 nt, synthetic construct
  source 1..23: mol_type = other RNA
  modified_base 1: mod_base = OTHER; note = 2'-O-methyluridine-3'-phosphorothioate 5'-(E)-Vinylphosphonate
  modified_base 2: mod_base = OTHER; note = 2'-deoxy-2'-fluoroadenosine-3'-phosphorothioate
  modified_base 3: mod_base = OTHER; note = 2'-O-methyluridine-3'-phosphate
  modified_base 4: mod_base = OTHER; note = 2'-O-methylguanosine-3'-phosphate
  modified_base 5: mod_base = OTHER; note = 2'-O-methylcytidine-3'-phosphate
  modified_base 6: mod_base = OTHER; note = 2'-deoxy-2'-fluorouridine-3'-phosphate
  modified_base 7: mod_base = OTHER; note = 2'-O-methylguanosine-3'-phosphate
  modified_base 8: mod_base = OTHER; note = 2'-deoxy-2'-fluoroadenosine-3'-phosphate
  modified_base 9: mod_base = OTHER; note = 2'-deoxy-2'-fluorocytidine-3'-phosphate
  modified_base 10: mod_base = OTHER; note = 2'-O-methylcytidine-3'-phosphate
  modified_base 11: mod_base = OTHER; note = 2'-O-methyluridine-3'-phosphate
  modified_base 12: mod_base = OTHER; note = 2'-O-methyluridine-3'-phosphate
  modified_base 13: mod_base = OTHER; note = 2'-O-methylguanosine-3'-phosphate
  modified_base 14: mod_base = OTHER; note = 2'-deoxy-2'-fluoroadenosine-3'-phosphate
  modified_base 15: mod_base = OTHER; note = 2'-O-methyluridine-3'-phosphate
  modified_base 16: mod_base = OTHER; note = 2'-deoxy-2'-fluoroguanosine-3'-phosphate
  modified_base 17: mod_base = OTHER; note = 2'-O-methyluridine-3'-phosphate
  modified_base 18: mod_base = OTHER; note = 2'-O-methyladenosine-3'-phosphate
  modified_base 19: mod_base = OTHER; note = 2'-O-methylguanosine-3'-phosphate
  modified_base 20: mod_base = OTHER; note = 2'-O-methyluridine-3'-phosphate
  modified_base 21: mod_base = OTHER; note = 2'-O-methylcytidine-3'-phosphorothioate
  modified_base 22: mod_base = OTHER; note = 2'-O-methylcytidine-3'-phosphorothioate
  modified_base 23: mod_base = OTHER; note = 2'-O-methylcytidine
tatgctgaccttgatgtagtccc

SEQ ID NO: 2658 - RNA, 23 nt, synthetic construct
  source 1..23: mol_type = other RNA
  modified_base 1: mod_base = OTHER; note = 2'-O-methyluridine-3'-phosphorothioate 5'-(E)-Vinylphosphonate
  modified_base 2: mod_base = OTHER; note = 2'-deoxy-2'-fluorocytidine-3'-phosphorothioate
  modified_base 3: mod_base = OTHER; note = 2'-O-methylguanosine-3'-phosphate
  modified_base 4: mod_base = OTHER; note = 2'-O-methyluridine-3'-phosphate
  modified_base 5: mod_base = OTHER; note = 2'-O-methyluridine-3'-phosphate
  modified_base 6: mod_base = OTHER; note = 2'-deoxy-2'-fluorocytidine-3'-phosphate
  modified_base 7: mod_base = OTHER; note = 2'-O-methylcytidine-3'-phosphate
  modified_base 8: mod_base = OTHER; note = 2'-deoxy-2'-fluoroadenosine-3'-phosphate
  modified_base 9: mod_base = OTHER; note = 2'-deoxy-2'-fluorocytidine-3'-phosphate
  modified_base 10: mod_base = OTHER; note = 2'-O-methyladenosine-3'-phosphate
  modified_base 11: mod_base = OTHER; note = 2'-O-methylguanosine-3'-phosphate
  modified_base 12: mod_base = OTHER; note = 2'-O-methylguanosine-3'-phosphate
  modified_base 13: mod_base = OTHER; note = 2'-O-methyladenosine-3'-phosphate
  modified_base 14: mod_base = OTHER; note = 2'-deoxy-2'-fluoroadenosine-3'-phosphate
  modified_base 15: mod_base = OTHER; note = 2'-O-methyluridine-3'-phosphate
  modified_base 16: mod_base = OTHER; note = 2'-deoxy-2'-fluoroguanosine-3'-phosphate
  modified_base 17: mod_base = OTHER; note = 2'-O-methyluridine-3'-phosphate
  modified_base 18: mod_base = OTHER; note = 2'-O-methylcytidine-3'-phosphate
  modified_base 19: mod_base = OTHER; note = 2'-O-methyladenosine-3'-phosphate
  modified_base 20: mod_base = OTHER; note = 2'-O-methylguanosine-3'-phosphate
  modified_base 21: mod_base = OTHER; note = 2'-O-methylcytidine-3'-phosphorothioate
  modified_base 22: mod_base = OTHER; note = 2'-O-methyladenosine-3'-phosphorothioate
  modified_base 23: mod_base = OTHER; note = 2'-O-methylcytidine
tcgttccacaggaatgtcagcac

SEQ ID NO: 2659 - RNA, 23 nt, synthetic construct
  source 1..23: mol_type = other RNA
  modified_base 1: mod_base = OTHER; note = 2'-O-methyluridine-3'-phosphorothioate 5'-(E)-Vinylphosphonate
  modified_base 2: mod_base = OTHER; note = 2'-deoxy-2'-fluorouridine-3'-phosphorothioate
  modified_base 3: mod_base = OTHER; note = 2'-O-methyluridine-3'-phosphate
  modified_base 4: mod_base = OTHER; note = 2'-O-methylguanosine-3'-phosphate
  modified_base 5: mod_base = OTHER; note = 2'-O-methylguanosine-3'-phosphate
  modified_base 6: mod_base = OTHER; note = 2'-deoxy-2'-fluorocytidine-3'-phosphate
  modified_base 7: mod_base = OTHER; note = 2'-O-methylguanosine-3'-phosphate
  modified_base 8: mod_base = OTHER; note = 2'-deoxy-2'-fluorouridine-3'-phosphate
  modified_base 9: mod_base = OTHER; note = 2'-deoxy-2'-fluoroadenosine-3'-phosphate
  modified_base 10: mod_base = OTHER; note = 2'-O-methyluridine-3'-phosphate
  modified_base 11: mod_base = OTHER; note = 2'-O-methyluridine-3'-phosphate
  modified_base 12: mod_base = OTHER; note = 2'-O-methyluridine-3'-phosphate
  modified_base 13: mod_base = OTHER; note = 2'-O-methylguanosine-3'-phosphate
  modified_base 14: mod_base = OTHER; note = 2'-deoxy-2'-fluoroguanosine-3'-phosphate
  modified_base 15: mod_base = OTHER; note = 2'-O-methylguanosine-3'-phosphate
  modified_base 16: mod_base = OTHER; note = 2'-deoxy-2'-fluoroadenosine-3'-phosphate
  modified_base 17: mod_base = OTHER; note = 2'-O-methyluridine-3'-phosphate
  modified_base 18: mod_base = OTHER; note = 2'-O-methylcytidine-3'-phosphate
  modified_base 19: mod_base = OTHER; note = 2'-O-methylcytidine-3'-phosphate
  modified_base 20: mod_base = OTHER; note = 2'-O-methyladenosine-3'-phosphate
  modified_base 21: mod_base = OTHER; note = 2'-O-methylguanosine-3'-phosphorothioate
  modified_base 22: mod_base = OTHER; note = 2'-O-methylcytidine-3'-phosphorothioate
  modified_base 23: mod_base = OTHER; note = 2'-O-methyluridine
tttggcgtatttgggatccagct

SEQ ID NO: 2660 - RNA, 23 nt, synthetic construct
  source 1..23: mol_type = other RNA
  modified_base 1: mod_base = OTHER; note = 2'-O-methyluridine-3'-phosphorothioate 5'-(E)-Vinylphosphonate
  modified_base 2: mod_base = OTHER; note = 2'-deoxy-2'-fluoroguanosine-3'-phosphorothioate
  modified_base 3: mod_base = OTHER; note = 2'-O-methylcytidine-3'-phosphate
  modified_base 4: mod_base = OTHER; note = 2'-O-methyladenosine-3'-phosphate
  modified_base 5: mod_base = OTHER; note = 2'-O-methyluridine-3'-phosphate
  modified_base 6: mod_base = OTHER; note = 2'-deoxy-2'-fluoroadenosine-3'-phosphate
  modified_base 7: mod_base = OTHER; note = 2'-O-methylguanosine-3'-phosphate
  modified_base 8: mod_base = OTHER; note = 2'-deoxy-2'-fluoroadenosine-3'-phosphate
  modified_base 9: mod_base = OTHER; note = 2'-deoxy-2'-fluoroadenosine-3'-phosphate
  modified_base 10: mod_base = OTHER; note = 2'-O-methylcytidine-3'-phosphate
  modified_base 11: mod_base = OTHER; note = 2'-O-methyluridine-3'-phosphate
  modified_base 12: mod_base = OTHER; note = 2'-O-methylcytidine-3'-phosphate
  modified_base 13: mod_base = OTHER; note = 2'-O-methylguanosine-3'-phosphate
  modified_base 14: mod_base = OTHER; note = 2'-deoxy-2'-fluorouridine-3'-phosphate
  modified_base 15: mod_base = OTHER; note = 2'-O-methyluridine-3'-phosphate
  modified_base 16: mod_base = OTHER; note = 2'-deoxy-2'-fluoroguanosine-3'-phosphate
  modified_base 17: mod_base = OTHER; note = 2'-O-methyladenosine-3'-phosphate
  modified_base 18: mod_base = OTHER; note = 2'-O-methyladenosine-3'-phosphate
  modified_base 19: mod_base = OTHER; note = 2'-O-methylguanosine-3'-phosphate
  modified_base 20: mod_base = OTHER; note = 2'-O-methylguanosine-3'-phosphate
  modified_base 21: mod_base = OTHER; note = 2'-O-methylcytidine-3'-phosphorothioate
  modified_base 22: mod_base = OTHER; note = 2'-O-methylcytidine-3'-phosphorothioate
  modified_base 23: mod_base = OTHER; note = 2'-O-methylguanosine
tgcatagaactcgttgaaggccg

SEQ ID NO: 2661 - RNA, 23 nt, synthetic construct
  source 1..23: mol_type = other RNA
  modified_base 1: mod_base = OTHER; note = 2'-O-methyluridine-3'-phosphorothioate 5'-(E)-Vinylphosphonate
  modified_base 2: mod_base = OTHER; note = 2'-deoxy-2'-fluorocytidine-3'-phosphorothioate
  modified_base 3: mod_base = OTHER; note = 2'-O-methylcytidine-3'-phosphate
  modified_base 4: mod_base = OTHER; note = 2'-O-methyladenosine-3'-phosphate
  modified_base 5: mod_base = OTHER; note = 2'-O-methyluridine-3'-phosphate
  modified_base 6: mod_base = OTHER; note = 2'-deoxy-2'-fluorocytidine-3'-phosphate
  modified_base 7: mod_base = OTHER; note = 2'-O-methylcytidine-3'-phosphate
  modified_base 8: mod_base = OTHER; note = 2'-deoxy-2'-fluoroadenosine-3'-phosphate
  modified_base 9: mod_base = OTHER; note = 2'-deoxy-2'-fluoroadenosine-3'-phosphate
  modified_base 10: mod_base = OTHER; note = 2'-O-methylcytidine-3'-phosphate
  modified_base 11: mod_base = OTHER; note = 2'-O-methyluridine-3'-phosphate
  modified_base 12: mod_base = OTHER; note = 2'-O-methyluridine-3'-phosphate
  modified_base 13: mod_base = OTHER; note = 2'-O-methylcytidine-3'-phosphate
  modified_base 14: mod_base = OTHER; note = 2'-deoxy-2'-fluorouridine-3'-phosphate
  modified_base 15: mod_base = OTHER; note = 2'-O-methylguanosine-3'-phosphate
  modified_base 16: mod_base = OTHER; note = 2'-deoxy-2'-fluorocytidine-3'-phosphate
  modified_base 17: mod_base = OTHER; note = 2'-O-methyladenosine-3'-phosphate
  modified_base 18: mod_base = OTHER; note = 2'-O-methylguanosine-3'-phosphate
  modified_base 19: mod_base = OTHER; note = 2'-O-methylguanosine-3'-phosphate
  modified_base 20: mod_base = OTHER; note = 2'-O-methyluridine-3'-phosphate
  modified_base 21: mod_base = OTHER; note = 2'-O-methyluridine-3'-phosphorothioate
  modified_base 22: mod_base = OTHER; note = 2'-O-methylcytidine-3'-phosphorothioate
  modified_base 23: mod_base = OTHER; note = 2'-O-methylcytidine
tccatccaacttctgcaggttcc

SEQ ID NO: 2662 - RNA, 23 nt, synthetic construct
  source 1..23: mol_type = other RNA
  modified_base 1: mod_base = OTHER; note = 2'-O-methyluridine-3'-phosphorothioate 5'-(E)-Vinylphosphonate
  modified_base 2: mod_base = OTHER; note = 2'-deoxy-2'-fluoroadenosine-3'-phosphorothioate
  modified_base 3: mod_base = OTHER; note = 2'-O-methyluridine-3'-phosphate
  modified_base 4: mod_base = OTHER; note = 2'-O-methylguanosine-3'-phosphate
  modified_base 5: mod_base = OTHER; note = 2'-O-methylcytidine-3'-phosphate
  modified_base 6: mod_base = OTHER; note = 2'-deoxy-2'-fluorocytidine-3'-phosphate
  modified_base 7: mod_base = OTHER; note = 2'-O-methylcytidine-3'-phosphate
  modified_base 8: mod_base = OTHER; note = 2'-deoxy-2'-fluorouridine-3'-phosphate
  modified_base 9: mod_base = OTHER; note = 2'-deoxy-2'-fluorocytidine-3'-phosphate
  modified_base 10: mod_base = OTHER; note = 2'-O-methylcytidine-3'-phosphate
  modified_base 11: mod_base = OTHER; note = 2'-O-methyluridine-3'-phosphate
  modified_base 12: mod_base = OTHER; note = 2'-O-methylcytidine-3'-phosphate
  modified_base 13: mod_base = OTHER; note = 2'-O-methylguanosine-3'-phosphate
  modified_base 14: mod_base = OTHER; note = 2'-deoxy-2'-fluorouridine-3'-phosphate
  modified_base 15: mod_base = OTHER; note = 2'-O-methylcytidine-3'-phosphate
  modified_base 16: mod_base = OTHER; note = 2'-deoxy-2'-fluorocytidine-3'-phosphate
  modified_base 17: mod_base = OTHER; note = 2'-O-methylguanosine-3'-phosphate
  modified_base 18: mod_base = OTHER; note = 2'-O-methyluridine-3'-phosphate
  modified_base 19: mod_base = OTHER; note = 2'-O-methylguanosine-3'-phosphate
  modified_base 20: mod_base = OTHER; note = 2'-O-methylcytidine-3'-phosphate
  modified_base 21: mod_base = OTHER; note = 2'-O-methyladenosine-3'-phosphorothioate
  modified_base 22: mod_base = OTHER; note = 2'-O-methylguanosine-3'-phosphorothioate
  modified_base 23: mod_base = OTHER; note = 2'-O-methyluridine
tatgccctcctcgtccgtgcagt

SEQ ID NO: 2663 - RNA, 23 nt, synthetic construct
  source 1..23: mol_type = other RNA
  modified_base 1: mod_base = OTHER; note = 2'-O-methyluridine-3'-phosphorothioate 5'-(E)-Vinylphosphonate
  modified_base 2: mod_base = OTHER; note = 2'-deoxy-2'-fluoroadenosine-3'-phosphorothioate
  modified_base 3: mod_base = OTHER; note = 2'-O-methylguanosine-3'-phosphate
  modified_base 4: mod_base = OTHER; note = 2'-O-methyluridine-3'-phosphate
  modified_base 5: mod_base = OTHER; note = 2'-O-methylguanosine-3'-phosphate
  modified_base 6: mod_base = OTHER; note = 2'-deoxy-2'-fluorocytidine-3'-phosphate
  modified_base 7: mod_base = OTHER; note = 2'-O-methylguanosine-3'-phosphate
  modified_base 8: mod_base = OTHER; note = 2'-deoxy-2'-fluorouridine-3'-phosphate
  modified_base 9: mod_base = OTHER; note = 2'-deoxy-2'-fluoroguanosine-3'-phosphate
  modified_base 10: mod_base = OTHER; note = 2'-O-methylguanosine-3'-phosphate
  modified_base 11: mod_base = OTHER; note = 2'-O-methylcytidine-3'-phosphate
  modified_base 12: mod_base = OTHER; note = 2'-O-methyladenosine-3'-phosphate
  modified_base 13: mod_base = OTHER; note = 2'-O-methylcytidine-3'-phosphate
  modified_base 14: mod_base = OTHER; note = 2'-deoxy-2'-fluorouridine-3'-phosphate
  modified_base 15: mod_base = OTHER; note = 2'-O-methylcytidine-3'-phosphate
  modified_base 16: mod_base = OTHER; note = 2'-deoxy-2'-fluorocytidine-3'-phosphate
  modified_base 17: mod_base = OTHER; note = 2'-O-methylguanosine-3'-phosphate
  modified_base 18: mod_base = OTHER; note = 2'-O-methylcytidine-3'-phosphate
  modified_base 19: mod_base = OTHER; note = 2'-O-methyladenosine-3'-phosphate
  modified_base 20: mod_base = OTHER; note = 2'-O-methyladenosine-3'-phosphate
  modified_base 21: mod_base = OTHER; note = 2'-O-methyladenosine-3'-phosphorothioate
  modified_base 22: mod_base = OTHER; note = 2'-O-methylguanosine-3'-phosphorothioate
  modified_base 23: mod_base = OTHER; note = 2'-O-methylguanosine
tagtgcgtggcactccgcaaagg

SEQ ID NO: 2664 - RNA, 23 nt, synthetic construct
  source 1..23: mol_type = other RNA
  modified_base 1: mod_base = OTHER; note = 2'-O-methyluridine-3'-phosphorothioate 5'-(E)-Vinylphosphonate
  modified_base 2: mod_base = OTHER; note = 2'-deoxy-2'-fluoroguanosine-3'-phosphorothioate
  modified_base 3: mod_base = OTHER; note = 2'-O-methylcytidine-3'-phosphate
  modified_base 4: mod_base = OTHER; note = 2'-O-methylcytidine-3'-phosphate
  modified_base 5: mod_base = OTHER; note = 2'-O-methyladenosine-3'-phosphate
  modified_base 6: mod_base = OTHER; note = 2'-deoxy-2'-fluoroguanosine-3'-phosphate
  modified_base 7: mod_base = OTHER; note = 2'-O-methylguanosine-3'-phosphate
  modified_base 8: mod_base = OTHER; note = 2'-deoxy-2'-fluorouridine-3'-phosphate
  modified_base 9: mod_base = OTHER; note = 2'-deoxy-2'-fluoroadenosine-3'-phosphate
  modified_base 10: mod_base = OTHER; note = 2'-O-methylcytidine-3'-phosphate
  modified_base 11: mod_base = OTHER; note = 2'-O-methylguanosine-3'-phosphate
  modified_base 12: mod_base = OTHER; note = 2'-O-methylcytidine-3'-phosphate
  modified_base 13: mod_base = OTHER; note = 2'-O-methyladenosine-3'-phosphate
  modified_base 14: mod_base = OTHER; note = 2'-deoxy-2'-fluoroguanosine-3'-phosphate
  modified_base 15: mod_base = OTHER; note = 2'-O-methyluridine-3'-phosphate
  modified_base 16: mod_base = OTHER; note = 2'-deoxy-2'-fluoroguanosine-3'-phosphate
  modified_base 17: mod_base = OTHER; note = 2'-O-methylcytidine-3'-phosphate
  modified_base 18: mod_base = OTHER; note = 2'-O-methyluridine-3'-phosphate
  modified_base 19: mod_base = OTHER; note = 2'-O-methylguanosine-3'-phosphate
  modified_base 20: mod_base = OTHER; note = 2'-O-methyluridine-3'-phosphate
  modified_base 21: mod_base = OTHER; note = 2'-O-methylcytidine-3'-phosphorothioate
  modified_base 22: mod_base = OTHER; note = 2'-O-methylcytidine-3'-phosphorothioate
  modified_base 23: mod_base = OTHER; note = 2'-O-methyladenosine
tgccaggtacgcagtgctgtcca

SEQ ID NO: 2665 - RNA, 23 nt, synthetic construct
  source 1..23: mol_type = other RNA
  modified_base 1: mod_base = OTHER; note = 2'-O-methyluridine-3'-phosphorothioate 5'-(E)-Vinylphosphonate
  modified_base 2: mod_base = OTHER; note = 2'-deoxy-2'-fluoroguanosine-3'-phosphorothioate
  modified_base 3: mod_base = OTHER; note = 2'-O-methyladenosine-3'-phosphate
  modified_base 4: mod_base = OTHER; note = 2'-O-methylguanosine-3'-phosphate
  modified_base 5: mod_base = OTHER; note = 2'-O-methyluridine-3'-phosphate
  modified_base 6: mod_base = OTHER; note = 2'-deoxy-2'-fluoroadenosine-3'-phosphate
  modified_base 7: mod_base = OTHER; note = 2'-O-methyluridine-3'-phosphate
  modified_base 8: mod_base = OTHER; note = 2'-deoxy-2'-fluorouridine-3'-phosphate
  modified_base 9: mod_base = OTHER; note = 2'-deoxy-2'-fluorocytidine-3'-phosphate
  modified_base 10: mod_base = OTHER; note = 2'-O-methylcytidine-3'-phosphate
  modified_base 11: mod_base = OTHER; note = 2'-O-methyladenosine-3'-phosphate
  modified_base 12: mod_base = OTHER; note = 2'-O-methylcytidine-3'-phosphate
  modified_base 13: mod_base = OTHER; note = 2'-O-methyladenosine-3'-phosphate
  modified_base 14: mod_base = OTHER; note = 2'-deoxy-2'-fluoroadenosine-3'-phosphate
  modified_base 15: mod_base = OTHER; note = 2'-O-methyladenosine-3'-phosphate
  modified_base 16: mod_base = OTHER; note = 2'-deoxy-2'-fluoroguanosine-3'-phosphate
  modified_base 17: mod_base = OTHER; note = 2'-O-methylguanosine-3'-phosphate
  modified_base 18: mod_base = OTHER; note = 2'-O-methyluridine-3'-phosphate
  modified_base 19: mod_base = OTHER; note = 2'-O-methylguanosine-3'-phosphate
  modified_base 20: mod_base = OTHER; note = 2'-O-methylguanosine-3'-phosphate
  modified_base 21: mod_base = OTHER; note = 2'-O-methylcytidine-3'-phosphorothioate
  modified_base 22: mod_base = OTHER; note = 2'-O-methyladenosine-3'-phosphorothioate
  modified_base 23: mod_base = OTHER; note = 2'-O-methylcytidine
tgagtattccacaaaggtggcac

SEQ ID NO: 2666 - RNA, 23 nt, synthetic construct
  source 1..23: mol_type = other RNA
  modified_base 1: mod_base = OTHER; note = 2'-O-methyluridine-3'-phosphorothioate 5'-(E)-Vinylphosphonate
  modified_base 2: mod_base = OTHER; note = 2'-deoxy-2'-fluoroadenosine-3'-phosphorothioate
  modified_base 3: mod_base = OTHER; note = 2'-O-methylguanosine-3'-phosphate
  modified_base 4: mod_base = OTHER; note = 2'-O-methyladenosine-3'-phosphate
  modified_base 5: mod_base = OTHER; note = 2'-O-methylguanosine-3'-phosphate
  modified_base 6: mod_base = OTHER; note = 2'-deoxy-2'-fluorocytidine-3'-phosphate
  modified_base 7: mod_base = OTHER; note = 2'-O-methyluridine-3'-phosphate
  modified_base 8: mod_base = OTHER; note = 2'-deoxy-2'-fluorocytidine-3'-phosphate
  modified_base 9: mod_base = OTHER; note = 2'-deoxy-2'-fluoroadenosine-3'-phosphate
  modified_base 10: mod_base = OTHER; note = 2'-O-methylguanosine-3'-phosphate
  modified_base 11: mod_base = OTHER; note = 2'-O-methylguanosine-3'-phosphate
  modified_base 12: mod_base = OTHER; note = 2'-O-methylguanosine-3'-phosphate
  modified_base 13: mod_base = OTHER; note = 2'-O-methylcytidine-3'-phosphate
  modified_base 14: mod_base = OTHER; note = 2'-deoxy-2'-fluoroadenosine-3'-phosphate
  modified_base 15: mod_base = OTHER; note = 2'-O-methylcytidine-3'-phosphate
  modified_base 16: mod_base = OTHER; note = 2'-deoxy-2'-fluorocytidine-3'-phosphate
  modified_base 17: mod_base = OTHER; note = 2'-O-methyluridine-3'-phosphate
  modified_base 18: mod_base = OTHER; note = 2'-O-methylcytidine-3'-phosphate
  modified_base 19: mod_base = OTHER; note = 2'-O-methylcytidine-3'-phosphate
  modified_base 20: mod_base = OTHER; note = 2'-O-methyladenosine-3'-phosphate
  modified_base 21: mod_base = OTHER; note = 2'-O-methylguanosine-3'-phosphorothioate
  modified_base 22: mod_base = OTHER; note = 2'-O-methyluridine-3'-phosphorothioate
  modified_base 23: mod_base = OTHER; note = 2'-O-methyluridine
tagagctcagggcacctccagtt

SEQ ID NO: 2667 - RNA, 23 nt, synthetic construct
  source 1..23: mol_type = other RNA
  modified_base 1: mod_base = OTHER; note = 2'-O-methyluridine-3'-phosphorothioate 5'-(E)-Vinylphosphonate
  modified_base 2: mod_base = OTHER; note = 2'-deoxy-2'-fluorouridine-3'-phosphorothioate
  modified_base 3: mod_base = OTHER; note = 2'-O-methylcytidine-3'-phosphate
  modified_base 4: mod_base = OTHER; note = 2'-O-methylcytidine-3'-phosphate
  modified_base 5: mod_base = OTHER; note = 2'-O-methyluridine-3'-phosphate
  modified_base 6: mod_base = OTHER; note = 2'-deoxy-2'-fluoroguanosine-3'-phosphate
  modified_base 7: mod_base = OTHER; note = 2'-O-methylguanosine-3'-phosphate
  modified_base 8: mod_base = OTHER; note = 2'-deoxy-2'-fluorouridine-3'-phosphate
  modified_base 9: mod_base = OTHER; note = 2'-deoxy-2'-fluoroguanosine-3'-phosphate
  modified_base 10: mod_base = OTHER; note = 2'-O-methylcytidine-3'-phosphate
  modified_base 11: mod_base = OTHER; note = 2'-O-methyluridine-3'-phosphate
  modified_base 12: mod_base = OTHER; note = 2'-O-methylguanosine-3'-phosphate
  modified_base 13: mod_base = OTHER; note = 2'-O-methylcytidine-3'-phosphate
  modified_base 14: mod_base = OTHER; note = 2'-deoxy-2'-fluoroadenosine-3'-phosphate
  modified_base 15: mod_base = OTHER; note = 2'-O-methyluridine-3'-phosphate
  modified_base 16: mod_base = OTHER; note = 2'-deoxy-2'-fluoroguanosine-3'-phosphate
  modified_base 17: mod_base = OTHER; note = 2'-O-methyluridine-3'-phosphate
  modified_base 18: mod_base = OTHER; note = 2'-O-methyluridine-3'-phosphate
  modified_base 19: mod_base = OTHER; note = 2'-O-methylguanosine-3'-phosphate
  modified_base 20: mod_base = OTHER; note = 2'-O-methyladenosine-3'-phosphate
  modified_base 21: mod_base = OTHER; note = 2'-O-methylguanosine-3'-phosphorothioate
  modified_base 22: mod_base = OTHER; note = 2'-O-methylguanosine-3'-phosphorothioate
  modified_base 23: mod_base = OTHER; note = 2'-O-methylguanosine
ttcctggtgctgcatgttgaggg

SEQ ID NO: 2668 - RNA, 23 nt, synthetic construct
  source 1..23: mol_type = other RNA
  modified_base 1: mod_base = OTHER; note = 2'-O-methyluridine-3'-phosphorothioate 5'-(E)-Vinylphosphonate
  modified_base 2: mod_base = OTHER; note = 2'-deoxy-2'-fluoroadenosine-3'-phosphorothioate
  modified_base 3: mod_base = OTHER; note = 2'-O-methylguanosine-3'-phosphate
  modified_base 4: mod_base = OTHER; note = 2'-O-methylcytidine-3'-phosphate
  modified_base 5: mod_base = OTHER; note = 2'-O-methyladenosine-3'-phosphate
  modified_base 6: mod_base = OTHER; note = 2'-deoxy-2'-fluoroguanosine-3'-phosphate
  modified_base 7: mod_base = OTHER; note = 2'-O-methylguanosine-3'-phosphate
  modified_base 8: mod_base = OTHER; note = 2'-deoxy-2'-fluorouridine-3'-phosphate
  modified_base 9: mod_base = OTHER; note = 2'-deoxy-2'-fluoroguanosine-3'-phosphate
  modified_base 10: mod_base = OTHER; note = 2'-O-methyluridine-3'-phosphate
  modified_base 11: mod_base = OTHER; note = 2'-O-methylcytidine-3'-phosphate
  modified_base 12: mod_base = OTHER; note = 2'-O-methylcytidine-3'-phosphate
  modified_base 13: mod_base = OTHER; note = 2'-O-methylguanosine-3'-phosphate
  modified_base 14: mod_base = OTHER; note = 2'-deoxy-2'-fluorouridine-3'-phosphate
  modified_base 15: mod_base = OTHER; note = 2'-O-methylguanosine-3'-phosphate
  modified_base 16: mod_base = OTHER; note = 2'-deoxy-2'-fluorocytidine-3'-phosphate
  modified_base 17: mod_base = OTHER; note = 2'-O-methyladenosine-3'-phosphate
  modified_base 18: mod_base = OTHER; note = 2'-O-methylguanosine-3'-phosphate
  modified_base 19: mod_base = OTHER; note = 2'-O-methylguanosine-3'-phosphate
  modified_base 20: mod_base = OTHER; note = 2'-O-methylguanosine-3'-phosphate
  modified_base 21: mod_base = OTHER; note = 2'-O-methyluridine-3'-phosphorothioate
  modified_base 22: mod_base = OTHER; note = 2'-O-methylguanosine-3'-phosphorothioate
  modified_base 23: mod_base = OTHER; note = 2'-O-methyladenosine
tagcaggtgtccgtgcagggtga

SEQ ID NO: 2669 - RNA, 23 nt, synthetic construct
  source 1..23: mol_type = other RNA
  modified_base 1: mod_base = OTHER; note = 2'-O-methyluridine-3'-phosphorothioate 5'-(E)-Vinylphosphonate
  modified_base 2: mod_base = OTHER; note = 2'-deoxy-2'-fluoroadenosine-3'-phosphorothioate
  modified_base 3: mod_base = OTHER; note = 2'-O-methylguanosine-3'-phosphate
  modified_base 4: mod_base = OTHER; note = 2'-O-methylcytidine-3'-phosphate
  modified_base 5: mod_base = OTHER; note = 2'-O-methylcytidine-3'-phosphate
  modified_base 6: mod_base = OTHER; note = 2'-deoxy-2'-fluoroguanosine-3'-phosphate
  modified_base 7: mod_base = OTHER; note = 2'-O-methyluridine-3'-phosphate
  modified_base 8: mod_base = OTHER; note = 2'-deoxy-2'-fluorocytidine-3'-phosphate
  modified_base 9: mod_base = OTHER; note = 2'-deoxy-2'-fluorocytidine-3'-phosphate
  modified_base 10: mod_base = OTHER; note = 2'-O-methyladenosine-3'-phosphate
  modified_base 11: mod_base = OTHER; note = 2'-O-methylcytidine-3'-phosphate
  modified_base 12: mod_base = OTHER; note = 2'-O-methyladenosine-3'-phosphate
  modified_base 13: mod_base = OTHER; note = 2'-O-methylcytidine-3'-phosphate
  modified_base 14: mod_base = OTHER; note = 2'-deoxy-2'-fluoroadenosine-3'-phosphate
  modified_base 15: mod_base = OTHER; note = 2'-O-methylguanosine-3'-phosphate
  modified_base 16: mod_base = OTHER; note = 2'-deoxy-2'-fluorouridine-3'-phosphate
  modified_base 17: mod_base = OTHER; note = 2'-O-methylguanosine-3'-phosphate
  modified_base 18: mod_base = OTHER; note = 2'-O-methylguanosine-3'-phosphate
  modified_base 19: mod_base = OTHER; note = 2'-O-methyluridine-3'-phosphate
  modified_base 20: mod_base = OTHER; note = 2'-O-methylcytidine-3'-phosphate
  modified_base 21: mod_base = OTHER; note = 2'-O-methylcytidine-3'-phosphorothioate
  modified_base 22: mod_base = OTHER; note = 2'-O-methyluridine-3'-phosphorothioate
  modified_base 23: mod_base = OTHER; note = 2'-O-methylcytidine
tagccgtccacacagtggtcctc

SEQ ID NO: 2670 - RNA, 23 nt, synthetic construct
  source 1..23: mol_type = other RNA
  modified_base 1: mod_base = OTHER; note = 2'-O-methyluridine-3'-phosphorothioate 5'-(E)-Vinylphosphonate
  modified_base 2: mod_base = OTHER; note = 2'-deoxy-2'-fluoroadenosine-3'-phosphorothioate
  modified_base 3: mod_base = OTHER; note = 2'-O-methylguanosine-3'-phosphate
  modified_base 4: mod_base = OTHER; note = 2'-O-methyluridine-3'-phosphate
  modified_base 5: mod_base = OTHER; note = 2'-O-methylguanosine-3'-phosphate
  modified_base 6: mod_base = OTHER; note = 2'-deoxy-2'-fluorocytidine-3'-phosphate
  modified_base 7: mod_base = OTHER; note = 2'-O-methylguanosine-3'-phosphate
  modified_base 8: mod_base = OTHER; note = 2'-deoxy-2'-fluorouridine-3'-phosphate
  modified_base 9: mod_base = OTHER; note = 2'-deoxy-2'-fluoroguanosine-3'-phosphate
  modified_base 10: mod_base = OTHER; note = 2'-O-methyladenosine-3'-phosphate
  modified_base 11: mod_base = OTHER; note = 2'-O-methyluridine-3'-phosphate
  modified_base 12: mod_base = OTHER; note = 2'-O-methylguanosine-3'-phosphate
  modified_base 13: mod_base = OTHER; note = 2'-O-methyluridine-3'-phosphate
  modified_base 14: mod_base = OTHER; note = 2'-deoxy-2'-fluorocytidine-3'-phosphate
  modified_base 15: mod_base = OTHER; note = 2'-O-methyladenosine-3'-phosphate
  modified_base 16: mod_base = OTHER; note = 2'-deoxy-2'-fluorouridine-3'-phosphate
  modified_base 17: mod_base = OTHER; note = 2'-O-methylcytidine-3'-phosphate
  modified_base 18: mod_base = OTHER; note = 2'-O-methylcytidine-3'-phosphate
  modified_base 19: mod_base = OTHER; note = 2'-O-methyladenosine-3'-phosphate
  modified_base 20: mod_base = OTHER; note = 2'-O-methylguanosine-3'-phosphate
  modified_base 21: mod_base = OTHER; note = 2'-O-methylcytidine-3'-phosphorothioate
  modified_base 22: mod_base = OTHER; note = 2'-O-methyladenosine-3'-phosphorothioate
  modified_base 23: mod_base = OTHER; note = 2'-O-methylcytidine
tagtgcgtgatgtcatccagcac

SEQ ID NO: 2671 - RNA, 23 nt, synthetic construct
  source 1..23: mol_type = other RNA
  modified_base 1: mod_base = OTHER; note = 2'-O-methyluridine-3'-phosphorothioate 5'-(E)-Vinylphosphonate
  modified_base 2: mod_base = OTHER; note = 2'-deoxy-2'-fluorouridine-3'-phosphorothioate
  modified_base 3: mod_base = OTHER; note = 2'-O-methylguanosine-3'-phosphate
  modified_base 4: mod_base = OTHER; note = 2'-O-methylcytidine-3'-phosphate
  modified_base 5: mod_base = OTHER; note = 2'-O-methyladenosine-3'-phosphate
  modified_base 6: mod_base = OTHER; note = 2'-deoxy-2'-fluoroguanosine-3'-phosphate
  modified_base 7: mod_base = OTHER; note = 2'-O-methylguanosine-3'-phosphate
  modified_base 8: mod_base = OTHER; note = 2'-deoxy-2'-fluorouridine-3'-phosphate
  modified_base 9: mod_base = OTHER; note = 2'-deoxy-2'-fluoroguanosine-3'-phosphate
  modified_base 10: mod_base = OTHER; note = 2'-O-methylguanosine-3'-phosphate
  modified_base 11: mod_base = OTHER; note = 2'-O-methyluridine-3'-phosphate
  modified_base 12: mod_base = OTHER; note = 2'-O-methylguanosine-3'-phosphate
  modified_base 13: mod_base = OTHER; note = 2'-O-methyluridine-3'-phosphate
  modified_base 14: mod_base = OTHER; note = 2'-deoxy-2'-fluorouridine-3'-phosphate
  modified_base 15: mod_base = OTHER; note = 2'-O-methylguanosine-3'-phosphate
  modified_base 16: mod_base = OTHER; note = 2'-deoxy-2'-fluoroadenosine-3'-phosphate
  modified_base 17: mod_base = OTHER; note = 2'-O-methyladenosine-3'-phosphate
  modified_base 18: mod_base = OTHER; note = 2'-O-methylguanosine-3'-phosphate
  modified_base 19: mod_base = OTHER; note = 2'-O-methylguanosine-3'-phosphate
  modified_base 20: mod_base = OTHER; note = 2'-O-methyladenosine-3'-phosphate
  modified_base 21: mod_base = OTHER; note = 2'-O-methylguanosine-3'-phosphorothioate
  modified_base 22: mod_base = OTHER; note = 2'-O-methylguanosine-3'-phosphorothioate
  modified_base 23: mod_base = OTHER; note = 2'-O-methyluridine
ttgcaggtggtgttgaaggaggt

SEQ ID NO: 2672 - RNA, 23 nt, synthetic construct
  source 1..23: mol_type = other RNA
  modified_base 1: mod_base = OTHER; note = 2'-O-methyluridine-3'-phosphorothioate 5'-(E)-Vinylphosphonate
  modified_base 2: mod_base = OTHER; note = 2'-deoxy-2'-fluoroadenosine-3'-phosphorothioate
  modified_base 3: mod_base = OTHER; note = 2'-O-methylguanosine-3'-phosphate
  modified_base 4: mod_base = OTHER; note = 2'-O-methylguanosine-3'-phosphate
  modified_base 5: mod_base = OTHER; note = 2'-O-methyluridine-3'-phosphate
  modified_base 6: mod_base = OTHER; note = 2'-deoxy-2'-fluorocytidine-3'-phosphate
  modified_base 7: mod_base = OTHER; note = 2'-O-methylcytidine-3'-phosphate
  modified_base 8: mod_base = OTHER; note = 2'-deoxy-2'-fluorouridine-3'-phosphate
  modified_base 9: mod_base = OTHER; note = 2'-deoxy-2'-fluoroguanosine-3'-phosphate
  modified_base 10: mod_base = OTHER; note = 2'-O-methylguanosine-3'-phosphate
  modified_base 11: mod_base = OTHER; note = 2'-O-methylcytidine-3'-phosphate
  modified_base 12: mod_base = OTHER; note = 2'-O-methyladenosine-3'-phosphate
  modified_base 13: mod_base = OTHER; note = 2'-O-methylcytidine-3'-phosphate
  modified_base 14: mod_base = OTHER; note = 2'-deoxy-2'-fluorouridine-3'-phosphate
  modified_base 15: mod_base = OTHER; note = 2'-O-methylguanosine-3'-phosphate
  modified_base 16: mod_base = OTHER; note = 2'-deoxy-2'-fluorocytidine-3'-phosphate
  modified_base 17: mod_base = OTHER; note = 2'-O-methylcytidine-3'-phosphate
  modified_base 18: mod_base = OTHER; note = 2'-O-methyladenosine-3'-phosphate
  modified_base 19: mod_base = OTHER; note = 2'-O-methyluridine-3'-phosphate
  modified_base 20: mod_base = OTHER; note = 2'-O-methyladenosine-3'-phosphate
  modified_base 21: mod_base = OTHER; note = 2'-O-methylguanosine-3'-phosphorothioate
  modified_base 22: mod_base = OTHER; note = 2'-O-methylcytidine-3'-phosphorothioate
  modified_base 23: mod_base = OTHER; note = 2'-O-methylcytidine
taggtcctggcactgccatagcc

SEQ ID NO: 2673 - RNA, 23 nt, synthetic construct
  source 1..23: mol_type = other RNA
  modified_base 1: mod_base = OTHER; note = 2'-O-methyluridine-3'-phosphorothioate 5'-(E)-Vinylphosphonate
  modified_base 2: mod_base = OTHER; note = 2'-deoxy-2'-fluorouridine-3'-phosphorothioate
  modified_base 3: mod_base = OTHER; note = 2'-O-methyladenosine-3'-phosphate
  modified_base 4: mod_base = OTHER; note = 2'-O-methylguanosine-3'-phosphate
  modified_base 5: mod_base = OTHER; note = 2'-O-methyladenosine-3'-phosphate
  modified_base 6: mod_base = OTHER; note = 2'-deoxy-2'-fluoroguanosine-3'-phosphate
  modified_base 7: mod_base = OTHER; note = 2'-O-methyluridine-3'-phosphate
  modified_base 8: mod_base = OTHER; note = 2'-deoxy-2'-fluorouridine-3'-phosphate
  modified_base 9: mod_base = OTHER; note = 2'-deoxy-2'-fluorouridine-3'-phosphate
  modified_base 10: mod_base = OTHER; note = 2'-O-methylcytidine-3'-phosphate
  modified_base 11: mod_base = OTHER; note = 2'-O-methyluridine-3'-phosphate
  modified_base 12: mod_base = OTHER; note = 2'-O-methylcytidine-3'-phosphate
  modified_base 13: mod_base = OTHER; note = 2'-O-methyladenosine-3'-phosphate
  modified_base 14: mod_base = OTHER; note = 2'-deoxy-2'-fluorouridine-3'-phosphate
  modified_base 15: mod_base = OTHER; note = 2'-O-methylcytidine-3'-phosphate
  modified_base 16: mod_base = OTHER; note = 2'-deoxy-2'-fluoroadenosine-3'-phosphate
  modified_base 17: mod_base = OTHER; note = 2'-O-methyluridine-3'-phosphate
  modified_base 18: mod_base = OTHER; note = 2'-O-methyladenosine-3'-phosphate
  modified_base 19: mod_base = OTHER; note = 2'-O-methylguanosine-3'-phosphate
  modified_base 20: mod_base = OTHER; note = 2'-O-methylguanosine-3'-phosphate
  modified_base 21: mod_base = OTHER; note = 2'-O-methyluridine-3'-phosphorothioate
  modified_base 22: mod_base = OTHER; note = 2'-O-methylguanosine-3'-phosphorothioate
  modified_base 23: mod_base = OTHER; note = 2'-O-methylguanosine
ttagagtttctcatcataggtgg

SEQ ID NO: 2674 - RNA, 23 nt, synthetic construct
  source 1..23: mol_type = other RNA
  modified_base 1: mod_base = OTHER; note = 2'-O-methyluridine-3'-phosphorothioate 5'-(E)-Vinylphosphonate
  modified_base 2: mod_base = OTHER; note = 2'-deoxy-2'-fluorouridine-3'-phosphorothioate
  modified_base 3: mod_base = OTHER; note = 2'-O-methyluridine-3'-phosphate
  modified_base 4: mod_base = OTHER; note = 2'-O-methylcytidine-3'-phosphate
  modified_base 5: mod_base = OTHER; note = 2'-O-methyluridine-3'-phosphate
  modified_base 6: mod_base = OTHER; note = 2'-deoxy-2'-fluorouridine-3'-phosphate
  modified_base 7: mod_base = OTHER; note = 2'-O-methylguanosine-3'-phosphate
  modified_base 8: mod_base = OTHER; note = 2'-deoxy-2'-fluoroguanosine-3'-phosphate
  modified_base 9: mod_base = OTHER; note = 2'-deoxy-2'-fluoroadenosine-3'-phosphate
  modified_base 10: mod_base = OTHER; note = 2'-O-methylcytidine-3'-phosphate
  modified_base 11: mod_base = OTHER; note = 2'-O-methyladenosine-3'-phosphate
  modified_base 12: mod_base = OTHER; note = 2'-O-methylguanosine-3'-phosphate
  modified_base 13: mod_base = OTHER; note = 2'-O-methyladenosine-3'-phosphate
  modified_base 14: mod_base = OTHER; note = 2'-deoxy-2'-fluoroadenosine-3'-phosphate
  modified_base 15: mod_base = OTHER; note = 2'-O-methylcytidine-3'-phosphate
  modified_base 16: mod_base = OTHER; note = 2'-deoxy-2'-fluoroguanosine-3'-phosphate
  modified_base 17: mod_base = OTHER; note = 2'-O-methyluridine-3'-phosphate
  modified_base 18: mod_base = OTHER; note = 2'-O-methyladenosine-3'-phosphate
  modified_base 19: mod_base = OTHER; note = 2'-O-methylguanosine-3'-phosphate
  modified_base 20: mod_base = OTHER; note = 2'-O-methylcytidine-3'-phosphate
  modified_base 21: mod_base = OTHER; note = 2'-O-methyluridine-3'-phosphorothioate
  modified_base 22: mod_base = OTHER; note = 2'-O-methylguanosine-3'-phosphorothioate
  modified_base 23: mod_base = OTHER; note = 2'-O-methylcytidine
tttcttggacagaacgtagctgc

SEQ ID NO: 2675 - RNA, 23 nt, synthetic construct
  source 1..23: mol_type = other RNA
  modified_base 1: mod_base = OTHER; note = 2'-O-methyluridine-3'-phosphorothioate 5'-(E)-Vinylphosphonate
  modified_base 2: mod_base = OTHER; note = 2'-deoxy-2'-fluoroadenosine-3'-phosphorothioate
  modified_base 3: mod_base = OTHER; note = 2'-O-methylguanosine-3'-phosphate
  modified_base 4: mod_base = OTHER; note = 2'-O-methylcytidine-3'-phosphate
  modified_base 5: mod_base = OTHER; note = 2'-O-methyladenosine-3'-phosphate
  modified_base 6: mod_base = OTHER; note = 2'-deoxy-2'-fluorocytidine-3'-phosphate
  modified_base 7: mod_base = OTHER; note = 2'-O-methylguanosine-3'-phosphate
  modified_base 8: mod_base = OTHER; note = 2'-deoxy-2'-fluoroguanosine-3'-phosphate
  modified_base 9: mod_base = OTHER; note = 2'-deoxy-2'-fluorouridine-3'-phosphate
  modified_base 10: mod_base = OTHER; note = 2'-O-methylguanosine-3'-phosphate
  modified_base 11: mod_base = OTHER; note = 2'-O-methyladenosine-3'-phosphate
  modified_base 12: mod_base = OTHER; note = 2'-O-methyladenosine-3'-phosphate
  modified_base 13: mod_base = OTHER; note = 2'-O-methylguanosine-3'-phosphate
  modified_base 14: mod_base = OTHER; note = 2'-deoxy-2'-fluorocytidine-3'-phosphate
  modified_base 15: mod_base = OTHER; note = 2'-O-methyluridine-3'-phosphate
  modified_base 16: mod_base = OTHER; note = 2'-deoxy-2'-fluoroguanosine-3'-phosphate
  modified_base 17: mod_base = OTHER; note = 2'-O-methylcytidine-3'-phosphate
  modified_base 18: mod_base = OTHER; note = 2'-O-methyluridine-3'-phosphate
  modified_base 19: mod_base = OTHER; note = 2'-O-methylguanosine-3'-phosphate
  modified_base 20: mod_base = OTHER; note = 2'-O-methyluridine-3'-phosphate
  modified_base 21: mod_base = OTHER; note = 2'-O-methylcytidine-3'-phosphorothioate
  modified_base 22: mod_base = OTHER; note = 2'-O-methylguanosine-3'-phosphorothioate
  modified_base 23: mod_base = OTHER; note = 2'-O-methylguanosine
tagcacggtgaagctgctgtcgg

SEQ ID NO: 2676 - RNA, 23 nt, synthetic construct
  source 1..23: mol_type = other RNA
  modified_base 1: mod_base = OTHER; note = 2'-O-methyluridine-3'-phosphorothioate 5'-(E)-Vinylphosphonate
  modified_base 2: mod_base = OTHER; note = 2'-deoxy-2'-fluorouridine-3'-phosphorothioate
  modified_base 3: mod_base = OTHER; note = 2'-O-methylcytidine-3'-phosphate
  modified_base 4: mod_base = OTHER; note = 2'-O-methyladenosine-3'-phosphate
  modified_base 5: mod_base = OTHER; note = 2'-O-methylguanosine-3'-phosphate
  modified_base 6: mod_base = OTHER; note = 2'-deoxy-2'-fluoroguanosine-3'-phosphate
  modified_base 7: mod_base = OTHER; note = 2'-O-methylcytidine-3'-phosphate
  modified_base 8: mod_base = OTHER; note = 2'-deoxy-2'-fluoroadenosine-3'-phosphate
  modified_base 9: mod_base = OTHER; note = 2'-deoxy-2'-fluoroguanosine-3'-phosphate
  modified_base 10: mod_base = OTHER; note = 2'-O-methyluridine-3'-phosphate
  modified_base 11: mod_base = OTHER; note = 2'-O-methyluridine-3'-phosphate
  modified_base 12: mod_base = OTHER; note = 2'-O-methylcytidine-3'-phosphate
  modified_base 13: mod_base = OTHER; note = 2'-O-methyluridine-3'-phosphate
  modified_base 14: mod_base = OTHER; note = 2'-deoxy-2'-fluorocytidine-3'-phosphate
  modified_base 15: mod_base = OTHER; note = 2'-O-methylguanosine-3'-phosphate
  modified_base 16: mod_base = OTHER; note = 2'-deoxy-2'-fluorouridine-3'-phosphate
  modified_base 17: mod_base = OTHER; note = 2'-O-methyluridine-3'-phosphate
  modified_base 18: mod_base = OTHER; note = 2'-O-methylguanosine-3'-phosphate
  modified_base 19: mod_base = OTHER; note = 2'-O-methyluridine-3'-phosphate
  modified_base 20: mod_base = OTHER; note = 2'-O-methylcytidine-3'-phosphate
  modified_base 21: mod_base = OTHER; note = 2'-O-methylcytidine-3'-phosphorothioate
  modified_base 22: mod_base = OTHER; note = 2'-O-methylguanosine-3'-phosphorothioate
  modified_base 23: mod_base = OTHER; note = 2'-O-methyluridine
ttcaggcagttctcgttgtccgt

SEQ ID NO: 2677 - RNA, 23 nt, synthetic construct
  source 1..23: mol_type = other RNA
  modified_base 1: mod_base = OTHER; note = 2'-O-methyluridine-3'-phosphorothioate 5'-(E)-Vinylphosphonate
  modified_base 2: mod_base = OTHER; note = 2'-deoxy-2'-fluorocytidine-3'-phosphorothioate
  modified_base 3: mod_base = OTHER; note = 2'-O-methylguanosine-3'-phosphate
  modified_base 4: mod_base = OTHER; note = 2'-O-methyluridine-3'-phosphate
  modified_base 5: mod_base = OTHER; note = 2'-O-methylguanosine-3'-phosphate
  modified_base 6: mod_base = OTHER; note = 2'-deoxy-2'-fluorouridine-3'-phosphate
  modified_base 7: mod_base = OTHER; note = 2'-O-methyladenosine-3'-phosphate
  modified_base 8: mod_base = OTHER; note = 2'-deoxy-2'-fluoroguanosine-3'-phosphate
  modified_base 9: mod_base = OTHER; note = 2'-deoxy-2'-fluoroadenosine-3'-phosphate
  modified_base 10: mod_base = OTHER; note = 2'-O-methyluridine-3'-phosphate
  modified_base 11: mod_base = OTHER; note = 2'-O-methylguanosine-3'-phosphate
  modified_base 12: mod_base = OTHER; note = 2'-O-methylguanosine-3'-phosphate
  modified_base 13: mod_base = OTHER; note = 2'-O-methyladenosine-3'-phosphate
  modified_base 14: mod_base = OTHER; note = 2'-deoxy-2'-fluoroguanosine-3'-phosphate
  modified_base 15: mod_base = OTHER; note = 2'-O-methyluridine-3'-phosphate
  modified_base 16: mod_base = OTHER; note = 2'-deoxy-2'-fluorouridine-3'-phosphate
  modified_base 17: mod_base = OTHER; note = 2'-O-methylguanosine-3'-phosphate
  modified_base 18: mod_base = OTHER; note = 2'-O-methyladenosine-3'-phosphate
  modified_base 19: mod_base = OTHER; note = 2'-O-methylguanosine-3'-phosphate
  modified_base 20: mod_base = OTHER; note = 2'-O-methylguanosine-3'-phosphate
  modified_base 21: mod_base = OTHER; note = 2'-O-methyladenosine-3'-phosphorothioate
  modified_base 22: mod_base = OTHER; note = 2'-O-methyladenosine-3'-phosphorothioate
  modified_base 23: mod_base = OTHER; note = 2'-O-methylcytidine
tcgtgtagatggagttgaggaac

SEQ ID NO: 2678 - RNA, 23 nt, synthetic construct
  source 1..23: mol_type = other RNA
  modified_base 1: mod_base = OTHER; note = 2'-O-methyluridine-3'-phosphorothioate 5'-(E)-Vinylphosphonate
  modified_base 2: mod_base = OTHER; note = 2'-deoxy-2'-fluoroguanosine-3'-phosphorothioate
  modified_base 3: mod_base = OTHER; note = 2'-O-methyluridine-3'-phosphate
  modified_base 4: mod_base = OTHER; note = 2'-O-methylguanosine-3'-phosphate
  modified_base 5: mod_base = OTHER; note = 2'-O-methyladenosine-3'-phosphate
  modified_base 6: mod_base = OTHER; note = 2'-deoxy-2'-fluoroadenosine-3'-phosphate
  modified_base 7: mod_base = OTHER; note = 2'-O-methylcytidine-3'-phosphate
  modified_base 8: mod_base = OTHER; note = 2'-deoxy-2'-fluoroadenosine-3'-phosphate
  modified_base 9: mod_base = OTHER; note = 2'-deoxy-2'-fluoroguanosine-3'-phosphate
  modified_base 10: mod_base = OTHER; note = 2'-O-methylguanosine-3'-phosphate
  modified_base 11: mod_base = OTHER; note = 2'-O-methylguanosine-3'-phosphate
  modified_base 12: mod_base = OTHER; note = 2'-O-methyluridine-3'-phosphate
  modified_base 13: mod_base = OTHER; note = 2'-O-methylguanosine-3'-phosphate
  modified_base 14: mod_base = OTHER; note = 2'-deoxy-2'-fluoroadenosine-3'-phosphate
  modified_base 15: mod_base = OTHER; note = 2'-O-methyluridine-3'-phosphate
  modified_base 16: mod_base = OTHER; note = 2'-deoxy-2'-fluoroguanosine-3'-phosphate
  modified_base 17: mod_base = OTHER; note = 2'-O-methyluridine-3'-phosphate
  modified_base 18: mod_base = OTHER; note = 2'-O-methyluridine-3'-phosphate
  modified_base 19: mod_base = OTHER; note = 2'-O-methylguanosine-3'-phosphate
  modified_base 20: mod_base = OTHER; note = 2'-O-methylguanosine-3'-phosphate
  modified_base 21: mod_base = OTHER; note = 2'-O-methylcytidine-3'-phosphorothioate
  modified_base 22: mod_base = OTHER; note = 2'-O-methyluridine-3'-phosphorothioate
  modified_base 23: mod_base = OTHER; note = 2'-O-methylguanosine
tgtgaacagggtgatgttggctg

SEQ ID NO: 2679 - RNA, 23 nt, synthetic construct
  source 1..23: mol_type = other RNA
  modified_base 1: mod_base = OTHER; note = 2'-O-methyluridine-3'-phosphorothioate 5'-(E)-Vinylphosphonate
  modified_base 2: mod_base = OTHER; note = 2'-deoxy-2'-fluoroadenosine-3'-phosphorothioate
  modified_base 3: mod_base = OTHER; note = 2'-O-methylcytidine-3'-phosphate
  modified_base 4: mod_base = OTHER; note = 2'-O-methylcytidine-3'-phosphate
  modified_base 5: mod_base = OTHER; note = 2'-O-methyladenosine-3'-phosphate
  modified_base 6: mod_base = OTHER; note = 2'-deoxy-2'-fluorocytidine-3'-phosphate
  modified_base 7: mod_base = OTHER; note = 2'-O-methylguanosine-3'-phosphate
  modified_base 8: mod_base = OTHER; note = 2'-deoxy-2'-fluoroadenosine-3'-phosphate
  modified_base 9: mod_base = OTHER; note = 2'-deoxy-2'-fluorouridine-3'-phosphate
  modified_base 10: mod_base = OTHER; note = 2'-O-methylguanosine-3'-phosphate
  modified_base 11: mod_base = OTHER; note = 2'-O-methyladenosine-3'-phosphate
  modified_base 12: mod_base = OTHER; note = 2'-O-methyladenosine-3'-phosphate
  modified_base 13: mod_base = OTHER; note = 2'-O-methylguanosine-3'-phosphate
  modified_base 14: mod_base = OTHER; note = 2'-deoxy-2'-fluoroadenosine-3'-phosphate
  modified_base 15: mod_base = OTHER; note = 2'-O-methyladenosine-3'-phosphate
  modified_base 16: mod_base = OTHER; note = 2'-deoxy-2'-fluoroguanosine-3'-phosphate
  modified_base 17: mod_base = OTHER; note = 2'-O-methylcytidine-3'-phosphate
  modified_base 18: mod_base = OTHER; note = 2'-O-methyluridine-3'-phosphate
  modified_base 19: mod_base = OTHER; note = 2'-O-methylcytidine-3'-phosphate
  modified_base 20: mod_base = OTHER; note = 2'-O-methylguanosine-3'-phosphate
  modified_base 21: mod_base = OTHER; note = 2'-O-methyladenosine-3'-phosphorothioate
  modified_base 22: mod_base = OTHER; note = 2'-O-methylguanosine-3'-phosphorothioate
  modified_base 23: mod_base = OTHER; note = 2'-O-methylguanosine
taccacgatgaagaagctcgagg

SEQ ID NO: 2680 - RNA, 23 nt, synthetic construct
  source 1..23: mol_type = other RNA
  modified_base 1: mod_base = OTHER; note = 2'-O-methyluridine-3'-phosphorothioate 5'-(E)-Vinylphosphonate
  modified_base 2: mod_base = OTHER; note = 2'-deoxy-2'-fluorocytidine-3'-phosphorothioate
  modified_base 3: mod_base = OTHER; note = 2'-O-methyladenosine-3'-phosphate
  modified_base 4: mod_base = OTHER; note = 2'-O-methyladenosine-3'-phosphate
  modified_base 5: mod_base = OTHER; note = 2'-O-methyladenosine-3'-phosphate
  modified_base 6: mod_base = OTHER; note = 2'-deoxy-2'-fluorocytidine-3'-phosphate
  modified_base 7: mod_base = OTHER; note = 2'-O-methyladenosine-3'-phosphate
  modified_base 8: mod_base = OTHER; note = 2'-deoxy-2'-fluorocytidine-3'-phosphate
  modified_base 9: mod_base = OTHER; note = 2'-deoxy-2'-fluorocytidine-3'-phosphate
  modified_base 10: mod_base = OTHER; note = 2'-O-methyluridine-3'-phosphate
  modified_base 11: mod_base = OTHER; note = 2'-O-methylguanosine-3'-phosphate
  modified_base 12: mod_base = OTHER; note = 2'-O-methylcytidine-3'-phosphate
  modified_base 13: mod_base = OTHER; note = 2'-O-methyladenosine-3'-phosphate
  modified_base 14: mod_base = OTHER; note = 2'-deoxy-2'-fluorouridine-3'-phosphate
  modified_base 15: mod_base = OTHER; note = 2'-O-methylguanosine-3'-phosphate
  modified_base 16: mod_base = OTHER; note = 2'-deoxy-2'-fluoroadenosine-3'-phosphate
  modified_base 17: mod_base = OTHER; note = 2'-O-methylguanosine-3'-phosphate
  modified_base 18: mod_base = OTHER; note = 2'-O-methyluridine-3'-phosphate
  modified_base 19: mod_base = OTHER; note = 2'-O-methylguanosine-3'-phosphate
  modified_base 20: mod_base = OTHER; note = 2'-O-methylguanosine-3'-phosphate
  modified_base 21: mod_base = OTHER; note = 2'-O-methylcytidine-3'-phosphorothioate
  modified_base 22: mod_base = OTHER; note = 2'-O-methyladenosine-3'-phosphorothioate
  modified_base 23: mod_base = OTHER; note = 2'-O-methylcytidine
tcaaacacctgcatgagtggcac

SEQ ID NO: 2681 - RNA, 23 nt, synthetic construct
  source 1..23: mol_type = other RNA
  modified_base 1: mod_base = OTHER; note = 2'-O-methyluridine-3'-phosphorothioate 5'-(E)-Vinylphosphonate
  modified_base 2: mod_base = OTHER; note = 2'-deoxy-2'-fluorouridine-3'-phosphorothioate
  modified_base 3: mod_base = OTHER; note = 2'-O-methylguanosine-3'-phosphate
  modified_base 4: mod_base = OTHER; note = 2'-O-methylguanosine-3'-phosphate
  modified_base 5: mod_base = OTHER; note = 2'-O-methyluridine-3'-phosphate
  modified_base 6: mod_base = OTHER; note = 2'-deoxy-2'-fluorouridine-3'-phosphate
  modified_base 7: mod_base = OTHER; note = 2'-O-methylcytidine-3'-phosphate
  modified_base 8: mod_base = OTHER; note = 2'-deoxy-2'-fluorouridine-3'-phosphate
  modified_base 9: mod_base = OTHER; note = 2'-deoxy-2'-fluoroguanosine-3'-phosphate
  modified_base 10: mod_base = OTHER; note = 2'-O-methylguanosine-3'-phosphate
  modified_base 11: mod_base = OTHER; note = 2'-O-methyluridine-3'-phosphate
  modified_base 12: mod_base = OTHER; note = 2'-O-methyluridine-3'-phosphate
  modified_base 13: mod_base = OTHER; note = 2'-O-methylguanosine-3'-phosphate
  modified_base 14: mod_base = OTHER; note = 2'-deoxy-2'-fluoroadenosine-3'-phosphate
  modified_base 15: mod_base = OTHER; note = 2'-O-methyladenosine-3'-phosphate
  modified_base 16: mod_base = OTHER; note = 2'-deoxy-2'-fluoroguanosine-3'-phosphate
  modified_base 17: mod_base = OTHER; note = 2'-O-methyluridine-3'-phosphate
  modified_base 18: mod_base = OTHER; note = 2'-O-methyluridine-3'-phosphate
  modified_base 19: mod_base = OTHER; note = 2'-O-methylcytidine-3'-phosphate
  modified_base 20: mod_base = OTHER; note = 2'-O-methylcytidine-3'-phosphate
  modified_base 21: mod_base = OTHER; note = 2'-O-methylcytidine-3'-phosphorothioate
  modified_base 22: mod_base = OTHER; note = 2'-O-methyladenosine-3'-phosphorothioate
  modified_base 23: mod_base = OTHER; note = 2'-O-methylcytidine
ttggttctggttgaagttcccac

SEQ ID NO: 2682 - RNA, 23 nt, synthetic construct
  source 1..23: mol_type = other RNA
  modified_base 1: mod_base = OTHER; note = 2'-O-methyluridine-3'-phosphorothioate 5'-(E)-Vinylphosphonate
  modified_base 2: mod_base = OTHER; note = 2'-deoxy-2'-fluorouridine-3'-phosphorothioate
  modified_base 3: mod_base = OTHER; note = 2'-O-methylguanosine-3'-phosphate
  modified_base 4: mod_base = OTHER; note = 2'-O-methyladenosine-3'-phosphate
  modified_base 5: mod_base = OTHER; note = 2'-O-methylguanosine-3'-phosphate
  modified_base 6: mod_base = OTHER; note = 2'-deoxy-2'-fluoroguanosine-3'-phosphate
  modified_base 7: mod_base = OTHER; note = 2'-O-methylguanosine-3'-phosphate
  modified_base 8: mod_base = OTHER; note = 2'-deoxy-2'-fluorocytidine-3'-phosphate
  modified_base 9: mod_base = OTHER; note = 2'-deoxy-2'-fluorocytidine-3'-phosphate
  modified_base 10: mod_base = OTHER; note = 2'-O-methylguanosine-3'-phosphate
  modified_base 11: mod_base = OTHER; note = 2'-O-methyluridine-3'-phosphate
  modified_base 12: mod_base = OTHER; note = 2'-O-methylguanosine-3'-phosphate
  modified_base 13: mod_base = OTHER; note = 2'-O-methyladenosine-3'-phosphate
  modified_base 14: mod_base = OTHER; note = 2'-deoxy-2'-fluoroadenosine-3'-phosphate
  modified_base 15: mod_base = OTHER; note = 2'-O-methylguanosine-3'-phosphate
  modified_base 16: mod_base = OTHER; note = 2'-deoxy-2'-fluorouridine-3'-phosphate
  modified_base 17: mod_base = OTHER; note = 2'-O-methylcytidine-3'-phosphate
  modified_base 18: mod_base = OTHER; note = 2'-O-methylguanosine-3'-phosphate
  modified_base 19: mod_base = OTHER; note = 2'-O-methyluridine-3'-phosphate
  modified_base 20: mod_base = OTHER; note = 2'-O-methylcytidine-3'-phosphate
  modified_base 21: mod_base = OTHER; note = 2'-O-methyladenosine-3'-phosphorothioate
  modified_base 22: mod_base = OTHER; note = 2'-O-methylguanosine-3'-phosphorothioate
  modified_base 23: mod_base = OTHER; note = 2'-O-methylcytidine
ttgagggccgtgaagtcgtcagc

SEQ ID NO: 2683 - RNA, 23 nt, synthetic construct
  source 1..23: mol_type = other RNA
  modified_base 1: mod_base = OTHER; note = 2'-O-methyluridine-3'-phosphorothioate 5'-(E)-Vinylphosphonate
  modified_base 2: mod_base = OTHER; note = 2'-deoxy-2'-fluorouridine-3'-phosphorothioate
  modified_base 3: mod_base = OTHER; note = 2'-O-methylcytidine-3'-phosphate
  modified_base 4: mod_base = OTHER; note = 2'-O-methylcytidine-3'-phosphate
  modified_base 5: mod_base = OTHER; note = 2'-O-methyladenosine-3'-phosphate
  modified_base 6: mod_base = OTHER; note = 2'-deoxy-2'-fluoroguanosine-3'-phosphate
  modified_base 7: mod_base = OTHER; note = 2'-O-methylguanosine-3'-phosphate
  modified_base 8: mod_base = OTHER; note = 2'-deoxy-2'-fluorouridine-3'-phosphate
  modified_base 9: mod_base = OTHER; note = 2'-deoxy-2'-fluoroguanosine-3'-phosphate
  modified_base 10: mod_base = OTHER; note = 2'-O-methyluridine-3'-phosphate
  modified_base 11: mod_base = OTHER; note = 2'-O-methyluridine-3'-phosphate
  modified_base 12: mod_base = OTHER; note = 2'-O-methylguanosine-3'-phosphate
  modified_base 13: mod_base = OTHER; note = 2'-O-methylguanosine-3'-phosphate
  modified_base 14: mod_base = OTHER; note = 2'-deoxy-2'-fluorocytidine-3'-phosphate
  modified_base 15: mod_base = OTHER; note = 2'-O-methylguanosine-3'-phosphate
  modified_base 16: mod_base = OTHER; note = 2'-deoxy-2'-fluoroadenosine-3'-phosphate
  modified_base 17: mod_base = OTHER; note = 2'-O-methyladenosine-3'-phosphate
  modified_base 18: mod_base = OTHER; note = 2'-O-methylguanosine-3'-phosphate
  modified_base 19: mod_base = OTHER; note = 2'-O-methylguanosine-3'-phosphate
  modified_base 20: mod_base = OTHER; note = 2'-O-methylcytidine-3'-phosphate
  modified_base 21: mod_base = OTHER; note = 2'-O-methyluridine-3'-phosphorothioate
  modified_base 22: mod_base = OTHER; note = 2'-O-methylguanosine-3'-phosphorothioate
  modified_base 23: mod_base = OTHER; note = 2'-O-methylcytidine
ttccaggtgttggcgaaggctgc

SEQ ID NO: 2684 - RNA, 23 nt, synthetic construct
  source 1..23: mol_type = other RNA
  modified_base 1: mod_base = OTHER; note = 2'-O-methyluridine-3'-phosphorothioate 5'-(E)-Vinylphosphonate
  modified_base 2: mod_base = OTHER; note = 2'-deoxy-2'-fluoroguanosine-3'-phosphorothioate
  modified_base 3: mod_base = OTHER; note = 2'-O-methyluridine-3'-phosphate
  modified_base 4: mod_base = OTHER; note = 2'-O-methylcytidine-3'-phosphate
  modified_base 5: mod_base = OTHER; note = 2'-O-methylcytidine-3'-phosphate
  modified_base 6: mod_base = OTHER; note = 2'-deoxy-2'-fluorouridine-3'-phosphate
  modified_base 7: mod_base = OTHER; note = 2'-O-methylcytidine-3'-phosphate
  modified_base 8: mod_base = OTHER; note = 2'-deoxy-2'-fluoroadenosine-3'-phosphate
  modified_base 9: mod_base = OTHER; note = 2'-deoxy-2'-fluoroadenosine-3'-phosphate
  modified_base 10: mod_base = OTHER; note = 2'-O-methyladenosine-3'-phosphate
  modified_base 11: mod_base = OTHER; note = 2'-O-methylguanosine-3'-phosphate
  modified_base 12: mod_base = OTHER; note = 2'-O-methylcytidine-3'-phosphate
  modified_base 13: mod_base = OTHER; note = 2'-O-methyluridine-3'-phosphate
  modified_base 14: mod_base = OTHER; note = 2'-deoxy-2'-fluoroguanosine-3'-phosphate
  modified_base 15: mod_base = OTHER; note = 2'-O-methyluridine-3'-phosphate
  modified_base 16: mod_base = OTHER; note = 2'-deoxy-2'-fluorouridine-3'-phosphate
  modified_base 17: mod_base = OTHER; note = 2'-O-methylcytidine-3'-phosphate
  modified_base 18: mod_base = OTHER; note = 2'-O-methylcytidine-3'-phosphate
  modified_base 19: mod_base = OTHER; note = 2'-O-methyluridine-3'-phosphate
  modified_base 20: mod_base = OTHER; note = 2'-O-methylguanosine-3'-phosphate
  modified_base 21: mod_base = OTHER; note = 2'-O-methylguanosine-3'-phosphorothioate
  modified_base 22: mod_base = OTHER; note = 2'-O-methylcytidine-3'-phosphorothioate
  modified_base 23: mod_base = OTHER; note = 2'-O-methyladenosine
tgtcctcaaagctgttcctggca

SEQ ID NO: 2685 - RNA, 23 nt, synthetic construct
  source 1..23: mol_type = other RNA
  modified_base 1: mod_base = OTHER; note = 2'-O-methyluridine-3'-phosphorothioate 5'-(E)-Vinylphosphonate
  modified_base 2: mod_base = OTHER; note = 2'-deoxy-2'-fluoroguanosine-3'-phosphorothioate
  modified_base 3: mod_base = OTHER; note = 2'-O-methylcytidine-3'-phosphate
  modified_base 4: mod_base = OTHER; note = 2'-O-methylguanosine-3'-phosphate
  modified_base 5: mod_base = OTHER; note = 2'-O-methyluridine-3'-phosphate
  modified_base 6: mod_base = OTHER; note = 2'-deoxy-2'-fluoroadenosine-3'-phosphate
  modified_base 7: mod_base = OTHER; note = 2'-O-methylguanosine-3'-phosphate
  modified_base 8: mod_base = OTHER; note = 2'-deoxy-2'-fluorouridine-3'-phosphate
  modified_base 9: mod_base = OTHER; note = 2'-deoxy-2'-fluorouridine-3'-phosphate
  modified_base 10: mod_base = OTHER; note = 2'-O-methylcytidine-3'-phosphate
  modified_base 11: mod_base = OTHER; note = 2'-O-methyluridine-3'-phosphate
  modified_base 12: mod_base = OTHER; note = 2'-O-methylcytidine-3'-phosphate
  modified_base 13: mod_base = OTHER; note = 2'-O-methyladenosine-3'-phosphate
  modified_base 14: mod_base = OTHER; note = 2'-deoxy-2'-fluorouridine-3'-phosphate
  modified_base 15: mod_base = OTHER; note = 2'-O-methyluridine-3'-phosphate
  modified_base 16: mod_base = OTHER; note = 2'-deoxy-2'-fluorocytidine-3'-phosphate
  modified_base 17: mod_base = OTHER; note = 2'-O-methyluridine-3'-phosphate
  modified_base 18: mod_base = OTHER; note = 2'-O-methylcytidine-3'-phosphate
  modified_base 19: mod_base = OTHER; note = 2'-O-methylcytidine-3'-phosphate
  modified_base 20: mod_base = OTHER; note = 2'-O-methyladenosine-3'-phosphate
  modified_base 21: mod_base = OTHER; note = 2'-O-methylcytidine-3'-phosphorothioate
  modified_base 22: mod_base = OTHER; note = 2'-O-methyladenosine-3'-phosphorothioate
  modified_base 23: mod_base = OTHER; note = 2'-O-methylcytidine
tgcgtagttctcattctccacac

SEQ ID NO: 2686 - RNA, 23 nt, synthetic construct
  source 1..23: mol_type = other RNA
  modified_base 1: mod_base = OTHER; note = 2'-O-methyluridine-3'-phosphorothioate 5'-(E)-Vinylphosphonate
  modified_base 2: mod_base = OTHER; note = 2'-deoxy-2'-fluoroadenosine-3'-phosphorothioate
  modified_base 3: mod_base = OTHER; note = 2'-O-methylguanosine-3'-phosphate
  modified_base 4: mod_base = OTHER; note = 2'-O-methylcytidine-3'-phosphate
  modified_base 5: mod_base = OTHER; note = 2'-O-methylguanosine-3'-phosphate
  modified_base 6: mod_base = OTHER; note = 2'-deoxy-2'-fluorocytidine-3'-phosphate
  modified_base 7: mod_base = OTHER; note = 2'-O-methylguanosine-3'-phosphate
  modified_base 8: mod_base = OTHER; note = 2'-deoxy-2'-fluoroadenosine-3'-phosphate
  modified_base 9: mod_base = OTHER; note = 2'-deoxy-2'-fluoroguanosine-3'-phosphate
  modified_base 10: mod_base = OTHER; note = 2'-O-methyladenosine-3'-phosphate
  modified_base 11: mod_base = OTHER; note = 2'-O-methyladenosine-3'-phosphate
  modified_base 12: mod_base = OTHER; note = 2'-O-methylguanosine-3'-phosphate
  modified_base 13: mod_base = OTHER; note = 2'-O-methylguanosine-3'-phosphate
  modified_base 14: mod_base = OTHER; note = 2'-deoxy-2'-fluorocytidine-3'-phosphate
  modified_base 15: mod_base = OTHER; note = 2'-O-methyladenosine-3'-phosphate
  modified_base 16: mod_base = OTHER; note = 2'-deoxy-2'-fluorocytidine-3'-phosphate
  modified_base 17: mod_base = OTHER; note = 2'-O-methyluridine-3'-phosphate
  modified_base 18: mod_base = OTHER; note = 2'-O-methylguanosine-3'-phosphate
  modified_base 19: mod_base = OTHER; note = 2'-O-methyluridine-3'-phosphate
  modified_base 20: mod_base = OTHER; note = 2'-O-methyluridine-3'-phosphate
  modified_base 21: mod_base = OTHER; note = 2'-O-methylguanosine-3'-phosphorothioate
  modified_base 22: mod_base = OTHER; note = 2'-O-methylguanosine-3'-phosphorothioate
  modified_base 23: mod_base = OTHER; note = 2'-O-methylguanosine
tagcgcgagaaggcactgttggg

SEQ ID NO: 2687 - RNA, 23 nt, synthetic construct
  source 1..23: mol_type = other RNA
  modified_base 1: mod_base = OTHER; note = 2'-O-methyluridine-3'-phosphorothioate 5'-(E)-Vinylphosphonate
  modified_base 2: mod_base = OTHER; note = 2'-deoxy-2'-fluoroadenosine-3'-phosphorothioate
  modified_base 3: mod_base = OTHER; note = 2'-O-methylcytidine-3'-phosphate
  modified_base 4: mod_base = OTHER; note = 2'-O-methyladenosine-3'-phosphate
  modified_base 5: mod_base = OTHER; note = 2'-O-methyluridine-3'-phosphate
  modified_base 6: mod_base = OTHER; note = 2'-deoxy-2'-fluoroguanosine-3'-phosphate
  modified_base 7: mod_base = OTHER; note = 2'-O-methylcytidine-3'-phosphate
  modified_base 8: mod_base = OTHER; note = 2'-deoxy-2'-fluoroadenosine-3'-phosphate
  modified_base 9: mod_base = OTHER; note = 2'-deoxy-2'-fluoroguanosine-3'-phosphate
  modified_base 10: mod_base = OTHER; note = 2'-O-methyluridine-3'-phosphate
  modified_base 11: mod_base = OTHER; note = 2'-O-methyluridine-3'-phosphate
  modified_base 12: mod_base = OTHER; note = 2'-O-methylcytidine-3'-phosphate
  modified_base 13: mod_base = OTHER; note = 2'-O-methylguanosine-3'-phosphate
  modified_base 14: mod_base = OTHER; note = 2'-deoxy-2'-fluoroadenosine-3'-phosphate
  modified_base 15: mod_base = OTHER; note = 2'-O-methylguanosine-3'-phosphate
  modified_base 16: mod_base = OTHER; note = 2'-deoxy-2'-fluorouridine-3'-phosphate
  modified_base 17: mod_base = OTHER; note = 2'-O-methylguanosine-3'-phosphate
  modified_base 18: mod_base = OTHER; note = 2'-O-methylguanosine-3'-phosphate
  modified_base 19: mod_base = OTHER; note = 2'-O-methyladenosine-3'-phosphate
  modified_base 20: mod_base = OTHER; note = 2'-O-methyladenosine-3'-phosphate
  modified_base 21: mod_base = OTHER; note = 2'-O-methylguanosine-3'-phosphorothioate
  modified_base 22: mod_base = OTHER; note = 2'-O-methylguanosine-3'-phosphorothioate
  modified_base 23: mod_base = OTHER; note = 2'-O-methylguanosine
tacatgcagttcgagtggaaggg

SEQ ID NO: 2688 - RNA, 23 nt, synthetic construct
  source 1..23: mol_type = other RNA
  modified_base 1: mod_base = OTHER; note = 2'-O-methyluridine-3'-phosphorothioate 5'-(E)-Vinylphosphonate
  modified_base 2: mod_base = OTHER; note = 2'-deoxy-2'-fluorouridine-3'-phosphorothioate
  modified_base 3: mod_base = OTHER; note = 2'-O-methylcytidine-3'-phosphate
  modified_base 4: mod_base = OTHER; note = 2'-O-methylcytidine-3'-phosphate
  modified_base 5: mod_base = OTHER; note = 2'-O-methylguanosine-3'-phosphate
  modified_base 6: mod_base = OTHER; note = 2'-deoxy-2'-fluorocytidine-3'-phosphate
  modified_base 7: mod_base = OTHER; note = 2'-O-methyluridine-3'-phosphate
  modified_base 8: mod_base = OTHER; note = 2'-deoxy-2'-fluorocytidine-3'-phosphate
  modified_base 9: mod_base = OTHER; note = 2'-deoxy-2'-fluoroadenosine-3'-phosphate
  modified_base 10: mod_base = OTHER; note = 2'-O-methylcytidine-3'-phosphate
  modified_base 11: mod_base = OTHER; note = 2'-O-methyladenosine-3'-phosphate
  modified_base 12: mod_base = OTHER; note = 2'-O-methylguanosine-3'-phosphate
  modified_base 13: mod_base = OTHER; note = 2'-O-methyluridine-3'-phosphate
  modified_base 14: mod_base = OTHER; note = 2'-deoxy-2'-fluorouridine-3'-phosphate
  modified_base 15: mod_base = OTHER; note = 2'-O-methylguanosine-3'-phosphate
  modified_base 16: mod_base = OTHER; note = 2'-deoxy-2'-fluorocytidine-3'-phosphate
  modified_base 17: mod_base = OTHER; note = 2'-O-methyladenosine-3'-phosphate
  modified_base 18: mod_base = OTHER; note = 2'-O-methylguanosine-3'-phosphate
  modified_base 19: mod_base = OTHER; note = 2'-O-methylguanosine-3'-phosphate
  modified_base 20: mod_base = OTHER; note = 2'-O-methyluridine-3'-phosphate
  modified_base 21: mod_base = OTHER; note = 2'-O-methylguanosine-3'-phosphorothioate
  modified_base 22: mod_base = OTHER; note = 2'-O-methyluridine-3'-phosphorothioate
  modified_base 23: mod_base = OTHER; note = 2'-O-methylcytidine
ttccgctcacagttgcaggtgtc

SEQ ID NO: 2689 - RNA, 23 nt, synthetic construct
  source 1..23: mol_type = other RNA
  modified_base 1: mod_base = OTHER; note = 2'-O-methyluridine-3'-phosphorothioate 5'-(E)-Vinylphosphonate
  modified_base 2: mod_base = OTHER; note = 2'-deoxy-2'-fluoroadenosine-3'-phosphorothioate
  modified_base 3: mod_base = OTHER; note = 2'-O-methylcytidine-3'-phosphate
  modified_base 4: mod_base = OTHER; note = 2'-O-methyladenosine-3'-phosphate
  modified_base 5: mod_base = OTHER; note = 2'-O-methylguanosine-3'-phosphate
  modified_base 6: mod_base = OTHER; note = 2'-deoxy-2'-fluoroguanosine-3'-phosphate
  modified_base 7: mod_base = OTHER; note = 2'-O-methylcytidine-3'-phosphate
  modified_base 8: mod_base = OTHER; note = 2'-deoxy-2'-fluoroguanosine-3'-phosphate
  modified_base 9: mod_base = OTHER; note = 2'-deoxy-2'-fluorouridine-3'-phosphate
  modified_base 10: mod_base = OTHER; note = 2'-O-methylguanosine-3'-phosphate
  modified_base 11: mod_base = OTHER; note = 2'-O-methylcytidine-3'-phosphate
  modified_base 12: mod_base = OTHER; note = 2'-O-methyladenosine-3'-phosphate
  modified_base 13: mod_base = OTHER; note = 2'-O-methylcytidine-3'-phosphate
  modified_base 14: mod_base = OTHER; note = 2'-deoxy-2'-fluoroadenosine-3'-phosphate
  modified_base 15: mod_base = OTHER; note = 2'-O-methyluridine-3'-phosphate
  modified_base 16: mod_base = OTHER; note = 2'-deoxy-2'-fluoroadenosine-3'-phosphate
  modified_base 17: mod_base = OTHER; note = 2'-O-methylguanosine-3'-phosphate
  modified_base 18: mod_base = OTHER; note = 2'-O-methylguanosine-3'-phosphate
  modified_base 19: mod_base = OTHER; note = 2'-O-methyladenosine-3'-phosphate
  modified_base 20: mod_base = OTHER; note = 2'-O-methylguanosine-3'-phosphate
  modified_base 21: mod_base = OTHER; note = 2'-O-methylguanosine-3'-phosphorothioate
  modified_base 22: mod_base = OTHER; note = 2'-O-methyladenosine-3'-phosphorothioate
  modified_base 23: mod_base = OTHER; note = 2'-O-methylcytidine
tacaggcgtgcacataggaggac

SEQ ID NO: 2690 - RNA, 23 nt, synthetic construct
  source 1..23: mol_type = other RNA
  modified_base 1: mod_base = OTHER; note = 2'-O-methyluridine-3'-phosphorothioate 5'-(E)-Vinylphosphonate
  modified_base 2: mod_base = OTHER; note = 2'-deoxy-2'-fluorocytidine-3'-phosphorothioate
  modified_base 3: mod_base = OTHER; note = 2'-O-methyladenosine-3'-phosphate
  modified_base 4: mod_base = OTHER; note = 2'-O-methylguanosine-3'-phosphate
  modified_base 5: mod_base = OTHER; note = 2'-O-methyluridine-3'-phosphate
  modified_base 6: mod_base = OTHER; note = 2'-deoxy-2'-fluorocytidine-3'-phosphate
  modified_base 7: mod_base = OTHER; note = 2'-O-methylguanosine-3'-phosphate
  modified_base 8: mod_base = OTHER; note = 2'-deoxy-2'-fluorocytidine-3'-phosphate
  modified_base 9: mod_base = OTHER; note = 2'-deoxy-2'-fluorouridine-3'-phosphate
  modified_base 10: mod_base = OTHER; note = 2'-O-methylguanosine-3'-phosphate
  modified_base 11: mod_base = OTHER; note = 2'-O-methyladenosine-3'-phosphate
  modified_base 12: mod_base = OTHER; note = 2'-O-methylguanosine-3'-phosphate
  modified_base 13: mod_base = OTHER; note = 2'-O-methylcytidine-3'-phosphate
  modified_base 14: mod_base = OTHER; note = 2'-deoxy-2'-fluorouridine-3'-phosphate
  modified_base 15: mod_base = OTHER; note = 2'-O-methylguanosine-3'-phosphate
  modified_base 16: mod_base = OTHER; note = 2'-deoxy-2'-fluorouridine-3'-phosphate
  modified_base 17: mod_base = OTHER; note = 2'-O-methyladenosine-3'-phosphate
  modified_base 18: mod_base = OTHER; note = 2'-O-methylcytidine-3'-phosphate
  modified_base 19: mod_base = OTHER; note = 2'-O-methylguanosine-3'-phosphate
  modified_base 20: mod_base = OTHER; note = 2'-O-methylcytidine-3'-phosphate
  modified_base 21: mod_base = OTHER; note = 2'-O-methylcytidine-3'-phosphorothioate
  modified_base 22: mod_base = OTHER; note = 2'-O-methylcytidine-3'-phosphorothioate
  modified_base 23: mod_base = OTHER; note = 2'-O-methyluridine
tcagtcgctgagctgtacgccct

SEQ ID NO: 2691 - RNA, 23 nt, synthetic construct
  source 1..23: mol_type = other RNA
  modified_base 1: mod_base = OTHER; note = 2'-O-methyluridine-3'-phosphorothioate 5'-(E)-Vinylphosphonate
  modified_base 2: mod_base = OTHER; note = 2'-deoxy-2'-fluorocytidine-3'-phosphorothioate
  modified_base 3: mod_base = OTHER; note = 2'-O-methyladenosine-3'-phosphate
  modified_base 4: mod_base = OTHER; note = 2'-O-methylguanosine-3'-phosphate
  modified_base 5: mod_base = OTHER; note = 2'-O-methyluridine-3'-phosphate
  modified_base 6: mod_base = OTHER; note = 2'-deoxy-2'-fluorouridine-3'-phosphate
  modified_base 7: mod_base = OTHER; note = 2'-O-methylcytidine-3'-phosphate
  modified_base 8: mod_base = OTHER; note = 2'-deoxy-2'-fluorouridine-3'-phosphate
  modified_base 9: mod_base = OTHER; note = 2'-deoxy-2'-fluoroguanosine-3'-phosphate
  modified_base 10: mod_base = OTHER; note = 2'-O-methylcytidine-3'-phosphate
  modified_base 11: mod_base = OTHER; note = 2'-O-methyladenosine-3'-phosphate
  modified_base 12: mod_base = OTHER; note = 2'-O-methyluridine-3'-phosphate
  modified_base 13: mod_base = OTHER; note = 2'-O-methylguanosine-3'-phosphate
  modified_base 14: mod_base = OTHER; note = 2'-deoxy-2'-fluorouridine-3'-phosphate
  modified_base 15: mod_base = OTHER; note = 2'-O-methyladenosine-3'-phosphate
  modified_base 16: mod_base = OTHER; note = 2'-deoxy-2'-fluorocytidine-3'-phosphate
  modified_base 17: mod_base = OTHER; note = 2'-O-methyluridine-3'-phosphate
  modified_base 18: mod_base = OTHER; note = 2'-O-methyluridine-3'-phosphate
  modified_base 19: mod_base = OTHER; note = 2'-O-methylguanosine-3'-phosphate
  modified_base 20: mod_base = OTHER; note = 2'-O-methylguanosine-3'-phosphate
  modified_base 21: mod_base = OTHER; note = 2'-O-methyluridine-3'-phosphorothioate
  modified_base 22: mod_base = OTHER; note = 2'-O-methylguanosine-3'-phosphorothioate
  modified_base 23: mod_base = OTHER; note = 2'-O-methylcytidine
tcagttctgcatgtacttggtgc

SEQ ID NO: 2692 - RNA, 23 nt, synthetic construct
  source 1..23: mol_type = other RNA
  modified_base 1: mod_base = OTHER; note = 2'-O-methyluridine-3'-phosphorothioate 5'-(E)-Vinylphosphonate
  modified_base 2: mod_base = OTHER; note = 2'-deoxy-2'-fluoroguanosine-3'-phosphorothioate
  modified_base 3: mod_base = OTHER; note = 2'-O-methylcytidine-3'-phosphate
  modified_base 4: mod_base = OTHER; note = 2'-O-methyladenosine-3'-phosphate
  modified_base 5: mod_base = OTHER; note = 2'-O-methyluridine-3'-phosphate
  modified_base 6: mod_base = OTHER; note = 2'-deoxy-2'-fluorocytidine-3'-phosphate
  modified_base 7: mod_base = OTHER; note = 2'-O-methylcytidine-3'-phosphate
  modified_base 8: mod_base = OTHER; note = 2'-deoxy-2'-fluoroadenosine-3'-phosphate
  modified_base 9: mod_base = OTHER; note = 2'-deoxy-2'-fluorocytidine-3'-phosphate
  modified_base 10: mod_base = OTHER; note = 2'-O-methylcytidine-3'-phosphate
  modified_base 11: mod_base = OTHER; note = 2'-O-methyladenosine-3'-phosphate
  modified_base 12: mod_base = OTHER; note = 2'-O-methylcytidine-3'-phosphate
  modified_base 13: mod_base = OTHER; note = 2'-O-methylguanosine-3'-phosphate
  modified_base 14: mod_base = OTHER; note = 2'-deoxy-2'-fluorouridine-3'-phosphate
  modified_base 15: mod_base = OTHER; note = 2'-O-methyladenosine-3'-phosphate
  modified_base 16: mod_base = OTHER; note = 2'-deoxy-2'-fluoroguanosine-3'-phosphate
  modified_base 17: mod_base = OTHER; note = 2'-O-methylguanosine-3'-phosphate
  modified_base 18: mod_base = OTHER; note = 2'-O-methylcytidine-3'-phosphate
  modified_base 19: mod_base = OTHER; note = 2'-O-methylguanosine-3'-phosphate
  modified_base 20: mod_base = OTHER; note = 2'-O-methyluridine-3'-phosphate
  modified_base 21: mod_base = OTHER; note = 2'-O-methyladenosine-3'-phosphorothioate
  modified_base 22: mod_base = OTHER; note = 2'-O-methylguanosine-3'-phosphorothioate
  modified_base 23: mod_base = OTHER; note = 2'-O-methylcytidine
tgcatccaccacgtaggcgtagc

SEQ ID NO: 2693 - RNA, 23 nt, synthetic construct
  source 1..23: mol_type = other RNA
  modified_base 1: mod_base = OTHER; note = 2'-O-methyluridine-3'-phosphorothioate 5'-(E)-Vinylphosphonate
  modified_base 2: mod_base = OTHER; note = 2'-deoxy-2'-fluoroadenosine-3'-phosphorothioate
  modified_base 3: mod_base = OTHER; note = 2'-O-methylguanosine-3'-phosphate
  modified_base 4: mod_base = OTHER; note = 2'-O-methylguanosine-3'-phosphate
  modified_base 5: mod_base = OTHER; note = 2'-O-methylcytidine-3'-phosphate
  modified_base 6: mod_base = OTHER; note = 2'-deoxy-2'-fluoroadenosine-3'-phosphate
  modified_base 7: mod_base = OTHER; note = 2'-O-methylcytidine-3'-phosphate
  modified_base 8: mod_base = OTHER; note = 2'-deoxy-2'-fluoroguanosine-3'-phosphate
  modified_base 9: mod_base = OTHER; note = 2'-deoxy-2'-fluoroadenosine-3'-phosphate
  modified_base 10: mod_base = OTHER; note = 2'-O-methyladenosine-3'-phosphate
  modified_base 11: mod_base = OTHER; note = 2'-O-methylguanosine-3'-phosphate
  modified_base 12: mod_base = OTHER; note = 2'-O-methylguanosine-3'-phosphate
  modified_base 13: mod_base = OTHER; note = 2'-O-methyladenosine-3'-phosphate
  modified_base 14: mod_base = OTHER; note = 2'-deoxy-2'-fluoroadenosine-3'-phosphate
  modified_base 15: mod_base = OTHER; note = 2'-O-methyladenosine-3'-phosphate
  modified_base 16: mod_base = OTHER; note = 2'-deoxy-2'-fluorocytidine-3'-phosphate
  modified_base 17: mod_base = OTHER; note = 2'-O-methylguanosine-3'-phosphate
  modified_base 18: mod_base = OTHER; note = 2'-O-methylcytidine-3'-phosphate
  modified_base 19: mod_base = OTHER; note = 2'-O-methyluridine-3'-phosphate
  modified_base 20: mod_base = OTHER; note = 2'-O-methylguanosine-3'-phosphate
  modified_base 21: mod_base = OTHER; note = 2'-O-methylcytidine-3'-phosphorothioate
  modified_base 22: mod_base = OTHER; note = 2'-O-methyladenosine-3'-phosphorothioate
  modified_base 23: mod_base = OTHER; note = 2'-O-methylguanosine
taggcacgaaggaaacgctgcag

SEQ ID NO: 2694 - RNA, 23 nt, synthetic construct
  source 1..23: mol_type = other RNA
  modified_base 1: mod_base = OTHER; note = 2'-O-methyluridine-3'-phosphorothioate 5'-(E)-Vinylphosphonate
  modified_base 2: mod_base = OTHER; note = 2'-deoxy-2'-fluorocytidine-3'-phosphorothioate
  modified_base 3: mod_base = OTHER; note = 2'-O-methylguanosine-3'-phosphate
  modified_base 4: mod_base = OTHER; note = 2'-O-methylcytidine-3'-phosphate
  modified_base 5: mod_base = OTHER; note = 2'-O-methylguanosine-3'-phosphate
  modified_base 6: mod_base = OTHER; note = 2'-deoxy-2'-fluorouridine-3'-phosphate
  modified_base 7: mod_base = OTHER; note = 2'-O-methylcytidine-3'-phosphate
  modified_base 8: mod_base = OTHER; note = 2'-deoxy-2'-fluoroadenosine-3'-phosphate
  modified_base 9: mod_base = OTHER; note = 2'-deoxy-2'-fluorouridine-3'-phosphate
  modified_base 10: mod_base = OTHER; note = 2'-O-methyluridine-3'-phosphate
  modified_base 11: mod_base = OTHER; note = 2'-O-methylguanosine-3'-phosphate
  modified_base 12: mod_base = OTHER; note = 2'-O-methyladenosine-3'-phosphate
  modified_base 13: mod_base = OTHER; note = 2'-O-methylguanosine-3'-phosphate
  modified_base 14: mod_base = OTHER; note = 2'-deoxy-2'-fluoroguanosine-3'-phosphate
  modified_base 15: mod_base = OTHER; note = 2'-O-methyladenosine-3'-phosphate
  modified_base 16: mod_base = OTHER; note = 2'-deoxy-2'-fluoroadenosine-3'-phosphate
  modified_base 17: mod_base = OTHER; note = 2'-O-methylguanosine-3'-phosphate
  modified_base 18: mod_base = OTHER; note = 2'-O-methylguanosine-3'-phosphate
  modified_base 19: mod_base = OTHER; note = 2'-O-methyluridine-3'-phosphate
  modified_base 20: mod_base = OTHER; note = 2'-O-methylguanosine-3'-phosphate
  modified_base 21: mod_base = OTHER; note = 2'-O-methylcytidine-3'-phosphorothioate
  modified_base 22: mod_base = OTHER; note = 2'-O-methylcytidine-3'-phosphorothioate
  modified_base 23: mod_base = OTHER; note = 2'-O-methylcytidine
tcgcgtcattgaggaaggtgccc

SEQ ID NO: 2695 - RNA, 23 nt, synthetic construct
  source 1..23: mol_type = other RNA
  modified_base 1: mod_base = OTHER; note = 2'-O-methyluridine-3'-phosphorothioate 5'-(E)-Vinylphosphonate
  modified_base 2: mod_base = OTHER; note = 2'-deoxy-2'-fluoroguanosine-3'-phosphorothioate
  modified_base 3: mod_base = OTHER; note = 2'-O-methyluridine-3'-phosphate
  modified_base 4: mod_base = OTHER; note = 2'-O-methylcytidine-3'-phosphate
  modified_base 5: mod_base = OTHER; note = 2'-O-methylguanosine-3'-phosphate
  modified_base 6: mod_base = OTHER; note = 2'-deoxy-2'-fluorouridine-3'-phosphate
  modified_base 7: mod_base = OTHER; note = 2'-O-methylguanosine-3'-phosphate
  modified_base 8: mod_base = OTHER; note = 2'-deoxy-2'-fluorocytidine-3'-phosphate
  modified_base 9: mod_base = OTHER; note = 2'-deoxy-2'-fluoroadenosine-3'-phosphate
  modified_base 10: mod_base = OTHER; note = 2'-O-methylcytidine-3'-phosphate
  modified_base 11: mod_base = OTHER; note = 2'-O-methylcytidine-3'-phosphate
  modified_base 12: mod_base = OTHER; note = 2'-O-methyladenosine-3'-phosphate
  modified_base 13: mod_base = OTHER; note = 2'-O-methylcytidine-3'-phosphate
  modified_base 14: mod_base = OTHER; note = 2'-deoxy-2'-fluorocytidine-3'-phosphate
  modified_base 15: mod_base = OTHER; note = 2'-O-methyluridine-3'-phosphate
  modified_base 16: mod_base = OTHER; note = 2'-deoxy-2'-fluorocytidine-3'-phosphate
  modified_base 17: mod_base = OTHER; note = 2'-O-methyluridine-3'-phosphate
  modified_base 18: mod_base = OTHER; note = 2'-O-methylcytidine-3'-phosphate
  modified_base 19: mod_base = OTHER; note = 2'-O-methylcytidine-3'-phosphate
  modified_base 20: mod_base = OTHER; note = 2'-O-methyladenosine-3'-phosphate
  modified_base 21: mod_base = OTHER; note = 2'-O-methylguanosine-3'-phosphorothioate
  modified_base 22: mod_base = OTHER; note = 2'-O-methylguanosine-3'-phosphorothioate
  modified_base 23: mod_base = OTHER; note = 2'-O-methyladenosine
tgtcgtgcaccacctctccagga

SEQ ID NO: 2696 - RNA, 23 nt, synthetic construct
  source 1..23: mol_type = other RNA
  modified_base 1: mod_base = OTHER; note = 2'-O-methyluridine-3'-phosphorothioate 5'-(E)-Vinylphosphonate
  modified_base 2: mod_base = OTHER; note = 2'-deoxy-2'-fluoroadenosine-3'-phosphorothioate
  modified_base 3: mod_base = OTHER; note = 2'-O-methylcytidine-3'-phosphate
  modified_base 4: mod_base = OTHER; note = 2'-O-methylcytidine-3'-phosphate
  modified_base 5: mod_base = OTHER; note = 2'-O-methylcytidine-3'-phosphate
  modified_base 6: mod_base = OTHER; note = 2'-deoxy-2'-fluoroguanosine-3'-phosphate
  modified_base 7: mod_base = OTHER; note = 2'-O-methyluridine-3'-phosphate
  modified_base 8: mod_base = OTHER; note = 2'-deoxy-2'-fluoroadenosine-3'-phosphate
  modified_base 9: mod_base = OTHER; note = 2'-deoxy-2'-fluorocytidine-3'-phosphate
  modified_base 10: mod_base = OTHER; note = 2'-O-methyladenosine-3'-phosphate
  modified_base 11: mod_base = OTHER; note = 2'-O-methyluridine-3'-phosphate
  modified_base 12: mod_base = OTHER; note = 2'-O-methylguanosine-3'-phosphate
  modified_base 13: mod_base = OTHER; note = 2'-O-methyladenosine-3'-phosphate
  modified_base 14: mod_base = OTHER; note = 2'-deoxy-2'-fluoroadenosine-3'-phosphate
  modified_base 15: mod_base = OTHER; note = 2'-O-methylcytidine-3'-phosphate
  modified_base 16: mod_base = OTHER; note = 2'-deoxy-2'-fluoroadenosine-3'-phosphate
  modified_base 17: mod_base = OTHER; note = 2'-O-methylcytidine-3'-phosphate
  modified_base 18: mod_base = OTHER; note = 2'-O-methyladenosine-3'-phosphate
  modified_base 19: mod_base = OTHER; note = 2'-O-methylcytidine-3'-phosphate
  modified_base 20: mod_base = OTHER; note = 2'-O-methylguanosine-3'-phosphate
  modified_base 21: mod_base = OTHER; note = 2'-O-methylguanosine-3'-phosphorothioate
  modified_base 22: mod_base = OTHER; note = 2'-O-methylcytidine-3'-phosphorothioate
  modified_base 23: mod_base = OTHER; note = 2'-O-methylguanosine
tacccgtacatgaacacacggcg

SEQ ID NO: 2697 - RNA, 23 nt, synthetic construct
  source 1..23: mol_type = other RNA
  modified_base 1: mod_base = OTHER; note = 2'-O-methyluridine-3'-phosphorothioate 5'-(E)-Vinylphosphonate
  modified_base 2: mod_base = OTHER; note = 2'-deoxy-2'-fluorouridine-3'-phosphorothioate
  modified_base 3: mod_base = OTHER; note = 2'-O-methylguanosine-3'-phosphate
  modified_base 4: mod_base = OTHER; note = 2'-O-methyluridine-3'-phosphate
  modified_base 5: mod_base = OTHER; note = 2'-O-methylguanosine-3'-phosphate
  modified_base 6: mod_base = OTHER; note = 2'-deoxy-2'-fluorocytidine-3'-phosphate
  modified_base 7: mod_base = OTHER; note = 2'-O-methyluridine-3'-phosphate
  modified_base 8: mod_base = OTHER; note = 2'-deoxy-2'-fluorouridine-3'-phosphate
  modified_base 9: mod_base = OTHER; note = 2'-deoxy-2'-fluorouridine-3'-phosphate
  modified_base 10: mod_base = OTHER; note = 2'-O-methyluridine-3'-phosphate
  modified_base 11: mod_base = OTHER; note = 2'-O-methylcytidine-3'-phosphate
  modified_base 12: mod_base = OTHER; note = 2'-O-methyluridine-3'-phosphate
  modified_base 13: mod_base = OTHER; note = 2'-O-methylguanosine-3'-phosphate
  modified_base 14: mod_base = OTHER; note = 2'-deoxy-2'-fluorocytidine-3'-phosphate
  modified_base 15: mod_base = OTHER; note = 2'-O-methyladenosine-3'-phosphate
  modified_base 16: mod_base = OTHER; note = 2'-deoxy-2'-fluoroguanosine-3'-phosphate
  modified_base 17: mod_base = OTHER; note = 2'-O-methyladenosine-3'-phosphate
  modified_base 18: mod_base = OTHER; note = 2'-O-methylguanosine-3'-phosphate
  modified_base 19: mod_base = OTHER; note = 2'-O-methyladenosine-3'-phosphate
  modified_base 20: mod_base = OTHER; note = 2'-O-methylguanosine-3'-phosphate
  modified_base 21: mod_base = OTHER; note = 2'-O-methylguanosine-3'-phosphorothioate
  modified_base 22: mod_base = OTHER; note = 2'-O-methylcytidine-3'-phosphorothioate
  modified_base 23: mod_base = OTHER; note = 2'-O-methyluridine
ttgtgcttttctgcagagaggct

SEQ ID NO: 2698 - RNA, 23 nt, synthetic construct
  source 1..23: mol_type = other RNA
  modified_base 1: mod_base = OTHER; note = 2'-O-methyluridine-3'-phosphorothioate 5'-(E)-Vinylphosphonate
  modified_base 2: mod_base = OTHER; note = 2'-deoxy-2'-fluorocytidine-3'-phosphorothioate
  modified_base 3: mod_base = OTHER; note = 2'-O-methylcytidine-3'-phosphate
  modified_base 4: mod_base = OTHER; note = 2'-O-methylguanosine-3'-phosphate
  modified_base 5: mod_base = OTHER; note = 2'-O-methyladenosine-3'-phosphate
  modified_base 6: mod_base = OTHER; note = 2'-deoxy-2'-fluoroguanosine-3'-phosphate
  modified_base 7: mod_base = OTHER; note = 2'-O-methylcytidine-3'-phosphate
  modified_base 8: mod_base = OTHER; note = 2'-deoxy-2'-fluorouridine-3'-phosphate
  modified_base 9: mod_base = OTHER; note = 2'-deoxy-2'-fluoroguanosine-3'-phosphate
  modified_base 10: mod_base = OTHER; note = 2'-O-methyluridine-3'-phosphate
  modified_base 11: mod_base = OTHER; note = 2'-O-methyluridine-3'-phosphate
  modified_base 12: mod_base = OTHER; note = 2'-O-methylguanosine-3'-phosphate
  modified_base 13: mod_base = OTHER; note = 2'-O-methylcytidine-3'-phosphate
  modified_base 14: mod_base = OTHER; note = 2'-deoxy-2'-fluorouridine-3'-phosphate
  modified_base 15: mod_base = OTHER; note = 2'-O-methylguanosine-3'-phosphate
  modified_base 16: mod_base = OTHER; note = 2'-deoxy-2'-fluorocytidine-3'-phosphate
  modified_base 17: mod_base = OTHER; note = 2'-O-methyladenosine-3'-phosphate
  modified_base 18: mod_base = OTHER; note = 2'-O-methylguanosine-3'-phosphate
  modified_base 19: mod_base = OTHER; note = 2'-O-methyluridine-3'-phosphate
  modified_base 20: mod_base = OTHER; note = 2'-O-methylcytidine-3'-phosphate
  modified_base 21: mod_base = OTHER; note = 2'-O-methylcytidine-3'-phosphorothioate
  modified_base 22: mod_base = OTHER; note = 2'-O-methyladenosine-3'-phosphorothioate
  modified_base 23: mod_base = OTHER; note = 2'-O-methylguanosine
tccgagctgttgctgcagtccag

SEQ ID NO: 2699 - RNA, 23 nt, synthetic construct
  source 1..23: mol_type = other RNA
  modified_base 1: mod_base = OTHER; note = 2'-O-methyluridine-3'-phosphorothioate 5'-(E)-Vinylphosphonate
  modified_base 2: mod_base = OTHER; note = 2'-deoxy-2'-fluorocytidine-3'-phosphorothioate
  modified_base 3: mod_base = OTHER; note = 2'-O-methylguanosine-3'-phosphate
  modified_base 4: mod_base = OTHER; note = 2'-O-methylcytidine-3'-phosphate
  modified_base 5: mod_base = OTHER; note = 2'-O-methyladenosine-3'-phosphate
  modified_base 6: mod_base = OTHER; note = 2'-deoxy-2'-fluoroguanosine-3'-phosphate
  modified_base 7: mod_base = OTHER; note = 2'-O-methyluridine-3'-phosphate
  modified_base 8: mod_base = OTHER; note = 2'-deoxy-2'-fluoroguanosine-3'-phosphate
  modified_base 9: mod_base = OTHER; note = 2'-deoxy-2'-fluorouridine-3'-phosphate
  modified_base 10: mod_base = OTHER; note = 2'-O-methylguanosine-3'-phosphate
  modified_base 11: mod_base = OTHER; note = 2'-O-methyluridine-3'-phosphate
  modified_base 12: mod_base = OTHER; note = 2'-O-methylguanosine-3'-phosphate
  modified_base 13: mod_base = OTHER; note = 2'-O-methylcytidine-3'-phosphate
  modified_base 14: mod_base = OTHER; note = 2'-deoxy-2'-fluorouridine-3'-phosphate
  modified_base 15: mod_base = OTHER; note = 2'-O-methylguanosine-3'-phosphate
  modified_base 16: mod_base = OTHER; note = 2'-deoxy-2'-fluoroadenosine-3'-phosphate
  modified_base 17: mod_base = OTHER; note = 2'-O-methyladenosine-3'-phosphate
  modified_base 18: mod_base = OTHER; note = 2'-O-methyladenosine-3'-phosphate
  modified_base 19: mod_base = OTHER; note = 2'-O-methylcytidine-3'-phosphate
  modified_base 20: mod_base = OTHER; note = 2'-O-methyladenosine-3'-phosphate
  modified_base 21: mod_base = OTHER; note = 2'-O-methylguanosine-3'-phosphorothioate
  modified_base 22: mod_base = OTHER; note = 2'-O-methylcytidine-3'-phosphorothioate
  modified_base 23: mod_base = OTHER; note = 2'-O-methylcytidine
tcgcagtgtgtgctgaaacagcc

SEQ ID NO: 2700 - RNA, 23 nt, synthetic construct
  source 1..23: mol_type = other RNA
  modified_base 1: mod_base = OTHER; note = 2'-O-methyluridine-3'-phosphorothioate 5'-(E)-Vinylphosphonate
  modified_base 2: mod_base = OTHER; note = 2'-deoxy-2'-fluoroadenosine-3'-phosphorothioate
  modified_base 3: mod_base = OTHER; note = 2'-O-methylguanosine-3'-phosphate
  modified_base 4: mod_base = OTHER; note = 2'-O-methyluridine-3'-phosphate
  modified_base 5: mod_base = OTHER; note = 2'-O-methylcytidine-3'-phosphate
  modified_base 6: mod_base = OTHER; note = 2'-deoxy-2'-fluorocytidine-3'-phosphate
  modified_base 7: mod_base = OTHER; note = 2'-O-methyluridine-3'-phosphate
  modified_base 8: mod_base = OTHER; note = 2'-deoxy-2'-fluorocytidine-3'-phosphate
  modified_base 9: mod_base = OTHER; note = 2'-deoxy-2'-fluorocytidine-3'-phosphate
  modified_base 10: mod_base = OTHER; note = 2'-O-methyluridine-3'-phosphate
  modified_base 11: mod_base = OTHER; note = 2'-O-methylcytidine-3'-phosphate
  modified_base 12: mod_base = OTHER; note = 2'-O-methylguanosine-3'-phosphate
  modified_base 13: mod_base = OTHER; note = 2'-O-methylguanosine-3'-phosphate
  modified_base 14: mod_base = OTHER; note = 2'-deoxy-2'-fluorocytidine-3'-phosphate
  modified_base 15: mod_base = OTHER; note = 2'-O-methyladenosine-3'-phosphate
  modified_base 16: mod_base = OTHER; note = 2'-deoxy-2'-fluoroadenosine-3'-phosphate
  modified_base 17: mod_base = OTHER; note = 2'-O-methyluridine-3'-phosphate
  modified_base 18: mod_base = OTHER; note = 2'-O-methylguanosine-3'-phosphate
  modified_base 19: mod_base = OTHER; note = 2'-O-methylcytidine-3'-phosphate
  modified_base 20: mod_base = OTHER; note = 2'-O-methyladenosine-3'-phosphate
  modified_base 21: mod_base = OTHER; note = 2'-O-methylguanosine-3'-phosphorothioate
  modified_base 22: mod_base = OTHER; note = 2'-O-methylcytidine-3'-phosphorothioate
  modified_base 23: mod_base = OTHER; note = 2'-O-methylcytidine
tagtcctcctcggcaatgcagcc

SEQ ID NO: 2701 - RNA, 23 nt, synthetic construct
  source 1..23: mol_type = other RNA
  modified_base 1: mod_base = OTHER; note = 2'-O-methyluridine-3'-phosphorothioate 5'-(E)-Vinylphosphonate
  modified_base 2: mod_base = OTHER; note = 2'-deoxy-2'-fluorouridine-3'-phosphorothioate
  modified_base 3: mod_base = OTHER; note = 2'-O-methylcytidine-3'-phosphate
  modified_base 4: mod_base = OTHER; note = 2'-O-methyluridine-3'-phosphate
  modified_base 5: mod_base = OTHER; note = 2'-O-methylcytidine-3'-phosphate
  modified_base 6: mod_base = OTHER; note = 2'-deoxy-2'-fluorouridine-3'-phosphate
  modified_base 7: mod_base = OTHER; note = 2'-O-methylcytidine-3'-phosphate
  modified_base 8: mod_base = OTHER; note = 2'-deoxy-2'-fluorocytidine-3'-phosphate
  modified_base 9: mod_base = OTHER; note = 2'-deoxy-2'-fluoroadenosine-3'-phosphate
  modified_base 10: mod_base = OTHER; note = 2'-O-methylguanosine-3'-phosphate
  modified_base 11: mod_base = OTHER; note = 2'-O-methylguanosine-3'-phosphate
  modified_base 12: mod_base = OTHER; note = 2'-O-methylcytidine-3'-phosphate
  modified_base 13: mod_base = OTHER; note = 2'-O-methyluridine-3'-phosphate
  modified_base 14: mod_base = OTHER; note = 2'-deoxy-2'-fluorouridine-3'-phosphate
  modified_base 15: mod_base = OTHER; note = 2'-O-methylguanosine-3'-phosphate
  modified_base 16: mod_base = OTHER; note = 2'-deoxy-2'-fluorouridine-3'-phosphate
  modified_base 17: mod_base = OTHER; note = 2'-O-methyladenosine-3'-phosphate
  modified_base 18: mod_base = OTHER; note = 2'-O-methylguanosine-3'-phosphate
  modified_base 19: mod_base = OTHER; note = 2'-O-methylguanosine-3'-phosphate
  modified_base 20: mod_base = OTHER; note = 2'-O-methyluridine-3'-phosphate
  modified_base 21: mod_base = OTHER; note = 2'-O-methylguanosine-3'-phosphorothioate
  modified_base 22: mod_base = OTHER; note = 2'-O-methylguanosine-3'-phosphorothioate
  modified_base 23: mod_base = OTHER; note = 2'-O-methylcytidine
ttctctccaggcttgtaggtggc

SEQ ID NO: 2702 - RNA, 23 nt, synthetic construct
  source 1..23: mol_type = other RNA
  modified_base 1: mod_base = OTHER; note = 2'-O-methyluridine-3'-phosphorothioate 5'-(E)-Vinylphosphonate
  modified_base 2: mod_base = OTHER; note = 2'-deoxy-2'-fluoroadenosine-3'-phosphorothioate
  modified_base 3: mod_base = OTHER; note = 2'-O-methylguanosine-3'-phosphate
  modified_base 4: mod_base = OTHER; note = 2'-O-methylguanosine-3'-phosphate
  modified_base 5: mod_base = OTHER; note = 2'-O-methyluridine-3'-phosphate
  modified_base 6: mod_base = OTHER; note = 2'-deoxy-2'-fluoroguanosine-3'-phosphate
  modified_base 7: mod_base = OTHER; note = 2'-O-methylcytidine-3'-phosphate
  modified_base 8: mod_base = OTHER; note = 2'-deoxy-2'-fluoroadenosine-3'-phosphate
  modified_base 9: mod_base = OTHER; note = 2'-deoxy-2'-fluoroguanosine-3'-phosphate
  modified_base 10: mod_base = OTHER; note = 2'-O-methylguanosine-3'-phosphate
  modified_base 11: mod_base = OTHER; note = 2'-O-methyluridine-3'-phosphate
  modified_base 12: mod_base = OTHER; note = 2'-O-methylguanosine-3'-phosphate
  modified_base 13: mod_base = OTHER; note = 2'-O-methyluridine-3'-phosphate
  modified_base 14: mod_base = OTHER; note = 2'-deoxy-2'-fluorouridine-3'-phosphate
  modified_base 15: mod_base = OTHER; note = 2'-O-methylguanosine-3'-phosphate
  modified_base 16: mod_base = OTHER; note = 2'-deoxy-2'-fluorocytidine-3'-phosphate
  modified_base 17: mod_base = OTHER; note = 2'-O-methyladenosine-3'-phosphate
  modified_base 18: mod_base = OTHER; note = 2'-O-methylguanosine-3'-phosphate
  modified_base 19: mod_base = OTHER; note = 2'-O-methyluridine-3'-phosphate
  modified_base 20: mod_base = OTHER; note = 2'-O-methylcytidine-3'-phosphate
  modified_base 21: mod_base = OTHER; note = 2'-O-methylguanosine-3'-phosphorothioate
  modified_base 22: mod_base = OTHER; note = 2'-O-methyladenosine-3'-phosphorothioate
  modified_base 23: mod_base = OTHER; note = 2'-O-methylcytidine
taggtgcaggtgttgcagtcgac

SEQ ID NO: 2703 - RNA, 23 nt, synthetic construct
  source 1..23: mol_type = other RNA
  modified_base 1: mod_base = OTHER; note = 2'-O-methyluridine-3'-phosphorothioate 5'-(E)-Vinylphosphonate
  modified_base 2: mod_base = OTHER; note = 2'-deoxy-2'-fluorouridine-3'-phosphorothioate
  modified_base 3: mod_base = OTHER; note = 2'-O-methylguanosine-3'-phosphate
  modified_base 4: mod_base = OTHER; note = 2'-O-methylcytidine-3'-phosphate
  modified_base 5: mod_base = OTHER; note = 2'-O-methyladenosine-3'-phosphate
  modified_base 6: mod_base = OTHER; note = 2'-deoxy-2'-fluorocytidine-3'-phosphate
  modified_base 7: mod_base = OTHER; note = 2'-O-methyluridine-3'-phosphate
  modified_base 8: mod_base = OTHER; note = 2'-deoxy-2'-fluorocytidine-3'-phosphate
  modified_base 9: mod_base = OTHER; note = 2'-deoxy-2'-fluorocytidine-3'-phosphate
  modified_base 10: mod_base = OTHER; note = 2'-O-methylcytidine-3'-phosphate
  modified_base 11: mod_base = OTHER; note = 2'-O-methyladenosine-3'-phosphate
  modified_base 12: mod_base = OTHER; note = 2'-O-methylcytidine-3'-phosphate
  modified_base 13: mod_base = OTHER; note = 2'-O-methylcytidine-3'-phosphate
  modified_base 14: mod_base = OTHER; note = 2'-deoxy-2'-fluorouridine-3'-phosphate
  modified_base 15: mod_base = OTHER; note = 2'-O-methylcytidine-3'-phosphate
  modified_base 16: mod_base = OTHER; note = 2'-deoxy-2'-fluorocytidine-3'-phosphate
  modified_base 17: mod_base = OTHER; note = 2'-O-methylguanosine-3'-phosphate
  modified_base 18: mod_base = OTHER; note = 2'-O-methylguanosine-3'-phosphate
  modified_base 19: mod_base = OTHER; note = 2'-O-methyluridine-3'-phosphate
  modified_base 20: mod_base = OTHER; note = 2'-O-methyluridine-3'-phosphate
  modified_base 21: mod_base = OTHER; note = 2'-O-methylcytidine-3'-phosphorothioate
  modified_base 22: mod_base = OTHER; note = 2'-O-methylcytidine-3'-phosphorothioate
  modified_base 23: mod_base = OTHER; note = 2'-O-methyluridine
ttgcactcccacctccggttcct

SEQ ID NO: 2704 - RNA, 23 nt, synthetic construct
  source 1..23: mol_type = other RNA
  modified_base 1: mod_base = OTHER; note = 2'-O-methyluridine-3'-phosphorothioate 5'-(E)-Vinylphosphonate
  modified_base 2: mod_base = OTHER; note = 2'-deoxy-2'-fluorocytidine-3'-phosphorothioate
  modified_base 3: mod_base = OTHER; note = 2'-O-methyladenosine-3'-phosphate
  modified_base 4: mod_base = OTHER; note = 2'-O-methyladenosine-3'-phosphate
  modified_base 5: mod_base = OTHER; note = 2'-O-methyladenosine-3'-phosphate
  modified_base 6: mod_base = OTHER; note = 2'-deoxy-2'-fluoroguanosine-3'-phosphate
  modified_base 7: mod_base = OTHER; note = 2'-O-methylguanosine-3'-phosphate
  modified_base 8: mod_base = OTHER; note = 2'-deoxy-2'-fluorouridine-3'-phosphate
  modified_base 9: mod_base = OTHER; note = 2'-deoxy-2'-fluoroguanosine-3'-phosphate
  modified_base 10: mod_base = OTHER; note = 2'-O-methyladenosine-3'-phosphate
  modified_base 11: mod_base = OTHER; note = 2'-O-methyluridine-3'-phosphate
  modified_base 12: mod_base = OTHER; note = 2'-O-methylguanosine-3'-phosphate
  modified_base 13: mod_base = OTHER; note = 2'-O-methyladenosine-3'-phosphate
  modified_base 14: mod_base = OTHER; note = 2'-deoxy-2'-fluoroadenosine-3'-phosphate
  modified_base 15: mod_base = OTHER; note = 2'-O-methylguanosine-3'-phosphate
  modified_base 16: mod_base = OTHER; note = 2'-deoxy-2'-fluorouridine-3'-phosphate
  modified_base 17: mod_base = OTHER; note = 2'-O-methylguanosine-3'-phosphate
  modified_base 18: mod_base = OTHER; note = 2'-O-methylguanosine-3'-phosphate
  modified_base 19: mod_base = OTHER; note = 2'-O-methylcytidine-3'-phosphate
  modified_base 20: mod_base = OTHER; note = 2'-O-methylcytidine-3'-phosphate
  modified_base 21: mod_base = OTHER; note = 2'-O-methyladenosine-3'-phosphorothioate
  modified_base 22: mod_base = OTHER; note = 2'-O-methyluridine-3'-phosphorothioate
  modified_base 23: mod_base = OTHER; note = 2'-O-methylcytidine
tcaaaggtgatgaagtggccatc

SEQ ID NO: 2705 - RNA, 23 nt, synthetic construct
  source 1..23: mol_type = other RNA
  modified_base 1: mod_base = OTHER; note = 2'-O-methyluridine-3'-phosphorothioate 5'-(E)-Vinylphosphonate
  modified_base 2: mod_base = OTHER; note = 2'-deoxy-2'-fluorocytidine-3'-phosphorothioate
  modified_base 3: mod_base = OTHER; note = 2'-O-methyluridine-3'-phosphate
  modified_base 4: mod_base = OTHER; note = 2'-O-methyluridine-3'-phosphate
  modified_base 5: mod_base = OTHER; note = 2'-O-methylcytidine-3'-phosphate
  modified_base 6: mod_base = OTHER; note = 2'-deoxy-2'-fluoroadenosine-3'-phosphate
  modified_base 7: mod_base = OTHER; note = 2'-O-methyladenosine-3'-phosphate
  modified_base 8: mod_base = OTHER; note = 2'-deoxy-2'-fluoroadenosine-3'-phosphate
  modified_base 9: mod_base = OTHER; note = 2'-deoxy-2'-fluoroguanosine-3'-phosphate
  modified_base 10: mod_base = OTHER; note = 2'-O-methylcytidine-3'-phosphate
  modified_base 11: mod_base = OTHER; note = 2'-O-methyluridine-3'-phosphate
  modified_base 12: mod_base = OTHER; note = 2'-O-methylguanosine-3'-phosphate
  modified_base 13: mod_base = OTHER; note = 2'-O-methyluridine-3'-phosphate
  modified_base 14: mod_base = OTHER; note = 2'-deoxy-2'-fluoroadenosine-3'-phosphate
  modified_base 15: mod_base = OTHER; note = 2'-O-methylguanosine-3'-phosphate
  modified_base 16: mod_base = OTHER; note = 2'-deoxy-2'-fluorocytidine-3'-phosphate
  modified_base 17: mod_base = OTHER; note = 2'-O-methylguanosine-3'-phosphate
  modified_base 18: mod_base = OTHER; note = 2'-O-methyladenosine-3'-phosphate
  modified_base 19: mod_base = OTHER; note = 2'-O-methyluridine-3'-phosphate
  modified_base 20: mod_base = OTHER; note = 2'-O-methylcytidine-3'-phosphate
  modified_base 21: mod_base = OTHER; note = 2'-O-methylguanosine-3'-phosphorothioate
  modified_base 22: mod_base = OTHER; note = 2'-O-methylcytidine-3'-phosphorothioate
  modified_base 23: mod_base = OTHER; note = 2'-O-methylcytidine
tcttcaaagctgtagcgatcgcc

SEQ ID NO: 2706 - RNA, 23 nt, synthetic construct
  source 1..23: mol_type = other RNA
  modified_base 1: mod_base = OTHER; note = 2'-O-methyluridine-3'-phosphorothioate 5'-(E)-Vinylphosphonate
  modified_base 2: mod_base = OTHER; note = 2'-deoxy-2'-fluoroguanosine-3'-phosphorothioate
  modified_base 3: mod_base = OTHER; note = 2'-O-methylguanosine-3'-phosphate
  modified_base 4: mod_base = OTHER; note = 2'-O-methylcytidine-3'-phosphate
  modified_base 5: mod_base = OTHER; note = 2'-O-methylcytidine-3'-phosphate
  modified_base 6: mod_base = OTHER; note = 2'-deoxy-2'-fluoroadenosine-3'-phosphate
  modified_base 7: mod_base = OTHER; note = 2'-O-methyladenosine-3'-phosphate
  modified_base 8: mod_base = OTHER; note = 2'-deoxy-2'-fluoroguanosine-3'-phosphate
  modified_base 9: mod_base = OTHER; note = 2'-deoxy-2'-fluoroadenosine-3'-phosphate
  modified_base 10: mod_base = OTHER; note = 2'-O-methyluridine-3'-phosphate
  modified_base 11: mod_base = OTHER; note = 2'-O-methylguanosine-3'-phosphate
  modified_base 12: mod_base = OTHER; note = 2'-O-methyluridine-3'-phosphate
  modified_base 13: mod_base = OTHER; note = 2'-O-methyladenosine-3'-phosphate
  modified_base 14: mod_base = OTHER; note = 2'-deoxy-2'-fluorocytidine-3'-phosphate
  modified_base 15: mod_base = OTHER; note = 2'-O-methyluridine-3'-phosphate
  modified_base 16: mod_base = OTHER; note = 2'-deoxy-2'-fluorocytidine-3'-phosphate
  modified_base 17: mod_base = OTHER; note = 2'-O-methylguanosine-3'-phosphate
  modified_base 18: mod_base = OTHER; note = 2'-O-methylcytidine-3'-phosphate
  modified_base 19: mod_base = OTHER; note = 2'-O-methyladenosine-3'-phosphate
  modified_base 20: mod_base = OTHER; note = 2'-O-methylguanosine-3'-phosphate
  modified_base 21: mod_base = OTHER; note = 2'-O-methylcytidine-3'-phosphorothioate
  modified_base 22: mod_base = OTHER; note = 2'-O-methyluridine-3'-phosphorothioate
  modified_base 23: mod_base = OTHER; note = 2'-O-methylguanosine
tggccaagatgtactcgcagctg

SEQ ID NO: 2707 - RNA, 23 nt, synthetic construct
  source 1..23: mol_type = other RNA
  modified_base 1: mod_base = OTHER; note = 2'-O-methyluridine-3'-phosphorothioate 5'-(E)-Vinylphosphonate
  modified_base 2: mod_base = OTHER; note = 2'-deoxy-2'-fluorouridine-3'-phosphorothioate
  modified_base 3: mod_base = OTHER; note = 2'-O-methylcytidine-3'-phosphate
  modified_base 4: mod_base = OTHER; note = 2'-O-methyluridine-3'-phosphate
  modified_base 5: mod_base = OTHER; note = 2'-O-methylcytidine-3'-phosphate
  modified_base 6: mod_base = OTHER; note = 2'-deoxy-2'-fluoroguanosine-3'-phosphate
  modified_base 7: mod_base = OTHER; note = 2'-O-methylguanosine-3'-phosphate
  modified_base 8: mod_base = OTHER; note = 2'-deoxy-2'-fluorouridine-3'-phosphate
  modified_base 9: mod_base = OTHER; note = 2'-deoxy-2'-fluoroguanosine-3'-phosphate
  modified_base 10: mod_base = OTHER; note = 2'-O-methyladenosine-3'-phosphate
  modified_base 11: mod_base = OTHER; note = 2'-O-methylcytidine-3'-phosphate
  modified_base 12: mod_base = OTHER; note = 2'-O-methylguanosine-3'-phosphate
  modified_base 13: mod_base = OTHER; note = 2'-O-methyladenosine-3'-phosphate
  modified_base 14: mod_base = OTHER; note = 2'-deoxy-2'-fluorouridine-3'-phosphate
  modified_base 15: mod_base = OTHER; note = 2'-O-methylguanosine-3'-phosphate
  modified_base 16: mod_base = OTHER; note = 2'-deoxy-2'-fluorocytidine-3'-phosphate
  modified_base 17: mod_base = OTHER; note = 2'-O-methylguanosine-3'-phosphate
  modified_base 18: mod_base = OTHER; note = 2'-O-methylguanosine-3'-phosphate
  modified_base 19: mod_base = OTHER; note = 2'-O-methyladenosine-3'-phosphate
  modified_base 20: mod_base = OTHER; note = 2'-O-methyladenosine-3'-phosphate
  modified_base 21: mod_base = OTHER; note = 2'-O-methylguanosine-3'-phosphorothioate
  modified_base 22: mod_base = OTHER; note = 2'-O-methylguanosine-3'-phosphorothioate
  modified_base 23: mod_base = OTHER; note = 2'-O-methyluridine
ttctcggtgacgatgcggaaggt

SEQ ID NO: 2708 - RNA, 23 nt, synthetic construct
  source 1..23: mol_type = other RNA
  modified_base 1: mod_base = OTHER; note = 2'-O-methyluridine-3'-phosphorothioate 5'-(E)-Vinylphosphonate
  modified_base 2: mod_base = OTHER; note = 2'-deoxy-2'-fluorouridine-3'-phosphorothioate
  modified_base 3: mod_base = OTHER; note = 2'-O-methylcytidine-3'-phosphate
  modified_base 4: mod_base = OTHER; note = 2'-O-methylcytidine-3'-phosphate
  modified_base 5: mod_base = OTHER; note = 2'-O-methyladenosine-3'-phosphate
  modified_base 6: mod_base = OTHER; note = 2'-deoxy-2'-fluorocytidine-3'-phosphate
  modified_base 7: mod_base = OTHER; note = 2'-O-methylguanosine-3'-phosphate
  modified_base 8: mod_base = OTHER; note = 2'-deoxy-2'-fluoroadenosine-3'-phosphate
  modified_base 9: mod_base = OTHER; note = 2'-deoxy-2'-fluoroadenosine-3'-phosphate
  modified_base 10: mod_base = OTHER; note = 2'-O-methylguanosine-3'-phosphate
  modified_base 11: mod_base = OTHER; note = 2'-O-methyladenosine-3'-phosphate
  modified_base 12: mod_base = OTHER; note = 2'-O-methylguanosine-3'-phosphate
  modified_base 13: mod_base = OTHER; note = 2'-O-methylcytidine-3'-phosphate
  modified_base 14: mod_base = OTHER; note = 2'-deoxy-2'-fluorouridine-3'-phosphate
  modified_base 15: mod_base = OTHER; note = 2'-O-methyluridine-3'-phosphate
  modified_base 16: mod_base = OTHER; note = 2'-deoxy-2'-fluoroguanosine-3'-phosphate
  modified_base 17: mod_base = OTHER; note = 2'-O-methyladenosine-3'-phosphate
  modified_base 18: mod_base = OTHER; note = 2'-O-methyluridine-3'-phosphate
  modified_base 19: mod_base = OTHER; note = 2'-O-methylguanosine-3'-phosphate
  modified_base 20: mod_base = OTHER; note = 2'-O-methylguanosine-3'-phosphate
  modified_base 21: mod_base = OTHER; note = 2'-O-methylcytidine-3'-phosphorothioate
  modified_base 22: mod_base = OTHER; note = 2'-O-methylcytidine-3'-phosphorothioate
  modified_base 23: mod_base = OTHER; note = 2'-O-methyluridine
ttccacgaagagcttgatggcct

SEQ ID NO: 2709 - RNA, 23 nt, synthetic construct
  source 1..23: mol_type = other RNA
  modified_base 1: mod_base = OTHER; note = 2'-O-methyluridine-3'-phosphorothioate 5'-(E)-Vinylphosphonate
  modified_base 2: mod_base = OTHER; note = 2'-deoxy-2'-fluorouridine-3'-phosphorothioate
  modified_base 3: mod_base = OTHER; note = 2'-O-methylcytidine-3'-phosphate
  modified_base 4: mod_base = OTHER; note = 2'-O-methyluridine-3'-phosphate
  modified_base 5: mod_base = OTHER; note = 2'-O-methyluridine-3'-phosphate
  modified_base 6: mod_base = OTHER; note = 2'-deoxy-2'-fluoroguanosine-3'-phosphate
  modified_base 7: mod_base = OTHER; note = 2'-O-methylguanosine-3'-phosphate
  modified_base 8: mod_base = OTHER; note = 2'-deoxy-2'-fluoroadenosine-3'-phosphate
  modified_base 9: mod_base = OTHER; note = 2'-deoxy-2'-fluoroguanosine-3'-phosphate
  modified_base 10: mod_base = OTHER; note = 2'-O-methylguanosine-3'-phosphate
  modified_base 11: mod_base = OTHER; note = 2'-O-methyladenosine-3'-phosphate
  modified_base 12: mod_base = OTHER; note = 2'-O-methyluridine-3'-phosphate
  modified_base 13: mod_base = OTHER; note = 2'-O-methylcytidine-3'-phosphate
  modified_base 14: mod_base = OTHER; note = 2'-deoxy-2'-fluoroadenosine-3'-phosphate
  modified_base 15: mod_base = OTHER; note = 2'-O-methylguanosine-3'-phosphate
  modified_base 16: mod_base = OTHER; note = 2'-deoxy-2'-fluorocytidine-3'-phosphate
  modified_base 17: mod_base = OTHER; note = 2'-O-methyluridine-3'-phosphate
  modified_base 18: mod_base = OTHER; note = 2'-O-methylcytidine-3'-phosphate
  modified_base 19: mod_base = OTHER; note = 2'-O-methylguanosine-3'-phosphate
  modified_base 20: mod_base = OTHER; note = 2'-O-methyluridine-3'-phosphate
  modified_base 21: mod_base = OTHER; note = 2'-O-methyladenosine-3'-phosphorothioate
  modified_base 22: mod_base = OTHER; note = 2'-O-methylguanosine-3'-phosphorothioate
  modified_base 23: mod_base = OTHER; note = 2'-O-methylcytidine
ttcttggaggatcagctcgtagc

SEQ ID NO: 2710 - RNA, 23 nt, synthetic construct
  source 1..23: mol_type = other RNA
  modified_base 1: mod_base = OTHER; note = 2'-O-methyluridine-3'-phosphorothioate 5'-(E)-Vinylphosphonate
  modified_base 2: mod_base = OTHER; note = 2'-deoxy-2'-fluorouridine-3'-phosphorothioate
  modified_base 3: mod_base = OTHER; note = 2'-O-methylcytidine-3'-phosphate
  modified_base 4: mod_base = OTHER; note = 2'-O-methylguanosine-3'-phosphate
  modified_base 5: mod_base = OTHER; note = 2'-O-methylcytidine-3'-phosphate
  modified_base 6: mod_base = OTHER; note = 2'-deoxy-2'-fluorocytidine-3'-phosphate
  modified_base 7: mod_base = OTHER; note = 2'-O-methyladenosine-3'-phosphate
  modified_base 8: mod_base = OTHER; note = 2'-deoxy-2'-fluorocytidine-3'-phosphate
  modified_base 9: mod_base = OTHER; note = 2'-deoxy-2'-fluorocytidine-3'-phosphate
  modified_base 10: mod_base = OTHER; note = 2'-O-methylguanosine-3'-phosphate
  modified_base 11: mod_base = OTHER; note = 2'-O-methylcytidine-3'-phosphate
  modified_base 12: mod_base = OTHER; note = 2'-O-methylcytidine-3'-phosphate
  modified_base 13: mod_base = OTHER; note = 2'-O-methyluridine-3'-phosphate
  modified_base 14: mod_base = OTHER; note = 2'-deoxy-2'-fluorouridine-3'-phosphate
  modified_base 15: mod_base = OTHER; note = 2'-O-methyladenosine-3'-phosphate
  modified_base 16: mod_base = OTHER; note = 2'-deoxy-2'-fluoroadenosine-3'-phosphate
  modified_base 17: mod_base = OTHER; note = 2'-O-methyladenosine-3'-phosphate
  modified_base 18: mod_base = OTHER; note = 2'-O-methylguanosine-3'-phosphate
  modified_base 19: mod_base = OTHER; note = 2'-O-methylguanosine-3'-phosphate
  modified_base 20: mod_base = OTHER; note = 2'-O-methyluridine-3'-phosphate
  modified_base 21: mod_base = OTHER; note = 2'-O-methylcytidine-3'-phosphorothioate
  modified_base 22: mod_base = OTHER; note = 2'-O-methylcytidine-3'-phosphorothioate
  modified_base 23: mod_base = OTHER; note = 2'-O-methylcytidine
ttcgccaccgccttaaaggtccc

SEQ ID NO: 2711 - RNA, 23 nt, synthetic construct
  source 1..23: mol_type = other RNA
  modified_base 1: mod_base = OTHER; note = 2'-O-methyluridine-3'-phosphorothioate 5'-(E)-Vinylphosphonate
  modified_base 2: mod_base = OTHER; note = 2'-deoxy-2'-fluorouridine-3'-phosphorothioate
  modified_base 3: mod_base = OTHER; note = 2'-O-methylguanosine-3'-phosphate
  modified_base 4: mod_base = OTHER; note = 2'-O-methyluridine-3'-phosphate
  modified_base 5: mod_base = OTHER; note = 2'-O-methyladenosine-3'-phosphate
  modified_base 6: mod_base = OTHER; note = 2'-deoxy-2'-fluoroguanosine-3'-phosphate
  modified_base 7: mod_base = OTHER; note = 2'-O-methylcytidine-3'-phosphate
  modified_base 8: mod_base = OTHER; note = 2'-deoxy-2'-fluoroguanosine-3'-phosphate
  modified_base 9: mod_base = OTHER; note = 2'-deoxy-2'-fluorouridine-3'-phosphate
  modified_base 10: mod_base = OTHER; note = 2'-O-methyladenosine-3'-phosphate
  modified_base 11: mod_base = OTHER; note = 2'-O-methyluridine-3'-phosphate
  modified_base 12: mod_base = OTHER; note = 2'-O-methylcytidine-3'-phosphate
  modified_base 13: mod_base = OTHER; note = 2'-O-methyluridine-3'-phosphate
  modified_base 14: mod_base = OTHER; note = 2'-deoxy-2'-fluorouridine-3'-phosphate
  modified_base 15: mod_base = OTHER; note = 2'-O-methylguanosine-3'-phosphate
  modified_base 16: mod_base = OTHER; note = 2'-deoxy-2'-fluorouridine-3'-phosphate
  modified_base 17: mod_base = OTHER; note = 2'-O-methyladenosine-3'-phosphate
  modified_base 18: mod_base = OTHER; note = 2'-O-methylguanosine-3'-phosphate
  modified_base 19: mod_base = OTHER; note = 2'-O-methylguanosine-3'-phosphate
  modified_base 20: mod_base = OTHER; note = 2'-O-methylguanosine-3'-phosphate
  modified_base 21: mod_base = OTHER; note = 2'-O-methyluridine-3'-phosphorothioate
  modified_base 22: mod_base = OTHER; note = 2'-O-methylguanosine-3'-phosphorothioate
  modified_base 23: mod_base = OTHER; note = 2'-O-methylguanosine
ttgtagcgtatcttgtagggtgg

SEQ ID NO: 2712 - RNA, 23 nt, synthetic construct
  source 1..23: mol_type = other RNA
  modified_base 1: mod_base = OTHER; note = 2'-O-methyluridine-3'-phosphorothioate 5'-(E)-Vinylphosphonate
  modified_base 2: mod_base = OTHER; note = 2'-deoxy-2'-fluorouridine-3'-phosphorothioate
  modified_base 3: mod_base = OTHER; note = 2'-O-methylguanosine-3'-phosphate
  modified_base 4: mod_base = OTHER; note = 2'-O-methylguanosine-3'-phosphate
  modified_base 5: mod_base = OTHER; note = 2'-O-methylguanosine-3'-phosphate
  modified_base 6: mod_base = OTHER; note = 2'-deoxy-2'-fluorouridine-3'-phosphate
  modified_base 7: mod_base = OTHER; note = 2'-O-methylcytidine-3'-phosphate
  modified_base 8: mod_base = OTHER; note = 2'-deoxy-2'-fluorouridine-3'-phosphate
  modified_base 9: mod_base = OTHER; note = 2'-deoxy-2'-fluorocytidine-3'-phosphate
  modified_base 10: mod_base = OTHER; note = 2'-O-methylguanosine-3'-phosphate
  modified_base 11: mod_base = OTHER; note = 2'-O-methyladenosine-3'-phosphate
  modified_base 12: mod_base = OTHER; note = 2'-O-methyluridine-3'-phosphate
  modified_base 13: mod_base = OTHER; note = 2'-O-methylguanosine-3'-phosphate
  modified_base 14: mod_base = OTHER; note = 2'-deoxy-2'-fluoroadenosine-3'-phosphate
  modified_base 15: mod_base = OTHER; note = 2'-O-methylcytidine-3'-phosphate
  modified_base 16: mod_base = OTHER; note = 2'-deoxy-2'-fluorocytidine-3'-phosphate
  modified_base 17: mod_base = OTHER; note = 2'-O-methyladenosine-3'-phosphate
  modified_base 18: mod_base = OTHER; note = 2'-O-methylguanosine-3'-phosphate
  modified_base 19: mod_base = OTHER; note = 2'-O-methylguanosine-3'-phosphate
  modified_base 20: mod_base = OTHER; note = 2'-O-methyladenosine-3'-phosphate
  modified_base 21: mod_base = OTHER; note = 2'-O-methyladenosine-3'-phosphorothioate
  modified_base 22: mod_base = OTHER; note = 2'-O-methylguanosine-3'-phosphorothioate
  modified_base 23: mod_base = OTHER; note = 2'-O-methyladenosine
ttgggtctcgatgaccaggaaga

SEQ ID NO: 2713 - RNA, 23 nt, synthetic construct
  source 1..23: mol_type = other RNA
  modified_base 1: mod_base = OTHER; note = 2'-O-methyluridine-3'-phosphorothioate 5'-(E)-Vinylphosphonate
  modified_base 2: mod_base = OTHER; note = 2'-deoxy-2'-fluorocytidine-3'-phosphorothioate
  modified_base 3: mod_base = OTHER; note = 2'-O-methyladenosine-3'-phosphate
  modified_base 4: mod_base = OTHER; note = 2'-O-methylguanosine-3'-phosphate
  modified_base 5: mod_base = OTHER; note = 2'-O-methyluridine-3'-phosphate
  modified_base 6: mod_base = OTHER; note = 2'-deoxy-2'-fluorocytidine-3'-phosphate
  modified_base 7: mod_base = OTHER; note = 2'-O-methylguanosine-3'-phosphate
  modified_base 8: mod_base = OTHER; note = 2'-deoxy-2'-fluoroguanosine-3'-phosphate
  modified_base 9: mod_base = OTHER; note = 2'-deoxy-2'-fluoroadenosine-3'-phosphate
  modified_base 10: mod_base = OTHER; note = 2'-O-methyluridine-3'-phosphate
  modified_base 11: mod_base = OTHER; note = 2'-O-methylguanosine-3'-phosphate
  modified_base 12: mod_base = OTHER; note = 2'-O-methyladenosine-3'-phosphate
  modified_base 13: mod_base = OTHER; note = 2'-O-methyladenosine-3'-phosphate
  modified_base 14: mod_base = OTHER; note = 2'-deoxy-2'-fluorocytidine-3'-phosphate
  modified_base 15: mod_base = OTHER; note = 2'-O-methyladenosine-3'-phosphate
  modified_base 16: mod_base = OTHER; note = 2'-deoxy-2'-fluorocytidine-3'-phosphate
  modified_base 17: mod_base = OTHER; note = 2'-O-methylguanosine-3'-phosphate
  modified_base 18: mod_base = OTHER; note = 2'-O-methylcytidine-3'-phosphate
  modified_base 19: mod_base = OTHER; note = 2'-O-methyluridine-3'-phosphate
  modified_base 20: mod_base = OTHER; note = 2'-O-methylguanosine-3'-phosphate
  modified_base 21: mod_base = OTHER; note = 2'-O-methylguanosine-3'-phosphorothioate
  modified_base 22: mod_base = OTHER; note = 2'-O-methyluridine-3'-phosphorothioate
  modified_base 23: mod_base = OTHER; note = 2'-O-methylcytidine
tcagtcggatgaacacgctggtc

SEQ ID NO: 2714 - RNA, 23 nt, synthetic construct
  source 1..23: mol_type = other RNA
  modified_base 1: mod_base = OTHER; note = 2'-O-methyluridine-3'-phosphorothioate 5'-(E)-Vinylphosphonate
  modified_base 2: mod_base = OTHER; note = 2'-deoxy-2'-fluoroadenosine-3'-phosphorothioate
  modified_base 3: mod_base = OTHER; note = 2'-O-methylcytidine-3'-phosphate
  modified_base 4: mod_base = OTHER; note = 2'-O-methylcytidine-3'-phosphate
  modified_base 5: mod_base = OTHER; note = 2'-O-methylcytidine-3'-phosphate
  modified_base 6: mod_base = OTHER; note = 2'-deoxy-2'-fluorouridine-3'-phosphate
  modified_base 7: mod_base = OTHER; note = 2'-O-methylguanosine-3'-phosphate
  modified_base 8: mod_base = OTHER; note = 2'-deoxy-2'-fluorocytidine-3'-phosphate
  modified_base 9: mod_base = OTHER; note = 2'-deoxy-2'-fluorocytidine-3'-phosphate
  modified_base 10: mod_base = OTHER; note = 2'-O-methylcytidine-3'-phosphate
  modified_base 11: mod_base = OTHER; note = 2'-O-methyluridine-3'-phosphate
  modified_base 12: mod_base = OTHER; note = 2'-O-methyluridine-3'-phosphate
  modified_base 13: mod_base = OTHER; note = 2'-O-methylguanosine-3'-phosphate
  modified_base 14: mod_base = OTHER; note = 2'-deoxy-2'-fluorouridine-3'-phosphate
  modified_base 15: mod_base = OTHER; note = 2'-O-methyladenosine-3'-phosphate
  modified_base 16: mod_base = OTHER; note = 2'-deoxy-2'-fluoroguanosine-3'-phosphate
  modified_base 17: mod_base = OTHER; note = 2'-O-methyluridine-3'-phosphate
  modified_base 18: mod_base = OTHER; note = 2'-O-methylcytidine-3'-phosphate
  modified_base 19: mod_base = OTHER; note = 2'-O-methylcytidine-3'-phosphate
  modified_base 20: mod_base = OTHER; note = 2'-O-methyluridine-3'-phosphate
  modified_base 21: mod_base = OTHER; note = 2'-O-methylguanosine-3'-phosphorothioate
  modified_base 22: mod_base = OTHER; note = 2'-O-methylguanosine-3'-phosphorothioate
  modified_base 23: mod_base = OTHER; note = 2'-O-methyluridine
taccctgcccttgtagtcctggt

SEQ ID NO: 2715 - RNA, 23 nt, synthetic construct
  source 1..23: mol_type = other RNA
  modified_base 1: mod_base = OTHER; note = 2'-O-methyluridine-3'-phosphorothioate 5'-(E)-Vinylphosphonate
  modified_base 2: mod_base = OTHER; note = 2'-deoxy-2'-fluoroguanosine-3'-phosphorothioate
  modified_base 3: mod_base = OTHER; note = 2'-O-methylcytidine-3'-phosphate
  modified_base 4: mod_base = OTHER; note = 2'-O-methyladenosine-3'-phosphate
  modified_base 5: mod_base = OTHER; note = 2'-O-methyluridine-3'-phosphate
  modified_base 6: mod_base = OTHER; note = 2'-deoxy-2'-fluorouridine-3'-phosphate
  modified_base 7: mod_base = OTHER; note = 2'-O-methylguanosine-3'-phosphate
  modified_base 8: mod_base = OTHER; note = 2'-deoxy-2'-fluorouridine-3'-phosphate
  modified_base 9: mod_base = OTHER; note = 2'-deoxy-2'-fluorocytidine-3'-phosphate
  modified_base 10: mod_base = OTHER; note = 2'-O-methylguanosine-3'-phosphate
  modified_base 11: mod_base = OTHER; note = 2'-O-methyluridine-3'-phosphate
  modified_base 12: mod_base = OTHER; note = 2'-O-methylcytidine-3'-phosphate
  modified_base 13: mod_base = OTHER; note = 2'-O-methylguanosine-3'-phosphate
  modified_base 14: mod_base = OTHER; note = 2'-deoxy-2'-fluoroadenosine-3'-phosphate
  modified_base 15: mod_base = OTHER; note = 2'-O-methyladenosine-3'-phosphate
  modified_base 16: mod_base = OTHER; note = 2'-deoxy-2'-fluoroguanosine-3'-phosphate
  modified_base 17: mod_base = OTHER; note = 2'-O-methyluridine-3'-phosphate
  modified_base 18: mod_base = OTHER; note = 2'-O-methyluridine-3'-phosphate
  modified_base 19: mod_base = OTHER; note = 2'-O-methylcytidine-3'-phosphate
  modified_base 20: mod_base = OTHER; note = 2'-O-methylcytidine-3'-phosphate
  modified_base 21: mod_base = OTHER; note = 2'-O-methylcytidine-3'-phosphorothioate
  modified_base 22: mod_base = OTHER; note = 2'-O-methylguanosine-3'-phosphorothioate
  modified_base 23: mod_base = OTHER; note = 2'-O-methylcytidine
tgcattgtcgtcgaagttcccgc

SEQ ID NO: 2716 - RNA, 23 nt, synthetic construct
  source 1..23: mol_type = other RNA
  modified_base 1: mod_base = OTHER; note = 2'-O-methyluridine-3'-phosphorothioate 5'-(E)-Vinylphosphonate
  modified_base 2: mod_base = OTHER; note = 2'-deoxy-2'-fluorouridine-3'-phosphorothioate
  modified_base 3: mod_base = OTHER; note = 2'-O-methyladenosine-3'-phosphate
  modified_base 4: mod_base = OTHER; note = 2'-O-methylcytidine-3'-phosphate
  modified_base 5: mod_base = OTHER; note = 2'-O-methylguanosine-3'-phosphate
  modified_base 6: mod_base = OTHER; note = 2'-deoxy-2'-fluorocytidine-3'-phosphate
  modified_base 7: mod_base = OTHER; note = 2'-O-methylguanosine-3'-phosphate
  modified_base 8: mod_base = OTHER; note = 2'-deoxy-2'-fluorouridine-3'-phosphate
  modified_base 9: mod_base = OTHER; note = 2'-deoxy-2'-fluoroguanosine-3'-phosphate
  modified_base 10: mod_base = OTHER; note = 2'-O-methylguanosine-3'-phosphate
  modified_base 11: mod_base = OTHER; note = 2'-O-methylcytidine-3'-phosphate
  modified_base 12: mod_base = OTHER; note = 2'-O-methyladenosine-3'-phosphate
  modified_base 13: mod_base = OTHER; note = 2'-O-methyladenosine-3'-phosphate
  modified_base 14: mod_base = OTHER; note = 2'-deoxy-2'-fluoroadenosine-3'-phosphate
  modified_base 15: mod_base = OTHER; note = 2'-O-methylguanosine-3'-phosphate
  modified_base 16: mod_base = OTHER; note = 2'-deoxy-2'-fluorouridine-3'-phosphate
  modified_base 17: mod_base = OTHER; note = 2'-O-methylcytidine-3'-phosphate
  modified_base 18: mod_base = OTHER; note = 2'-O-methyladenosine-3'-phosphate
  modified_base 19: mod_base = OTHER; note = 2'-O-methyluridine-3'-phosphate
  modified_base 20: mod_base = OTHER; note = 2'-O-methyluridine-3'-phosphate
  modified_base 21: mod_base = OTHER; note = 2'-O-methylguanosine-3'-phosphorothioate
  modified_base 22: mod_base = OTHER; note = 2'-O-methyladenosine-3'-phosphorothioate
  modified_base 23: mod_base = OTHER; note = 2'-O-methyluridine
ttacgcgtggcaaagtcattgat

SEQ ID NO: 2717 - RNA, 23 nt, synthetic construct
  source 1..23: mol_type = other RNA
  modified_base 1: mod_base = OTHER; note = 2'-O-methyluridine-3'-phosphorothioate 5'-(E)-Vinylphosphonate
  modified_base 2: mod_base = OTHER; note = 2'-deoxy-2'-fluorocytidine-3'-phosphorothioate
  modified_base 3: mod_base = OTHER; note = 2'-O-methyluridine-3'-phosphate
  modified_base 4: mod_base = OTHER; note = 2'-O-methylguanosine-3'-phosphate
  modified_base 5: mod_base = OTHER; note = 2'-O-methyluridine-3'-phosphate
  modified_base 6: mod_base = OTHER; note = 2'-deoxy-2'-fluorouridine-3'-phosphate
  modified_base 7: mod_base = OTHER; note = 2'-O-methylcytidine-3'-phosphate
  modified_base 8: mod_base = OTHER; note = 2'-deoxy-2'-fluorocytidine-3'-phosphate
  modified_base 9: mod_base = OTHER; note = 2'-deoxy-2'-fluorocytidine-3'-phosphate
  modified_base 10: mod_base = OTHER; note = 2'-O-methyladenosine-3'-phosphate
  modified_base 11: mod_base = OTHER; note = 2'-O-methyladenosine-3'-phosphate
  modified_base 12: mod_base = OTHER; note = 2'-O-methyladenosine-3'-phosphate
  modified_base 13: mod_base = OTHER; note = 2'-O-methylcytidine-3'-phosphate
  modified_base 14: mod_base = OTHER; note = 2'-deoxy-2'-fluorouridine-3'-phosphate
  modified_base 15: mod_base = OTHER; note = 2'-O-methylcytidine-3'-phosphate
  modified_base 16: mod_base = OTHER; note = 2'-deoxy-2'-fluorocytidine-3'-phosphate
  modified_base 17: mod_base = OTHER; note = 2'-O-methyladenosine-3'-phosphate
  modified_base 18: mod_base = OTHER; note = 2'-O-methylguanosine-3'-phosphate
  modified_base 19: mod_base = OTHER; note = 2'-O-methyluridine-3'-phosphate
  modified_base 20: mod_base = OTHER; note = 2'-O-methylguanosine-3'-phosphate
  modified_base 21: mod_base = OTHER; note = 2'-O-methylcytidine-3'-phosphorothioate
  modified_base 22: mod_base = OTHER; note = 2'-O-methylguanosine-3'-phosphorothioate
  modified_base 23: mod_base = OTHER; note = 2'-O-methyluridine
tctgttcccaaactccagtgcgt

SEQ ID NO: 2718 - RNA, 23 nt, synthetic construct
  source 1..23: mol_type = other RNA
  modified_base 1: mod_base = OTHER; note = 2'-O-methyluridine-3'-phosphorothioate 5'-(E)-Vinylphosphonate
  modified_base 2: mod_base = OTHER; note = 2'-deoxy-2'-fluorouridine-3'-phosphorothioate
  modified_base 3: mod_base = OTHER; note = 2'-O-methylguanosine-3'-phosphate
  modified_base 4: mod_base = OTHER; note = 2'-O-methylcytidine-3'-phosphate
  modified_base 5: mod_base = OTHER; note = 2'-O-methyluridine-3'-phosphate
  modified_base 6: mod_base = OTHER; note = 2'-deoxy-2'-fluoroguanosine-3'-phosphate
  modified_base 7: mod_base = OTHER; note = 2'-O-methylcytidine-3'-phosphate
  modified_base 8: mod_base = OTHER; note = 2'-deoxy-2'-fluoroadenosine-3'-phosphate
  modified_base 9: mod_base = OTHER; note = 2'-deoxy-2'-fluorocytidine-3'-phosphate
  modified_base 10: mod_base = OTHER; note = 2'-O-methyluridine-3'-phosphate
  modified_base 11: mod_base = OTHER; note = 2'-O-methylguanosine-3'-phosphate
  modified_base 12: mod_base = OTHER; note = 2'-O-methylcytidine-3'-phosphate
  modified_base 13: mod_base = OTHER; note = 2'-O-methyluridine-3'-phosphate
  modified_base 14: mod_base = OTHER; note = 2'-deoxy-2'-fluorouridine-3'-phosphate
  modified_base 15: mod_base = OTHER; note = 2'-O-methylcytidine-3'-phosphate
  modified_base 16: mod_base = OTHER; note = 2'-deoxy-2'-fluorouridine-3'-phosphate
  modified_base 17: mod_base = OTHER; note = 2'-O-methylguanosine-3'-phosphate
  modified_base 18: mod_base = OTHER; note = 2'-O-methylguanosine-3'-phosphate
  modified_base 19: mod_base = OTHER; note = 2'-O-methylguanosine-3'-phosphate
  modified_base 20: mod_base = OTHER; note = 2'-O-methylcytidine-3'-phosphate
  modified_base 21: mod_base = OTHER; note = 2'-O-methylcytidine-3'-phosphorothioate
  modified_base 22: mod_base = OTHER; note = 2'-O-methylcytidine-3'-phosphorothioate
  modified_base 23: mod_base = OTHER; note = 2'-O-methyladenosine
ttgctgcactgcttctgggccca

SEQ ID NO: 2719 - RNA, 23 nt, synthetic construct
  source 1..23: mol_type = other RNA
  modified_base 1: mod_base = OTHER; note = 2'-O-methyluridine-3'-phosphorothioate 5'-(E)-Vinylphosphonate
  modified_base 2: mod_base = OTHER; note = 2'-deoxy-2'-fluoroadenosine-3'-phosphorothioate
  modified_base 3: mod_base = OTHER; note = 2'-O-methylcytidine-3'-phosphate
  modified_base 4: mod_base = OTHER; note = 2'-O-methyluridine-3'-phosphate
  modified_base 5: mod_base = OTHER; note = 2'-O-methyluridine-3'-phosphate
  modified_base 6: mod_base = OTHER; note = 2'-deoxy-2'-fluoroguanosine-3'-phosphate
  modified_base 7: mod_base = OTHER; note = 2'-O-methylguanosine-3'-phosphate
  modified_base 8: mod_base = OTHER; note = 2'-deoxy-2'-fluorouridine-3'-phosphate
  modified_base 9: mod_base = OTHER; note = 2'-deoxy-2'-fluoroguanosine-3'-phosphate
  modified_base 10: mod_base = OTHER; note = 2'-O-methylguanosine-3'-phosphate
  modified_base 11: mod_base = OTHER; note = 2'-O-methyladenosine-3'-phosphate
  modified_base 12: mod_base = OTHER; note = 2'-O-methylguanosine-3'-phosphate
  modified_base 13: mod_base = OTHER; note = 2'-O-methyluridine-3'-phosphate
  modified_base 14: mod_base = OTHER; note = 2'-deoxy-2'-fluorocytidine-3'-phosphate
  modified_base 15: mod_base = OTHER; note = 2'-O-methyladenosine-3'-phosphate
  modified_base 16: mod_base = OTHER; note = 2'-deoxy-2'-fluoroadenosine-3'-phosphate
  modified_base 17: mod_base = OTHER; note = 2'-O-methylcytidine-3'-phosphate
  modified_base 18: mod_base = OTHER; note = 2'-O-methylcytidine-3'-phosphate
  modified_base 19: mod_base = OTHER; note = 2'-O-methyluridine-3'-phosphate
  modified_base 20: mod_base = OTHER; note = 2'-O-methylguanosine-3'-phosphate
  modified_base 21: mod_base = OTHER; note = 2'-O-methylguanosine-3'-phosphorothioate
  modified_base 22: mod_base = OTHER; note = 2'-O-methylguanosine-3'-phosphorothioate
  modified_base 23: mod_base = OTHER; note = 2'-O-methyladenosine
tacttggtggagtcaacctggga

SEQ ID NO: 2720 - RNA, 23 nt, synthetic construct
  source 1..23: mol_type = other RNA
  modified_base 1: mod_base = OTHER; note = 2'-O-methyluridine-3'-phosphorothioate 5'-(E)-Vinylphosphonate
  modified_base 2: mod_base = OTHER; note = 2'-deoxy-2'-fluorocytidine-3'-phosphorothioate
  modified_base 3: mod_base = OTHER; note = 2'-O-methylguanosine-3'-phosphate
  modified_base 4: mod_base = OTHER; note = 2'-O-methyluridine-3'-phosphate
  modified_base 5: mod_base = OTHER; note = 2'-O-methylcytidine-3'-phosphate
  modified_base 6: mod_base = OTHER; note = 2'-deoxy-2'-fluoroguanosine-3'-phosphate
  modified_base 7: mod_base = OTHER; note = 2'-O-methyluridine-3'-phosphate
  modified_base 8: mod_base = OTHER; note = 2'-deoxy-2'-fluorouridine-3'-phosphate
  modified_base 9: mod_base = OTHER; note = 2'-deoxy-2'-fluorocytidine-3'-phosphate
  modified_base 10: mod_base = OTHER; note = 2'-O-methyladenosine-3'-phosphate
  modified_base 11: mod_base = OTHER; note = 2'-O-methylcytidine-3'-phosphate
  modified_base 12: mod_base = OTHER; note = 2'-O-methylguanosine-3'-phosphate
  modified_base 13: mod_base = OTHER; note = 2'-O-methylcytidine-3'-phosphate
  modified_base 14: mod_base = OTHER; note = 2'-deoxy-2'-fluoroadenosine-3'-phosphate
  modified_base 15: mod_base = OTHER; note = 2'-O-methylguanosine-3'-phosphate
  modified_base 16: mod_base = OTHER; note = 2'-deoxy-2'-fluoroguanosine-3'-phosphate
  modified_base 17: mod_base = OTHER; note = 2'-O-methylcytidine-3'-phosphate
  modified_base 18: mod_base = OTHER; note = 2'-O-methylcytidine-3'-phosphate
  modified_base 19: mod_base = OTHER; note = 2'-O-methyluridine-3'-phosphate
  modified_base 20: mod_base = OTHER; note = 2'-O-methylcytidine-3'-phosphate
  modified_base 21: mod_base = OTHER; note = 2'-O-methylguanosine-3'-phosphorothioate
  modified_base 22: mod_base = OTHER; note = 2'-O-methyluridine-3'-phosphorothioate
  modified_base 23: mod_base = OTHER; note = 2'-O-methyladenosine
tcgtcgttcacgcaggcctcgta

SEQ ID NO: 2721 - RNA, 23 nt, synthetic construct
  source 1..23: mol_type = other RNA
  modified_base 1: mod_base = OTHER; note = 2'-O-methyluridine-3'-phosphorothioate 5'-(E)-Vinylphosphonate
  modified_base 2: mod_base = OTHER; note = 2'-deoxy-2'-fluorocytidine-3'-phosphorothioate
  modified_base 3: mod_base = OTHER; note = 2'-O-methylguanosine-3'-phosphate
  modified_base 4: mod_base = OTHER; note = 2'-O-methyluridine-3'-phosphate
  modified_base 5: mod_base = OTHER; note = 2'-O-methylguanosine-3'-phosphate
  modified_base 6: mod_base = OTHER; note = 2'-deoxy-2'-fluorocytidine-3'-phosphate
  modified_base 7: mod_base = OTHER; note = 2'-O-methyladenosine-3'-phosphate
  modified_base 8: mod_base = OTHER; note = 2'-deoxy-2'-fluoroguanosine-3'-phosphate
  modified_base 9: mod_base = OTHER; note = 2'-deoxy-2'-fluoroadenosine-3'-phosphate
  modified_base 10: mod_base = OTHER; note = 2'-O-methyladenosine-3'-phosphate
  modified_base 11: mod_base = OTHER; note = 2'-O-methyladenosine-3'-phosphate
  modified_base 12: mod_base = OTHER; note = 2'-O-methylcytidine-3'-phosphate
  modified_base 13: mod_base = OTHER; note = 2'-O-methyladenosine-3'-phosphate
  modified_base 14: mod_base = OTHER; note = 2'-deoxy-2'-fluorocytidine-3'-phosphate
  modified_base 15: mod_base = OTHER; note = 2'-O-methyluridine-3'-phosphate
  modified_base 16: mod_base = OTHER; note = 2'-deoxy-2'-fluorocytidine-3'-phosphate
  modified_base 17: mod_base = OTHER; note = 2'-O-methylguanosine-3'-phosphate
  modified_base 18: mod_base = OTHER; note = 2'-O-methylcytidine-3'-phosphate
  modified_base 19: mod_base = OTHER; note = 2'-O-methyladenosine-3'-phosphate
  modified_base 20: mod_base = OTHER; note = 2'-O-methylguanosine-3'-phosphate
  modified_base 21: mod_base = OTHER; note = 2'-O-methyluridine-3'-phosphorothioate
  modified_base 22: mod_base = OTHER; note = 2'-O-methylcytidine-3'-phosphorothioate
  modified_base 23: mod_base = OTHER; note = 2'-O-methylguanosine
tcgtgcagaaacactcgcagtcg

SEQ ID NO: 2722 - RNA, 23 nt, synthetic construct
  source 1..23: mol_type = other RNA
  modified_base 1: mod_base = OTHER; note = 2'-O-methyluridine-3'-phosphorothioate 5'-(E)-Vinylphosphonate
  modified_base 2: mod_base = OTHER; note = 2'-deoxy-2'-fluoroadenosine-3'-phosphorothioate
  modified_base 3: mod_base = OTHER; note = 2'-O-methylguanosine-3'-phosphate
  modified_base 4: mod_base = OTHER; note = 2'-O-methyluridine-3'-phosphate
  modified_base 5: mod_base = OTHER; note = 2'-O-methylcytidine-3'-phosphate
  modified_base 6: mod_base = OTHER; note = 2'-deoxy-2'-fluorocytidine-3'-phosphate
  modified_base 7: mod_base = OTHER; note = 2'-O-methylguanosine-3'-phosphate
  modified_base 8: mod_base = OTHER; note = 2'-deoxy-2'-fluorocytidine-3'-phosphate
  modified_base 9: mod_base = OTHER; note = 2'-deoxy-2'-fluorocytidine-3'-phosphate
  modified_base 10: mod_base = OTHER; note = 2'-O-methyladenosine-3'-phosphate
  modified_base 11: mod_base = OTHER; note = 2'-O-methylguanosine-3'-phosphate
  modified_base 12: mod_base = OTHER; note = 2'-O-methylguanosine-3'-phosphate
  modified_base 13: mod_base = OTHER; note = 2'-O-methyladenosine-3'-phosphate
  modified_base 14: mod_base = OTHER; note = 2'-deoxy-2'-fluorocytidine-3'-phosphate
  modified_base 15: mod_base = OTHER; note = 2'-O-methyladenosine-3'-phosphate
  modified_base 16: mod_base = OTHER; note = 2'-deoxy-2'-fluorocytidine-3'-phosphate
  modified_base 17: mod_base = OTHER; note = 2'-O-methyladenosine-3'-phosphate
  modified_base 18: mod_base = OTHER; note = 2'-O-methylcytidine-3'-phosphate
  modified_base 19: mod_base = OTHER; note = 2'-O-methyladenosine-3'-phosphate
  modified_base 20: mod_base = OTHER; note = 2'-O-methylcytidine-3'-phosphate
  modified_base 21: mod_base = OTHER; note = 2'-O-methyladenosine-3'-phosphorothioate
  modified_base 22: mod_base = OTHER; note = 2'-O-methylguanosine-3'-phosphorothioate
  modified_base 23: mod_base = OTHER; note = 2'-O-methylguanosine
tagtccgccaggacacacacagg

SEQ ID NO: 2723 - RNA, 23 nt, synthetic construct
  source 1..23: mol_type = other RNA
  modified_base 1: mod_base = OTHER; note = 2'-O-methyluridine-3'-phosphorothioate 5'-(E)-Vinylphosphonate
  modified_base 2: mod_base = OTHER; note = 2'-deoxy-2'-fluoroguanosine-3'-phosphorothioate
  modified_base 3: mod_base = OTHER; note = 2'-O-methyluridine-3'-phosphate
  modified_base 4: mod_base = OTHER; note = 2'-O-methyluridine-3'-phosphate
  modified_base 5: mod_base = OTHER; note = 2'-O-methylguanosine-3'-phosphate
  modified_base 6: mod_base = OTHER; note = 2'-deoxy-2'-fluorouridine-3'-phosphate
  modified_base 7: mod_base = OTHER; note = 2'-O-methyladenosine-3'-phosphate
  modified_base 8: mod_base = OTHER; note = 2'-deoxy-2'-fluoroguanosine-3'-phosphate
  modified_base 9: mod_base = OTHER; note = 2'-deoxy-2'-fluoroadenosine-3'-phosphate
  modified_base 10: mod_base = OTHER; note = 2'-O-methyladenosine-3'-phosphate
  modified_base 11: mod_base = OTHER; note = 2'-O-methylguanosine-3'-phosphate
  modified_base 12: mod_base = OTHER; note = 2'-O-methyluridine-3'-phosphate
  modified_base 13: mod_base = OTHER; note = 2'-O-methylcytidine-3'-phosphate
  modified_base 14: mod_base = OTHER; note = 2'-deoxy-2'-fluoroadenosine-3'-phosphate
  modified_base 15: mod_base = OTHER; note = 2'-O-methylcytidine-3'-phosphate
  modified_base 16: mod_base = OTHER; note = 2'-deoxy-2'-fluoroadenosine-3'-phosphate
  modified_base 17: mod_base = OTHER; note = 2'-O-methylguanosine-3'-phosphate
  modified_base 18: mod_base = OTHER; note = 2'-O-methyladenosine-3'-phosphate
  modified_base 19: mod_base = OTHER; note = 2'-O-methyladenosine-3'-phosphate
  modified_base 20: mod_base = OTHER; note = 2'-O-methylcytidine-3'-phosphate
  modified_base 21: mod_base = OTHER; note = 2'-O-methyladenosine-3'-phosphorothioate
  modified_base 22: mod_base = OTHER; note = 2'-O-methyladenosine-3'-phosphorothioate
  modified_base 23: mod_base = OTHER; note = 2'-O-methylguanosine
tgttgtagaagtcacagaacaag

SEQ ID NO: 2724 - RNA, 23 nt, synthetic construct
  source 1..23: mol_type = other RNA
  modified_base 1: mod_base = OTHER; note = 2'-O-methyluridine-3'-phosphorothioate 5'-(E)-Vinylphosphonate
  modified_base 2: mod_base = OTHER; note = 2'-deoxy-2'-fluoroguanosine-3'-phosphorothioate
  modified_base 3: mod_base = OTHER; note = 2'-O-methylguanosine-3'-phosphate
  modified_base 4: mod_base = OTHER; note = 2'-O-methylcytidine-3'-phosphate
  modified_base 5: mod_base = OTHER; note = 2'-O-methyluridine-3'-phosphate
  modified_base 6: mod_base = OTHER; note = 2'-deoxy-2'-fluoroguanosine-3'-phosphate
  modified_base 7: mod_base = OTHER; note = 2'-O-methylguanosine-3'-phosphate
  modified_base 8: mod_base = OTHER; note = 2'-deoxy-2'-fluorouridine-3'-phosphate
  modified_base 9: mod_base = OTHER; note = 2'-deoxy-2'-fluoroadenosine-3'-phosphate
  modified_base 10: mod_base = OTHER; note = 2'-O-methylguanosine-3'-phosphate
  modified_base 11: mod_base = OTHER; note = 2'-O-methyluridine-3'-phosphate
  modified_base 12: mod_base = OTHER; note = 2'-O-methylguanosine-3'-phosphate
  modified_base 13: mod_base = OTHER; note = 2'-O-methylcytidine-3'-phosphate
  modified_base 14: mod_base = OTHER; note = 2'-deoxy-2'-fluorocytidine-3'-phosphate
  modified_base 15: mod_base = OTHER; note = 2'-O-methyladenosine-3'-phosphate
  modified_base 16: mod_base = OTHER; note = 2'-deoxy-2'-fluorocytidine-3'-phosphate
  modified_base 17: mod_base = OTHER; note = 2'-O-methyluridine-3'-phosphate
  modified_base 18: mod_base = OTHER; note = 2'-O-methylcytidine-3'-phosphate
  modified_base 19: mod_base = OTHER; note = 2'-O-methyladenosine-3'-phosphate
  modified_base 20: mod_base = OTHER; note = 2'-O-methylcytidine-3'-phosphate
  modified_base 21: mod_base = OTHER; note = 2'-O-methyladenosine-3'-phosphorothioate
  modified_base 22: mod_base = OTHER; note = 2'-O-methylguanosine-3'-phosphorothioate
  modified_base 23: mod_base = OTHER; note = 2'-O-methylcytidine
tggctggtagtgccactcacagc

SEQ ID NO: 2725 - RNA, 23 nt, synthetic construct
  source 1..23: mol_type = other RNA
  modified_base 1: mod_base = OTHER; note = 2'-O-methyluridine-3'-phosphorothioate 5'-(E)-Vinylphosphonate
  modified_base 2: mod_base = OTHER; note = 2'-deoxy-2'-fluorouridine-3'-phosphorothioate
  modified_base 3: mod_base = OTHER; note = 2'-O-methylguanosine-3'-phosphate
  modified_base 4: mod_base = OTHER; note = 2'-O-methylguanosine-3'-phosphate
  modified_base 5: mod_base = OTHER; note = 2'-O-methylguanosine-3'-phosphate
  modified_base 6: mod_base = OTHER; note = 2'-deoxy-2'-fluorocytidine-3'-phosphate
  modified_base 7: mod_base = OTHER; note = 2'-O-methyladenosine-3'-phosphate
  modified_base 8: mod_base = OTHER; note = 2'-deoxy-2'-fluorocytidine-3'-phosphate
  modified_base 9: mod_base = OTHER; note = 2'-deoxy-2'-fluorouridine-3'-phosphate
  modified_base 10: mod_base = OTHER; note = 2'-O-methyluridine-3'-phosphate
  modified_base 11: mod_base = OTHER; note = 2'-O-methylcytidine-3'-phosphate
  modified_base 12: mod_base = OTHER; note = 2'-O-methylguanosine-3'-phosphate
  modified_base 13: mod_base = OTHER; note = 2'-O-methylguanosine-3'-phosphate
  modified_base 14: mod_base = OTHER; note = 2'-deoxy-2'-fluoroguanosine-3'-phosphate
  modified_base 15: mod_base = OTHER; note = 2'-O-methyluridine-3'-phosphate
  modified_base 16: mod_base = OTHER; note = 2'-deoxy-2'-fluoroadenosine-3'-phosphate
  modified_base 17: mod_base = OTHER; note = 2'-O-methylguanosine-3'-phosphate
  modified_base 18: mod_base = OTHER; note = 2'-O-methylcytidine-3'-phosphate
  modified_base 19: mod_base = OTHER; note = 2'-O-methyladenosine-3'-phosphate
  modified_base 20: mod_base = OTHER; note = 2'-O-methylguanosine-3'-phosphate
  modified_base 21: mod_base = OTHER; note = 2'-O-methylcytidine-3'-phosphorothioate
  modified_base 22: mod_base = OTHER; note = 2'-O-methylcytidine-3'-phosphorothioate
  modified_base 23: mod_base = OTHER; note = 2'-O-methyluridine
ttgggcacttcgggtagcagcct

SEQ ID NO: 2726 - RNA, 23 nt, synthetic construct
  source 1..23: mol_type = other RNA
  modified_base 1: mod_base = OTHER; note = 2'-O-methyluridine-3'-phosphorothioate 5'-(E)-Vinylphosphonate
  modified_base 2: mod_base = OTHER; note = 2'-deoxy-2'-fluoroguanosine-3'-phosphorothioate
  modified_base 3: mod_base = OTHER; note = 2'-O-methyluridine-3'-phosphate
  modified_base 4: mod_base = OTHER; note = 2'-O-methylcytidine-3'-phosphate
  modified_base 5: mod_base = OTHER; note = 2'-O-methylcytidine-3'-phosphate
  modified_base 6: mod_base = OTHER; note = 2'-deoxy-2'-fluorouridine-3'-phosphate
  modified_base 7: mod_base = OTHER; note = 2'-O-methylcytidine-3'-phosphate
  modified_base 8: mod_base = OTHER; note = 2'-deoxy-2'-fluoroadenosine-3'-phosphate
  modified_base 9: mod_base = OTHER; note = 2'-deoxy-2'-fluorouridine-3'-phosphate
  modified_base 10: mod_base = OTHER; note = 2'-O-methyluridine-3'-phosphate
  modified_base 11: mod_base = OTHER; note = 2'-O-methylguanosine-3'-phosphate
  modified_base 12: mod_base = OTHER; note = 2'-O-methyladenosine-3'-phosphate
  modified_base 13: mod_base = OTHER; note = 2'-O-methyladenosine-3'-phosphate
  modified_base 14: mod_base = OTHER; note = 2'-deoxy-2'-fluoroguanosine-3'-phosphate
  modified_base 15: mod_base = OTHER; note = 2'-O-methyladenosine-3'-phosphate
  modified_base 16: mod_base = OTHER; note = 2'-deoxy-2'-fluoroadenosine-3'-phosphate
  modified_base 17: mod_base = OTHER; note = 2'-O-methylguanosine-3'-phosphate
  modified_base 18: mod_base = OTHER; note = 2'-O-methylguanosine-3'-phosphate
  modified_base 19: mod_base = OTHER; note = 2'-O-methylguanosine-3'-phosphate
  modified_base 20: mod_base = OTHER; note = 2'-O-methylcytidine-3'-phosphate
  modified_base 21: mod_base = OTHER; note = 2'-O-methyluridine-3'-phosphorothioate
  modified_base 22: mod_base = OTHER; note = 2'-O-methylguanosine-3'-phosphorothioate
  modified_base 23: mod_base = OTHER; note = 2'-O-methylguanosine
tgtcctcattgaagaagggctgg

SEQ ID NO: 2727 - RNA, 23 nt, synthetic construct
  source 1..23: mol_type = other RNA
  modified_base 1: mod_base = OTHER; note = 2'-O-methyluridine-3'-phosphorothioate 5'-(E)-Vinylphosphonate
  modified_base 2: mod_base = OTHER; note = 2'-deoxy-2'-fluorocytidine-3'-phosphorothioate
  modified_base 3: mod_base = OTHER; note = 2'-O-methylcytidine-3'-phosphate
  modified_base 4: mod_base = OTHER; note = 2'-O-methyladenosine-3'-phosphate
  modified_base 5: mod_base = OTHER; note = 2'-O-methylcytidine-3'-phosphate
  modified_base 6: mod_base = OTHER; note = 2'-deoxy-2'-fluoroadenosine-3'-phosphate
  modified_base 7: mod_base = OTHER; note = 2'-O-methylcytidine-3'-phosphate
  modified_base 8: mod_base = OTHER; note = 2'-deoxy-2'-fluorouridine-3'-phosphate
  modified_base 9: mod_base = OTHER; note = 2'-deoxy-2'-fluoroguanosine-3'-phosphate
  modified_base 10: mod_base = OTHER; note = 2'-O-methylguanosine-3'-phosphate
  modified_base 11: mod_base = OTHER; note = 2'-O-methylguanosine-3'-phosphate
  modified_base 12: mod_base = OTHER; note = 2'-O-methylcytidine-3'-phosphate
  modified_base 13: mod_base = OTHER; note = 2'-O-methylcytidine-3'-phosphate
  modified_base 14: mod_base = OTHER; note = 2'-deoxy-2'-fluoroadenosine-3'-phosphate
  modified_base 15: mod_base = OTHER; note = 2'-O-methylcytidine-3'-phosphate
  modified_base 16: mod_base = OTHER; note = 2'-deoxy-2'-fluoroguanosine-3'-phosphate
  modified_base 17: mod_base = OTHER; note = 2'-O-methylcytidine-3'-phosphate
  modified_base 18: mod_base = OTHER; note = 2'-O-methyladenosine-3'-phosphate
  modified_base 19: mod_base = OTHER; note = 2'-O-methylcytidine-3'-phosphate
  modified_base 20: mod_base = OTHER; note = 2'-O-methyluridine-3'-phosphate
  modified_base 21: mod_base = OTHER; note = 2'-O-methyluridine-3'-phosphorothioate
  modified_base 22: mod_base = OTHER; note = 2'-O-methylcytidine-3'-phosphorothioate
  modified_base 23: mod_base = OTHER; note = 2'-O-methyladenosine
tccacactgggccacgcacttca

SEQ ID NO: 2728 - RNA, 23 nt, synthetic construct
  source 1..23: mol_type = other RNA
  modified_base 1: mod_base = OTHER; note = 2'-O-methyluridine-3'-phosphorothioate 5'-(E)-Vinylphosphonate
  modified_base 2: mod_base = OTHER; note = 2'-deoxy-2'-fluoroadenosine-3'-phosphorothioate
  modified_base 3: mod_base = OTHER; note = 2'-O-methylguanosine-3'-phosphate
  modified_base 4: mod_base = OTHER; note = 2'-O-methyluridine-3'-phosphate
  modified_base 5: mod_base = OTHER; note = 2'-O-methyluridine-3'-phosphate
  modified_base 6: mod_base = OTHER; note = 2'-deoxy-2'-fluorouridine-3'-phosphate
  modified_base 7: mod_base = OTHER; note = 2'-O-methylcytidine-3'-phosphate
  modified_base 8: mod_base = OTHER; note = 2'-deoxy-2'-fluorocytidine-3'-phosphate
  modified_base 9: mod_base = OTHER; note = 2'-deoxy-2'-fluoroguanosine-3'-phosphate
  modified_base 10: mod_base = OTHER; note = 2'-O-methyluridine-3'-phosphate
  modified_base 11: mod_base = OTHER; note = 2'-O-methylcytidine-3'-phosphate
  modified_base 12: mod_base = OTHER; note = 2'-O-methylcytidine-3'-phosphate
  modified_base 13: mod_base = OTHER; note = 2'-O-methyluridine-3'-phosphate
  modified_base 14: mod_base = OTHER; note = 2'-deoxy-2'-fluorouridine-3'-phosphate
  modified_base 15: mod_base = OTHER; note = 2'-O-methylguanosine-3'-phosphate
  modified_base 16: mod_base = OTHER; note = 2'-deoxy-2'-fluorouridine-3'-phosphate
  modified_base 17: mod_base = OTHER; note = 2'-O-methylcytidine-3'-phosphate
  modified_base 18: mod_base = OTHER; note = 2'-O-methylguanosine-3'-phosphate
  modified_base 19: mod_base = OTHER; note = 2'-O-methyluridine-3'-phosphate
  modified_base 20: mod_base = OTHER; note = 2'-O-methyladenosine-3'-phosphate
  modified_base 21: mod_base = OTHER; note = 2'-O-methylguanosine-3'-phosphorothioate
  modified_base 22: mod_base = OTHER; note = 2'-O-methylcytidine-3'-phosphorothioate
  modified_base 23: mod_base = OTHER; note = 2'-O-methyladenosine
tagtttccgtccttgtcgtagca

SEQ ID NO: 2729 - RNA, 23 nt, synthetic construct
  source 1..23: mol_type = other RNA
  modified_base 1: mod_base = OTHER; note = 2'-O-methyluridine-3'-phosphorothioate 5'-(E)-Vinylphosphonate
  modified_base 2: mod_base = OTHER; note = 2'-deoxy-2'-fluoroguanosine-3'-phosphorothioate
  modified_base 3: mod_base = OTHER; note = 2'-O-methylguanosine-3'-phosphate
  modified_base 4: mod_base = OTHER; note = 2'-O-methyladenosine-3'-phosphate
  modified_base 5: mod_base = OTHER; note = 2'-O-methylcytidine-3'-phosphate
  modified_base 6: mod_base = OTHER; note = 2'-deoxy-2'-fluorocytidine-3'-phosphate
  modified_base 7: mod_base = OTHER; note = 2'-O-methylcytidine-3'-phosphate
  modified_base 8: mod_base = OTHER; note = 2'-deoxy-2'-fluorouridine-3'-phosphate
  modified_base 9: mod_base = OTHER; note = 2'-deoxy-2'-fluorouridine-3'-phosphate
  modified_base 10: mod_base = OTHER; note = 2'-O-methylguanosine-3'-phosphate
  modified_base 11: mod_base = OTHER; note = 2'-O-methylcytidine-3'-phosphate
  modified_base 12: mod_base = OTHER; note = 2'-O-methyladenosine-3'-phosphate
  modified_base 13: mod_base = OTHER; note = 2'-O-methylcytidine-3'-phosphate
  modified_base 14: mod_base = OTHER; note = 2'-deoxy-2'-fluorocytidine-3'-phosphate
  modified_base 15: mod_base = OTHER; note = 2'-O-methylguanosine-3'-phosphate
  modified_base 16: mod_base = OTHER; note = 2'-deoxy-2'-fluoroadenosine-3'-phosphate
  modified_base 17: mod_base = OTHER; note = 2'-O-methylcytidine-3'-phosphate
  modified_base 18: mod_base = OTHER; note = 2'-O-methylguanosine-3'-phosphate
  modified_base 19: mod_base = OTHER; note = 2'-O-methyluridine-3'-phosphate
  modified_base 20: mod_base = OTHER; note = 2'-O-methylcytidine-3'-phosphate
  modified_base 21: mod_base = OTHER; note = 2'-O-methyladenosine-3'-phosphorothioate
  modified_base 22: mod_base = OTHER; note = 2'-O-methyluridine-3'-phosphorothioate
  modified_base 23: mod_base = OTHER; note = 2'-O-methyladenosine
tggacccttgcaccgacgtcata

SEQ ID NO: 2730 - RNA, 23 nt, synthetic construct
  source 1..23: mol_type = other RNA
  modified_base 1: mod_base = OTHER; note = 2'-O-methyluridine-3'-phosphorothioate 5'-(E)-Vinylphosphonate
  modified_base 2: mod_base = OTHER; note = 2'-deoxy-2'-fluoroguanosine-3'-phosphorothioate
  modified_base 3: mod_base = OTHER; note = 2'-O-methyluridine-3'-phosphate
  modified_base 4: mod_base = OTHER; note = 2'-O-methylguanosine-3'-phosphate
  modified_base 5: mod_base = OTHER; note = 2'-O-methyluridine-3'-phosphate
  modified_base 6: mod_base = OTHER; note = 2'-deoxy-2'-fluoroguanosine-3'-phosphate
  modified_base 7: mod_base = OTHER; note = 2'-O-methylcytidine-3'-phosphate
  modified_base 8: mod_base = OTHER; note = 2'-deoxy-2'-fluoroadenosine-3'-phosphate
  modified_base 9: mod_base = OTHER; note = 2'-deoxy-2'-fluoroguanosine-3'-phosphate
  modified_base 10: mod_base = OTHER; note = 2'-O-methyluridine-3'-phosphate
  modified_base 11: mod_base = OTHER; note = 2'-O-methyluridine-3'-phosphate
  modified_base 12: mod_base = OTHER; note = 2'-O-methyladenosine-3'-phosphate
  modified_base 13: mod_base = OTHER; note = 2'-O-methylcytidine-3'-phosphate
  modified_base 14: mod_base = OTHER; note = 2'-deoxy-2'-fluoroadenosine-3'-phosphate
  modified_base 15: mod_base = OTHER; note = 2'-O-methylguanosine-3'-phosphate
  modified_base 16: mod_base = OTHER; note = 2'-deoxy-2'-fluorocytidine-3'-phosphate
  modified_base 17: mod_base = OTHER; note = 2'-O-methyluridine-3'-phosphate
  modified_base 18: mod_base = OTHER; note = 2'-O-methylcytidine-3'-phosphate
  modified_base 19: mod_base = OTHER; note = 2'-O-methyluridine-3'-phosphate
  modified_base 20: mod_base = OTHER; note = 2'-O-methylguanosine-3'-phosphate
  modified_base 21: mod_base = OTHER; note = 2'-O-methylguanosine-3'-phosphorothioate
  modified_base 22: mod_base = OTHER; note = 2'-O-methylcytidine-3'-phosphorothioate
  modified_base 23: mod_base = OTHER; note = 2'-O-methyladenosine
tgtgtgcagttacagctctggca

SEQ ID NO: 2731 - RNA, 23 nt, synthetic construct
  source 1..23: mol_type = other RNA
  modified_base 1: mod_base = OTHER; note = 2'-O-methyluridine-3'-phosphorothioate 5'-(E)-Vinylphosphonate
  modified_base 2: mod_base = OTHER; note = 2'-deoxy-2'-fluorouridine-3'-phosphorothioate
  modified_base 3: mod_base = OTHER; note = 2'-O-methylcytidine-3'-phosphate
  modified_base 4: mod_base = OTHER; note = 2'-O-methyladenosine-3'-phosphate
  modified_base 5: mod_base = OTHER; note = 2'-O-methyladenosine-3'-phosphate
  modified_base 6: mod_base = OTHER; note = 2'-deoxy-2'-fluoroguanosine-3'-phosphate
  modified_base 7: mod_base = OTHER; note = 2'-O-methylguanosine-3'-phosphate
  modified_base 8: mod_base = OTHER; note = 2'-deoxy-2'-fluorocytidine-3'-phosphate
  modified_base 9: mod_base = OTHER; note = 2'-deoxy-2'-fluorouridine-3'-phosphate
  modified_base 10: mod_base = OTHER; note = 2'-O-methylguanosine-3'-phosphate
  modified_base 11: mod_base = OTHER; note = 2'-O-methyluridine-3'-phosphate
  modified_base 12: mod_base = OTHER; note = 2'-O-methylguanosine-3'-phosphate
  modified_base 13: mod_base = OTHER; note = 2'-O-methyladenosine-3'-phosphate
  modified_base 14: mod_base = OTHER; note = 2'-deoxy-2'-fluoroguanosine-3'-phosphate
  modified_base 15: mod_base = OTHER; note = 2'-O-methylcytidine-3'-phosphate
  modified_base 16: mod_base = OTHER; note = 2'-deoxy-2'-fluoroguanosine-3'-phosphate
  modified_base 17: mod_base = OTHER; note = 2'-O-methylcytidine-3'-phosphate
  modified_base 18: mod_base = OTHER; note = 2'-O-methyladenosine-3'-phosphate
  modified_base 19: mod_base = OTHER; note = 2'-O-methylcytidine-3'-phosphate
  modified_base 20: mod_base = OTHER; note = 2'-O-methyluridine-3'-phosphate
  modified_base 21: mod_base = OTHER; note = 2'-O-methylguanosine-3'-phosphorothioate
  modified_base 22: mod_base = OTHER; note = 2'-O-methylguanosine-3'-phosphorothioate
  modified_base 23: mod_base = OTHER; note = 2'-O-methyladenosine
ttcaaggctgtgagcgcactgga

SEQ ID NO: 2732 - RNA, 23 nt, synthetic construct
  source 1..23: mol_type = other RNA
  modified_base 1: mod_base = OTHER; note = 2'-O-methyluridine-3'-phosphorothioate 5'-(E)-Vinylphosphonate
  modified_base 2: mod_base = OTHER; note = 2'-deoxy-2'-fluorouridine-3'-phosphorothioate
  modified_base 3: mod_base = OTHER; note = 2'-O-methylcytidine-3'-phosphate
  modified_base 4: mod_base = OTHER; note = 2'-O-methylcytidine-3'-phosphate
  modified_base 5: mod_base = OTHER; note = 2'-O-methyluridine-3'-phosphate
  modified_base 6: mod_base = OTHER; note = 2'-deoxy-2'-fluoroguanosine-3'-phosphate
  modified_base 7: mod_base = OTHER; note = 2'-O-methyluridine-3'-phosphate
  modified_base 8: mod_base = OTHER; note = 2'-deoxy-2'-fluorocytidine-3'-phosphate
  modified_base 9: mod_base = OTHER; note = 2'-deoxy-2'-fluorocytidine-3'-phosphate
  modified_base 10: mod_base = OTHER; note = 2'-O-methyluridine-3'-phosphate
  modified_base 11: mod_base = OTHER; note = 2'-O-methylcytidine-3'-phosphate
  modified_base 12: mod_base = OTHER; note = 2'-O-methyladenosine-3'-phosphate
  modified_base 13: mod_base = OTHER; note = 2'-O-methyluridine-3'-phosphate
  modified_base 14: mod_base = OTHER; note = 2'-deoxy-2'-fluoroadenosine-3'-phosphate
  modified_base 15: mod_base = OTHER; note = 2'-O-methylguanosine-3'-phosphate
  modified_base 16: mod_base = OTHER; note = 2'-deoxy-2'-fluoroguanosine-3'-phosphate
  modified_base 17: mod_base = OTHER; note = 2'-O-methyluridine-3'-phosphate
  modified_base 18: mod_base = OTHER; note = 2'-O-methylguanosine-3'-phosphate
  modified_base 19: mod_base = OTHER; note = 2'-O-methylcytidine-3'-phosphate
  modified_base 20: mod_base = OTHER; note = 2'-O-methyladenosine-3'-phosphate
  modified_base 21: mod_base = OTHER; note = 2'-O-methylguanosine-3'-phosphorothioate
  modified_base 22: mod_base = OTHER; note = 2'-O-methylguanosine-3'-phosphorothioate
  modified_base 23: mod_base = OTHER; note = 2'-O-methyluridine
ttcctgtcctcataggtgcaggt

SEQ ID NO: 2733 - RNA, 23 nt, synthetic construct
  source 1..23: mol_type = other RNA
  modified_base 1: mod_base = OTHER; note = 2'-O-methyluridine-3'-phosphorothioate 5'-(E)-Vinylphosphonate
  modified_base 2: mod_base = OTHER; note = 2'-deoxy-2'-fluoroguanosine-3'-phosphorothioate
  modified_base 3: mod_base = OTHER; note = 2'-O-methyluridine-3'-phosphate
  modified_base 4: mod_base = OTHER; note = 2'-O-methylguanosine-3'-phosphate
  modified_base 5: mod_base = OTHER; note = 2'-O-methyluridine-3'-phosphate
  modified_base 6: mod_base = OTHER; note = 2'-deoxy-2'-fluorouridine-3'-phosphate
  modified_base 7: mod_base = OTHER; note = 2'-O-methylguanosine-3'-phosphate
  modified_base 8: mod_base = OTHER; note = 2'-deoxy-2'-fluorouridine-3'-phosphate
  modified_base 9: mod_base = OTHER; note = 2'-deoxy-2'-fluoroadenosine-3'-phosphate
  modified_base 10: mod_base = OTHER; note = 2'-O-methylguanosine-3'-phosphate
  modified_base 11: mod_base = OTHER; note = 2'-O-methyladenosine-3'-phosphate
  modified_base 12: mod_base = OTHER; note = 2'-O-methyluridine-3'-phosphate
  modified_base 13: mod_base = OTHER; note = 2'-O-methylguanosine-3'-phosphate
  modified_base 14: mod_base = OTHER; note = 2'-deoxy-2'-fluoroadenosine-3'-phosphate
  modified_base 15: mod_base = OTHER; note = 2'-O-methylcytidine-3'-phosphate
  modified_base 16: mod_base = OTHER; note = 2'-deoxy-2'-fluoroguanosine-3'-phosphate
  modified_base 17: mod_base = OTHER; note = 2'-O-methyluridine-3'-phosphate
  modified_base 18: mod_base = OTHER; note = 2'-O-methylcytidine-3'-phosphate
  modified_base 19: mod_base = OTHER; note = 2'-O-methylcytidine-3'-phosphate
  modified_base 20: mod_base = OTHER; note = 2'-O-methyluridine-3'-phosphate
  modified_base 21: mod_base = OTHER; note = 2'-O-methylguanosine-3'-phosphorothioate
  modified_base 22: mod_base = OTHER; note = 2'-O-methylguanosine-3'-phosphorothioate
  modified_base 23: mod_base = OTHER; note = 2'-O-methyluridine
tgtgttgtagatgacgtcctggt

SEQ ID NO: 2734 - RNA, 23 nt, synthetic construct
  source 1..23: mol_type = other RNA
  modified_base 1: mod_base = OTHER; note = 2'-O-methyluridine-3'-phosphorothioate 5'-(E)-Vinylphosphonate
  modified_base 2: mod_base = OTHER; note = 2'-deoxy-2'-fluoroadenosine-3'-phosphorothioate
  modified_base 3: mod_base = OTHER; note = 2'-O-methylguanosine-3'-phosphate
  modified_base 4: mod_base = OTHER; note = 2'-O-methyladenosine-3'-phosphate
  modified_base 5: mod_base = OTHER; note = 2'-O-methyluridine-3'-phosphate
  modified_base 6: mod_base = OTHER; note = 2'-deoxy-2'-fluoroguanosine-3'-phosphate
  modified_base 7: mod_base = OTHER; note = 2'-O-methylguanosine-3'-phosphate
  modified_base 8: mod_base = OTHER; note = 2'-deoxy-2'-fluorocytidine-3'-phosphate
  modified_base 9: mod_base = OTHER; note = 2'-deoxy-2'-fluoroguanosine-3'-phosphate
  modified_base 10: mod_base = OTHER; note = 2'-O-methyladenosine-3'-phosphate
  modified_base 11: mod_base = OTHER; note = 2'-O-methyluridine-3'-phosphate
  modified_base 12: mod_base = OTHER; note = 2'-O-methylcytidine-3'-phosphate
  modified_base 13: mod_base = OTHER; note = 2'-O-methyladenosine-3'-phosphate
  modified_base 14: mod_base = OTHER; note = 2'-deoxy-2'-fluoroadenosine-3'-phosphate
  modified_base 15: mod_base = OTHER; note = 2'-O-methylguanosine-3'-phosphate
  modified_base 16: mod_base = OTHER; note = 2'-deoxy-2'-fluorocytidine-3'-phosphate
  modified_base 17: mod_base = OTHER; note = 2'-O-methyladenosine-3'-phosphate
  modified_base 18: mod_base = OTHER; note = 2'-O-methylguanosine-3'-phosphate
  modified_base 19: mod_base = OTHER; note = 2'-O-methylguanosine-3'-phosphate
  modified_base 20: mod_base = OTHER; note = 2'-O-methylcytidine-3'-phosphate
  modified_base 21: mod_base = OTHER; note = 2'-O-methylguanosine-3'-phosphorothioate
  modified_base 22: mod_base = OTHER; note = 2'-O-methylcytidine-3'-phosphorothioate
  modified_base 23: mod_base = OTHER; note = 2'-O-methylcytidine
tagatggcgatcaagcaggcgcc

SEQ ID NO: 2735 - RNA, 23 nt, synthetic construct
  source 1..23: mol_type = other RNA
  modified_base 1: mod_base = OTHER; note = 2'-O-methyluridine-3'-phosphorothioate 5'-(E)-Vinylphosphonate
  modified_base 2: mod_base = OTHER; note = 2'-deoxy-2'-fluoroadenosine-3'-phosphorothioate
  modified_base 3: mod_base = OTHER; note = 2'-O-methylcytidine-3'-phosphate
  modified_base 4: mod_base = OTHER; note = 2'-O-methyladenosine-3'-phosphate
  modified_base 5: mod_base = OTHER; note = 2'-O-methylguanosine-3'-phosphate
  modified_base 6: mod_base = OTHER; note = 2'-deoxy-2'-fluorocytidine-3'-phosphate
  modified_base 7: mod_base = OTHER; note = 2'-O-methylcytidine-3'-phosphate
  modified_base 8: mod_base = OTHER; note = 2'-deoxy-2'-fluorouridine-3'-phosphate
  modified_base 9: mod_base = OTHER; note = 2'-deoxy-2'-fluorouridine-3'-phosphate
  modified_base 10: mod_base = OTHER; note = 2'-O-methylcytidine-3'-phosphate
  modified_base 11: mod_base = OTHER; note = 2'-O-methylcytidine-3'-phosphate
  modified_base 12: mod_base = OTHER; note = 2'-O-methyluridine-3'-phosphate
  modified_base 13: mod_base = OTHER; note = 2'-O-methylguanosine-3'-phosphate
  modified_base 14: mod_base = OTHER; note = 2'-deoxy-2'-fluoroadenosine-3'-phosphate
  modified_base 15: mod_base = OTHER; note = 2'-O-methyluridine-3'-phosphate
  modified_base 16: mod_base = OTHER; note = 2'-deoxy-2'-fluoroguanosine-3'-phosphate
  modified_base 17: mod_base = OTHER; note = 2'-O-methyladenosine-3'-phosphate
  modified_base 18: mod_base = OTHER; note = 2'-O-methyluridine-3'-phosphate
  modified_base 19: mod_base = OTHER; note = 2'-O-methylguanosine-3'-phosphate
  modified_base 20: mod_base = OTHER; note = 2'-O-methylguanosine-3'-phosphate
  modified_base 21: mod_base = OTHER; note = 2'-O-methyluridine-3'-phosphorothioate
  modified_base 22: mod_base = OTHER; note = 2'-O-methylguanosine-3'-phosphorothioate
  modified_base 23: mod_base = OTHER; note = 2'-O-methylcytidine
tacagccttcctgatgatggtgc

SEQ ID NO: 2736 - RNA, 23 nt, synthetic construct
  source 1..23: mol_type = other RNA
  modified_base 1: mod_base = OTHER; note = 2'-O-methyluridine-3'-phosphorothioate 5'-(E)-Vinylphosphonate
  modified_base 2: mod_base = OTHER; note = 2'-deoxy-2'-fluorouridine-3'-phosphorothioate
  modified_base 3: mod_base = OTHER; note = 2'-O-methylguanosine-3'-phosphate
  modified_base 4: mod_base = OTHER; note = 2'-O-methyladenosine-3'-phosphate
  modified_base 5: mod_base = OTHER; note = 2'-O-methyladenosine-3'-phosphate
  modified_base 6: mod_base = OTHER; note = 2'-deoxy-2'-fluoroguanosine-3'-phosphate
  modified_base 7: mod_base = OTHER; note = 2'-O-methylguanosine-3'-phosphate
  modified_base 8: mod_base = OTHER; note = 2'-deoxy-2'-fluorouridine-3'-phosphate
  modified_base 9: mod_base = OTHER; note = 2'-deoxy-2'-fluoroguanosine-3'-phosphate
  modified_base 10: mod_base = OTHER; note = 2'-O-methyladenosine-3'-phosphate
  modified_base 11: mod_base = OTHER; note = 2'-O-methyladenosine-3'-phosphate
  modified_base 12: mod_base = OTHER; note = 2'-O-methyluridine-3'-phosphate
  modified_base 13: mod_base = OTHER; note = 2'-O-methylguanosine-3'-phosphate
  modified_base 14: mod_base = OTHER; note = 2'-deoxy-2'-fluoroguanosine-3'-phosphate
  modified_base 15: mod_base = OTHER; note = 2'-O-methylcytidine-3'-phosphate
  modified_base 16: mod_base = OTHER; note = 2'-deoxy-2'-fluoroguanosine-3'-phosphate
  modified_base 17: mod_base = OTHER; note = 2'-O-methyluridine-3'-phosphate
  modified_base 18: mod_base = OTHER; note = 2'-O-methyluridine-3'-phosphate
  modified_base 19: mod_base = OTHER; note = 2'-O-methylguanosine-3'-phosphate
  modified_base 20: mod_base = OTHER; note = 2'-O-methyluridine-3'-phosphate
  modified_base 21: mod_base = OTHER; note = 2'-O-methylguanosine-3'-phosphorothioate
  modified_base 22: mod_base = OTHER; note = 2'-O-methylguanosine-3'-phosphorothioate
  modified_base 23: mod_base = OTHER; note = 2'-O-methylcytidine
ttgaaggtgaatggcgttgtggc

SEQ ID NO: 2737 - RNA, 23 nt, synthetic construct
  source 1..23: mol_type = other RNA
  modified_base 1: mod_base = OTHER; note = 2'-O-methyluridine-3'-phosphorothioate 5'-(E)-Vinylphosphonate
  modified_base 2: mod_base = OTHER; note = 2'-deoxy-2'-fluorouridine-3'-phosphorothioate
  modified_base 3: mod_base = OTHER; note = 2'-O-methylcytidine-3'-phosphate
  modified_base 4: mod_base = OTHER; note = 2'-O-methylguanosine-3'-phosphate
  modified_base 5: mod_base = OTHER; note = 2'-O-methylcytidine-3'-phosphate
  modified_base 6: mod_base = OTHER; note = 2'-deoxy-2'-fluoroguanosine-3'-phosphate
  modified_base 7: mod_base = OTHER; note = 2'-O-methylguanosine-3'-phosphate
  modified_base 8: mod_base = OTHER; note = 2'-deoxy-2'-fluoroadenosine-3'-phosphate
  modified_base 9: mod_base = OTHER; note = 2'-deoxy-2'-fluorocytidine-3'-phosphate
  modified_base 10: mod_base = OTHER; note = 2'-O-methyladenosine-3'-phosphate
  modified_base 11: mod_base = OTHER; note = 2'-O-methylcytidine-3'-phosphate
  modified_base 12: mod_base = OTHER; note = 2'-O-methyladenosine-3'-phosphate
  modified_base 13: mod_base = OTHER; note = 2'-O-methylcytidine-3'-phosphate
  modified_base 14: mod_base = OTHER; note = 2'-deoxy-2'-fluoroadenosine-3'-phosphate
  modified_base 15: mod_base = OTHER; note = 2'-O-methylcytidine-3'-phosphate
  modified_base 16: mod_base = OTHER; note = 2'-deoxy-2'-fluoroguanosine-3'-phosphate
  modified_base 17: mod_base = OTHER; note = 2'-O-methylguanosine-3'-phosphate
  modified_base 18: mod_base = OTHER; note = 2'-O-methyluridine-3'-phosphate
  modified_base 19: mod_base = OTHER; note = 2'-O-methylguanosine-3'-phosphate
  modified_base 20: mod_base = OTHER; note = 2'-O-methylguanosine-3'-phosphate
  modified_base 21: mod_base = OTHER; note = 2'-O-methyladenosine-3'-phosphorothioate
  modified_base 22: mod_base = OTHER; note = 2'-O-methylguanosine-3'-phosphorothioate
  modified_base 23: mod_base = OTHER; note = 2'-O-methyladenosine
ttcgcggacacacacggtggaga

SEQ ID NO: 2738 - RNA, 23 nt, synthetic construct
  source 1..23: mol_type = other RNA
  modified_base 1: mod_base = OTHER; note = 2'-O-methyluridine-3'-phosphorothioate 5'-(E)-Vinylphosphonate
  modified_base 2: mod_base = OTHER; note = 2'-deoxy-2'-fluorouridine-3'-phosphorothioate
  modified_base 3: mod_base = OTHER; note = 2'-O-methylguanosine-3'-phosphate
  modified_base 4: mod_base = OTHER; note = 2'-O-methylcytidine-3'-phosphate
  modified_base 5: mod_base = OTHER; note = 2'-O-methylcytidine-3'-phosphate
  modified_base 6: mod_base = OTHER; note = 2'-deoxy-2'-fluorocytidine-3'-phosphate
  modified_base 7: mod_base = OTHER; note = 2'-O-methyladenosine-3'-phosphate
  modified_base 8: mod_base = OTHER; note = 2'-deoxy-2'-fluorouridine-3'-phosphate
  modified_base 9: mod_base = OTHER; note = 2'-deoxy-2'-fluorouridine-3'-phosphate
  modified_base 10: mod_base = OTHER; note = 2'-O-methylguanosine-3'-phosphate
  modified_base 11: mod_base = OTHER; note = 2'-O-methyluridine-3'-phosphate
  modified_base 12: mod_base = OTHER; note = 2'-O-methyladenosine-3'-phosphate
  modified_base 13: mod_base = OTHER; note = 2'-O-methylcytidine-3'-phosphate
  modified_base 14: mod_base = OTHER; note = 2'-deoxy-2'-fluorocytidine-3'-phosphate
  modified_base 15: mod_base = OTHER; note = 2'-O-methyladenosine-3'-phosphate
  modified_base 16: mod_base = OTHER; note = 2'-deoxy-2'-fluoroguanosine-3'-phosphate
  modified_base 17: mod_base = OTHER; note = 2'-O-methylcytidine-3'-phosphate
  modified_base 18: mod_base = OTHER; note = 2'-O-methyluridine-3'-phosphate
  modified_base 19: mod_base = OTHER; note = 2'-O-methylguanosine-3'-phosphate
  modified_base 20: mod_base = OTHER; note = 2'-O-methylguanosine-3'-phosphate
  modified_base 21: mod_base = OTHER; note = 2'-O-methyladenosine-3'-phosphorothioate
  modified_base 22: mod_base = OTHER; note = 2'-O-methylcytidine-3'-phosphorothioate
  modified_base 23: mod_base = OTHER; note = 2'-O-methylcytidine
ttgcccattgtaccagctggacc

SEQ ID NO: 2739 - RNA, 23 nt, synthetic construct
  source 1..23: mol_type = other RNA
  modified_base 1: mod_base = OTHER; note = 2'-O-methyluridine-3'-phosphorothioate 5'-(E)-Vinylphosphonate
  modified_base 2: mod_base = OTHER; note = 2'-deoxy-2'-fluorocytidine-3'-phosphorothioate
  modified_base 3: mod_base = OTHER; note = 2'-O-methyladenosine-3'-phosphate
  modified_base 4: mod_base = OTHER; note = 2'-O-methyladenosine-3'-phosphate
  modified_base 5: mod_base = OTHER; note = 2'-O-methyladenosine-3'-phosphate
  modified_base 6: mod_base = OTHER; note = 2'-deoxy-2'-fluorocytidine-3'-phosphate
  modified_base 7: mod_base = OTHER; note = 2'-O-methylguanosine-3'-phosphate
  modified_base 8: mod_base = OTHER; note = 2'-deoxy-2'-fluorouridine-3'-phosphate
  modified_base 9: mod_base = OTHER; note = 2'-deoxy-2'-fluorocytidine-3'-phosphate
  modified_base 10: mod_base = OTHER; note = 2'-O-methyluridine-3'-phosphate
  modified_base 11: mod_base = OTHER; note = 2'-O-methylcytidine-3'-phosphate
  modified_base 12: mod_base = OTHER; note = 2'-O-methyladenosine-3'-phosphate
  modified_base 13: mod_base = OTHER; note = 2'-O-methyladenosine-3'-phosphate
  modified_base 14: mod_base = OTHER; note = 2'-deoxy-2'-fluoroadenosine-3'-phosphate
  modified_base 15: mod_base = OTHER; note = 2'-O-methylguanosine-3'-phosphate
  modified_base 16: mod_base = OTHER; note = 2'-deoxy-2'-fluorouridine-3'-phosphate
  modified_base 17: mod_base = OTHER; note = 2'-O-methylcytidine-3'-phosphate
  modified_base 18: mod_base = OTHER; note = 2'-O-methyluridine-3'-phosphate
  modified_base 19: mod_base = OTHER; note = 2'-O-methylcytidine-3'-phosphate
  modified_base 20: mod_base = OTHER; note = 2'-O-methylcytidine-3'-phosphate
  modified_base 21: mod_base = OTHER; note = 2'-O-methylguanosine-3'-phosphorothioate
  modified_base 22: mod_base = OTHER; note = 2'-O-methylcytidine-3'-phosphorothioate
  modified_base 23: mod_base = OTHER; note = 2'-O-methylcytidine
tcaaacgtctcaaagtctccgcc

SEQ ID NO: 2740 - RNA, 23 nt, synthetic construct
  source 1..23: mol_type = other RNA
  modified_base 1: mod_base = OTHER; note = 2'-O-methyluridine-3'-phosphorothioate 5'-(E)-Vinylphosphonate
  modified_base 2: mod_base = OTHER; note = 2'-deoxy-2'-fluoroadenosine-3'-phosphorothioate
  modified_base 3: mod_base = OTHER; note = 2'-O-methylguanosine-3'-phosphate
  modified_base 4: mod_base = OTHER; note = 2'-O-methylguanosine-3'-phosphate
  modified_base 5: mod_base = OTHER; note = 2'-O-methylguanosine-3'-phosphate
  modified_base 6: mod_base = OTHER; note = 2'-deoxy-2'-fluorocytidine-3'-phosphate
  modified_base 7: mod_base = OTHER; note = 2'-O-methyladenosine-3'-phosphate
  modified_base 8: mod_base = OTHER; note = 2'-deoxy-2'-fluorouridine-3'-phosphate
  modified_base 9: mod_base = OTHER; note = 2'-deoxy-2'-fluoroadenosine-3'-phosphate
  modified_base 10: mod_base = OTHER; note = 2'-O-methylcytidine-3'-phosphate
  modified_base 11: mod_base = OTHER; note = 2'-O-methylcytidine-3'-phosphate
  modified_base 12: mod_base = OTHER; note = 2'-O-methyluridine-3'-phosphate
  modified_base 13: mod_base = OTHER; note = 2'-O-methylguanosine-3'-phosphate
  modified_base 14: mod_base = OTHER; note = 2'-deoxy-2'-fluoroguanosine-3'-phosphate
  modified_base 15: mod_base = OTHER; note = 2'-O-methyluridine-3'-phosphate
  modified_base 16: mod_base = OTHER; note = 2'-deoxy-2'-fluoroadenosine-3'-phosphate
  modified_base 17: mod_base = OTHER; note = 2'-O-methylcytidine-3'-phosphate
  modified_base 18: mod_base = OTHER; note = 2'-O-methylcytidine-3'-phosphate
  modified_base 19: mod_base = OTHER; note = 2'-O-methylcytidine-3'-phosphate
  modified_base 20: mod_base = OTHER; note = 2'-O-methyluridine-3'-phosphate
  modified_base 21: mod_base = OTHER; note = 2'-O-methylcytidine-3'-phosphorothioate
  modified_base 22: mod_base = OTHER; note = 2'-O-methyluridine-3'-phosphorothioate
  modified_base 23: mod_base = OTHER; note = 2'-O-methylcytidine
tagggcatacctggtaccctctc

SEQ ID NO: 2741 - RNA, 23 nt, synthetic construct
  source 1..23: mol_type = other RNA
  modified_base 1: mod_base = OTHER; note = 2'-O-methyluridine-3'-phosphorothioate 5'-(E)-Vinylphosphonate
  modified_base 2: mod_base = OTHER; note = 2'-deoxy-2'-fluorocytidine-3'-phosphorothioate
  modified_base 3: mod_base = OTHER; note = 2'-O-methylguanosine-3'-phosphate
  modified_base 4: mod_base = OTHER; note = 2'-O-methylguanosine-3'-phosphate
  modified_base 5: mod_base = OTHER; note = 2'-O-methylcytidine-3'-phosphate
  modified_base 6: mod_base = OTHER; note = 2'-deoxy-2'-fluoroadenosine-3'-phosphate
  modified_base 7: mod_base = OTHER; note = 2'-O-methylcytidine-3'-phosphate
  modified_base 8: mod_base = OTHER; note = 2'-deoxy-2'-fluorouridine-3'-phosphate
  modified_base 9: mod_base = OTHER; note = 2'-deoxy-2'-fluorocytidine-3'-phosphate
  modified_base 10: mod_base = OTHER; note = 2'-O-methylguanosine-3'-phosphate
  modified_base 11: mod_base = OTHER; note = 2'-O-methyladenosine-3'-phosphate
  modified_base 12: mod_base = OTHER; note = 2'-O-methyluridine-3'-phosphate
  modified_base 13: mod_base = OTHER; note = 2'-O-methylguanosine-3'-phosphate
  modified_base 14: mod_base = OTHER; note = 2'-deoxy-2'-fluorouridine-3'-phosphate
  modified_base 15: mod_base = OTHER; note = 2'-O-methylcytidine-3'-phosphate
  modified_base 16: mod_base = OTHER; note = 2'-deoxy-2'-fluoroadenosine-3'-phosphate
  modified_base 17: mod_base = OTHER; note = 2'-O-methylguanosine-3'-phosphate
  modified_base 18: mod_base = OTHER; note = 2'-O-methylcytidine-3'-phosphate
  modified_base 19: mod_base = OTHER; note = 2'-O-methylcytidine-3'-phosphate
  modified_base 20: mod_base = OTHER; note = 2'-O-methyladenosine-3'-phosphate
  modified_base 21: mod_base = OTHER; note = 2'-O-methylguanosine-3'-phosphorothioate
  modified_base 22: mod_base = OTHER; note = 2'-O-methylcytidine-3'-phosphorothioate
  modified_base 23: mod_base = OTHER; note = 2'-O-methyladenosine
tcggcactcgatgtcagccagca

SEQ ID NO: 2742 - RNA, 23 nt, synthetic construct
  source 1..23: mol_type = other RNA
  modified_base 1: mod_base = OTHER; note = 2'-O-methyluridine-3'-phosphorothioate 5'-(E)-Vinylphosphonate
  modified_base 2: mod_base = OTHER; note = 2'-deoxy-2'-fluorouridine-3'-phosphorothioate
  modified_base 3: mod_base = OTHER; note = 2'-O-methylcytidine-3'-phosphate
  modified_base 4: mod_base = OTHER; note = 2'-O-methylcytidine-3'-phosphate
  modified_base 5: mod_base = OTHER; note = 2'-O-methyladenosine-3'-phosphate
  modified_base 6: mod_base = OTHER; note = 2'-deoxy-2'-fluoroguanosine-3'-phosphate
  modified_base 7: mod_base = OTHER; note = 2'-O-methylcytidine-3'-phosphate
  modified_base 8: mod_base = OTHER; note = 2'-deoxy-2'-fluoroguanosine-3'-phosphate
  modified_base 9: mod_base = OTHER; note = 2'-deoxy-2'-fluoroguanosine-3'-phosphate
  modified_base 10: mod_base = OTHER; note = 2'-O-methylcytidine-3'-phosphate
  modified_base 11: mod_base = OTHER; note = 2'-O-methyladenosine-3'-phosphate
  modified_base 12: mod_base = OTHER; note = 2'-O-methyluridine-3'-phosphate
  modified_base 13: mod_base = OTHER; note = 2'-O-methylguanosine-3'-phosphate
  modified_base 14: mod_base = OTHER; note = 2'-deoxy-2'-fluorouridine-3'-phosphate
  modified_base 15: mod_base = OTHER; note = 2'-O-methylcytidine-3'-phosphate
  modified_base 16: mod_base = OTHER; note = 2'-deoxy-2'-fluoroguanosine-3'-phosphate
  modified_base 17: mod_base = OTHER; note = 2'-O-methylguanosine-3'-phosphate
  modified_base 18: mod_base = OTHER; note = 2'-O-methylguanosine-3'-phosphate
  modified_base 19: mod_base = OTHER; note = 2'-O-methyladenosine-3'-phosphate
  modified_base 20: mod_base = OTHER; note = 2'-O-methyladenosine-3'-phosphate
  modified_base 21: mod_base = OTHER; note = 2'-O-methylguanosine-3'-phosphorothioate
  modified_base 22: mod_base = OTHER; note = 2'-O-methylcytidine-3'-phosphorothioate
  modified_base 23: mod_base = OTHER; note = 2'-O-methyluridine
ttccagcggcatgtcgggaagct

SEQ ID NO: 2743 - RNA, 23 nt, synthetic construct
  source 1..23: mol_type = other RNA
  modified_base 1: mod_base = OTHER; note = 2'-O-methyluridine-3'-phosphorothioate 5'-(E)-Vinylphosphonate
  modified_base 2: mod_base = OTHER; note = 2'-deoxy-2'-fluoroadenosine-3'-phosphorothioate
  modified_base 3: mod_base = OTHER; note = 2'-O-methyluridine-3'-phosphate
  modified_base 4: mod_base = OTHER; note = 2'-O-methylguanosine-3'-phosphate
  modified_base 5: mod_base = OTHER; note = 2'-O-methylcytidine-3'-phosphate
  modified_base 6: mod_base = OTHER; note = 2'-deoxy-2'-fluoroguanosine-3'-phosphate
  modified_base 7: mod_base = OTHER; note = 2'-O-methylguanosine-3'-phosphate
  modified_base 8: mod_base = OTHER; note = 2'-deoxy-2'-fluorouridine-3'-phosphate
  modified_base 9: mod_base = OTHER; note = 2'-deoxy-2'-fluorocytidine-3'-phosphate
  modified_base 10: mod_base = OTHER; note = 2'-O-methyladenosine-3'-phosphate
  modified_base 11: mod_base = OTHER; note = 2'-O-methylcytidine-3'-phosphate
  modified_base 12: mod_base = OTHER; note = 2'-O-methyladenosine-3'-phosphate
  modified_base 13: mod_base = OTHER; note = 2'-O-methylguanosine-3'-phosphate
  modified_base 14: mod_base = OTHER; note = 2'-deoxy-2'-fluorouridine-3'-phosphate
  modified_base 15: mod_base = OTHER; note = 2'-O-methylcytidine-3'-phosphate
  modified_base 16: mod_base = OTHER; note = 2'-deoxy-2'-fluorocytidine-3'-phosphate
  modified_base 17: mod_base = OTHER; note = 2'-O-methyladenosine-3'-phosphate
  modified_base 18: mod_base = OTHER; note = 2'-O-methylcytidine-3'-phosphate
  modified_base 19: mod_base = OTHER; note = 2'-O-methylcytidine-3'-phosphate
  modified_base 20: mod_base = OTHER; note = 2'-O-methyluridine-3'-phosphate
  modified_base 21: mod_base = OTHER; note = 2'-O-methylguanosine-3'-phosphorothioate
  modified_base 22: mod_base = OTHER; note = 2'-O-methylcytidine-3'-phosphorothioate
  modified_base 23: mod_base = OTHER; note = 2'-O-methyluridine
tatgcggtcacagtccacctgct

SEQ ID NO: 2744 - RNA, 23 nt, synthetic construct
  source 1..23: mol_type = other RNA
  modified_base 1: mod_base = OTHER; note = 2'-O-methyluridine-3'-phosphorothioate 5'-(E)-Vinylphosphonate
  modified_base 2: mod_base = OTHER; note = 2'-deoxy-2'-fluoroguanosine-3'-phosphorothioate
  modified_base 3: mod_base = OTHER; note = 2'-O-methyladenosine-3'-phosphate
  modified_base 4: mod_base = OTHER; note = 2'-O-methylcytidine-3'-phosphate
  modified_base 5: mod_base = OTHER; note = 2'-O-methyluridine-3'-phosphate
  modified_base 6: mod_base = OTHER; note = 2'-deoxy-2'-fluorocytidine-3'-phosphate
  modified_base 7: mod_base = OTHER; note = 2'-O-methyluridine-3'-phosphate
  modified_base 8: mod_base = OTHER; note = 2'-deoxy-2'-fluoroguanosine-3'-phosphate
  modified_base 9: mod_base = OTHER; note = 2'-deoxy-2'-fluorouridine-3'-phosphate
  modified_base 10: mod_base = OTHER; note = 2'-O-methyluridine-3'-phosphate
  modified_base 11: mod_base = OTHER; note = 2'-O-methylguanosine-3'-phosphate
  modified_base 12: mod_base = OTHER; note = 2'-O-methylguanosine-3'-phosphate
  modified_base 13: mod_base = OTHER; note = 2'-O-methylcytidine-3'-phosphate
  modified_base 14: mod_base = OTHER; note = 2'-deoxy-2'-fluorouridine-3'-phosphate
  modified_base 15: mod_base = OTHER; note = 2'-O-methylguanosine-3'-phosphate
  modified_base 16: mod_base = OTHER; note = 2'-deoxy-2'-fluorouridine-3'-phosphate
  modified_base 17: mod_base = OTHER; note = 2'-O-methyluridine-3'-phosphate
  modified_base 18: mod_base = OTHER; note = 2'-O-methylguanosine-3'-phosphate
  modified_base 19: mod_base = OTHER; note = 2'-O-methylguanosine-3'-phosphate
  modified_base 20: mod_base = OTHER; note = 2'-O-methylcytidine-3'-phosphate
  modified_base 21: mod_base = OTHER; note = 2'-O-methylguanosine-3'-phosphorothioate
  modified_base 22: mod_base = OTHER; note = 2'-O-methylcytidine-3'-phosphorothioate
  modified_base 23: mod_base = OTHER; note = 2'-O-methyladenosine
tgactctgttggctgttggcgca

SEQ ID NO: 2745 - RNA, 23 nt, synthetic construct
  source 1..23: mol_type = other RNA
  modified_base 1: mod_base = OTHER; note = 2'-O-methyluridine-3'-phosphorothioate 5'-(E)-Vinylphosphonate
  modified_base 2: mod_base = OTHER; note = 2'-deoxy-2'-fluorocytidine-3'-phosphorothioate
  modified_base 3: mod_base = OTHER; note = 2'-O-methyladenosine-3'-phosphate
  modified_base 4: mod_base = OTHER; note = 2'-O-methylguanosine-3'-phosphate
  modified_base 5: mod_base = OTHER; note = 2'-O-methylcytidine-3'-phosphate
  modified_base 6: mod_base = OTHER; note = 2'-deoxy-2'-fluorouridine-3'-phosphate
  modified_base 7: mod_base = OTHER; note = 2'-O-methylcytidine-3'-phosphate
  modified_base 8: mod_base = OTHER; note = 2'-deoxy-2'-fluoroguanosine-3'-phosphate
  modified_base 9: mod_base = OTHER; note = 2'-deoxy-2'-fluorouridine-3'-phosphate
  modified_base 10: mod_base = OTHER; note = 2'-O-methyladenosine-3'-phosphate
  modified_base 11: mod_base = OTHER; note = 2'-O-methylguanosine-3'-phosphate
  modified_base 12: mod_base = OTHER; note = 2'-O-methyluridine-3'-phosphate
  modified_base 13: mod_base = OTHER; note = 2'-O-methylcytidine-3'-phosphate
  modified_base 14: mod_base = OTHER; note = 2'-deoxy-2'-fluoroguanosine-3'-phosphate
  modified_base 15: mod_base = OTHER; note = 2'-O-methyluridine-3'-phosphate
  modified_base 16: mod_base = OTHER; note = 2'-deoxy-2'-fluoroguanosine-3'-phosphate
  modified_base 17: mod_base = OTHER; note = 2'-O-methyladenosine-3'-phosphate
  modified_base 18: mod_base = OTHER; note = 2'-O-methylcytidine-3'-phosphate
  modified_base 19: mod_base = OTHER; note = 2'-O-methyladenosine-3'-phosphate
  modified_base 20: mod_base = OTHER; note = 2'-O-methylguanosine-3'-phosphate
  modified_base 21: mod_base = OTHER; note = 2'-O-methyladenosine-3'-phosphorothioate
  modified_base 22: mod_base = OTHER; note = 2'-O-methylguanosine-3'-phosphorothioate
  modified_base 23: mod_base = OTHER; note = 2'-O-methylcytidine
tcagctcgtagtcgtgacagagc

SEQ ID NO: 2746 - RNA, 23 nt, synthetic construct
  source 1..23: mol_type = other RNA
  modified_base 1: mod_base = OTHER; note = 2'-O-methyluridine-3'-phosphorothioate 5'-(E)-Vinylphosphonate
  modified_base 2: mod_base = OTHER; note = 2'-deoxy-2'-fluoroguanosine-3'-phosphorothioate
  modified_base 3: mod_base = OTHER; note = 2'-O-methylcytidine-3'-phosphate
  modified_base 4: mod_base = OTHER; note = 2'-O-methyladenosine-3'-phosphate
  modified_base 5: mod_base = OTHER; note = 2'-O-methylcytidine-3'-phosphate
  modified_base 6: mod_base = OTHER; note = 2'-deoxy-2'-fluoroguanosine-3'-phosphate
  modified_base 7: mod_base = OTHER; note = 2'-O-methyluridine-3'-phosphate
  modified_base 8: mod_base = OTHER; note = 2'-deoxy-2'-fluoroadenosine-3'-phosphate
  modified_base 9: mod_base = OTHER; note = 2'-deoxy-2'-fluorouridine-3'-phosphate
  modified_base 10: mod_base = OTHER; note = 2'-O-methyluridine-3'-phosphate
  modified_base 11: mod_base = OTHER; note = 2'-O-methylcytidine-3'-phosphate
  modified_base 12: mod_base = OTHER; note = 2'-O-methylguanosine-3'-phosphate
  modified_base 13: mod_base = OTHER; note = 2'-O-methylcytidine-3'-phosphate
  modified_base 14: mod_base = OTHER; note = 2'-deoxy-2'-fluoroadenosine-3'-phosphate
  modified_base 15: mod_base = OTHER; note = 2'-O-methylguanosine-3'-phosphate
  modified_base 16: mod_base = OTHER; note = 2'-deoxy-2'-fluorocytidine-3'-phosphate
  modified_base 17: mod_base = OTHER; note = 2'-O-methyladenosine-3'-phosphate
  modified_base 18: mod_base = OTHER; note = 2'-O-methylguanosine-3'-phosphate
  modified_base 19: mod_base = OTHER; note = 2'-O-methyladenosine-3'-phosphate
  modified_base 20: mod_base = OTHER; note = 2'-O-methylguanosine-3'-phosphate
  modified_base 21: mod_base = OTHER; note = 2'-O-methyladenosine-3'-phosphorothioate
  modified_base 22: mod_base = OTHER; note = 2'-O-methyladenosine-3'-phosphorothioate
  modified_base 23: mod_base = OTHER; note = 2'-O-methylcytidine
tgcacgtattcgcagcagagaac

SEQ ID NO: 2747 - RNA, 23 nt, synthetic construct
  source 1..23: mol_type = other RNA
  modified_base 1: mod_base = OTHER; note = 2'-O-methyluridine-3'-phosphorothioate 5'-(E)-Vinylphosphonate
  modified_base 2: mod_base = OTHER; note = 2'-deoxy-2'-fluorouridine-3'-phosphorothioate
  modified_base 3: mod_base = OTHER; note = 2'-O-methyladenosine-3'-phosphate
  modified_base 4: mod_base = OTHER; note = 2'-O-methylguanosine-3'-phosphate
  modified_base 5: mod_base = OTHER; note = 2'-O-methylguanosine-3'-phosphate
  modified_base 6: mod_base = OTHER; note = 2'-deoxy-2'-fluorocytidine-3'-phosphate
  modified_base 7: mod_base = OTHER; note = 2'-O-methyladenosine-3'-phosphate
  modified_base 8: mod_base = OTHER; note = 2'-deoxy-2'-fluorocytidine-3'-phosphate
  modified_base 9: mod_base = OTHER; note = 2'-deoxy-2'-fluoroadenosine-3'-phosphate
  modified_base 10: mod_base = OTHER; note = 2'-O-methylguanosine-3'-phosphate
  modified_base 11: mod_base = OTHER; note = 2'-O-methylcytidine-3'-phosphate
  modified_base 12: mod_base = OTHER; note = 2'-O-methyladenosine-3'-phosphate
  modified_base 13: mod_base = OTHER; note = 2'-O-methylguanosine-3'-phosphate
  modified_base 14: mod_base = OTHER; note = 2'-deoxy-2'-fluoroguanosine-3'-phosphate
  modified_base 15: mod_base = OTHER; note = 2'-O-methylcytidine-3'-phosphate
  modified_base 16: mod_base = OTHER; note = 2'-deoxy-2'-fluorouridine-3'-phosphate
  modified_base 17: mod_base = OTHER; note = 2'-O-methylcytidine-3'-phosphate
  modified_base 18: mod_base = OTHER; note = 2'-O-methylcytidine-3'-phosphate
  modified_base 19: mod_base = OTHER; note = 2'-O-methylguanosine-3'-phosphate
  modified_base 20: mod_base = OTHER; note = 2'-O-methyluridine-3'-phosphate
  modified_base 21: mod_base = OTHER; note = 2'-O-methylguanosine-3'-phosphorothioate
  modified_base 22: mod_base = OTHER; note = 2'-O-methylcytidine-3'-phosphorothioate
  modified_base 23: mod_base = OTHER; note = 2'-O-methyluridine
ttaggcacagcaggctccgtgct

SEQ ID NO: 2748 - RNA, 23 nt, synthetic construct
  source 1..23: mol_type = other RNA
  modified_base 1: mod_base = OTHER; note = 2'-O-methyluridine-3'-phosphorothioate 5'-(E)-Vinylphosphonate
  modified_base 2: mod_base = OTHER; note = 2'-deoxy-2'-fluorocytidine-3'-phosphorothioate
  modified_base 3: mod_base = OTHER; note = 2'-O-methyluridine-3'-phosphate
  modified_base 4: mod_base = OTHER; note = 2'-O-methyluridine-3'-phosphate
  modified_base 5: mod_base = OTHER; note = 2'-O-methyluridine-3'-phosphate
  modified_base 6: mod_base = OTHER; note = 2'-deoxy-2'-fluorouridine-3'-phosphate
  modified_base 7: mod_base = OTHER; note = 2'-O-methylcytidine-3'-phosphate
  modified_base 8: mod_base = OTHER; note = 2'-deoxy-2'-fluoroguanosine-3'-phosphate
  modified_base 9: mod_base = OTHER; note = 2'-deoxy-2'-fluoroguanosine-3'-phosphate
  modified_base 10: mod_base = OTHER; note = 2'-O-methyluridine-3'-phosphate
  modified_base 11: mod_base = OTHER; note = 2'-O-methyluridine-3'-phosphate
  modified_base 12: mod_base = OTHER; note = 2'-O-methylguanosine-3'-phosphate
  modified_base 13: mod_base = OTHER; note = 2'-O-methylcytidine-3'-phosphate
  modified_base 14: mod_base = OTHER; note = 2'-deoxy-2'-fluorouridine-3'-phosphate
  modified_base 15: mod_base = OTHER; note = 2'-O-methylguanosine-3'-phosphate
  modified_base 16: mod_base = OTHER; note = 2'-deoxy-2'-fluorouridine-3'-phosphate
  modified_base 17: mod_base = OTHER; note = 2'-O-methylguanosine-3'-phosphate
  modified_base 18: mod_base = OTHER; note = 2'-O-methylguanosine-3'-phosphate
  modified_base 19: mod_base = OTHER; note = 2'-O-methyluridine-3'-phosphate
  modified_base 20: mod_base = OTHER; note = 2'-O-methylcytidine-3'-phosphate
  modified_base 21: mod_base = OTHER; note = 2'-O-methyluridine-3'-phosphorothioate
  modified_base 22: mod_base = OTHER; note = 2'-O-methylguanosine-3'-phosphorothioate
  modified_base 23: mod_base = OTHER; note = 2'-O-methylguanosine
tcttttcggttgctgtggtctgg

SEQ ID NO: 2749 - RNA, 23 nt, synthetic construct
  source 1..23: mol_type = other RNA
  modified_base 1: mod_base = OTHER; note = 2'-O-methyluridine-3'-phosphorothioate 5'-(E)-Vinylphosphonate
  modified_base 2: mod_base = OTHER; note = 2'-deoxy-2'-fluorouridine-3'-phosphorothioate
  modified_base 3: mod_base = OTHER; note = 2'-O-methylguanosine-3'-phosphate
  modified_base 4: mod_base = OTHER; note = 2'-O-methylguanosine-3'-phosphate
  modified_base 5: mod_base = OTHER; note = 2'-O-methyladenosine-3'-phosphate
  modified_base 6: mod_base = OTHER; note = 2'-deoxy-2'-fluorocytidine-3'-phosphate
  modified_base 7: mod_base = OTHER; note = 2'-O-methylcytidine-3'-phosphate
  modified_base 8: mod_base = OTHER; note = 2'-deoxy-2'-fluorocytidine-3'-phosphate
  modified_base 9: mod_base = OTHER; note = 2'-deoxy-2'-fluoroadenosine-3'-phosphate
  modified_base 10: mod_base = OTHER; note = 2'-O-methylguanosine-3'-phosphate
  modified_base 11: mod_base = OTHER; note = 2'-O-methyluridine-3'-phosphate
  modified_base 12: mod_base = OTHER; note = 2'-O-methylcytidine-3'-phosphate
  modified_base 13: mod_base = OTHER; note = 2'-O-methyluridine-3'-phosphate
  modified_base 14: mod_base = OTHER; note = 2'-deoxy-2'-fluoroguanosine-3'-phosphate
  modified_base 15: mod_base = OTHER; note = 2'-O-methylcytidine-3'-phosphate
  modified_base 16: mod_base = OTHER; note = 2'-deoxy-2'-fluoroguanosine-3'-phosphate
  modified_base 17: mod_base = OTHER; note = 2'-O-methyladenosine-3'-phosphate
  modified_base 18: mod_base = OTHER; note = 2'-O-methylguanosine-3'-phosphate
  modified_base 19: mod_base = OTHER; note = 2'-O-methylguanosine-3'-phosphate
  modified_base 20: mod_base = OTHER; note = 2'-O-methyluridine-3'-phosphate
  modified_base 21: mod_base = OTHER; note = 2'-O-methylguanosine-3'-phosphorothioate
  modified_base 22: mod_base = OTHER; note = 2'-O-methyladenosine-3'-phosphorothioate
  modified_base 23: mod_base = OTHER; note = 2'-O-methylguanosine
ttggacccagtctgcgaggtgag

SEQ ID NO: 2750 - RNA, 23 nt, synthetic construct
  source 1..23: mol_type = other RNA
  modified_base 1: mod_base = OTHER; note = 2'-O-methyluridine-3'-phosphorothioate 5'-(E)-Vinylphosphonate
  modified_base 2: mod_base = OTHER; note = 2'-deoxy-2'-fluorouridine-3'-phosphorothioate
  modified_base 3: mod_base = OTHER; note = 2'-O-methylcytidine-3'-phosphate
  modified_base 4: mod_base = OTHER; note = 2'-O-methylcytidine-3'-phosphate
  modified_base 5: mod_base = OTHER; note = 2'-O-methyluridine-3'-phosphate
  modified_base 6: mod_base = OTHER; note = 2'-deoxy-2'-fluorocytidine-3'-phosphate
  modified_base 7: mod_base = OTHER; note = 2'-O-methyladenosine-3'-phosphate
  modified_base 8: mod_base = OTHER; note = 2'-deoxy-2'-fluorouridine-3'-phosphate
  modified_base 9: mod_base = OTHER; note = 2'-deoxy-2'-fluorocytidine-3'-phosphate
  modified_base 10: mod_base = OTHER; note = 2'-O-methyladenosine-3'-phosphate
  modified_base 11: mod_base = OTHER; note = 2'-O-methyladenosine-3'-phosphate
  modified_base 12: mod_base = OTHER; note = 2'-O-methyladenosine-3'-phosphate
  modified_base 13: mod_base = OTHER; note = 2'-O-methylcytidine-3'-phosphate
  modified_base 14: mod_base = OTHER; note = 2'-deoxy-2'-fluorocytidine-3'-phosphate
  modified_base 15: mod_base = OTHER; note = 2'-O-methyladenosine-3'-phosphate
  modified_base 16: mod_base = OTHER; note = 2'-deoxy-2'-fluorocytidine-3'-phosphate
  modified_base 17: mod_base = OTHER; note = 2'-O-methyluridine-3'-phosphate
  modified_base 18: mod_base = OTHER; note = 2'-O-methylcytidine-3'-phosphate
  modified_base 19: mod_base = OTHER; note = 2'-O-methyluridine-3'-phosphate
  modified_base 20: mod_base = OTHER; note = 2'-O-methylguanosine-3'-phosphate
  modified_base 21: mod_base = OTHER; note = 2'-O-methyluridine-3'-phosphorothioate
  modified_base 22: mod_base = OTHER; note = 2'-O-methylcytidine-3'-phosphorothioate
  modified_base 23: mod_base = OTHER; note = 2'-O-methylcytidine
ttcctcatcaaaccactctgtcc

SEQ ID NO: 2751 - RNA, 23 nt, synthetic construct
  source 1..23: mol_type = other RNA
  modified_base 1: mod_base = OTHER; note = 2'-O-methyluridine-3'-phosphorothioate 5'-(E)-Vinylphosphonate
  modified_base 2: mod_base = OTHER; note = 2'-deoxy-2'-fluorouridine-3'-phosphorothioate
  modified_base 3: mod_base = OTHER; note = 2'-O-methyluridine-3'-phosphate
  modified_base 4: mod_base = OTHER; note = 2'-O-methyladenosine-3'-phosphate
  modified_base 5: mod_base = OTHER; note = 2'-O-methyluridine-3'-phosphate
  modified_base 6: mod_base = OTHER; note = 2'-deoxy-2'-fluorocytidine-3'-phosphate
  modified_base 7: mod_base = OTHER; note = 2'-O-methylguanosine-3'-phosphate
  modified_base 8: mod_base = OTHER; note = 2'-deoxy-2'-fluorouridine-3'-phosphate
  modified_base 9: mod_base = OTHER; note = 2'-deoxy-2'-fluoroadenosine-3'-phosphate
  modified_base 10: mod_base = OTHER; note = 2'-O-methylguanosine-3'-phosphate
  modified_base 11: mod_base = OTHER; note = 2'-O-methylguanosine-3'-phosphate
  modified_base 12: mod_base = OTHER; note = 2'-O-methyladenosine-3'-phosphate
  modified_base 13: mod_base = OTHER; note = 2'-O-methylcytidine-3'-phosphate
  modified_base 14: mod_base = OTHER; note = 2'-deoxy-2'-fluorouridine-3'-phosphate
  modified_base 15: mod_base = OTHER; note = 2'-O-methylcytidine-3'-phosphate
  modified_base 16: mod_base = OTHER; note = 2'-deoxy-2'-fluoroadenosine-3'-phosphate
  modified_base 17: mod_base = OTHER; note = 2'-O-methyladenosine-3'-phosphate
  modified_base 18: mod_base = OTHER; note = 2'-O-methylcytidine-3'-phosphate
  modified_base 19: mod_base = OTHER; note = 2'-O-methylguanosine-3'-phosphate
  modified_base 20: mod_base = OTHER; note = 2'-O-methyluridine-3'-phosphate
  modified_base 21: mod_base = OTHER; note = 2'-O-methylcytidine-3'-phosphorothioate
  modified_base 22: mod_base = OTHER; note = 2'-O-methylcytidine-3'-phosphorothioate
  modified_base 23: mod_base = OTHER; note = 2'-O-methylcytidine
tttatcgtaggactcaacgtccc

SEQ ID NO: 2752 - RNA, 23 nt, synthetic construct
  source 1..23: mol_type = other RNA
  modified_base 1: mod_base = OTHER; note = 2'-O-methyluridine-3'-phosphorothioate 5'-(E)-Vinylphosphonate
  modified_base 2: mod_base = OTHER; note = 2'-deoxy-2'-fluoroadenosine-3'-phosphorothioate
  modified_base 3: mod_base = OTHER; note = 2'-O-methyluridine-3'-phosphate
  modified_base 4: mod_base = OTHER; note = 2'-O-methyladenosine-3'-phosphate
  modified_base 5: mod_base = OTHER; note = 2'-O-methyladenosine-3'-phosphate
  modified_base 6: mod_base = OTHER; note = 2'-deoxy-2'-fluoroguanosine-3'-phosphate
  modified_base 7: mod_base = OTHER; note = 2'-O-methyluridine-3'-phosphate
  modified_base 8: mod_base = OTHER; note = 2'-deoxy-2'-fluoroguanosine-3'-phosphate
  modified_base 9: mod_base = OTHER; note = 2'-deoxy-2'-fluorocytidine-3'-phosphate
  modified_base 10: mod_base = OTHER; note = 2'-O-methylcytidine-3'-phosphate
  modified_base 11: mod_base = OTHER; note = 2'-O-methylcytidine-3'-phosphate
  modified_base 12: mod_base = OTHER; note = 2'-O-methyluridine-3'-phosphate
  modified_base 13: mod_base = OTHER; note = 2'-O-methylcytidine-3'-phosphate
  modified_base 14: mod_base = OTHER; note = 2'-deoxy-2'-fluorocytidine-3'-phosphate
  modified_base 15: mod_base = OTHER; note = 2'-O-methyladenosine-3'-phosphate
  modified_base 16: mod_base = OTHER; note = 2'-deoxy-2'-fluoroguanosine-3'-phosphate
  modified_base 17: mod_base = OTHER; note = 2'-O-methylcytidine-3'-phosphate
  modified_base 18: mod_base = OTHER; note = 2'-O-methylguanosine-3'-phosphate
  modified_base 19: mod_base = OTHER; note = 2'-O-methylguanosine-3'-phosphate
  modified_base 20: mod_base = OTHER; note = 2'-O-methylcytidine-3'-phosphate
  modified_base 21: mod_base = OTHER; note = 2'-O-methylcytidine-3'-phosphorothioate
  modified_base 22: mod_base = OTHER; note = 2'-O-methylcytidine-3'-phosphorothioate
  modified_base 23: mod_base = OTHER; note = 2'-O-methyluridine
tataagtgccctccagcggccct

SEQ ID NO: 2753 - RNA, 23 nt, synthetic construct
  source 1..23: mol_type = other RNA
  modified_base 1: mod_base = OTHER; note = 2'-O-methyluridine-3'-phosphorothioate 5'-(E)-Vinylphosphonate
  modified_base 2: mod_base = OTHER; note = 2'-deoxy-2'-fluorocytidine-3'-phosphorothioate
  modified_base 3: mod_base = OTHER; note = 2'-O-methyladenosine-3'-phosphate
  modified_base 4: mod_base = OTHER; note = 2'-O-methylcytidine-3'-phosphate
  modified_base 5: mod_base = OTHER; note = 2'-O-methyluridine-3'-phosphate
  modified_base 6: mod_base = OTHER; note = 2'-deoxy-2'-fluorocytidine-3'-phosphate
  modified_base 7: mod_base = OTHER; note = 2'-O-methyluridine-3'-phosphate
  modified_base 8: mod_base = OTHER; note = 2'-deoxy-2'-fluoroadenosine-3'-phosphate
  modified_base 9: mod_base = OTHER; note = 2'-deoxy-2'-fluorouridine-3'-phosphate
  modified_base 10: mod_base = OTHER; note = 2'-O-methylguanosine-3'-phosphate
  modified_base 11: mod_base = OTHER; note = 2'-O-methyluridine-3'-phosphate
  modified_base 12: mod_base = OTHER; note = 2'-O-methylcytidine-3'-phosphate
  modified_base 13: mod_base = OTHER; note = 2'-O-methylcytidine-3'-phosphate
  modified_base 14: mod_base = OTHER; note = 2'-deoxy-2'-fluorouridine-3'-phosphate
  modified_base 15: mod_base = OTHER; note = 2'-O-methyluridine-3'-phosphate
  modified_base 16: mod_base = OTHER; note = 2'-deoxy-2'-fluoroadenosine-3'-phosphate
  modified_base 17: mod_base = OTHER; note = 2'-O-methylguanosine-3'-phosphate
  modified_base 18: mod_base = OTHER; note = 2'-O-methylguanosine-3'-phosphate
  modified_base 19: mod_base = OTHER; note = 2'-O-methylcytidine-3'-phosphate
  modified_base 20: mod_base = OTHER; note = 2'-O-methyluridine-3'-phosphate
  modified_base 21: mod_base = OTHER; note = 2'-O-methylguanosine-3'-phosphorothioate
  modified_base 22: mod_base = OTHER; note = 2'-O-methylcytidine-3'-phosphorothioate
  modified_base 23: mod_base = OTHER; note = 2'-O-methyluridine
tcactctatgtccttaggctgct

SEQ ID NO: 2754 - RNA, 23 nt, synthetic construct
  source 1..23: mol_type = other RNA
  modified_base 1: mod_base = OTHER; note = 2'-O-methyluridine-3'-phosphorothioate 5'-(E)-Vinylphosphonate
  modified_base 2: mod_base = OTHER; note = 2'-deoxy-2'-fluoroadenosine-3'-phosphorothioate
  modified_base 3: mod_base = OTHER; note = 2'-O-methylcytidine-3'-phosphate
  modified_base 4: mod_base = OTHER; note = 2'-O-methylcytidine-3'-phosphate
  modified_base 5: mod_base = OTHER; note = 2'-O-methyluridine-3'-phosphate
  modified_base 6: mod_base = OTHER; note = 2'-deoxy-2'-fluoroguanosine-3'-phosphate
  modified_base 7: mod_base = OTHER; note = 2'-O-methyluridine-3'-phosphate
  modified_base 8: mod_base = OTHER; note = 2'-deoxy-2'-fluoroguanosine-3'-phosphate
  modified_base 9: mod_base = OTHER; note = 2'-deoxy-2'-fluorocytidine-3'-phosphate
  modified_base 10: mod_base = OTHER; note = 2'-O-methylcytidine-3'-phosphate
  modified_base 11: mod_base = OTHER; note = 2'-O-methyladenosine-3'-phosphate
  modified_base 12: mod_base = OTHER; note = 2'-O-methylguanosine-3'-phosphate
  modified_base 13: mod_base = OTHER; note = 2'-O-methylguanosine-3'-phosphate
  modified_base 14: mod_base = OTHER; note = 2'-deoxy-2'-fluoroguanosine-3'-phosphate
  modified_base 15: mod_base = OTHER; note = 2'-O-methyluridine-3'-phosphate
  modified_base 16: mod_base = OTHER; note = 2'-deoxy-2'-fluorocytidine-3'-phosphate
  modified_base 17: mod_base = OTHER; note = 2'-O-methylcytidine-3'-phosphate
  modified_base 18: mod_base = OTHER; note = 2'-O-methyladenosine-3'-phosphate
  modified_base 19: mod_base = OTHER; note = 2'-O-methylguanosine-3'-phosphate
  modified_base 20: mod_base = OTHER; note = 2'-O-methyluridine-3'-phosphate
  modified_base 21: mod_base = OTHER; note = 2'-O-methyluridine-3'-phosphorothioate
  modified_base 22: mod_base = OTHER; note = 2'-O-methylguanosine-3'-phosphorothioate
  modified_base 23: mod_base = OTHER; note = 2'-O-methylguanosine
tacctgtgccagggtccagttgg

SEQ ID NO: 2755 - RNA, 23 nt, synthetic construct
  source 1..23: mol_type = other RNA
  modified_base 1: mod_base = OTHER; note = 2'-O-methyluridine-3'-phosphorothioate 5'-(E)-Vinylphosphonate
  modified_base 2: mod_base = OTHER; note = 2'-deoxy-2'-fluoroadenosine-3'-phosphorothioate
  modified_base 3: mod_base = OTHER; note = 2'-O-methyladenosine-3'-phosphate
  modified_base 4: mod_base = OTHER; note = 2'-O-methylguanosine-3'-phosphate
  modified_base 5: mod_base = OTHER; note = 2'-O-methyluridine-3'-phosphate
  modified_base 6: mod_base = OTHER; note = 2'-deoxy-2'-fluoroguanosine-3'-phosphate
  modified_base 7: mod_base = OTHER; note = 2'-O-methylguanosine-3'-phosphate
  modified_base 8: mod_base = OTHER; note = 2'-deoxy-2'-fluoroadenosine-3'-phosphate
  modified_base 9: mod_base = OTHER; note = 2'-deoxy-2'-fluorocytidine-3'-phosphate
  modified_base 10: mod_base = OTHER; note = 2'-O-methylguanosine-3'-phosphate
  modified_base 11: mod_base = OTHER; note = 2'-O-methyluridine-3'-phosphate
  modified_base 12: mod_base = OTHER; note = 2'-O-methylcytidine-3'-phosphate
  modified_base 13: mod_base = OTHER; note = 2'-O-methyladenosine-3'-phosphate
  modified_base 14: mod_base = OTHER; note = 2'-deoxy-2'-fluorocytidine-3'-phosphate
  modified_base 15: mod_base = OTHER; note = 2'-O-methyladenosine-3'-phosphate
  modified_base 16: mod_base = OTHER; note = 2'-deoxy-2'-fluoroguanosine-3'-phosphate
  modified_base 17: mod_base = OTHER; note = 2'-O-methyluridine-3'-phosphate
  modified_base 18: mod_base = OTHER; note = 2'-O-methylguanosine-3'-phosphate
  modified_base 19: mod_base = OTHER; note = 2'-O-methylcytidine-3'-phosphate
  modified_base 20: mod_base = OTHER; note = 2'-O-methyladenosine-3'-phosphate
  modified_base 21: mod_base = OTHER; note = 2'-O-methylcytidine-3'-phosphorothioate
  modified_base 22: mod_base = OTHER; note = 2'-O-methylcytidine-3'-phosphorothioate
  modified_base 23: mod_base = OTHER; note = 2'-O-methyluridine
taagtggacgtcacagtgcacct

SEQ ID NO: 2756 - RNA, 23 nt, synthetic construct
  source 1..23: mol_type = other RNA
  modified_base 1: mod_base = OTHER; note = 2'-O-methyluridine-3'-phosphorothioate 5'-(E)-Vinylphosphonate
  modified_base 2: mod_base = OTHER; note = 2'-deoxy-2'-fluorocytidine-3'-phosphorothioate
  modified_base 3: mod_base = OTHER; note = 2'-O-methylcytidine-3'-phosphate
  modified_base 4: mod_base = OTHER; note = 2'-O-methyluridine-3'-phosphate
  modified_base 5: mod_base = OTHER; note = 2'-O-methylguanosine-3'-phosphate
  modified_base 6: mod_base = OTHER; note = 2'-deoxy-2'-fluorocytidine-3'-phosphate
  modified_base 7: mod_base = OTHER; note = 2'-O-methyluridine-3'-phosphate
  modified_base 8: mod_base = OTHER; note = 2'-deoxy-2'-fluorocytidine-3'-phosphate
  modified_base 9: mod_base = OTHER; note = 2'-deoxy-2'-fluorocytidine-3'-phosphate
  modified_base 10: mod_base = OTHER; note = 2'-O-methylcytidine-3'-phosphate
  modified_base 11: mod_base = OTHER; note = 2'-O-methyladenosine-3'-phosphate
  modified_base 12: mod_base = OTHER; note = 2'-O-methylguanosine-3'-phosphate
  modified_base 13: mod_base = OTHER; note = 2'-O-methyluridine-3'-phosphate
  modified_base 14: mod_base = OTHER; note = 2'-deoxy-2'-fluorouridine-3'-phosphate
  modified_base 15: mod_base = OTHER; note = 2'-O-methylcytidine-3'-phosphate
  modified_base 16: mod_base = OTHER; note = 2'-deoxy-2'-fluorocytidine-3'-phosphate
  modified_base 17: mod_base = OTHER; note = 2'-O-methyluridine-3'-phosphate
  modified_base 18: mod_base = OTHER; note = 2'-O-methylguanosine-3'-phosphate
  modified_base 19: mod_base = OTHER; note = 2'-O-methylcytidine-3'-phosphate
  modified_base 20: mod_base = OTHER; note = 2'-O-methyladenosine-3'-phosphate
  modified_base 21: mod_base = OTHER; note = 2'-O-methylcytidine-3'-phosphorothioate
  modified_base 22: mod_base = OTHER; note = 2'-O-methyladenosine-3'-phosphorothioate
  modified_base 23: mod_base = OTHER; note = 2'-O-methylcytidine
tcctgctcccagttcctgcacac

SEQ ID NO: 2757 - RNA, 23 nt, synthetic construct
  source 1..23: mol_type = other RNA
  modified_base 1: mod_base = OTHER; note = 2'-O-methyluridine-3'-phosphorothioate 5'-(E)-Vinylphosphonate
  modified_base 2: mod_base = OTHER; note = 2'-deoxy-2'-fluorouridine-3'-phosphorothioate
  modified_base 3: mod_base = OTHER; note = 2'-O-methylguanosine-3'-phosphate
  modified_base 4: mod_base = OTHER; note = 2'-O-methyluridine-3'-phosphate
  modified_base 5: mod_base = OTHER; note = 2'-O-methyladenosine-3'-phosphate
  modified_base 6: mod_base = OTHER; note = 2'-deoxy-2'-fluoroguanosine-3'-phosphate
  modified_base 7: mod_base = OTHER; note = 2'-O-methylcytidine-3'-phosphate
  modified_base 8: mod_base = OTHER; note = 2'-deoxy-2'-fluoroadenosine-3'-phosphate
  modified_base 9: mod_base = OTHER; note = 2'-deoxy-2'-fluorocytidine-3'-phosphate
  modified_base 10: mod_base = OTHER; note = 2'-O-methyladenosine-3'-phosphate
  modified_base 11: mod_base = OTHER; note = 2'-O-methyluridine-3'-phosphate
  modified_base 12: mod_base = OTHER; note = 2'-O-methylcytidine-3'-phosphate
  modified_base 13: mod_base = OTHER; note = 2'-O-methyluridine-3'-phosphate
  modified_base 14: mod_base = OTHER; note = 2'-deoxy-2'-fluorouridine-3'-phosphate
  modified_base 15: mod_base = OTHER; note = 2'-O-methylguanosine-3'-phosphate
  modified_base 16: mod_base = OTHER; note = 2'-deoxy-2'-fluoroadenosine-3'-phosphate
  modified_base 17: mod_base = OTHER; note = 2'-O-methyladenosine-3'-phosphate
  modified_base 18: mod_base = OTHER; note = 2'-O-methylguanosine-3'-phosphate
  modified_base 19: mod_base = OTHER; note = 2'-O-methyladenosine-3'-phosphate
  modified_base 20: mod_base = OTHER; note = 2'-O-methylcytidine-3'-phosphate
  modified_base 21: mod_base = OTHER; note = 2'-O-methylguanosine-3'-phosphorothioate
  modified_base 22: mod_base = OTHER; note = 2'-O-methylcytidine-3'-phosphorothioate
  modified_base 23: mod_base = OTHER; note = 2'-O-methylcytidine
ttgtagcacatcttgaagacgcc

SEQ ID NO: 2758 - RNA, 23 nt, synthetic construct
  source 1..23: mol_type = other RNA
  modified_base 1: mod_base = OTHER; note = 2'-O-methyluridine-3'-phosphorothioate 5'-(E)-Vinylphosphonate
  modified_base 2: mod_base = OTHER; note = 2'-deoxy-2'-fluoroadenosine-3'-phosphorothioate
  modified_base 3: mod_base = OTHER; note = 2'-O-methylguanosine-3'-phosphate
  modified_base 4: mod_base = OTHER; note = 2'-O-methyluridine-3'-phosphate
  modified_base 5: mod_base = OTHER; note = 2'-O-methylguanosine-3'-phosphate
  modified_base 6: mod_base = OTHER; note = 2'-deoxy-2'-fluoroguanosine-3'-phosphate
  modified_base 7: mod_base = OTHER; note = 2'-O-methyluridine-3'-phosphate
  modified_base 8: mod_base = OTHER; note = 2'-deoxy-2'-fluorocytidine-3'-phosphate
  modified_base 9: mod_base = OTHER; note = 2'-deoxy-2'-fluoroguanosine-3'-phosphate
  modified_base 10: mod_base = OTHER; note = 2'-O-methyluridine-3'-phosphate
  modified_base 11: mod_base = OTHER; note = 2'-O-methylcytidine-3'-phosphate
  modified_base 12: mod_base = OTHER; note = 2'-O-methyladenosine-3'-phosphate
  modified_base 13: mod_base = OTHER; note = 2'-O-methylcytidine-3'-phosphate
  modified_base 14: mod_base = OTHER; note = 2'-deoxy-2'-fluorouridine-3'-phosphate
  modified_base 15: mod_base = OTHER; note = 2'-O-methylguanosine-3'-phosphate
  modified_base 16: mod_base = OTHER; note = 2'-deoxy-2'-fluorocytidine-3'-phosphate
  modified_base 17: mod_base = OTHER; note = 2'-O-methyladenosine-3'-phosphate
  modified_base 18: mod_base = OTHER; note = 2'-O-methylguanosine-3'-phosphate
  modified_base 19: mod_base = OTHER; note = 2'-O-methylcytidine-3'-phosphate
  modified_base 20: mod_base = OTHER; note = 2'-O-methyladenosine-3'-phosphate
  modified_base 21: mod_base = OTHER; note = 2'-O-methylguanosine-3'-phosphorothioate
  modified_base 22: mod_base = OTHER; note = 2'-O-methyladenosine-3'-phosphorothioate
  modified_base 23: mod_base = OTHER; note = 2'-O-methylguanosine
tagtggtcgtcactgcagcagag

SEQ ID NO: 2759 - RNA, 23 nt, synthetic construct
  source 1..23: mol_type = other RNA
  modified_base 1: mod_base = OTHER; note = 2'-O-methyluridine-3'-phosphorothioate 5'-(E)-Vinylphosphonate
  modified_base 2: mod_base = OTHER; note = 2'-deoxy-2'-fluorocytidine-3'-phosphorothioate
  modified_base 3: mod_base = OTHER; note = 2'-O-methylguanosine-3'-phosphate
  modified_base 4: mod_base = OTHER; note = 2'-O-methyluridine-3'-phosphate
  modified_base 5: mod_base = OTHER; note = 2'-O-methylcytidine-3'-phosphate
  modified_base 6: mod_base = OTHER; note = 2'-deoxy-2'-fluorouridine-3'-phosphate
  modified_base 7: mod_base = OTHER; note = 2'-O-methylcytidine-3'-phosphate
  modified_base 8: mod_base = OTHER; note = 2'-deoxy-2'-fluorocytidine-3'-phosphate
  modified_base 9: mod_base = OTHER; note = 2'-deoxy-2'-fluoroadenosine-3'-phosphate
  modified_base 10: mod_base = OTHER; note = 2'-O-methylguanosine-3'-phosphate
  modified_base 11: mod_base = OTHER; note = 2'-O-methylcytidine-3'-phosphate
  modified_base 12: mod_base = OTHER; note = 2'-O-methyluridine-3'-phosphate
  modified_base 13: mod_base = OTHER; note = 2'-O-methylcytidine-3'-phosphate
  modified_base 14: mod_base = OTHER; note = 2'-deoxy-2'-fluorouridine-3'-phosphate
  modified_base 15: mod_base = OTHER; note = 2'-O-methylguanosine-3'-phosphate
  modified_base 16: mod_base = OTHER; note = 2'-deoxy-2'-fluorouridine-3'-phosphate
  modified_base 17: mod_base = OTHER; note = 2'-O-methylguanosine-3'-phosphate
  modified_base 18: mod_base = OTHER; note = 2'-O-methylguanosine-3'-phosphate
  modified_base 19: mod_base = OTHER; note = 2'-O-methyluridine-3'-phosphate
  modified_base 20: mod_base = OTHER; note = 2'-O-methylcytidine-3'-phosphate
  modified_base 21: mod_base = OTHER; note = 2'-O-methylguanosine-3'-phosphorothioate
  modified_base 22: mod_base = OTHER; note = 2'-O-methylguanosine-3'-phosphorothioate
  modified_base 23: mod_base = OTHER; note = 2'-O-methyluridine
tcgtctccagctctgtggtcggt

SEQ ID NO: 2760 - RNA, 23 nt, synthetic construct
  source 1..23: mol_type = other RNA
  modified_base 1: mod_base = OTHER; note = 2'-O-methyluridine-3'-phosphorothioate 5'-(E)-Vinylphosphonate
  modified_base 2: mod_base = OTHER; note = 2'-deoxy-2'-fluorouridine-3'-phosphorothioate
  modified_base 3: mod_base = OTHER; note = 2'-O-methylguanosine-3'-phosphate
  modified_base 4: mod_base = OTHER; note = 2'-O-methylcytidine-3'-phosphate
  modified_base 5: mod_base = OTHER; note = 2'-O-methylguanosine-3'-phosphate
  modified_base 6: mod_base = OTHER; note = 2'-deoxy-2'-fluoroguanosine-3'-phosphate
  modified_base 7: mod_base = OTHER; note = 2'-O-methylcytidine-3'-phosphate
  modified_base 8: mod_base = OTHER; note = 2'-deoxy-2'-fluoroguanosine-3'-phosphate
  modified_base 9: mod_base = OTHER; note = 2'-deoxy-2'-fluorouridine-3'-phosphate
  modified_base 10: mod_base = OTHER; note = 2'-O-methyluridine-3'-phosphate
  modified_base 11: mod_base = OTHER; note = 2'-O-methylguanosine-3'-phosphate
  modified_base 12: mod_base = OTHER; note = 2'-O-methyladenosine-3'-phosphate
  modified_base 13: mod_base = OTHER; note = 2'-O-methylguanosine-3'-phosphate
  modified_base 14: mod_base = OTHER; note = 2'-deoxy-2'-fluoroadenosine-3'-phosphate
  modified_base 15: mod_base = OTHER; note = 2'-O-methyladenosine-3'-phosphate
  modified_base 16: mod_base = OTHER; note = 2'-deoxy-2'-fluorocytidine-3'-phosphate
  modified_base 17: mod_base = OTHER; note = 2'-O-methyladenosine-3'-phosphate
  modified_base 18: mod_base = OTHER; note = 2'-O-methylguanosine-3'-phosphate
  modified_base 19: mod_base = OTHER; note = 2'-O-methylguanosine-3'-phosphate
  modified_base 20: mod_base = OTHER; note = 2'-O-methylguanosine-3'-phosphate
  modified_base 21: mod_base = OTHER; note = 2'-O-methylcytidine-3'-phosphorothioate
  modified_base 22: mod_base = OTHER; note = 2'-O-methylcytidine-3'-phosphorothioate
  modified_base 23: mod_base = OTHER; note = 2'-O-methyluridine
ttgcggcgttgagaacagggcct

SEQ ID NO: 2761 - RNA, 23 nt, synthetic construct
  source 1..23: mol_type = other RNA
  modified_base 1: mod_base = OTHER; note = 2'-O-methyluridine-3'-phosphorothioate 5'-(E)-Vinylphosphonate
  modified_base 2: mod_base = OTHER; note = 2'-deoxy-2'-fluoroadenosine-3'-phosphorothioate
  modified_base 3: mod_base = OTHER; note = 2'-O-methyluridine-3'-phosphate
  modified_base 4: mod_base = OTHER; note = 2'-O-methylguanosine-3'-phosphate
  modified_base 5: mod_base = OTHER; note = 2'-O-methyluridine-3'-phosphate
  modified_base 6: mod_base = OTHER; note = 2'-deoxy-2'-fluorocytidine-3'-phosphate
  modified_base 7: mod_base = OTHER; note = 2'-O-methyladenosine-3'-phosphate
  modified_base 8: mod_base = OTHER; note = 2'-deoxy-2'-fluoroguanosine-3'-phosphate
  modified_base 9: mod_base = OTHER; note = 2'-deoxy-2'-fluorouridine-3'-phosphate
  modified_base 10: mod_base = OTHER; note = 2'-O-methylcytidine-3'-phosphate
  modified_base 11: mod_base = OTHER; note = 2'-O-methylcytidine-3'-phosphate
  modified_base 12: mod_base = OTHER; note = 2'-O-methyluridine-3'-phosphate
  modified_base 13: mod_base = OTHER; note = 2'-O-methyluridine-3'-phosphate
  modified_base 14: mod_base = OTHER; note = 2'-deoxy-2'-fluorocytidine-3'-phosphate
  modified_base 15: mod_base = OTHER; note = 2'-O-methyluridine-3'-phosphate
  modified_base 16: mod_base = OTHER; note = 2'-deoxy-2'-fluoroguanosine-3'-phosphate
  modified_base 17: mod_base = OTHER; note = 2'-O-methyladenosine-3'-phosphate
  modified_base 18: mod_base = OTHER; note = 2'-O-methylguanosine-3'-phosphate
  modified_base 19: mod_base = OTHER; note = 2'-O-methyladenosine-3'-phosphate
  modified_base 20: mod_base = OTHER; note = 2'-O-methylguanosine-3'-phosphate
  modified_base 21: mod_base = OTHER; note = 2'-O-methylguanosine-3'-phosphorothioate
  modified_base 22: mod_base = OTHER; note = 2'-O-methylguanosine-3'-phosphorothioate
  modified_base 23: mod_base = OTHER; note = 2'-O-methyluridine
tatgtcagtccttctgagagggt

SEQ ID NO: 2762 - RNA, 23 nt, synthetic construct
  source 1..23: mol_type = other RNA
  modified_base 1: mod_base = OTHER; note = 2'-O-methyluridine-3'-phosphorothioate 5'-(E)-Vinylphosphonate
  modified_base 2: mod_base = OTHER; note = 2'-deoxy-2'-fluorocytidine-3'-phosphorothioate
  modified_base 3: mod_base = OTHER; note = 2'-O-methyladenosine-3'-phosphate
  modified_base 4: mod_base = OTHER; note = 2'-O-methyladenosine-3'-phosphate
  modified_base 5: mod_base = OTHER; note = 2'-O-methylguanosine-3'-phosphate
  modified_base 6: mod_base = OTHER; note = 2'-deoxy-2'-fluoroguanosine-3'-phosphate
  modified_base 7: mod_base = OTHER; note = 2'-O-methylguanosine-3'-phosphate
  modified_base 8: mod_base = OTHER; note = 2'-deoxy-2'-fluorouridine-3'-phosphate
  modified_base 9: mod_base = OTHER; note = 2'-deoxy-2'-fluoroguanosine-3'-phosphate
  modified_base 10: mod_base = OTHER; note = 2'-O-methylcytidine-3'-phosphate
  modified_base 11: mod_base = OTHER; note = 2'-O-methyluridine-3'-phosphate
  modified_base 12: mod_base = OTHER; note = 2'-O-methyluridine-3'-phosphate
  modified_base 13: mod_base = OTHER; note = 2'-O-methylguanosine-3'-phosphate
  modified_base 14: mod_base = OTHER; note = 2'-deoxy-2'-fluorouridine-3'-phosphate
  modified_base 15: mod_base = OTHER; note = 2'-O-methylguanosine-3'-phosphate
  modified_base 16: mod_base = OTHER; note = 2'-deoxy-2'-fluorouridine-3'-phosphate
  modified_base 17: mod_base = OTHER; note = 2'-O-methyladenosine-3'-phosphate
  modified_base 18: mod_base = OTHER; note = 2'-O-methyluridine-3'-phosphate
  modified_base 19: mod_base = OTHER; note = 2'-O-methylcytidine-3'-phosphate
  modified_base 20: mod_base = OTHER; note = 2'-O-methyluridine-3'-phosphate
  modified_base 21: mod_base = OTHER; note = 2'-O-methylguanosine-3'-phosphorothioate
  modified_base 22: mod_base = OTHER; note = 2'-O-methylguanosine-3'-phosphorothioate
  modified_base 23: mod_base = OTHER; note = 2'-O-methylguanosine
tcaagggtgcttgtgtatctggg

SEQ ID NO: 2763 - RNA, 23 nt, synthetic construct
  source 1..23: mol_type = other RNA
  modified_base 1: mod_base = OTHER; note = 2'-O-methyluridine-3'-phosphorothioate 5'-(E)-Vinylphosphonate
  modified_base 2: mod_base = OTHER; note = 2'-deoxy-2'-fluoroguanosine-3'-phosphorothioate
  modified_base 3: mod_base = OTHER; note = 2'-O-methyladenosine-3'-phosphate
  modified_base 4: mod_base = OTHER; note = 2'-O-methylcytidine-3'-phosphate
  modified_base 5: mod_base = OTHER; note = 2'-O-methyladenosine-3'-phosphate
  modified_base 6: mod_base = OTHER; note = 2'-deoxy-2'-fluoroguanosine-3'-phosphate
  modified_base 7: mod_base = OTHER; note = 2'-O-methyluridine-3'-phosphate
  modified_base 8: mod_base = OTHER; note = 2'-deoxy-2'-fluoroguanosine-3'-phosphate
  modified_base 9: mod_base = OTHER; note = 2'-deoxy-2'-fluoroguanosine-3'-phosphate
  modified_base 10: mod_base = OTHER; note = 2'-O-methylguanosine-3'-phosphate
  modified_base 11: mod_base = OTHER; note = 2'-O-methyluridine-3'-phosphate
  modified_base 12: mod_base = OTHER; note = 2'-O-methyluridine-3'-phosphate
  modified_base 13: mod_base = OTHER; note = 2'-O-methylcytidine-3'-phosphate
  modified_base 14: mod_base = OTHER; note = 2'-deoxy-2'-fluorouridine-3'-phosphate
  modified_base 15: mod_base = OTHER; note = 2'-O-methylguanosine-3'-phosphate
  modified_base 16: mod_base = OTHER; note = 2'-deoxy-2'-fluorouridine-3'-phosphate
  modified_base 17: mod_base = OTHER; note = 2'-O-methylguanosine-3'-phosphate
  modified_base 18: mod_base = OTHER; note = 2'-O-methylguanosine-3'-phosphate
  modified_base 19: mod_base = OTHER; note = 2'-O-methyladenosine-3'-phosphate
  modified_base 20: mod_base = OTHER; note = 2'-O-methylguanosine-3'-phosphate
  modified_base 21: mod_base = OTHER; note = 2'-O-methylcytidine-3'-phosphorothioate
  modified_base 22: mod_base = OTHER; note = 2'-O-methylcytidine-3'-phosphorothioate
  modified_base 23: mod_base = OTHER; note = 2'-O-methyluridine
tgacagtgggttctgtggagcct

SEQ ID NO: 2764 - RNA, 23 nt, synthetic construct
  source 1..23: mol_type = other RNA
  modified_base 1: mod_base = OTHER; note = 2'-O-methyluridine-3'-phosphorothioate 5'-(E)-Vinylphosphonate
  modified_base 2: mod_base = OTHER; note = 2'-deoxy-2'-fluorocytidine-3'-phosphorothioate
  modified_base 3: mod_base = OTHER; note = 2'-O-methyluridine-3'-phosphate
  modified_base 4: mod_base = OTHER; note = 2'-O-methylguanosine-3'-phosphate
  modified_base 5: mod_base = OTHER; note = 2'-O-methyladenosine-3'-phosphate
  modified_base 6: mod_base = OTHER; note = 2'-deoxy-2'-fluoroguanosine-3'-phosphate
  modified_base 7: mod_base = OTHER; note = 2'-O-methylcytidine-3'-phosphate
  modified_base 8: mod_base = OTHER; note = 2'-deoxy-2'-fluoroguanosine-3'-phosphate
  modified_base 9: mod_base = OTHER; note = 2'-deoxy-2'-fluorouridine-3'-phosphate
  modified_base 10: mod_base = OTHER; note = 2'-O-methylguanosine-3'-phosphate
  modified_base 11: mod_base = OTHER; note = 2'-O-methyluridine-3'-phosphate
  modified_base 12: mod_base = OTHER; note = 2'-O-methyluridine-3'-phosphate
  modified_base 13: mod_base = OTHER; note = 2'-O-methylguanosine-3'-phosphate
  modified_base 14: mod_base = OTHER; note = 2'-deoxy-2'-fluoroguanosine-3'-phosphate
  modified_base 15: mod_base = OTHER; note = 2'-O-methyladenosine-3'-phosphate
  modified_base 16: mod_base = OTHER; note = 2'-deoxy-2'-fluoroadenosine-3'-phosphate
  modified_base 17: mod_base = OTHER; note = 2'-O-methylguanosine-3'-phosphate
  modified_base 18: mod_base = OTHER; note = 2'-O-methylguanosine-3'-phosphate
  modified_base 19: mod_base = OTHER; note = 2'-O-methylguanosine-3'-phosphate
  modified_base 20: mod_base = OTHER; note = 2'-O-methyluridine-3'-phosphate
  modified_base 21: mod_base = OTHER; note = 2'-O-methylguanosine-3'-phosphorothioate
  modified_base 22: mod_base = OTHER; note = 2'-O-methylguanosine-3'-phosphorothioate
  modified_base 23: mod_base = OTHER; note = 2'-O-methyladenosine
tctgagcgtgttggaagggtgga

SEQ ID NO: 2765 - RNA, 23 nt, synthetic construct
  source 1..23: mol_type = other RNA
  modified_base 1: mod_base = OTHER; note = 2'-O-methyluridine-3'-phosphorothioate 5'-(E)-Vinylphosphonate
  modified_base 2: mod_base = OTHER; note = 2'-deoxy-2'-fluoroguanosine-3'-phosphorothioate
  modified_base 3: mod_base = OTHER; note = 2'-O-methylguanosine-3'-phosphate
  modified_base 4: mod_base = OTHER; note = 2'-O-methyladenosine-3'-phosphate
  modified_base 5: mod_base = OTHER; note = 2'-O-methylguanosine-3'-phosphate
  modified_base 6: mod_base = OTHER; note = 2'-deoxy-2'-fluoroguanosine-3'-phosphate
  modified_base 7: mod_base = OTHER; note = 2'-O-methyluridine-3'-phosphate
  modified_base 8: mod_base = OTHER; note = 2'-deoxy-2'-fluorouridine-3'-phosphate
  modified_base 9: mod_base = OTHER; note = 2'-deoxy-2'-fluoroguanosine-3'-phosphate
  modified_base 10: mod_base = OTHER; note = 2'-O-methylcytidine-3'-phosphate
  modified_base 11: mod_base = OTHER; note = 2'-O-methylcytidine-3'-phosphate
  modified_base 12: mod_base = OTHER; note = 2'-O-methyladenosine-3'-phosphate
  modified_base 13: mod_base = OTHER; note = 2'-O-methyluridine-3'-phosphate
  modified_base 14: mod_base = OTHER; note = 2'-deoxy-2'-fluorouridine-3'-phosphate
  modified_base 15: mod_base = OTHER; note = 2'-O-methylguanosine-3'-phosphate
  modified_base 16: mod_base = OTHER; note = 2'-deoxy-2'-fluorouridine-3'-phosphate
  modified_base 17: mod_base = OTHER; note = 2'-O-methyluridine-3'-phosphate
  modified_base 18: mod_base = OTHER; note = 2'-O-methylguanosine-3'-phosphate
  modified_base 19: mod_base = OTHER; note = 2'-O-methyluridine-3'-phosphate
  modified_base 20: mod_base = OTHER; note = 2'-O-methyluridine-3'-phosphate
  modified_base 21: mod_base = OTHER; note = 2'-O-methylguanosine-3'-phosphorothioate
  modified_base 22: mod_base = OTHER; note = 2'-O-methylguanosine-3'-phosphorothioate
  modified_base 23: mod_base = OTHER; note = 2'-O-methylguanosine
tggaggttgccattgttgttggg

SEQ ID NO: 2766 - RNA, 23 nt, synthetic construct
  source 1..23: mol_type = other RNA
  modified_base 1: mod_base = OTHER; note = 2'-O-methyluridine-3'-phosphorothioate 5'-(E)-Vinylphosphonate
  modified_base 2: mod_base = OTHER; note = 2'-deoxy-2'-fluorouridine-3'-phosphorothioate
  modified_base 3: mod_base = OTHER; note = 2'-O-methylcytidine-3'-phosphate
  modified_base 4: mod_base = OTHER; note = 2'-O-methyladenosine-3'-phosphate
  modified_base 5: mod_base = OTHER; note = 2'-O-methylguanosine-3'-phosphate
  modified_base 6: mod_base = OTHER; note = 2'-deoxy-2'-fluorocytidine-3'-phosphate
  modified_base 7: mod_base = OTHER; note = 2'-O-methylguanosine-3'-phosphate
  modified_base 8: mod_base = OTHER; note = 2'-deoxy-2'-fluoroguanosine-3'-phosphate
  modified_base 9: mod_base = OTHER; note = 2'-deoxy-2'-fluorocytidine-3'-phosphate
  modified_base 10: mod_base = OTHER; note = 2'-O-methyluridine-3'-phosphate
  modified_base 11: mod_base = OTHER; note = 2'-O-methylcytidine-3'-phosphate
  modified_base 12: mod_base = OTHER; note = 2'-O-methyluridine-3'-phosphate
  modified_base 13: mod_base = OTHER; note = 2'-O-methyluridine-3'-phosphate
  modified_base 14: mod_base = OTHER; note = 2'-deoxy-2'-fluorouridine-3'-phosphate
  modified_base 15: mod_base = OTHER; note = 2'-O-methylguanosine-3'-phosphate
  modified_base 16: mod_base = OTHER; note = 2'-deoxy-2'-fluoroguanosine-3'-phosphate
  modified_base 17: mod_base = OTHER; note = 2'-O-methyladenosine-3'-phosphate
  modified_base 18: mod_base = OTHER; note = 2'-O-methyladenosine-3'-phosphate
  modified_base 19: mod_base = OTHER; note = 2'-O-methylguanosine-3'-phosphate
  modified_base 20: mod_base = OTHER; note = 2'-O-methylcytidine-3'-phosphate
  modified_base 21: mod_base = OTHER; note = 2'-O-methylguanosine-3'-phosphorothioate
  modified_base 22: mod_base = OTHER; note = 2'-O-methylguanosine-3'-phosphorothioate
  modified_base 23: mod_base = OTHER; note = 2'-O-methyluridine
ttcagcggctctttggaagcggt

SEQ ID NO: 2767 - RNA, 23 nt, synthetic construct
  source 1..23: mol_type = other RNA
  modified_base 1: mod_base = OTHER; note = 2'-O-methyluridine-3'-phosphorothioate 5'-(E)-Vinylphosphonate
  modified_base 2: mod_base = OTHER; note = 2'-deoxy-2'-fluorouridine-3'-phosphorothioate
  modified_base 3: mod_base = OTHER; note = 2'-O-methylcytidine-3'-phosphate
  modified_base 4: mod_base = OTHER; note = 2'-O-methylguanosine-3'-phosphate
  modified_base 5: mod_base = OTHER; note = 2'-O-methylcytidine-3'-phosphate
  modified_base 6: mod_base = OTHER; note = 2'-deoxy-2'-fluorouridine-3'-phosphate
  modified_base 7: mod_base = OTHER; note = 2'-O-methylcytidine-3'-phosphate
  modified_base 8: mod_base = OTHER; note = 2'-deoxy-2'-fluoroguanosine-3'-phosphate
  modified_base 9: mod_base = OTHER; note = 2'-deoxy-2'-fluorouridine-3'-phosphate
  modified_base 10: mod_base = OTHER; note = 2'-O-methylguanosine-3'-phosphate
  modified_base 11: mod_base = OTHER; note = 2'-O-methyladenosine-3'-phosphate
  modified_base 12: mod_base = OTHER; note = 2'-O-methylguanosine-3'-phosphate
  modified_base 13: mod_base = OTHER; note = 2'-O-methyluridine-3'-phosphate
  modified_base 14: mod_base = OTHER; note = 2'-deoxy-2'-fluoroguanosine-3'-phosphate
  modified_base 15: mod_base = OTHER; note = 2'-O-methyluridine-3'-phosphate
  modified_base 16: mod_base = OTHER; note = 2'-deoxy-2'-fluorouridine-3'-phosphate
  modified_base 17: mod_base = OTHER; note = 2'-O-methylguanosine-3'-phosphate
  modified_base 18: mod_base = OTHER; note = 2'-O-methylguanosine-3'-phosphate
  modified_base 19: mod_base = OTHER; note = 2'-O-methylcytidine-3'-phosphate
  modified_base 20: mod_base = OTHER; note = 2'-O-methylguanosine-3'-phosphate
  modified_base 21: mod_base = OTHER; note = 2'-O-methylcytidine-3'-phosphorothioate
  modified_base 22: mod_base = OTHER; note = 2'-O-methylcytidine-3'-phosphorothioate
  modified_base 23: mod_base = OTHER; note = 2'-O-methyladenosine
ttcgctcgtgagtgttggcgcca

SEQ ID NO: 2768 - RNA, 23 nt, synthetic construct
  source 1..23: mol_type = other RNA
  modified_base 1: mod_base = OTHER; note = 2'-O-methyluridine-3'-phosphorothioate 5'-(E)-Vinylphosphonate
  modified_base 2: mod_base = OTHER; note = 2'-deoxy-2'-fluorouridine-3'-phosphorothioate
  modified_base 3: mod_base = OTHER; note = 2'-O-methylcytidine-3'-phosphate
  modified_base 4: mod_base = OTHER; note = 2'-O-methyluridine-3'-phosphate
  modified_base 5: mod_base = OTHER; note = 2'-O-methylcytidine-3'-phosphate
  modified_base 6: mod_base = OTHER; note = 2'-deoxy-2'-fluoroguanosine-3'-phosphate
  modified_base 7: mod_base = OTHER; note = 2'-O-methylguanosine-3'-phosphate
  modified_base 8: mod_base = OTHER; note = 2'-deoxy-2'-fluorocytidine-3'-phosphate
  modified_base 9: mod_base = OTHER; note = 2'-deoxy-2'-fluorocytidine-3'-phosphate
  modified_base 10: mod_base = OTHER; note = 2'-O-methyluridine-3'-phosphate
  modified_base 11: mod_base = OTHER; note = 2'-O-methylguanosine-3'-phosphate
  modified_base 12: mod_base = OTHER; note = 2'-O-methyladenosine-3'-phosphate
  modified_base 13: mod_base = OTHER; note = 2'-O-methylguanosine-3'-phosphate
  modified_base 14: mod_base = OTHER; note = 2'-deoxy-2'-fluoroadenosine-3'-phosphate
  modified_base 15: mod_base = OTHER; note = 2'-O-methylguanosine-3'-phosphate
  modified_base 16: mod_base = OTHER; note = 2'-deoxy-2'-fluoroguanosine-3'-phosphate
  modified_base 17: mod_base = OTHER; note = 2'-O-methyluridine-3'-phosphate
  modified_base 18: mod_base = OTHER; note = 2'-O-methylguanosine-3'-phosphate
  modified_base 19: mod_base = OTHER; note = 2'-O-methylguanosine-3'-phosphate
  modified_base 20: mod_base = OTHER; note = 2'-O-methyladenosine-3'-phosphate
  modified_base 21: mod_base = OTHER; note = 2'-O-methylcytidine-3'-phosphorothioate
  modified_base 22: mod_base = OTHER; note = 2'-O-methyladenosine-3'-phosphorothioate
  modified_base 23: mod_base = OTHER; note = 2'-O-methylguanosine
ttctcggcctgagaggtggacag

SEQ ID NO: 2769 - RNA, 23 nt, synthetic construct
  source 1..23: mol_type = other RNA
  modified_base 1: mod_base = OTHER; note = 2'-O-methyluridine-3'-phosphorothioate 5'-(E)-Vinylphosphonate
  modified_base 2: mod_base = OTHER; note = 2'-deoxy-2'-fluorouridine-3'-phosphorothioate
  modified_base 3: mod_base = OTHER; note = 2'-O-methylcytidine-3'-phosphate
  modified_base 4: mod_base = OTHER; note = 2'-O-methyladenosine-3'-phosphate
  modified_base 5: mod_base = OTHER; note = 2'-O-methyluridine-3'-phosphate
  modified_base 6: mod_base = OTHER; note = 2'-deoxy-2'-fluorouridine-3'-phosphate
  modified_base 7: mod_base = OTHER; note = 2'-O-methylguanosine-3'-phosphate
  modified_base 8: mod_base = OTHER; note = 2'-deoxy-2'-fluorouridine-3'-phosphate
  modified_base 9: mod_base = OTHER; note = 2'-deoxy-2'-fluorocytidine-3'-phosphate
  modified_base 10: mod_base = OTHER; note = 2'-O-methylguanosine-3'-phosphate
  modified_base 11: mod_base = OTHER; note = 2'-O-methyluridine-3'-phosphate
  modified_base 12: mod_base = OTHER; note = 2'-O-methylcytidine-3'-phosphate
  modified_base 13: mod_base = OTHER; note = 2'-O-methyluridine-3'-phosphate
  modified_base 14: mod_base = OTHER; note = 2'-deoxy-2'-fluorocytidine-3'-phosphate
  modified_base 15: mod_base = OTHER; note = 2'-O-methyluridine-3'-phosphate
  modified_base 16: mod_base = OTHER; note = 2'-deoxy-2'-fluoroguanosine-3'-phosphate
  modified_base 17: mod_base = OTHER; note = 2'-O-methyluridine-3'-phosphate
  modified_base 18: mod_base = OTHER; note = 2'-O-methylcytidine-3'-phosphate
  modified_base 19: mod_base = OTHER; note = 2'-O-methylcytidine-3'-phosphate
  modified_base 20: mod_base = OTHER; note = 2'-O-methyluridine-3'-phosphate
  modified_base 21: mod_base = OTHER; note = 2'-O-methylguanosine-3'-phosphorothioate
  modified_base 22: mod_base = OTHER; note = 2'-O-methylguanosine-3'-phosphorothioate
  modified_base 23: mod_base = OTHER; note = 2'-O-methylguanosine
ttcattgtcgtctctgtcctggg

SEQ ID NO: 2770 - RNA, 23 nt, synthetic construct
  source 1..23: mol_type = other RNA
  modified_base 1: mod_base = OTHER; note = 2'-O-methyluridine-3'-phosphorothioate 5'-(E)-Vinylphosphonate
  modified_base 2: mod_base = OTHER; note = 2'-deoxy-2'-fluorouridine-3'-phosphorothioate
  modified_base 3: mod_base = OTHER; note = 2'-O-methylguanosine-3'-phosphate
  modified_base 4: mod_base = OTHER; note = 2'-O-methylguanosine-3'-phosphate
  modified_base 5: mod_base = OTHER; note = 2'-O-methyluridine-3'-phosphate
  modified_base 6: mod_base = OTHER; note = 2'-deoxy-2'-fluoroguanosine-3'-phosphate
  modified_base 7: mod_base = OTHER; note = 2'-O-methylguanosine-3'-phosphate
  modified_base 8: mod_base = OTHER; note = 2'-deoxy-2'-fluorouridine-3'-phosphate
  modified_base 9: mod_base = OTHER; note = 2'-deoxy-2'-fluoroguanosine-3'-phosphate
  modified_base 10: mod_base = OTHER; note = 2'-O-methylguanosine-3'-phosphate
  modified_base 11: mod_base = OTHER; note = 2'-O-methyluridine-3'-phosphate
  modified_base 12: mod_base = OTHER; note = 2'-O-methylguanosine-3'-phosphate
  modified_base 13: mod_base = OTHER; note = 2'-O-methyluridine-3'-phosphate
  modified_base 14: mod_base = OTHER; note = 2'-deoxy-2'-fluorouridine-3'-phosphate
  modified_base 15: mod_base = OTHER; note = 2'-O-methyladenosine-3'-phosphate
  modified_base 16: mod_base = OTHER; note = 2'-deoxy-2'-fluoroguanosine-3'-phosphate
  modified_base 17: mod_base = OTHER; note = 2'-O-methyluridine-3'-phosphate
  modified_base 18: mod_base = OTHER; note = 2'-O-methylcytidine-3'-phosphate
  modified_base 19: mod_base = OTHER; note = 2'-O-methyladenosine-3'-phosphate
  modified_base 20: mod_base = OTHER; note = 2'-O-methyladenosine-3'-phosphate
  modified_base 21: mod_base = OTHER; note = 2'-O-methylguanosine-3'-phosphorothioate
  modified_base 22: mod_base = OTHER; note = 2'-O-methylguanosine-3'-phosphorothioate
  modified_base 23: mod_base = OTHER; note = 2'-O-methylguanosine
ttggtggtggtgttagtcaaggg

SEQ ID NO: 2771 - RNA, 23 nt, synthetic construct
  source 1..23: mol_type = other RNA
  modified_base 1: mod_base = OTHER; note = 2'-O-methyluridine-3'-phosphorothioate 5'-(E)-Vinylphosphonate
  modified_base 2: mod_base = OTHER; note = 2'-deoxy-2'-fluoroadenosine-3'-phosphorothioate
  modified_base 3: mod_base = OTHER; note = 2'-O-methylcytidine-3'-phosphate
  modified_base 4: mod_base = OTHER; note = 2'-O-methyluridine-3'-phosphate
  modified_base 5: mod_base = OTHER; note = 2'-O-methylcytidine-3'-phosphate
  modified_base 6: mod_base = OTHER; note = 2'-deoxy-2'-fluoroadenosine-3'-phosphate
  modified_base 7: mod_base = OTHER; note = 2'-O-methylcytidine-3'-phosphate
  modified_base 8: mod_base = OTHER; note = 2'-deoxy-2'-fluoroadenosine-3'-phosphate
  modified_base 9: mod_base = OTHER; note = 2'-deoxy-2'-fluorocytidine-3'-phosphate
  modified_base 10: mod_base = OTHER; note = 2'-O-methyluridine-3'-phosphate
  modified_base 11: mod_base = OTHER; note = 2'-O-methyluridine-3'-phosphate
  modified_base 12: mod_base = OTHER; note = 2'-O-methylcytidine-3'-phosphate
  modified_base 13: mod_base = OTHER; note = 2'-O-methylguanosine-3'-phosphate
  modified_base 14: mod_base = OTHER; note = 2'-deoxy-2'-fluoroguanosine-3'-phosphate
  modified_base 15: mod_base = OTHER; note = 2'-O-methyluridine-3'-phosphate
  modified_base 16: mod_base = OTHER; note = 2'-deoxy-2'-fluorouridine-3'-phosphate
  modified_base 17: mod_base = OTHER; note = 2'-O-methylguanosine-3'-phosphate
  modified_base 18: mod_base = OTHER; note = 2'-O-methyladenosine-3'-phosphate
  modified_base 19: mod_base = OTHER; note = 2'-O-methylcytidine-3'-phosphate
  modified_base 20: mod_base = OTHER; note = 2'-O-methyladenosine-3'-phosphate
  modified_base 21: mod_base = OTHER; note = 2'-O-methylguanosine-3'-phosphorothioate
  modified_base 22: mod_base = OTHER; note = 2'-O-methylcytidine-3'-phosphorothioate
  modified_base 23: mod_base = OTHER; note = 2'-O-methylguanosine
tactcacacttcggttgacagcg

SEQ ID NO: 2772 - RNA, 23 nt, synthetic construct
  source 1..23: mol_type = other RNA
  modified_base 1: mod_base = OTHER; note = 2'-O-methyluridine-3'-phosphorothioate 5'-(E)-Vinylphosphonate
  modified_base 2: mod_base = OTHER; note = 2'-deoxy-2'-fluoroadenosine-3'-phosphorothioate
  modified_base 3: mod_base = OTHER; note = 2'-O-methylguanosine-3'-phosphate
  modified_base 4: mod_base = OTHER; note = 2'-O-methyluridine-3'-phosphate
  modified_base 5: mod_base = OTHER; note = 2'-O-methylcytidine-3'-phosphate
  modified_base 6: mod_base = OTHER; note = 2'-deoxy-2'-fluorocytidine-3'-phosphate
  modified_base 7: mod_base = OTHER; note = 2'-O-methyladenosine-3'-phosphate
  modified_base 8: mod_base = OTHER; note = 2'-deoxy-2'-fluorocytidine-3'-phosphate
  modified_base 9: mod_base = OTHER; note = 2'-deoxy-2'-fluoroguanosine-3'-phosphate
  modified_base 10: mod_base = OTHER; note = 2'-O-methyluridine-3'-phosphate
  modified_base 11: mod_base = OTHER; note = 2'-O-methylcytidine-3'-phosphate
  modified_base 12: mod_base = OTHER; note = 2'-O-methyladenosine-3'-phosphate
  modified_base 13: mod_base = OTHER; note = 2'-O-methyladenosine-3'-phosphate
  modified_base 14: mod_base = OTHER; note = 2'-deoxy-2'-fluoroadenosine-3'-phosphate
  modified_base 15: mod_base = OTHER; note = 2'-O-methylcytidine-3'-phosphate
  modified_base 16: mod_base = OTHER; note = 2'-deoxy-2'-fluorocytidine-3'-phosphate
  modified_base 17: mod_base = OTHER; note = 2'-O-methyladenosine-3'-phosphate
  modified_base 18: mod_base = OTHER; note = 2'-O-methylcytidine-3'-phosphate
  modified_base 19: mod_base = OTHER; note = 2'-O-methyluridine-3'-phosphate
  modified_base 20: mod_base = OTHER; note = 2'-O-methylcytidine-3'-phosphate
  modified_base 21: mod_base = OTHER; note = 2'-O-methyluridine-3'-phosphorothioate
  modified_base 22: mod_base = OTHER; note = 2'-O-methylguanosine-3'-phosphorothioate
  modified_base 23: mod_base = OTHER; note = 2'-O-methyluridine
tagtccacgtcaaaccactctgt

SEQ ID NO: 2773 - RNA, 23 nt, synthetic construct
  source 1..23: mol_type = other RNA
  modified_base 1: mod_base = OTHER; note = 2'-O-methyluridine-3'-phosphorothioate 5'-(E)-Vinylphosphonate
  modified_base 2: mod_base = OTHER; note = 2'-deoxy-2'-fluorouridine-3'-phosphorothioate
  modified_base 3: mod_base = OTHER; note = 2'-O-methylguanosine-3'-phosphate
  modified_base 4: mod_base = OTHER; note = 2'-O-methyladenosine-3'-phosphate
  modified_base 5: mod_base = OTHER; note = 2'-O-methyluridine-3'-phosphate
  modified_base 6: mod_base = OTHER; note = 2'-deoxy-2'-fluoroguanosine-3'-phosphate
  modified_base 7: mod_base = OTHER; note = 2'-O-methyluridine-3'-phosphate
  modified_base 8: mod_base = OTHER; note = 2'-deoxy-2'-fluorouridine-3'-phosphate
  modified_base 9: mod_base = OTHER; note = 2'-deoxy-2'-fluorouridine-3'-phosphate
  modified_base 10: mod_base = OTHER; note = 2'-O-methyluridine-3'-phosphate
  modified_base 11: mod_base = OTHER; note = 2'-O-methylcytidine-3'-phosphate
  modified_base 12: mod_base = OTHER; note = 2'-O-methyladenosine-3'-phosphate
  modified_base 13: mod_base = OTHER; note = 2'-O-methyladenosine-3'-phosphate
  modified_base 14: mod_base = OTHER; note = 2'-deoxy-2'-fluoroadenosine-3'-phosphate
  modified_base 15: mod_base = OTHER; note = 2'-O-methyladenosine-3'-phosphate
  modified_base 16: mod_base = OTHER; note = 2'-deoxy-2'-fluoroguanosine-3'-phosphate
  modified_base 17: mod_base = OTHER; note = 2'-O-methyluridine-3'-phosphate
  modified_base 18: mod_base = OTHER; note = 2'-O-methyluridine-3'-phosphate
  modified_base 19: mod_base = OTHER; note = 2'-O-methyluridine-3'-phosphate
  modified_base 20: mod_base = OTHER; note = 2'-O-methylcytidine-3'-phosphate
  modified_base 21: mod_base = OTHER; note = 2'-O-methylcytidine-3'-phosphorothioate
  modified_base 22: mod_base = OTHER; note = 2'-O-methyladenosine-3'-phosphorothioate
  modified_base 23: mod_base = OTHER; note = 2'-O-methyluridine
ttgatgttttcaaaagtttccat

SEQ ID NO: 2774 - RNA, 23 nt, synthetic construct
  source 1..23: mol_type = other RNA
  modified_base 1: mod_base = OTHER; note = 2'-O-methyluridine-3'-phosphorothioate 5'-(E)-Vinylphosphonate
  modified_base 2: mod_base = OTHER; note = 2'-deoxy-2'-fluorocytidine-3'-phosphorothioate
  modified_base 3: mod_base = OTHER; note = 2'-O-methyladenosine-3'-phosphate
  modified_base 4: mod_base = OTHER; note = 2'-O-methylcytidine-3'-phosphate
  modified_base 5: mod_base = OTHER; note = 2'-O-methyluridine-3'-phosphate
  modified_base 6: mod_base = OTHER; note = 2'-deoxy-2'-fluorocytidine-3'-phosphate
  modified_base 7: mod_base = OTHER; note = 2'-O-methyluridine-3'-phosphate
  modified_base 8: mod_base = OTHER; note = 2'-deoxy-2'-fluoroadenosine-3'-phosphate
  modified_base 9: mod_base = OTHER; note = 2'-deoxy-2'-fluorouridine-3'-phosphate
  modified_base 10: mod_base = OTHER; note = 2'-O-methylguanosine-3'-phosphate
  modified_base 11: mod_base = OTHER; note = 2'-O-methylcytidine-3'-phosphate
  modified_base 12: mod_base = OTHER; note = 2'-O-methyluridine-3'-phosphate
  modified_base 13: mod_base = OTHER; note = 2'-O-methylcytidine-3'-phosphate
  modified_base 14: mod_base = OTHER; note = 2'-deoxy-2'-fluorouridine-3'-phosphate
  modified_base 15: mod_base = OTHER; note = 2'-O-methyluridine-3'-phosphate
  modified_base 16: mod_base = OTHER; note = 2'-deoxy-2'-fluorouridine-3'-phosphate
  modified_base 17: mod_base = OTHER; note = 2'-O-methylguanosine-3'-phosphate
  modified_base 18: mod_base = OTHER; note = 2'-O-methylguanosine-3'-phosphate
  modified_base 19: mod_base = OTHER; note = 2'-O-methyluridine-3'-phosphate
  modified_base 20: mod_base = OTHER; note = 2'-O-methylguanosine-3'-phosphate
  modified_base 21: mod_base = OTHER; note = 2'-O-methylcytidine-3'-phosphorothioate
  modified_base 22: mod_base = OTHER; note = 2'-O-methylcytidine-3'-phosphorothioate
  modified_base 23: mod_base = OTHER; note = 2'-O-methylcytidine
tcactctatgctctttggtgccc

SEQ ID NO: 2775 - RNA, 23 nt, synthetic construct
  source 1..23: mol_type = other RNA
  modified_base 1: mod_base = OTHER; note = 2'-O-methyluridine-3'-phosphorothioate 5'-(E)-Vinylphosphonate
  modified_base 2: mod_base = OTHER; note = 2'-deoxy-2'-fluorocytidine-3'-phosphorothioate
  modified_base 3: mod_base = OTHER; note = 2'-O-methylcytidine-3'-phosphate
  modified_base 4: mod_base = OTHER; note = 2'-O-methyluridine-3'-phosphate
  modified_base 5: mod_base = OTHER; note = 2'-O-methylguanosine-3'-phosphate
  modified_base 6: mod_base = OTHER; note = 2'-deoxy-2'-fluoroguanosine-3'-phosphate
  modified_base 7: mod_base = OTHER; note = 2'-O-methyluridine-3'-phosphate
  modified_base 8: mod_base = OTHER; note = 2'-deoxy-2'-fluorocytidine-3'-phosphate
  modified_base 9: mod_base = OTHER; note = 2'-deoxy-2'-fluoroguanosine-3'-phosphate
  modified_base 10: mod_base = OTHER; note = 2'-O-methyladenosine-3'-phosphate
  modified_base 11: mod_base = OTHER; note = 2'-O-methyluridine-3'-phosphate
  modified_base 12: mod_base = OTHER; note = 2'-O-methylguanosine-3'-phosphate
  modified_base 13: mod_base = OTHER; note = 2'-O-methylcytidine-3'-phosphate
  modified_base 14: mod_base = OTHER; note = 2'-deoxy-2'-fluorouridine-3'-phosphate
  modified_base 15: mod_base = OTHER; note = 2'-O-methyluridine-3'-phosphate
  modified_base 16: mod_base = OTHER; note = 2'-deoxy-2'-fluoroadenosine-3'-phosphate
  modified_base 17: mod_base = OTHER; note = 2'-O-methylcytidine-3'-phosphate
  modified_base 18: mod_base = OTHER; note = 2'-O-methylcytidine-3'-phosphate
  modified_base 19: mod_base = OTHER; note = 2'-O-methyluridine-3'-phosphate
  modified_base 20: mod_base = OTHER; note = 2'-O-methylcytidine-3'-phosphate
  modified_base 21: mod_base = OTHER; note = 2'-O-methylguanosine-3'-phosphorothioate
  modified_base 22: mod_base = OTHER; note = 2'-O-methylguanosine-3'-phosphorothioate
  modified_base 23: mod_base = OTHER; note = 2'-O-methylguanosine
tcctggtcgatgcttacctcggg

SEQ ID NO: 2776 - RNA, 23 nt, synthetic construct
  source 1..23: mol_type = other RNA
  modified_base 1: mod_base = OTHER; note = 2'-O-methyluridine-3'-phosphorothioate 5'-(E)-Vinylphosphonate
  modified_base 2: mod_base = OTHER; note = 2'-deoxy-2'-fluoroguanosine-3'-phosphorothioate
  modified_base 3: mod_base = OTHER; note = 2'-O-methyluridine-3'-phosphate
  modified_base 4: mod_base = OTHER; note = 2'-O-methylcytidine-3'-phosphate
  modified_base 5: mod_base = OTHER; note = 2'-O-methyluridine-3'-phosphate
  modified_base 6: mod_base = OTHER; note = 2'-deoxy-2'-fluorocytidine-3'-phosphate
  modified_base 7: mod_base = OTHER; note = 2'-O-methylcytidine-3'-phosphate
  modified_base 8: mod_base = OTHER; note = 2'-deoxy-2'-fluoroadenosine-3'-phosphate
  modified_base 9: mod_base = OTHER; note = 2'-deoxy-2'-fluoroguanosine-3'-phosphate
  modified_base 10: mod_base = OTHER; note = 2'-O-methylguanosine-3'-phosphate
  modified_base 11: mod_base = OTHER; note = 2'-O-methylcytidine-3'-phosphate
  modified_base 12: mod_base = OTHER; note = 2'-O-methyluridine-3'-phosphate
  modified_base 13: mod_base = OTHER; note = 2'-O-methylguanosine-3'-phosphate
  modified_base 14: mod_base = OTHER; note = 2'-deoxy-2'-fluorocytidine-3'-phosphate
  modified_base 15: mod_base = OTHER; note = 2'-O-methyladenosine-3'-phosphate
  modified_base 16: mod_base = OTHER; note = 2'-deoxy-2'-fluoroguanosine-3'-phosphate
  modified_base 17: mod_base = OTHER; note = 2'-O-methylguanosine-3'-phosphate
  modified_base 18: mod_base = OTHER; note = 2'-O-methyluridine-3'-phosphate
  modified_base 19: mod_base = OTHER; note = 2'-O-methylcytidine-3'-phosphate
  modified_base 20: mod_base = OTHER; note = 2'-O-methyladenosine-3'-phosphate
  modified_base 21: mod_base = OTHER; note = 2'-O-methylguanosine-3'-phosphorothioate
  modified_base 22: mod_base = OTHER; note = 2'-O-methylcytidine-3'-phosphorothioate
  modified_base 23: mod_base = OTHER; note = 2'-O-methyladenosine
tgtctccaggctgcaggtcagca

SEQ ID NO: 2777 - RNA, 23 nt, synthetic construct
  source 1..23: mol_type = other RNA
  modified_base 1: mod_base = OTHER; note = 2'-O-methyluridine-3'-phosphorothioate 5'-(E)-Vinylphosphonate
  modified_base 2: mod_base = OTHER; note = 2'-deoxy-2'-fluorouridine-3'-phosphorothioate
  modified_base 3: mod_base = OTHER; note = 2'-O-methylcytidine-3'-phosphate
  modified_base 4: mod_base = OTHER; note = 2'-O-methyluridine-3'-phosphate
  modified_base 5: mod_base = OTHER; note = 2'-O-methylguanosine-3'-phosphate
  modified_base 6: mod_base = OTHER; note = 2'-deoxy-2'-fluoroguanosine-3'-phosphate
  modified_base 7: mod_base = OTHER; note = 2'-O-methyluridine-3'-phosphate
  modified_base 8: mod_base = OTHER; note = 2'-deoxy-2'-fluorocytidine-3'-phosphate
  modified_base 9: mod_base = OTHER; note = 2'-deoxy-2'-fluorouridine-3'-phosphate
  modified_base 10: mod_base = OTHER; note = 2'-O-methyluridine-3'-phosphate
  modified_base 11: mod_base = OTHER; note = 2'-O-methylcytidine-3'-phosphate
  modified_base 12: mod_base = OTHER; note = 2'-O-methylguanosine-3'-phosphate
  modified_base 13: mod_base = OTHER; note = 2'-O-methyluridine-3'-phosphate
  modified_base 14: mod_base = OTHER; note = 2'-deoxy-2'-fluorouridine-3'-phosphate
  modified_base 15: mod_base = OTHER; note = 2'-O-methylcytidine-3'-phosphate
  modified_base 16: mod_base = OTHER; note = 2'-deoxy-2'-fluorouridine-3'-phosphate
  modified_base 17: mod_base = OTHER; note = 2'-O-methyluridine-3'-phosphate
  modified_base 18: mod_base = OTHER; note = 2'-O-methylguanosine-3'-phosphate
  modified_base 19: mod_base = OTHER; note = 2'-O-methylcytidine-3'-phosphate
  modified_base 20: mod_base = OTHER; note = 2'-O-methyladenosine-3'-phosphate
  modified_base 21: mod_base = OTHER; note = 2'-O-methylguanosine-3'-phosphorothioate
  modified_base 22: mod_base = OTHER; note = 2'-O-methylguanosine-3'-phosphorothioate
  modified_base 23: mod_base = OTHER; note = 2'-O-methyluridine
ttctggtcttcgttcttgcaggt

SEQ ID NO: 2778 - RNA, 23 nt, synthetic construct
  source 1..23: mol_type = other RNA
  modified_base 1: mod_base = OTHER; note = 2'-O-methyluridine-3'-phosphorothioate 5'-(E)-Vinylphosphonate
  modified_base 2: mod_base = OTHER; note = 2'-deoxy-2'-fluorocytidine-3'-phosphorothioate
  modified_base 3: mod_base = OTHER; note = 2'-O-methylguanosine-3'-phosphate
  modified_base 4: mod_base = OTHER; note = 2'-O-methylcytidine-3'-phosphate
  modified_base 5: mod_base = OTHER; note = 2'-O-methyladenosine-3'-phosphate
  modified_base 6: mod_base = OTHER; note = 2'-deoxy-2'-fluorocytidine-3'-phosphate
  modified_base 7: mod_base = OTHER; note = 2'-O-methylguanosine-3'-phosphate
  modified_base 8: mod_base = OTHER; note = 2'-deoxy-2'-fluorouridine-3'-phosphate
  modified_base 9: mod_base = OTHER; note = 2'-deoxy-2'-fluorouridine-3'-phosphate
  modified_base 10: mod_base = OTHER; note = 2'-O-methylguanosine-3'-phosphate
  modified_base 11: mod_base = OTHER; note = 2'-O-methyluridine-3'-phosphate
  modified_base 12: mod_base = OTHER; note = 2'-O-methyladenosine-3'-phosphate
  modified_base 13: mod_base = OTHER; note = 2'-O-methylguanosine-3'-phosphate
  modified_base 14: mod_base = OTHER; note = 2'-deoxy-2'-fluorouridine-3'-phosphate
  modified_base 15: mod_base = OTHER; note = 2'-O-methyluridine-3'-phosphate
  modified_base 16: mod_base = OTHER; note = 2'-deoxy-2'-fluoroguanosine-3'-phosphate
  modified_base 17: mod_base = OTHER; note = 2'-O-methyladenosine-3'-phosphate
  modified_base 18: mod_base = OTHER; note = 2'-O-methyladenosine-3'-phosphate
  modified_base 19: mod_base = OTHER; note = 2'-O-methylguanosine-3'-phosphate
  modified_base 20: mod_base = OTHER; note = 2'-O-methylcytidine-3'-phosphate
  modified_base 21: mod_base = OTHER; note = 2'-O-methyladenosine-3'-phosphorothioate
  modified_base 22: mod_base = OTHER; note = 2'-O-methylcytidine-3'-phosphorothioate
  modified_base 23: mod_base = OTHER; note = 2'-O-methyladenosine
tcgcacgttgtagttgaagcaca

SEQ ID NO: 2779 - RNA, 23 nt, synthetic construct
  source 1..23: mol_type = other RNA
  modified_base 1: mod_base = OTHER; note = 2'-O-methyluridine-3'-phosphorothioate 5'-(E)-Vinylphosphonate
  modified_base 2: mod_base = OTHER; note = 2'-deoxy-2'-fluoroguanosine-3'-phosphorothioate
  modified_base 3: mod_base = OTHER; note = 2'-O-methylguanosine-3'-phosphate
  modified_base 4: mod_base = OTHER; note = 2'-O-methylcytidine-3'-phosphate
  modified_base 5: mod_base = OTHER; note = 2'-O-methyluridine-3'-phosphate
  modified_base 6: mod_base = OTHER; note = 2'-deoxy-2'-fluoroguanosine-3'-phosphate
  modified_base 7: mod_base = OTHER; note = 2'-O-methyluridine-3'-phosphate
  modified_base 8: mod_base = OTHER; note = 2'-deoxy-2'-fluoroadenosine-3'-phosphate
  modified_base 9: mod_base = OTHER; note = 2'-deoxy-2'-fluoroguanosine-3'-phosphate
  modified_base 10: mod_base = OTHER; note = 2'-O-methyluridine-3'-phosphate
  modified_base 11: mod_base = OTHER; note = 2'-O-methylcytidine-3'-phosphate
  modified_base 12: mod_base = OTHER; note = 2'-O-methylguanosine-3'-phosphate
  modified_base 13: mod_base = OTHER; note = 2'-O-methyluridine-3'-phosphate
  modified_base 14: mod_base = OTHER; note = 2'-deoxy-2'-fluorocytidine-3'-phosphate
  modified_base 15: mod_base = OTHER; note = 2'-O-methyladenosine-3'-phosphate
  modified_base 16: mod_base = OTHER; note = 2'-deoxy-2'-fluorocytidine-3'-phosphate
  modified_base 17: mod_base = OTHER; note = 2'-O-methyladenosine-3'-phosphate
  modified_base 18: mod_base = OTHER; note = 2'-O-methylguanosine-3'-phosphate
  modified_base 19: mod_base = OTHER; note = 2'-O-methylcytidine-3'-phosphate
  modified_base 20: mod_base = OTHER; note = 2'-O-methyladenosine-3'-phosphate
  modified_base 21: mod_base = OTHER; note = 2'-O-methyladenosine-3'-phosphorothioate
  modified_base 22: mod_base = OTHER; note = 2'-O-methyladenosine-3'-phosphorothioate
  modified_base 23: mod_base = OTHER; note = 2'-O-methylguanosine
tggctgtagtcgtcacagcaaag

SEQ ID NO: 2780 - RNA, 23 nt, synthetic construct
  source 1..23: mol_type = other RNA
  modified_base 1: mod_base = OTHER; note = 2'-O-methyluridine-3'-phosphorothioate 5'-(E)-Vinylphosphonate
  modified_base 2: mod_base = OTHER; note = 2'-deoxy-2'-fluorouridine-3'-phosphorothioate
  modified_base 3: mod_base = OTHER; note = 2'-O-methyluridine-3'-phosphate
  modified_base 4: mod_base = OTHER; note = 2'-O-methylguanosine-3'-phosphate
  modified_base 5: mod_base = OTHER; note = 2'-O-methyluridine-3'-phosphate
  modified_base 6: mod_base = OTHER; note = 2'-deoxy-2'-fluoroguanosine-3'-phosphate
  modified_base 7: mod_base = OTHER; note = 2'-O-methyladenosine-3'-phosphate
  modified_base 8: mod_base = OTHER; note = 2'-deoxy-2'-fluoroguanosine-3'-phosphate
  modified_base 9: mod_base = OTHER; note = 2'-deoxy-2'-fluoroguanosine-3'-phosphate
  modified_base 10: mod_base = OTHER; note = 2'-O-methyladenosine-3'-phosphate
  modified_base 11: mod_base = OTHER; note = 2'-O-methyluridine-3'-phosphate
  modified_base 12: mod_base = OTHER; note = 2'-O-methylcytidine-3'-phosphate
  modified_base 13: mod_base = OTHER; note = 2'-O-methylcytidine-3'-phosphate
  modified_base 14: mod_base = OTHER; note = 2'-deoxy-2'-fluoroadenosine-3'-phosphate
  modified_base 15: mod_base = OTHER; note = 2'-O-methylguanosine-3'-phosphate
  modified_base 16: mod_base = OTHER; note = 2'-deoxy-2'-fluoroguanosine-3'-phosphate
  modified_base 17: mod_base = OTHER; note = 2'-O-methyluridine-3'-phosphate
  modified_base 18: mod_base = OTHER; note = 2'-O-methylcytidine-3'-phosphate
  modified_base 19: mod_base = OTHER; note = 2'-O-methylguanosine-3'-phosphate
  modified_base 20: mod_base = OTHER; note = 2'-O-methyluridine-3'-phosphate
  modified_base 21: mod_base = OTHER; note = 2'-O-methylcytidine-3'-phosphorothioate
  modified_base 22: mod_base = OTHER; note = 2'-O-methylcytidine-3'-phosphorothioate
  modified_base 23: mod_base = OTHER; note = 2'-O-methylcytidine
tttgtgaggatccaggtcgtccc

SEQ ID NO: 2781 - RNA, 23 nt, synthetic construct
  source 1..23: mol_type = other RNA
  modified_base 1: mod_base = OTHER; note = 2'-O-methyluridine-3'-phosphorothioate 5'-(E)-Vinylphosphonate
  modified_base 2: mod_base = OTHER; note = 2'-deoxy-2'-fluorocytidine-3'-phosphorothioate
  modified_base 3: mod_base = OTHER; note = 2'-O-methylguanosine-3'-phosphate
  modified_base 4: mod_base = OTHER; note = 2'-O-methyluridine-3'-phosphate
  modified_base 5: mod_base = OTHER; note = 2'-O-methyladenosine-3'-phosphate
  modified_base 6: mod_base = OTHER; note = 2'-deoxy-2'-fluoroguanosine-3'-phosphate
  modified_base 7: mod_base = OTHER; note = 2'-O-methyluridine-3'-phosphate
  modified_base 8: mod_base = OTHER; note = 2'-deoxy-2'-fluoroguanosine-3'-phosphate
  modified_base 9: mod_base = OTHER; note = 2'-deoxy-2'-fluoroguanosine-3'-phosphate
  modified_base 10: mod_base = OTHER; note = 2'-O-methylcytidine-3'-phosphate
  modified_base 11: mod_base = OTHER; note = 2'-O-methyluridine-3'-phosphate
  modified_base 12: mod_base = OTHER; note = 2'-O-methylguanosine-3'-phosphate
  modified_base 13: mod_base = OTHER; note = 2'-O-methyluridine-3'-phosphate
  modified_base 14: mod_base = OTHER; note = 2'-deoxy-2'-fluorouridine-3'-phosphate
  modified_base 15: mod_base = OTHER; note = 2'-O-methylguanosine-3'-phosphate
  modified_base 16: mod_base = OTHER; note = 2'-deoxy-2'-fluorouridine-3'-phosphate
  modified_base 17: mod_base = OTHER; note = 2'-O-methylguanosine-3'-phosphate
  modified_base 18: mod_base = OTHER; note = 2'-O-methylguanosine-3'-phosphate
  modified_base 19: mod_base = OTHER; note = 2'-O-methyluridine-3'-phosphate
  modified_base 20: mod_base = OTHER; note = 2'-O-methylcytidine-3'-phosphate
  modified_base 21: mod_base = OTHER; note = 2'-O-methylguanosine-3'-phosphorothioate
  modified_base 22: mod_base = OTHER; note = 2'-O-methylguanosine-3'-phosphorothioate
  modified_base 23: mod_base = OTHER; note = 2'-O-methylcytidine
tcgtagtggctgttgtggtcggc

SEQ ID NO: 2782 - RNA, 23 nt, synthetic construct
  source 1..23: mol_type = other RNA
  modified_base 1: mod_base = OTHER; note = 2'-O-methyluridine-3'-phosphorothioate 5'-(E)-Vinylphosphonate
  modified_base 2: mod_base = OTHER; note = 2'-deoxy-2'-fluoroguanosine-3'-phosphorothioate
  modified_base 3: mod_base = OTHER; note = 2'-O-methylguanosine-3'-phosphate
  modified_base 4: mod_base = OTHER; note = 2'-O-methyladenosine-3'-phosphate
  modified_base 5: mod_base = OTHER; note = 2'-O-methylguanosine-3'-phosphate
  modified_base 6: mod_base = OTHER; note = 2'-deoxy-2'-fluorocytidine-3'-phosphate
  modified_base 7: mod_base = OTHER; note = 2'-O-methyluridine-3'-phosphate
  modified_base 8: mod_base = OTHER; note = 2'-deoxy-2'-fluoroguanosine-3'-phosphate
  modified_base 9: mod_base = OTHER; note = 2'-deoxy-2'-fluorouridine-3'-phosphate
  modified_base 10: mod_base = OTHER; note = 2'-O-methyluridine-3'-phosphate
  modified_base 11: mod_base = OTHER; note = 2'-O-methylcytidine-3'-phosphate
  modified_base 12: mod_base = OTHER; note = 2'-O-methyluridine-3'-phosphate
  modified_base 13: mod_base = OTHER; note = 2'-O-methylcytidine-3'-phosphate
  modified_base 14: mod_base = OTHER; note = 2'-deoxy-2'-fluoroadenosine-3'-phosphate
  modified_base 15: mod_base = OTHER; note = 2'-O-methylguanosine-3'-phosphate
  modified_base 16: mod_base = OTHER; note = 2'-deoxy-2'-fluoroguanosine-3'-phosphate
  modified_base 17: mod_base = OTHER; note = 2'-O-methylguanosine-3'-phosphate
  modified_base 18: mod_base = OTHER; note = 2'-O-methyluridine-3'-phosphate
  modified_base 19: mod_base = OTHER; note = 2'-O-methylguanosine-3'-phosphate
  modified_base 20: mod_base = OTHER; note = 2'-O-methylguanosine-3'-phosphate
  modified_base 21: mod_base = OTHER; note = 2'-O-methyladenosine-3'-phosphorothioate
  modified_base 22: mod_base = OTHER; note = 2'-O-methylguanosine-3'-phosphorothioate
  modified_base 23: mod_base = OTHER; note = 2'-O-methylguanosine
tggagctgttctcagggtggagg

SEQ ID NO: 2783 - RNA, 23 nt, synthetic construct
  source 1..23: mol_type = other RNA
  modified_base 1: mod_base = OTHER; note = 2'-O-methyluridine-3'-phosphorothioate 5'-(E)-Vinylphosphonate
  modified_base 2: mod_base = OTHER; note = 2'-deoxy-2'-fluorouridine-3'-phosphorothioate
  modified_base 3: mod_base = OTHER; note = 2'-O-methylguanosine-3'-phosphate
  modified_base 4: mod_base = OTHER; note = 2'-O-methylguanosine-3'-phosphate
  modified_base 5: mod_base = OTHER; note = 2'-O-methyluridine-3'-phosphate
  modified_base 6: mod_base = OTHER; note = 2'-deoxy-2'-fluoroguanosine-3'-phosphate
  modified_base 7: mod_base = OTHER; note = 2'-O-methylguanosine-3'-phosphate
  modified_base 8: mod_base = OTHER; note = 2'-deoxy-2'-fluorouridine-3'-phosphate
  modified_base 9: mod_base = OTHER; note = 2'-deoxy-2'-fluorocytidine-3'-phosphate
  modified_base 10: mod_base = OTHER; note = 2'-O-methyladenosine-3'-phosphate
  modified_base 11: mod_base = OTHER; note = 2'-O-methylguanosine-3'-phosphate
  modified_base 12: mod_base = OTHER; note = 2'-O-methylcytidine-3'-phosphate
  modified_base 13: mod_base = OTHER; note = 2'-O-methyladenosine-3'-phosphate
  modified_base 14: mod_base = OTHER; note = 2'-deoxy-2'-fluorocytidine-3'-phosphate
  modified_base 15: mod_base = OTHER; note = 2'-O-methyluridine-3'-phosphate
  modified_base 16: mod_base = OTHER; note = 2'-deoxy-2'-fluorouridine-3'-phosphate
  modified_base 17: mod_base = OTHER; note = 2'-O-methyluridine-3'-phosphate
  modified_base 18: mod_base = OTHER; note = 2'-O-methylguanosine-3'-phosphate
  modified_base 19: mod_base = OTHER; note = 2'-O-methylguanosine-3'-phosphate
  modified_base 20: mod_base = OTHER; note = 2'-O-methylguanosine-3'-phosphate
  modified_base 21: mod_base = OTHER; note = 2'-O-methyladenosine-3'-phosphorothioate
  modified_base 22: mod_base = OTHER; note = 2'-O-methylguanosine-3'-phosphorothioate
  modified_base 23: mod_base = OTHER; note = 2'-O-methylguanosine
ttggtggtcagcactttgggagg

SEQ ID NO: 2784 - RNA, 23 nt, synthetic construct
  source 1..23: mol_type = other RNA
  modified_base 1: mod_base = OTHER; note = 2'-O-methyluridine-3'-phosphorothioate 5'-(E)-Vinylphosphonate
  modified_base 2: mod_base = OTHER; note = 2'-deoxy-2'-fluoroadenosine-3'-phosphorothioate
  modified_base 3: mod_base = OTHER; note = 2'-O-methylguanosine-3'-phosphate
  modified_base 4: mod_base = OTHER; note = 2'-O-methylguanosine-3'-phosphate
  modified_base 5: mod_base = OTHER; note = 2'-O-methylguanosine-3'-phosphate
  modified_base 6: mod_base = OTHER; note = 2'-deoxy-2'-fluoroadenosine-3'-phosphate
  modified_base 7: mod_base = OTHER; note = 2'-O-methylguanosine-3'-phosphate
  modified_base 8: mod_base = OTHER; note = 2'-deoxy-2'-fluorouridine-3'-phosphate
  modified_base 9: mod_base = OTHER; note = 2'-deoxy-2'-fluoroguanosine-3'-phosphate
  modified_base 10: mod_base = OTHER; note = 2'-O-methylguanosine-3'-phosphate
  modified_base 11: mod_base = OTHER; note = 2'-O-methylcytidine-3'-phosphate
  modified_base 12: mod_base = OTHER; note = 2'-O-methyluridine-3'-phosphate
  modified_base 13: mod_base = OTHER; note = 2'-O-methyluridine-3'-phosphate
  modified_base 14: mod_base = OTHER; note = 2'-deoxy-2'-fluorouridine-3'-phosphate
  modified_base 15: mod_base = OTHER; note = 2'-O-methylguanosine-3'-phosphate
  modified_base 16: mod_base = OTHER; note = 2'-deoxy-2'-fluoroguanosine-3'-phosphate
  modified_base 17: mod_base = OTHER; note = 2'-O-methyladenosine-3'-phosphate
  modified_base 18: mod_base = OTHER; note = 2'-O-methylguanosine-3'-phosphate
  modified_base 19: mod_base = OTHER; note = 2'-O-methylcytidine-3'-phosphate
  modified_base 20: mod_base = OTHER; note = 2'-O-methyluridine-3'-phosphate
  modified_base 21: mod_base = OTHER; note = 2'-O-methylguanosine-3'-phosphorothioate
  modified_base 22: mod_base = OTHER; note = 2'-O-methylguanosine-3'-phosphorothioate
  modified_base 23: mod_base = OTHER; note = 2'-O-methyluridine
tagggagtggctttggagctggt

SEQ ID NO: 2785 - RNA, 23 nt, synthetic construct
  source 1..23: mol_type = other RNA
  modified_base 1: mod_base = OTHER; note = 2'-O-methyluridine-3'-phosphorothioate 5'-(E)-Vinylphosphonate
  modified_base 2: mod_base = OTHER; note = 2'-deoxy-2'-fluoroguanosine-3'-phosphorothioate
  modified_base 3: mod_base = OTHER; note = 2'-O-methylguanosine-3'-phosphate
  modified_base 4: mod_base = OTHER; note = 2'-O-methyluridine-3'-phosphate
  modified_base 5: mod_base = OTHER; note = 2'-O-methyluridine-3'-phosphate
  modified_base 6: mod_base = OTHER; note = 2'-deoxy-2'-fluoroguanosine-3'-phosphate
  modified_base 7: mod_base = OTHER; note = 2'-O-methylcytidine-3'-phosphate
  modified_base 8: mod_base = OTHER; note = 2'-deoxy-2'-fluoroadenosine-3'-phosphate
  modified_base 9: mod_base = OTHER; note = 2'-deoxy-2'-fluoroguanosine-3'-phosphate
  modified_base 10: mod_base = OTHER; note = 2'-O-methyluridine-3'-phosphate
  modified_base 11: mod_base = OTHER; note = 2'-O-methylcytidine-3'-phosphate
  modified_base 12: mod_base = OTHER; note = 2'-O-methylcytidine-3'-phosphate
  modified_base 13: mod_base = OTHER; note = 2'-O-methylcytidine-3'-phosphate
  modified_base 14: mod_base = OTHER; note = 2'-deoxy-2'-fluorouridine-3'-phosphate
  modified_base 15: mod_base = OTHER; note = 2'-O-methylguanosine-3'-phosphate
  modified_base 16: mod_base = OTHER; note = 2'-deoxy-2'-fluoroguanosine-3'-phosphate
  modified_base 17: mod_base = OTHER; note = 2'-O-methyladenosine-3'-phosphate
  modified_base 18: mod_base = OTHER; note = 2'-O-methylcytidine-3'-phosphate
  modified_base 19: mod_base = OTHER; note = 2'-O-methyluridine-3'-phosphate
  modified_base 20: mod_base = OTHER; note = 2'-O-methylguanosine-3'-phosphate
  modified_base 21: mod_base = OTHER; note = 2'-O-methylguanosine-3'-phosphorothioate
  modified_base 22: mod_base = OTHER; note = 2'-O-methyladenosine-3'-phosphorothioate
  modified_base 23: mod_base = OTHER; note = 2'-O-methylguanosine
tggttgcagtccctggactggag

SEQ ID NO: 2786 - RNA, 23 nt, synthetic construct
  source 1..23: mol_type = other RNA
  modified_base 1: mod_base = OTHER; note = 2'-O-methyluridine-3'-phosphorothioate 5'-(E)-Vinylphosphonate
  modified_base 2: mod_base = OTHER; note = 2'-deoxy-2'-fluorouridine-3'-phosphorothioate
  modified_base 3: mod_base = OTHER; note = 2'-O-methylguanosine-3'-phosphate
  modified_base 4: mod_base = OTHER; note = 2'-O-methylguanosine-3'-phosphate
  modified_base 5: mod_base = OTHER; note = 2'-O-methylcytidine-3'-phosphate
  modified_base 6: mod_base = OTHER; note = 2'-deoxy-2'-fluorouridine-3'-phosphate
  modified_base 7: mod_base = OTHER; note = 2'-O-methylguanosine-3'-phosphate
  modified_base 8: mod_base = OTHER; note = 2'-deoxy-2'-fluorouridine-3'-phosphate
  modified_base 9: mod_base = OTHER; note = 2'-deoxy-2'-fluoroguanosine-3'-phosphate
  modified_base 10: mod_base = OTHER; note = 2'-O-methylcytidine-3'-phosphate
  modified_base 11: mod_base = OTHER; note = 2'-O-methyluridine-3'-phosphate
  modified_base 12: mod_base = OTHER; note = 2'-O-methyluridine-3'-phosphate
  modified_base 13: mod_base = OTHER; note = 2'-O-methylcytidine-3'-phosphate
  modified_base 14: mod_base = OTHER; note = 2'-deoxy-2'-fluorouridine-3'-phosphate
  modified_base 15: mod_base = OTHER; note = 2'-O-methylcytidine-3'-phosphate
  modified_base 16: mod_base = OTHER; note = 2'-deoxy-2'-fluoroadenosine-3'-phosphate
  modified_base 17: mod_base = OTHER; note = 2'-O-methylguanosine-3'-phosphate
  modified_base 18: mod_base = OTHER; note = 2'-O-methyluridine-3'-phosphate
  modified_base 19: mod_base = OTHER; note = 2'-O-methylguanosine-3'-phosphate
  modified_base 20: mod_base = OTHER; note = 2'-O-methylcytidine-3'-phosphate
  modified_base 21: mod_base = OTHER; note = 2'-O-methyluridine-3'-phosphorothioate
  modified_base 22: mod_base = OTHER; note = 2'-O-methylguanosine-3'-phosphorothioate
  modified_base 23: mod_base = OTHER; note = 2'-O-methylguanosine
ttggctgtgcttctcagtgctgg

SEQ ID NO: 2787 - RNA, 23 nt, synthetic construct
  source 1..23: mol_type = other RNA
  modified_base 1: mod_base = OTHER; note = 2'-O-methyluridine-3'-phosphorothioate 5'-(E)-Vinylphosphonate
  modified_base 2: mod_base = OTHER; note = 2'-deoxy-2'-fluoroguanosine-3'-phosphorothioate
  modified_base 3: mod_base = OTHER; note = 2'-O-methyladenosine-3'-phosphate
  modified_base 4: mod_base = OTHER; note = 2'-O-methyluridine-3'-phosphate
  modified_base 5: mod_base = OTHER; note = 2'-O-methylguanosine-3'-phosphate
  modified_base 6: mod_base = OTHER; note = 2'-deoxy-2'-fluoroguanosine-3'-phosphate
  modified_base 7: mod_base = OTHER; note = 2'-O-methylguanosine-3'-phosphate
  modified_base 8: mod_base = OTHER; note = 2'-deoxy-2'-fluorouridine-3'-phosphate
  modified_base 9: mod_base = OTHER; note = 2'-deoxy-2'-fluoroguanosine-3'-phosphate
  modified_base 10: mod_base = OTHER; note = 2'-O-methyluridine-3'-phosphate
  modified_base 11: mod_base = OTHER; note = 2'-O-methyladenosine-3'-phosphate
  modified_base 12: mod_base = OTHER; note = 2'-O-methyladenosine-3'-phosphate
  modified_base 13: mod_base = OTHER; note = 2'-O-methylcytidine-3'-phosphate
  modified_base 14: mod_base = OTHER; note = 2'-deoxy-2'-fluoroguanosine-3'-phosphate
  modified_base 15: mod_base = OTHER; note = 2'-O-methylcytidine-3'-phosphate
  modified_base 16: mod_base = OTHER; note = 2'-deoxy-2'-fluorouridine-3'-phosphate
  modified_base 17: mod_base = OTHER; note = 2'-O-methylguanosine-3'-phosphate
  modified_base 18: mod_base = OTHER; note = 2'-O-methylguanosine-3'-phosphate
  modified_base 19: mod_base = OTHER; note = 2'-O-methyluridine-3'-phosphate
  modified_base 20: mod_base = OTHER; note = 2'-O-methyladenosine-3'-phosphate
  modified_base 21: mod_base = OTHER; note = 2'-O-methylguanosine-3'-phosphorothioate
  modified_base 22: mod_base = OTHER; note = 2'-O-methylcytidine-3'-phosphorothioate
  modified_base 23: mod_base = OTHER; note = 2'-O-methyluridine
tgatgggtgtaacgctggtagct

SEQ ID NO: 2788 - RNA, 23 nt, synthetic construct
  source 1..23: mol_type = other RNA
  modified_base 1: mod_base = OTHER; note = 2'-O-methyluridine-3'-phosphorothioate 5'-(E)-Vinylphosphonate
  modified_base 2: mod_base = OTHER; note = 2'-deoxy-2'-fluoroadenosine-3'-phosphorothioate
  modified_base 3: mod_base = OTHER; note = 2'-O-methylguanosine-3'-phosphate
  modified_base 4: mod_base = OTHER; note = 2'-O-methylguanosine-3'-phosphate
  modified_base 5: mod_base = OTHER; note = 2'-O-methyluridine-3'-phosphate
  modified_base 6: mod_base = OTHER; note = 2'-deoxy-2'-fluoroguanosine-3'-phosphate
  modified_base 7: mod_base = OTHER; note = 2'-O-methylguanosine-3'-phosphate
  modified_base 8: mod_base = OTHER; note = 2'-deoxy-2'-fluorouridine-3'-phosphate
  modified_base 9: mod_base = OTHER; note = 2'-deoxy-2'-fluoroguanosine-3'-phosphate
  modified_base 10: mod_base = OTHER; note = 2'-O-methylcytidine-3'-phosphate
  modified_base 11: mod_base = OTHER; note = 2'-O-methylcytidine-3'-phosphate
  modified_base 12: mod_base = OTHER; note = 2'-O-methylcytidine-3'-phosphate
  modified_base 13: mod_base = OTHER; note = 2'-O-methyladenosine-3'-phosphate
  modified_base 14: mod_base = OTHER; note = 2'-deoxy-2'-fluoroguanosine-3'-phosphate
  modified_base 15: mod_base = OTHER; note = 2'-O-methylguanosine-3'-phosphate
  modified_base 16: mod_base = OTHER; note = 2'-deoxy-2'-fluoroguanosine-3'-phosphate
  modified_base 17: mod_base = OTHER; note = 2'-O-methyladenosine-3'-phosphate
  modified_base 18: mod_base = OTHER; note = 2'-O-methylguanosine-3'-phosphate
  modified_base 19: mod_base = OTHER; note = 2'-O-methylguanosine-3'-phosphate
  modified_base 20: mod_base = OTHER; note = 2'-O-methyladenosine-3'-phosphate
  modified_base 21: mod_base = OTHER; note = 2'-O-methyladenosine-3'-phosphorothioate
  modified_base 22: mod_base = OTHER; note = 2'-O-methylguanosine-3'-phosphorothioate
  modified_base 23: mod_base = OTHER; note = 2'-O-methyladenosine
taggtggtgcccagggaggaaga

SEQ ID NO: 2789 - RNA, 23 nt, synthetic construct
  source 1..23: mol_type = other RNA
  modified_base 1: mod_base = OTHER; note = 2'-O-methyluridine-3'-phosphorothioate 5'-(E)-Vinylphosphonate
  modified_base 2: mod_base = OTHER; note = 2'-deoxy-2'-fluoroguanosine-3'-phosphorothioate
  modified_base 3: mod_base = OTHER; note = 2'-O-methyluridine-3'-phosphate
  modified_base 4: mod_base = OTHER; note = 2'-O-methylguanosine-3'-phosphate
  modified_base 5: mod_base = OTHER; note = 2'-O-methyluridine-3'-phosphate
  modified_base 6: mod_base = OTHER; note = 2'-deoxy-2'-fluoroguanosine-3'-phosphate
  modified_base 7: mod_base = OTHER; note = 2'-O-methylguanosine-3'-phosphate
  modified_base 8: mod_base = OTHER; note = 2'-deoxy-2'-fluorouridine-3'-phosphate
  modified_base 9: mod_base = OTHER; note = 2'-deoxy-2'-fluoroguanosine-3'-phosphate
  modified_base 10: mod_base = OTHER; note = 2'-O-methylguanosine-3'-phosphate
  modified_base 11: mod_base = OTHER; note = 2'-O-methyluridine-3'-phosphate
  modified_base 12: mod_base = OTHER; note = 2'-O-methylcytidine-3'-phosphate
  modified_base 13: mod_base = OTHER; note = 2'-O-methyluridine-3'-phosphate
  modified_base 14: mod_base = OTHER; note = 2'-deoxy-2'-fluoroguanosine-3'-phosphate
  modified_base 15: mod_base = OTHER; note = 2'-O-methyluridine-3'-phosphate
  modified_base 16: mod_base = OTHER; note = 2'-deoxy-2'-fluoroguanosine-3'-phosphate
  modified_base 17: mod_base = OTHER; note = 2'-O-methyladenosine-3'-phosphate
  modified_base 18: mod_base = OTHER; note = 2'-O-methyluridine-3'-phosphate
  modified_base 19: mod_base = OTHER; note = 2'-O-methyladenosine-3'-phosphate
  modified_base 20: mod_base = OTHER; note = 2'-O-methylguanosine-3'-phosphate
  modified_base 21: mod_base = OTHER; note = 2'-O-methylguanosine-3'-phosphorothioate
  modified_base 22: mod_base = OTHER; note = 2'-O-methylcytidine-3'-phosphorothioate
  modified_base 23: mod_base = OTHER; note = 2'-O-methylguanosine
tgtgtggtggtctgtgataggcg

SEQ ID NO: 2790 - RNA, 23 nt, synthetic construct
  source 1..23: mol_type = other RNA
  modified_base 1: mod_base = OTHER; note = 2'-O-methyluridine-3'-phosphorothioate 5'-(E)-Vinylphosphonate
  modified_base 2: mod_base = OTHER; note = 2'-deoxy-2'-fluorouridine-3'-phosphorothioate
  modified_base 3: mod_base = OTHER; note = 2'-O-methylguanosine-3'-phosphate
  modified_base 4: mod_base = OTHER; note = 2'-O-methyluridine-3'-phosphate
  modified_base 5: mod_base = OTHER; note = 2'-O-methylguanosine-3'-phosphate
  modified_base 6: mod_base = OTHER; note = 2'-deoxy-2'-fluoroguanosine-3'-phosphate
  modified_base 7: mod_base = OTHER; note = 2'-O-methylcytidine-3'-phosphate
  modified_base 8: mod_base = OTHER; note = 2'-deoxy-2'-fluorouridine-3'-phosphate
  modified_base 9: mod_base = OTHER; note = 2'-deoxy-2'-fluoroguanosine-3'-phosphate
  modified_base 10: mod_base = OTHER; note = 2'-O-methyluridine-3'-phosphate
  modified_base 11: mod_base = OTHER; note = 2'-O-methylguanosine-3'-phosphate
  modified_base 12: mod_base = OTHER; note = 2'-O-methylguanosine-3'-phosphate
  modified_base 13: mod_base = OTHER; note = 2'-O-methyladenosine-3'-phosphate
  modified_base 14: mod_base = OTHER; note = 2'-deoxy-2'-fluorocytidine-3'-phosphate
  modified_base 15: mod_base = OTHER; note = 2'-O-methyladenosine-3'-phosphate
  modified_base 16: mod_base = OTHER; note = 2'-deoxy-2'-fluorouridine-3'-phosphate
  modified_base 17: mod_base = OTHER; note = 2'-O-methylguanosine-3'-phosphate
  modified_base 18: mod_base = OTHER; note = 2'-O-methylguanosine-3'-phosphate
  modified_base 19: mod_base = OTHER; note = 2'-O-methyluridine-3'-phosphate
  modified_base 20: mod_base = OTHER; note = 2'-O-methylguanosine-3'-phosphate
  modified_base 21: mod_base = OTHER; note = 2'-O-methylguanosine-3'-phosphorothioate
  modified_base 22: mod_base = OTHER; note = 2'-O-methylcytidine-3'-phosphorothioate
  modified_base 23: mod_base = OTHER; note = 2'-O-methylcytidine
ttgtggctgtggacatggtggcc

SEQ ID NO: 2791 - RNA, 23 nt, synthetic construct
  source 1..23: mol_type = other RNA
  modified_base 1: mod_base = OTHER; note = 2'-O-methyluridine-3'-phosphorothioate 5'-(E)-Vinylphosphonate
  modified_base 2: mod_base = OTHER; note = 2'-deoxy-2'-fluoroguanosine-3'-phosphorothioate
  modified_base 3: mod_base = OTHER; note = 2'-O-methylcytidine-3'-phosphate
  modified_base 4: mod_base = OTHER; note = 2'-O-methyladenosine-3'-phosphate
  modified_base 5: mod_base = OTHER; note = 2'-O-methylguanosine-3'-phosphate
  modified_base 6: mod_base = OTHER; note = 2'-deoxy-2'-fluorouridine-3'-phosphate
  modified_base 7: mod_base = OTHER; note = 2'-O-methylcytidine-3'-phosphate
  modified_base 8: mod_base = OTHER; note = 2'-deoxy-2'-fluorouridine-3'-phosphate
  modified_base 9: mod_base = OTHER; note = 2'-deoxy-2'-fluorocytidine-3'-phosphate
  modified_base 10: mod_base = OTHER; note = 2'-O-methyluridine-3'-phosphate
  modified_base 11: mod_base = OTHER; note = 2'-O-methylguanosine-3'-phosphate
  modified_base 12: mod_base = OTHER; note = 2'-O-methylguanosine-3'-phosphate
  modified_base 13: mod_base = OTHER; note = 2'-O-methyladenosine-3'-phosphate
  modified_base 14: mod_base = OTHER; note = 2'-deoxy-2'-fluoroguanosine-3'-phosphate
  modified_base 15: mod_base = OTHER; note = 2'-O-methyluridine-3'-phosphate
  modified_base 16: mod_base = OTHER; note = 2'-deoxy-2'-fluoroguanosine-3'-phosphate
  modified_base 17: mod_base = OTHER; note = 2'-O-methylguanosine-3'-phosphate
  modified_base 18: mod_base = OTHER; note = 2'-O-methyladenosine-3'-phosphate
  modified_base 19: mod_base = OTHER; note = 2'-O-methylguanosine-3'-phosphate
  modified_base 20: mod_base = OTHER; note = 2'-O-methylguanosine-3'-phosphate
  modified_base 21: mod_base = OTHER; note = 2'-O-methyladenosine-3'-phosphorothioate
  modified_base 22: mod_base = OTHER; note = 2'-O-methylguanosine-3'-phosphorothioate
  modified_base 23: mod_base = OTHER; note = 2'-O-methylguanosine
tgcagtctctggagtggaggagg

SEQ ID NO: 2792 - RNA, 23 nt, synthetic construct
  source 1..23: mol_type = other RNA
  modified_base 1: mod_base = OTHER; note = 2'-O-methyluridine-3'-phosphorothioate 5'-(E)-Vinylphosphonate
  modified_base 2: mod_base = OTHER; note = 2'-deoxy-2'-fluorouridine-3'-phosphorothioate
  modified_base 3: mod_base = OTHER; note = 2'-O-methylguanosine-3'-phosphate
  modified_base 4: mod_base = OTHER; note = 2'-O-methylguanosine-3'-phosphate
  modified_base 5: mod_base = OTHER; note = 2'-O-methylcytidine-3'-phosphate
  modified_base 6: mod_base = OTHER; note = 2'-deoxy-2'-fluoroguanosine-3'-phosphate
  modified_base 7: mod_base = OTHER; note = 2'-O-methylguanosine-3'-phosphate
  modified_base 8: mod_base = OTHER; note = 2'-deoxy-2'-fluorouridine-3'-phosphate
  modified_base 9: mod_base = OTHER; note = 2'-deoxy-2'-fluoroadenosine-3'-phosphate
  modified_base 10: mod_base = OTHER; note = 2'-O-methyladenosine-3'-phosphate
  modified_base 11: mod_base = OTHER; note = 2'-O-methylguanosine-3'-phosphate
  modified_base 12: mod_base = OTHER; note = 2'-O-methylcytidine-3'-phosphate
  modified_base 13: mod_base = OTHER; note = 2'-O-methyladenosine-3'-phosphate
  modified_base 14: mod_base = OTHER; note = 2'-deoxy-2'-fluorocytidine-3'-phosphate
  modified_base 15: mod_base = OTHER; note = 2'-O-methyluridine-3'-phosphate
  modified_base 16: mod_base = OTHER; note = 2'-deoxy-2'-fluoroguanosine-3'-phosphate
  modified_base 17: mod_base = OTHER; note = 2'-O-methyluridine-3'-phosphate
  modified_base 18: mod_base = OTHER; note = 2'-O-methylguanosine-3'-phosphate
  modified_base 19: mod_base = OTHER; note = 2'-O-methylguanosine-3'-phosphate
  modified_base 20: mod_base = OTHER; note = 2'-O-methyladenosine-3'-phosphate
  modified_base 21: mod_base = OTHER; note = 2'-O-methylguanosine-3'-phosphorothioate
  modified_base 22: mod_base = OTHER; note = 2'-O-methylguanosine-3'-phosphorothioate
  modified_base 23: mod_base = OTHER; note = 2'-O-methyluridine
ttggcggtaagcactgtggaggt

SEQ ID NO: 2793 - RNA, 23 nt, synthetic construct
  source 1..23: mol_type = other RNA
  modified_base 1: mod_base = OTHER; note = 2'-O-methyluridine-3'-phosphorothioate 5'-(E)-Vinylphosphonate
  modified_base 2: mod_base = OTHER; note = 2'-deoxy-2'-fluoroguanosine-3'-phosphorothioate
  modified_base 3: mod_base = OTHER; note = 2'-O-methylguanosine-3'-phosphate
  modified_base 4: mod_base = OTHER; note = 2'-O-methyluridine-3'-phosphate
  modified_base 5: mod_base = OTHER; note = 2'-O-methyladenosine-3'-phosphate
  modified_base 6: mod_base = OTHER; note = 2'-deoxy-2'-fluoroguanosine-3'-phosphate
  modified_base 7: mod_base = OTHER; note = 2'-O-methyluridine-3'-phosphate
  modified_base 8: mod_base = OTHER; note = 2'-deoxy-2'-fluoroguanosine-3'-phosphate
  modified_base 9: mod_base = OTHER; note = 2'-deoxy-2'-fluorouridine-3'-phosphate
  modified_base 10: mod_base = OTHER; note = 2'-O-methylguanosine-3'-phosphate
  modified_base 11: mod_base = OTHER; note = 2'-O-methyladenosine-3'-phosphate
  modified_base 12: mod_base = OTHER; note = 2'-O-methylguanosine-3'-phosphate
  modified_base 13: mod_base = OTHER; note = 2'-O-methylcytidine-3'-phosphate
  modified_base 14: mod_base = OTHER; note = 2'-deoxy-2'-fluorouridine-3'-phosphate
  modified_base 15: mod_base = OTHER; note = 2'-O-methylguanosine-3'-phosphate
  modified_base 16: mod_base = OTHER; note = 2'-deoxy-2'-fluorouridine-3'-phosphate
  modified_base 17: mod_base = OTHER; note = 2'-O-methyluridine-3'-phosphate
  modified_base 18: mod_base = OTHER; note = 2'-O-methylcytidine-3'-phosphate
  modified_base 19: mod_base = OTHER; note = 2'-O-methylcytidine-3'-phosphate
  modified_base 20: mod_base = OTHER; note = 2'-O-methyluridine-3'-phosphate
  modified_base 21: mod_base = OTHER; note = 2'-O-methylguanosine-3'-phosphorothioate
  modified_base 22: mod_base = OTHER; note = 2'-O-methylguanosine-3'-phosphorothioate
  modified_base 23: mod_base = OTHER; note = 2'-O-methylguanosine
tggtagtgtgagctgttcctggg

SEQ ID NO: 2794 - RNA, 23 nt, synthetic construct
  source 1..23: mol_type = other RNA
  modified_base 1: mod_base = OTHER; note = 2'-O-methyluridine-3'-phosphorothioate 5'-(E)-Vinylphosphonate
  modified_base 2: mod_base = OTHER; note = 2'-deoxy-2'-fluorocytidine-3'-phosphorothioate
  modified_base 3: mod_base = OTHER; note = 2'-O-methylguanosine-3'-phosphate
  modified_base 4: mod_base = OTHER; note = 2'-O-methyluridine-3'-phosphate
  modified_base 5: mod_base = OTHER; note = 2'-O-methylguanosine-3'-phosphate
  modified_base 6: mod_base = OTHER; note = 2'-deoxy-2'-fluoroguanosine-3'-phosphate
  modified_base 7: mod_base = OTHER; note = 2'-O-methyluridine-3'-phosphate
  modified_base 8: mod_base = OTHER; note = 2'-deoxy-2'-fluorouridine-3'-phosphate
  modified_base 9: mod_base = OTHER; note = 2'-deoxy-2'-fluoroguanosine-3'-phosphate
  modified_base 10: mod_base = OTHER; note = 2'-O-methyluridine-3'-phosphate
  modified_base 11: mod_base = OTHER; note = 2'-O-methylguanosine-3'-phosphate
  modified_base 12: mod_base = OTHER; note = 2'-O-methylguanosine-3'-phosphate
  modified_base 13: mod_base = OTHER; note = 2'-O-methyluridine-3'-phosphate
  modified_base 14: mod_base = OTHER; note = 2'-deoxy-2'-fluoroadenosine-3'-phosphate
  modified_base 15: mod_base = OTHER; note = 2'-O-methylguanosine-3'-phosphate
  modified_base 16: mod_base = OTHER; note = 2'-deoxy-2'-fluorouridine-3'-phosphate
  modified_base 17: mod_base = OTHER; note = 2'-O-methyluridine-3'-phosphate
  modified_base 18: mod_base = OTHER; note = 2'-O-methylguanosine-3'-phosphate
  modified_base 19: mod_base = OTHER; note = 2'-O-methylguanosine-3'-phosphate
  modified_base 20: mod_base = OTHER; note = 2'-O-methylcytidine-3'-phosphate
  modified_base 21: mod_base = OTHER; note = 2'-O-methyladenosine-3'-phosphorothioate
  modified_base 22: mod_base = OTHER; note = 2'-O-methylcytidine-3'-phosphorothioate
  modified_base 23: mod_base = OTHER; note = 2'-O-methyluridine
tcgtggttgtggtagttggcact

SEQ ID NO: 2795 - RNA, 23 nt, synthetic construct
  source 1..23: mol_type = other RNA
  modified_base 1: mod_base = OTHER; note = 2'-O-methyluridine-3'-phosphorothioate 5'-(E)-Vinylphosphonate
  modified_base 2: mod_base = OTHER; note = 2'-deoxy-2'-fluorouridine-3'-phosphorothioate
  modified_base 3: mod_base = OTHER; note = 2'-O-methyluridine-3'-phosphate
  modified_base 4: mod_base = OTHER; note = 2'-O-methylguanosine-3'-phosphate
  modified_base 5: mod_base = OTHER; note = 2'-O-methyluridine-3'-phosphate
  modified_base 6: mod_base = OTHER; note = 2'-deoxy-2'-fluoroguanosine-3'-phosphate
  modified_base 7: mod_base = OTHER; note = 2'-O-methylcytidine-3'-phosphate
  modified_base 8: mod_base = OTHER; note = 2'-deoxy-2'-fluorouridine-3'-phosphate
  modified_base 9: mod_base = OTHER; note = 2'-deoxy-2'-fluoroguanosine-3'-phosphate
  modified_base 10: mod_base = OTHER; note = 2'-O-methyladenosine-3'-phosphate
  modified_base 11: mod_base = OTHER; note = 2'-O-methyluridine-3'-phosphate
  modified_base 12: mod_base = OTHER; note = 2'-O-methylcytidine-3'-phosphate
  modified_base 13: mod_base = OTHER; note = 2'-O-methylcytidine-3'-phosphate
  modified_base 14: mod_base = OTHER; note = 2'-deoxy-2'-fluoroadenosine-3'-phosphate
  modified_base 15: mod_base = OTHER; note = 2'-O-methylcytidine-3'-phosphate
  modified_base 16: mod_base = OTHER; note = 2'-deoxy-2'-fluoroadenosine-3'-phosphate
  modified_base 17: mod_base = OTHER; note = 2'-O-methylcytidine-3'-phosphate
  modified_base 18: mod_base = OTHER; note = 2'-O-methyluridine-3'-phosphate
  modified_base 19: mod_base = OTHER; note = 2'-O-methylguanosine-3'-phosphate
  modified_base 20: mod_base = OTHER; note = 2'-O-methylguanosine-3'-phosphate
  modified_base 21: mod_base = OTHER; note = 2'-O-methyladenosine-3'-phosphorothioate
  modified_base 22: mod_base = OTHER; note = 2'-O-methylguanosine-3'-phosphorothioate
  modified_base 23: mod_base = OTHER; note = 2'-O-methylguanosine
tttgtgctgatccacactggagg

SEQ ID NO: 2796 - RNA, 23 nt, synthetic construct
  source 1..23: mol_type = other RNA
  modified_base 1: mod_base = OTHER; note = 2'-O-methyluridine-3'-phosphorothioate 5'-(E)-Vinylphosphonate
  modified_base 2: mod_base = OTHER; note = 2'-deoxy-2'-fluorouridine-3'-phosphorothioate
  modified_base 3: mod_base = OTHER; note = 2'-O-methylguanosine-3'-phosphate
  modified_base 4: mod_base = OTHER; note = 2'-O-methylguanosine-3'-phosphate
  modified_base 5: mod_base = OTHER; note = 2'-O-methyladenosine-3'-phosphate
  modified_base 6: mod_base = OTHER; note = 2'-deoxy-2'-fluoroguanosine-3'-phosphate
  modified_base 7: mod_base = OTHER; note = 2'-O-methylcytidine-3'-phosphate
  modified_base 8: mod_base = OTHER; note = 2'-deoxy-2'-fluorocytidine-3'-phosphate
  modified_base 9: mod_base = OTHER; note = 2'-deoxy-2'-fluorouridine-3'-phosphate
  modified_base 10: mod_base = OTHER; note = 2'-O-methylcytidine-3'-phosphate
  modified_base 11: mod_base = OTHER; note = 2'-O-methyluridine-3'-phosphate
  modified_base 12: mod_base = OTHER; note = 2'-O-methylguanosine-3'-phosphate
  modified_base 13: mod_base = OTHER; note = 2'-O-methylguanosine-3'-phosphate
  modified_base 14: mod_base = OTHER; note = 2'-deoxy-2'-fluorouridine-3'-phosphate
  modified_base 15: mod_base = OTHER; note = 2'-O-methyluridine-3'-phosphate
  modified_base 16: mod_base = OTHER; note = 2'-deoxy-2'-fluoroguanosine-3'-phosphate
  modified_base 17: mod_base = OTHER; note = 2'-O-methyluridine-3'-phosphate
  modified_base 18: mod_base = OTHER; note = 2'-O-methylguanosine-3'-phosphate
  modified_base 19: mod_base = OTHER; note = 2'-O-methylguanosine-3'-phosphate
  modified_base 20: mod_base = OTHER; note = 2'-O-methylguanosine-3'-phosphate
  modified_base 21: mod_base = OTHER; note = 2'-O-methyluridine-3'-phosphorothioate
  modified_base 22: mod_base = OTHER; note = 2'-O-methylguanosine-3'-phosphorothioate
  modified_base 23: mod_base = OTHER; note = 2'-O-methyluridine
ttggagcctctggttgtgggtgt

SEQ ID NO: 2797 - RNA, 23 nt, synthetic construct
  source 1..23: mol_type = other RNA
  modified_base 1: mod_base = OTHER; note = 2'-O-methyluridine-3'-phosphorothioate 5'-(E)-Vinylphosphonate
  modified_base 2: mod_base = OTHER; note = 2'-deoxy-2'-fluorouridine-3'-phosphorothioate
  modified_base 3: mod_base = OTHER; note = 2'-O-methylguanosine-3'-phosphate
  modified_base 4: mod_base = OTHER; note = 2'-O-methylguanosine-3'-phosphate
  modified_base 5: mod_base = OTHER; note = 2'-O-methyluridine-3'-phosphate
  modified_base 6: mod_base = OTHER; note = 2'-deoxy-2'-fluoroguanosine-3'-phosphate
  modified_base 7: mod_base = OTHER; note = 2'-O-methylguanosine-3'-phosphate
  modified_base 8: mod_base = OTHER; note = 2'-deoxy-2'-fluorouridine-3'-phosphate
  modified_base 9: mod_base = OTHER; note = 2'-deoxy-2'-fluorocytidine-3'-phosphate
  modified_base 10: mod_base = OTHER; note = 2'-O-methyladenosine-3'-phosphate
  modified_base 11: mod_base = OTHER; note = 2'-O-methylguanosine-3'-phosphate
  modified_base 12: mod_base = OTHER; note = 2'-O-methylcytidine-3'-phosphate
  modified_base 13: mod_base = OTHER; note = 2'-O-methyladenosine-3'-phosphate
  modified_base 14: mod_base = OTHER; note = 2'-deoxy-2'-fluorocytidine-3'-phosphate
  modified_base 15: mod_base = OTHER; note = 2'-O-methyluridine-3'-phosphate
  modified_base 16: mod_base = OTHER; note = 2'-deoxy-2'-fluoroguanosine-3'-phosphate
  modified_base 17: mod_base = OTHER; note = 2'-O-methyluridine-3'-phosphate
  modified_base 18: mod_base = OTHER; note = 2'-O-methylguanosine-3'-phosphate
  modified_base 19: mod_base = OTHER; note = 2'-O-methylguanosine-3'-phosphate
  modified_base 20: mod_base = OTHER; note = 2'-O-methylcytidine-3'-phosphate
  modified_base 21: mod_base = OTHER; note = 2'-O-methylguanosine-3'-phosphorothioate
  modified_base 22: mod_base = OTHER; note = 2'-O-methylguanosine-3'-phosphorothioate
  modified_base 23: mod_base = OTHER; note = 2'-O-methyluridine
ttggtggtcagcactgtggcggt

SEQ ID NO: 2798 - RNA, 23 nt, synthetic construct
  source 1..23: mol_type = other RNA
  modified_base 1: mod_base = OTHER; note = 2'-O-methyluridine-3'-phosphorothioate 5'-(E)-Vinylphosphonate
  modified_base 2: mod_base = OTHER; note = 2'-deoxy-2'-fluoroguanosine-3'-phosphorothioate
  modified_base 3: mod_base = OTHER; note = 2'-O-methyluridine-3'-phosphate
  modified_base 4: mod_base = OTHER; note = 2'-O-methyluridine-3'-phosphate
  modified_base 5: mod_base = OTHER; note = 2'-O-methylguanosine-3'-phosphate
  modified_base 6: mod_base = OTHER; note = 2'-deoxy-2'-fluorocytidine-3'-phosphate
  modified_base 7: mod_base = OTHER; note = 2'-O-methylcytidine-3'-phosphate
  modified_base 8: mod_base = OTHER; note = 2'-deoxy-2'-fluoroadenosine-3'-phosphate
  modified_base 9: mod_base = OTHER; note = 2'-deoxy-2'-fluorouridine-3'-phosphate
  modified_base 10: mod_base = OTHER; note = 2'-O-methyladenosine-3'-phosphate
  modified_base 11: mod_base = OTHER; note = 2'-O-methylguanosine-3'-phosphate
  modified_base 12: mod_base = OTHER; note = 2'-O-methyladenosine-3'-phosphate
  modified_base 13: mod_base = OTHER; note = 2'-O-methyladenosine-3'-phosphate
  modified_base 14: mod_base = OTHER; note = 2'-deoxy-2'-fluorocytidine-3'-phosphate
  modified_base 15: mod_base = OTHER; note = 2'-O-methylcytidine-3'-phosphate
  modified_base 16: mod_base = OTHER; note = 2'-deoxy-2'-fluoroadenosine-3'-phosphate
  modified_base 17: mod_base = OTHER; note = 2'-O-methylguanosine-3'-phosphate
  modified_base 18: mod_base = OTHER; note = 2'-O-methyluridine-3'-phosphate
  modified_base 19: mod_base = OTHER; note = 2'-O-methylguanosine-3'-phosphate
  modified_base 20: mod_base = OTHER; note = 2'-O-methylguanosine-3'-phosphate
  modified_base 21: mod_base = OTHER; note = 2'-O-methylcytidine-3'-phosphorothioate
  modified_base 22: mod_base = OTHER; note = 2'-O-methylcytidine-3'-phosphorothioate
  modified_base 23: mod_base = OTHER; note = 2'-O-methyladenosine
tgttgccatagaaccagtggcca

SEQ ID NO: 2799 - RNA, 23 nt, synthetic construct
  source 1..23: mol_type = other RNA
  modified_base 1: mod_base = OTHER; note = 2'-O-methyluridine-3'-phosphorothioate 5'-(E)-Vinylphosphonate
  modified_base 2: mod_base = OTHER; note = 2'-deoxy-2'-fluorouridine-3'-phosphorothioate
  modified_base 3: mod_base = OTHER; note = 2'-O-methylguanosine-3'-phosphate
  modified_base 4: mod_base = OTHER; note = 2'-O-methylguanosine-3'-phosphate
  modified_base 5: mod_base = OTHER; note = 2'-O-methyluridine-3'-phosphate
  modified_base 6: mod_base = OTHER; note = 2'-deoxy-2'-fluorocytidine-3'-phosphate
  modified_base 7: mod_base = OTHER; note = 2'-O-methyluridine-3'-phosphate
  modified_base 8: mod_base = OTHER; note = 2'-deoxy-2'-fluoroguanosine-3'-phosphate
  modified_base 9: mod_base = OTHER; note = 2'-deoxy-2'-fluorouridine-3'-phosphate
  modified_base 10: mod_base = OTHER; note = 2'-O-methylguanosine-3'-phosphate
  modified_base 11: mod_base = OTHER; note = 2'-O-methyluridine-3'-phosphate
  modified_base 12: mod_base = OTHER; note = 2'-O-methylguanosine-3'-phosphate
  modified_base 13: mod_base = OTHER; note = 2'-O-methylcytidine-3'-phosphate
  modified_base 14: mod_base = OTHER; note = 2'-deoxy-2'-fluorouridine-3'-phosphate
  modified_base 15: mod_base = OTHER; note = 2'-O-methyladenosine-3'-phosphate
  modified_base 16: mod_base = OTHER; note = 2'-deoxy-2'-fluoroguanosine-3'-phosphate
  modified_base 17: mod_base = OTHER; note = 2'-O-methyladenosine-3'-phosphate
  modified_base 18: mod_base = OTHER; note = 2'-O-methylguanosine-3'-phosphate
  modified_base 19: mod_base = OTHER; note = 2'-O-methylguanosine-3'-phosphate
  modified_base 20: mod_base = OTHER; note = 2'-O-methyladenosine-3'-phosphate
  modified_base 21: mod_base = OTHER; note = 2'-O-methylguanosine-3'-phosphorothioate
  modified_base 22: mod_base = OTHER; note = 2'-O-methylguanosine-3'-phosphorothioate
  modified_base 23: mod_base = OTHER; note = 2'-O-methylguanosine
ttggtctgtgtgctagaggaggg

SEQ ID NO: 2800 - RNA, 23 nt, synthetic construct
  source 1..23: mol_type = other RNA
  modified_base 1: mod_base = OTHER; note = 2'-O-methyluridine-3'-phosphorothioate 5'-(E)-Vinylphosphonate
  modified_base 2: mod_base = OTHER; note = 2'-deoxy-2'-fluorouridine-3'-phosphorothioate
  modified_base 3: mod_base = OTHER; note = 2'-O-methylguanosine-3'-phosphate
  modified_base 4: mod_base = OTHER; note = 2'-O-methylguanosine-3'-phosphate
  modified_base 5: mod_base = OTHER; note = 2'-O-methylcytidine-3'-phosphate
  modified_base 6: mod_base = OTHER; note = 2'-deoxy-2'-fluorocytidine-3'-phosphate
  modified_base 7: mod_base = OTHER; note = 2'-O-methylguanosine-3'-phosphate
  modified_base 8: mod_base = OTHER; note = 2'-deoxy-2'-fluorouridine-3'-phosphate
  modified_base 9: mod_base = OTHER; note = 2'-deoxy-2'-fluoroguanosine-3'-phosphate
  modified_base 10: mod_base = OTHER; note = 2'-O-methyladenosine-3'-phosphate
  modified_base 11: mod_base = OTHER; note = 2'-O-methyluridine-3'-phosphate
  modified_base 12: mod_base = OTHER; note = 2'-O-methylcytidine-3'-phosphate
  modified_base 13: mod_base = OTHER; note = 2'-O-methylguanosine-3'-phosphate
  modified_base 14: mod_base = OTHER; note = 2'-deoxy-2'-fluorouridine-3'-phosphate
  modified_base 15: mod_base = OTHER; note = 2'-O-methyladenosine-3'-phosphate
  modified_base 16: mod_base = OTHER; note = 2'-deoxy-2'-fluoroguanosine-3'-phosphate
  modified_base 17: mod_base = OTHER; note = 2'-O-methyluridine-3'-phosphate
  modified_base 18: mod_base = OTHER; note = 2'-O-methylguanosine-3'-phosphate
  modified_base 19: mod_base = OTHER; note = 2'-O-methylguanosine-3'-phosphate
  modified_base 20: mod_base = OTHER; note = 2'-O-methylcytidine-3'-phosphate
  modified_base 21: mod_base = OTHER; note = 2'-O-methylcytidine-3'-phosphorothioate
  modified_base 22: mod_base = OTHER; note = 2'-O-methylguanosine-3'-phosphorothioate
  modified_base 23: mod_base = OTHER; note = 2'-O-methyluridine
ttggccgtgatcgtagtggccgt

SEQ ID NO: 2801 - RNA, 23 nt, synthetic construct
  source 1..23: mol_type = other RNA
  modified_base 1: mod_base = OTHER; note = 2'-O-methyluridine-3'-phosphorothioate 5'-(E)-Vinylphosphonate
  modified_base 2: mod_base = OTHER; note = 2'-deoxy-2'-fluorouridine-3'-phosphorothioate
  modified_base 3: mod_base = OTHER; note = 2'-O-methyluridine-3'-phosphate
  modified_base 4: mod_base = OTHER; note = 2'-O-methylguanosine-3'-phosphate
  modified_base 5: mod_base = OTHER; note = 2'-O-methyluridine-3'-phosphate
  modified_base 6: mod_base = OTHER; note = 2'-deoxy-2'-fluorocytidine-3'-phosphate
  modified_base 7: mod_base = OTHER; note = 2'-O-methylcytidine-3'-phosphate
  modified_base 8: mod_base = OTHER; note = 2'-deoxy-2'-fluorocytidine-3'-phosphate
  modified_base 9: mod_base = OTHER; note = 2'-deoxy-2'-fluoroadenosine-3'-phosphate
  modified_base 10: mod_base = OTHER; note = 2'-O-methylguanosine-3'-phosphate
  modified_base 11: mod_base = OTHER; note = 2'-O-methylguanosine-3'-phosphate
  modified_base 12: mod_base = OTHER; note = 2'-O-methyladenosine-3'-phosphate
  modified_base 13: mod_base = OTHER; note = 2'-O-methylguanosine-3'-phosphate
  modified_base 14: mod_base = OTHER; note = 2'-deoxy-2'-fluorouridine-3'-phosphate
  modified_base 15: mod_base = OTHER; note = 2'-O-methyluridine-3'-phosphate
  modified_base 16: mod_base = OTHER; note = 2'-deoxy-2'-fluoroguanosine-3'-phosphate
  modified_base 17: mod_base = OTHER; note = 2'-O-methyladenosine-3'-phosphate
  modified_base 18: mod_base = OTHER; note = 2'-O-methylguanosine-3'-phosphate
  modified_base 19: mod_base = OTHER; note = 2'-O-methylguanosine-3'-phosphate
  modified_base 20: mod_base = OTHER; note = 2'-O-methyladenosine-3'-phosphate
  modified_base 21: mod_base = OTHER; note = 2'-O-methylguanosine-3'-phosphorothioate
  modified_base 22: mod_base = OTHER; note = 2'-O-methylguanosine-3'-phosphorothioate
  modified_base 23: mod_base = OTHER; note = 2'-O-methylguanosine
tttgtcccaggagttgaggaggg

SEQ ID NO: 2802 - RNA, 23 nt, synthetic construct
  source 1..23: mol_type = other RNA
  modified_base 1: mod_base = OTHER; note = 2'-O-methyluridine-3'-phosphorothioate 5'-(E)-Vinylphosphonate
  modified_base 2: mod_base = OTHER; note = 2'-deoxy-2'-fluoroadenosine-3'-phosphorothioate
  modified_base 3: mod_base = OTHER; note = 2'-O-methylguanosine-3'-phosphate
  modified_base 4: mod_base = OTHER; note = 2'-O-methylguanosine-3'-phosphate
  modified_base 5: mod_base = OTHER; note = 2'-O-methylguanosine-3'-phosphate
  modified_base 6: mod_base = OTHER; note = 2'-deoxy-2'-fluoroadenosine-3'-phosphate
  modified_base 7: mod_base = OTHER; note = 2'-O-methylguanosine-3'-phosphate
  modified_base 8: mod_base = OTHER; note = 2'-deoxy-2'-fluorouridine-3'-phosphate
  modified_base 9: mod_base = OTHER; note = 2'-deoxy-2'-fluorocytidine-3'-phosphate
  modified_base 10: mod_base = OTHER; note = 2'-O-methyladenosine-3'-phosphate
  modified_base 11: mod_base = OTHER; note = 2'-O-methylcytidine-3'-phosphate
  modified_base 12: mod_base = OTHER; note = 2'-O-methyluridine-3'-phosphate
  modified_base 13: mod_base = OTHER; note = 2'-O-methylguanosine-3'-phosphate
  modified_base 14: mod_base = OTHER; note = 2'-deoxy-2'-fluorouridine-3'-phosphate
  modified_base 15: mod_base = OTHER; note = 2'-O-methylguanosine-3'-phosphate
  modified_base 16: mod_base = OTHER; note = 2'-deoxy-2'-fluorouridine-3'-phosphate
  modified_base 17: mod_base = OTHER; note = 2'-O-methyluridine-3'-phosphate
  modified_base 18: mod_base = OTHER; note = 2'-O-methylguanosine-3'-phosphate
  modified_base 19: mod_base = OTHER; note = 2'-O-methylcytidine-3'-phosphate
  modified_base 20: mod_base = OTHER; note = 2'-O-methyluridine-3'-phosphate
  modified_base 21: mod_base = OTHER; note = 2'-O-methylguanosine-3'-phosphorothioate
  modified_base 22: mod_base = OTHER; note = 2'-O-methylguanosine-3'-phosphorothioate
  modified_base 23: mod_base = OTHER; note = 2'-O-methyluridine
tagggagtcactgtgttgctggt

SEQ ID NO: 2803 - RNA, 23 nt, synthetic construct
  source 1..23: mol_type = other RNA
  modified_base 1: mod_base = OTHER; note = 2'-O-methyluridine-3'-phosphorothioate 5'-(E)-Vinylphosphonate
  modified_base 2: mod_base = OTHER; note = 2'-deoxy-2'-fluorouridine-3'-phosphorothioate
  modified_base 3: mod_base = OTHER; note = 2'-O-methylguanosine-3'-phosphate
  modified_base 4: mod_base = OTHER; note = 2'-O-methyluridine-3'-phosphate
  modified_base 5: mod_base = OTHER; note = 2'-O-methylguanosine-3'-phosphate
  modified_base 6: mod_base = OTHER; note = 2'-deoxy-2'-fluoroguanosine-3'-phosphate
  modified_base 7: mod_base = OTHER; note = 2'-O-methylguanosine-3'-phosphate
  modified_base 8: mod_base = OTHER; note = 2'-deoxy-2'-fluorouridine-3'-phosphate
  modified_base 9: mod_base = OTHER; note = 2'-deoxy-2'-fluoroguanosine-3'-phosphate
  modified_base 10: mod_base = OTHER; note = 2'-O-methylguanosine-3'-phosphate
  modified_base 11: mod_base = OTHER; note = 2'-O-methyluridine-3'-phosphate
  modified_base 12: mod_base = OTHER; note = 2'-O-methylcytidine-3'-phosphate
  modified_base 13: mod_base = OTHER; note = 2'-O-methylcytidine-3'-phosphate
  modified_base 14: mod_base = OTHER; note = 2'-deoxy-2'-fluorocytidine-3'-phosphate
  modified_base 15: mod_base = OTHER; note = 2'-O-methyluridine-3'-phosphate
  modified_base 16: mod_base = OTHER; note = 2'-deoxy-2'-fluoroadenosine-3'-phosphate
  modified_base 17: mod_base = OTHER; note = 2'-O-methylguanosine-3'-phosphate
  modified_base 18: mod_base = OTHER; note = 2'-O-methylguanosine-3'-phosphate
  modified_base 19: mod_base = OTHER; note = 2'-O-methylguanosine-3'-phosphate
  modified_base 20: mod_base = OTHER; note = 2'-O-methylcytidine-3'-phosphate
  modified_base 21: mod_base = OTHER; note = 2'-O-methyladenosine-3'-phosphorothioate
  modified_base 22: mod_base = OTHER; note = 2'-O-methylguanosine-3'-phosphorothioate
  modified_base 23: mod_base = OTHER; note = 2'-O-methyladenosine
ttgtgggtggtccctagggcaga

SEQ ID NO: 2804 - RNA, 23 nt, synthetic construct
  source 1..23: mol_type = other RNA
  modified_base 1: mod_base = OTHER; note = 2'-O-methyluridine-3'-phosphorothioate 5'-(E)-Vinylphosphonate
  modified_base 2: mod_base = OTHER; note = 2'-deoxy-2'-fluorouridine-3'-phosphorothioate
  modified_base 3: mod_base = OTHER; note = 2'-O-methylguanosine-3'-phosphate
  modified_base 4: mod_base = OTHER; note = 2'-O-methylguanosine-3'-phosphate
  modified_base 5: mod_base = OTHER; note = 2'-O-methylcytidine-3'-phosphate
  modified_base 6: mod_base = OTHER; note = 2'-deoxy-2'-fluorocytidine-3'-phosphate
  modified_base 7: mod_base = OTHER; note = 2'-O-methyladenosine-3'-phosphate
  modified_base 8: mod_base = OTHER; note = 2'-deoxy-2'-fluorouridine-3'-phosphate
  modified_base 9: mod_base = OTHER; note = 2'-deoxy-2'-fluoroguanosine-3'-phosphate
  modified_base 10: mod_base = OTHER; note = 2'-O-methylguanosine-3'-phosphate
  modified_base 11: mod_base = OTHER; note = 2'-O-methyluridine-3'-phosphate
  modified_base 12: mod_base = OTHER; note = 2'-O-methylguanosine-3'-phosphate
  modified_base 13: mod_base = OTHER; note = 2'-O-methyluridine-3'-phosphate
  modified_base 14: mod_base = OTHER; note = 2'-deoxy-2'-fluorouridine-3'-phosphate
  modified_base 15: mod_base = OTHER; note = 2'-O-methylcytidine-3'-phosphate
  modified_base 16: mod_base = OTHER; note = 2'-deoxy-2'-fluoroguanosine-3'-phosphate
  modified_base 17: mod_base = OTHER; note = 2'-O-methylguanosine-3'-phosphate
  modified_base 18: mod_base = OTHER; note = 2'-O-methylcytidine-3'-phosphate
  modified_base 19: mod_base = OTHER; note = 2'-O-methyladenosine-3'-phosphate
  modified_base 20: mod_base = OTHER; note = 2'-O-methylcytidine-3'-phosphate
  modified_base 21: mod_base = OTHER; note = 2'-O-methyluridine-3'-phosphorothioate
  modified_base 22: mod_base = OTHER; note = 2'-O-methylguanosine-3'-phosphorothioate
  modified_base 23: mod_base = OTHER; note = 2'-O-methylguanosine
ttggccatggtgttcggcactgg

SEQ ID NO: 2805 - RNA, 23 nt, synthetic construct
  source 1..23: mol_type = other RNA
  modified_base 1: mod_base = OTHER; note = 2'-O-methyluridine-3'-phosphorothioate 5'-(E)-Vinylphosphonate
  modified_base 2: mod_base = OTHER; note = 2'-deoxy-2'-fluoroadenosine-3'-phosphorothioate
  modified_base 3: mod_base = OTHER; note = 2'-O-methylguanosine-3'-phosphate
  modified_base 4: mod_base = OTHER; note = 2'-O-methylguanosine-3'-phosphate
  modified_base 5: mod_base = OTHER; note = 2'-O-methyluridine-3'-phosphate
  modified_base 6: mod_base = OTHER; note = 2'-deoxy-2'-fluoroguanosine-3'-phosphate
  modified_base 7: mod_base = OTHER; note = 2'-O-methylguanosine-3'-phosphate
  modified_base 8: mod_base = OTHER; note = 2'-deoxy-2'-fluorocytidine-3'-phosphate
  modified_base 9: mod_base = OTHER; note = 2'-deoxy-2'-fluorocytidine-3'-phosphate
  modified_base 10: mod_base = OTHER; note = 2'-O-methylguanosine-3'-phosphate
  modified_base 11: mod_base = OTHER; note = 2'-O-methyladenosine-3'-phosphate
  modified_base 12: mod_base = OTHER; note = 2'-O-methyladenosine-3'-phosphate
  modified_base 13: mod_base = OTHER; note = 2'-O-methylguanosine-3'-phosphate
  modified_base 14: mod_base = OTHER; note = 2'-deoxy-2'-fluorouridine-3'-phosphate
  modified_base 15: mod_base = OTHER; note = 2'-O-methylcytidine-3'-phosphate
  modified_base 16: mod_base = OTHER; note = 2'-deoxy-2'-fluorocytidine-3'-phosphate
  modified_base 17: mod_base = OTHER; note = 2'-O-methyladenosine-3'-phosphate
  modified_base 18: mod_base = OTHER; note = 2'-O-methylguanosine-3'-phosphate
  modified_base 19: mod_base = OTHER; note = 2'-O-methylguanosine-3'-phosphate
  modified_base 20: mod_base = OTHER; note = 2'-O-methylcytidine-3'-phosphate
  modified_base 21: mod_base = OTHER; note = 2'-O-methyluridine-3'-phosphorothioate
  modified_base 22: mod_base = OTHER; note = 2'-O-methylguanosine-3'-phosphorothioate
  modified_base 23: mod_base = OTHER; note = 2'-O-methyluridine
taggtggccgaagtccaggctgt

SEQ ID NO: 2806 - RNA, 23 nt, synthetic construct
  source 1..23: mol_type = other RNA
  modified_base 1: mod_base = OTHER; note = 2'-O-methyluridine-3'-phosphorothioate 5'-(E)-Vinylphosphonate
  modified_base 2: mod_base = OTHER; note = 2'-deoxy-2'-fluoroguanosine-3'-phosphorothioate
  modified_base 3: mod_base = OTHER; note = 2'-O-methyladenosine-3'-phosphate
  modified_base 4: mod_base = OTHER; note = 2'-O-methyladenosine-3'-phosphate
  modified_base 5: mod_base = OTHER; note = 2'-O-methylguanosine-3'-phosphate
  modified_base 6: mod_base = OTHER; note = 2'-deoxy-2'-fluoroguanosine-3'-phosphate
  modified_base 7: mod_base = OTHER; note = 2'-O-methylcytidine-3'-phosphate
  modified_base 8: mod_base = OTHER; note = 2'-deoxy-2'-fluorouridine-3'-phosphate
  modified_base 9: mod_base = OTHER; note = 2'-deoxy-2'-fluorocytidine-3'-phosphate
  modified_base 10: mod_base = OTHER; note = 2'-O-methyluridine-3'-phosphate
  modified_base 11: mod_base = OTHER; note = 2'-O-methylguanosine-3'-phosphate
  modified_base 12: mod_base = OTHER; note = 2'-O-methyluridine-3'-phosphate
  modified_base 13: mod_base = OTHER; note = 2'-O-methylguanosine-3'-phosphate
  modified_base 14: mod_base = OTHER; note = 2'-deoxy-2'-fluoroadenosine-3'-phosphate
  modified_base 15: mod_base = OTHER; note = 2'-O-methyluridine-3'-phosphate
  modified_base 16: mod_base = OTHER; note = 2'-deoxy-2'-fluoroguanosine-3'-phosphate
  modified_base 17: mod_base = OTHER; note = 2'-O-methyluridine-3'-phosphate
  modified_base 18: mod_base = OTHER; note = 2'-O-methylguanosine-3'-phosphate
  modified_base 19: mod_base = OTHER; note = 2'-O-methylguanosine-3'-phosphate
  modified_base 20: mod_base = OTHER; note = 2'-O-methylguanosine-3'-phosphate
  modified_base 21: mod_base = OTHER; note = 2'-O-methyluridine-3'-phosphorothioate
  modified_base 22: mod_base = OTHER; note = 2'-O-methylguanosine-3'-phosphorothioate
  modified_base 23: mod_base = OTHER; note = 2'-O-methylguanosine
tgaaggctctgtgatgtgggtgg

SEQ ID NO: 2807 - RNA, 23 nt, synthetic construct
  source 1..23: mol_type = other RNA
  modified_base 1: mod_base = OTHER; note = 2'-O-methyluridine-3'-phosphorothioate 5'-(E)-Vinylphosphonate
  modified_base 2: mod_base = OTHER; note = 2'-deoxy-2'-fluorocytidine-3'-phosphorothioate
  modified_base 3: mod_base = OTHER; note = 2'-O-methyluridine-3'-phosphate
  modified_base 4: mod_base = OTHER; note = 2'-O-methyladenosine-3'-phosphate
  modified_base 5: mod_base = OTHER; note = 2'-O-methylguanosine-3'-phosphate
  modified_base 6: mod_base = OTHER; note = 2'-deoxy-2'-fluoroguanosine-3'-phosphate
  modified_base 7: mod_base = OTHER; note = 2'-O-methylguanosine-3'-phosphate
  modified_base 8: mod_base = OTHER; note = 2'-deoxy-2'-fluorouridine-3'-phosphate
  modified_base 9: mod_base = OTHER; note = 2'-deoxy-2'-fluoroguanosine-3'-phosphate
  modified_base 10: mod_base = OTHER; note = 2'-O-methyluridine-3'-phosphate
  modified_base 11: mod_base = OTHER; note = 2'-O-methylguanosine-3'-phosphate
  modified_base 12: mod_base = OTHER; note = 2'-O-methylguanosine-3'-phosphate
  modified_base 13: mod_base = OTHER; note = 2'-O-methylguanosine-3'-phosphate
  modified_base 14: mod_base = OTHER; note = 2'-deoxy-2'-fluoroadenosine-3'-phosphate
  modified_base 15: mod_base = OTHER; note = 2'-O-methyladenosine-3'-phosphate
  modified_base 16: mod_base = OTHER; note = 2'-deoxy-2'-fluoroguanosine-3'-phosphate
  modified_base 17: mod_base = OTHER; note = 2'-O-methyluridine-3'-phosphate
  modified_base 18: mod_base = OTHER; note = 2'-O-methylcytidine-3'-phosphate
  modified_base 19: mod_base = OTHER; note = 2'-O-methyladenosine-3'-phosphate
  modified_base 20: mod_base = OTHER; note = 2'-O-methylcytidine-3'-phosphate
  modified_base 21: mod_base = OTHER; note = 2'-O-methylcytidine-3'-phosphorothioate
  modified_base 22: mod_base = OTHER; note = 2'-O-methylguanosine-3'-phosphorothioate
  modified_base 23: mod_base = OTHER; note = 2'-O-methyluridine
tctagggtgtgggaagtcaccgt

SEQ ID NO: 2808 - RNA, 23 nt, synthetic construct
  source 1..23: mol_type = other RNA
  modified_base 1: mod_base = OTHER; note = 2'-O-methyluridine-3'-phosphorothioate 5'-(E)-Vinylphosphonate
  modified_base 2: mod_base = OTHER; note = 2'-deoxy-2'-fluorocytidine-3'-phosphorothioate
  modified_base 3: mod_base = OTHER; note = 2'-O-methyluridine-3'-phosphate
  modified_base 4: mod_base = OTHER; note = 2'-O-methylguanosine-3'-phosphate
  modified_base 5: mod_base = OTHER; note = 2'-O-methylguanosine-3'-phosphate
  modified_base 6: mod_base = OTHER; note = 2'-deoxy-2'-fluoroguanosine-3'-phosphate
  modified_base 7: mod_base = OTHER; note = 2'-O-methyluridine-3'-phosphate
  modified_base 8: mod_base = OTHER; note = 2'-deoxy-2'-fluoroguanosine-3'-phosphate
  modified_base 9: mod_base = OTHER; note = 2'-deoxy-2'-fluoroguanosine-3'-phosphate
  modified_base 10: mod_base = OTHER; note = 2'-O-methyluridine-3'-phosphate
  modified_base 11: mod_base = OTHER; note = 2'-O-methyladenosine-3'-phosphate
  modified_base 12: mod_base = OTHER; note = 2'-O-methylcytidine-3'-phosphate
  modified_base 13: mod_base = OTHER; note = 2'-O-methylcytidine-3'-phosphate
  modified_base 14: mod_base = OTHER; note = 2'-deoxy-2'-fluoroguanosine-3'-phosphate
  modified_base 15: mod_base = OTHER; note = 2'-O-methylguanosine-3'-phosphate
  modified_base 16: mod_base = OTHER; note = 2'-deoxy-2'-fluorouridine-3'-phosphate
  modified_base 17: mod_base = OTHER; note = 2'-O-methylguanosine-3'-phosphate
  modified_base 18: mod_base = OTHER; note = 2'-O-methylguanosine-3'-phosphate
  modified_base 19: mod_base = OTHER; note = 2'-O-methyluridine-3'-phosphate
  modified_base 20: mod_base = OTHER; note = 2'-O-methyluridine-3'-phosphate
  modified_base 21: mod_base = OTHER; note = 2'-O-methylguanosine-3'-phosphorothioate
  modified_base 22: mod_base = OTHER; note = 2'-O-methylcytidine-3'-phosphorothioate
  modified_base 23: mod_base = OTHER; note = 2'-O-methyluridine
tctgggtggtaccggtggttgct

SEQ ID NO: 2809 - RNA, 23 nt, synthetic construct
  source 1..23: mol_type = other RNA
  modified_base 1: mod_base = OTHER; note = 2'-O-methyluridine-3'-phosphorothioate 5'-(E)-Vinylphosphonate
  modified_base 2: mod_base = OTHER; note = 2'-deoxy-2'-fluoroguanosine-3'-phosphorothioate
  modified_base 3: mod_base = OTHER; note = 2'-O-methylcytidine-3'-phosphate
  modified_base 4: mod_base = OTHER; note = 2'-O-methyluridine-3'-phosphate
  modified_base 5: mod_base = OTHER; note = 2'-O-methylguanosine-3'-phosphate
  modified_base 6: mod_base = OTHER; note = 2'-deoxy-2'-fluoroguanosine-3'-phosphate
  modified_base 7: mod_base = OTHER; note = 2'-O-methyladenosine-3'-phosphate
  modified_base 8: mod_base = OTHER; note = 2'-deoxy-2'-fluoroadenosine-3'-phosphate
  modified_base 9: mod_base = OTHER; note = 2'-deoxy-2'-fluoroadenosine-3'-phosphate
  modified_base 10: mod_base = OTHER; note = 2'-O-methylguanosine-3'-phosphate
  modified_base 11: mod_base = OTHER; note = 2'-O-methylguanosine-3'-phosphate
  modified_base 12: mod_base = OTHER; note = 2'-O-methylguanosine-3'-phosphate
  modified_base 13: mod_base = OTHER; note = 2'-O-methylcytidine-3'-phosphate
  modified_base 14: mod_base = OTHER; note = 2'-deoxy-2'-fluorouridine-3'-phosphate
  modified_base 15: mod_base = OTHER; note = 2'-O-methylguanosine-3'-phosphate
  modified_base 16: mod_base = OTHER; note = 2'-deoxy-2'-fluoroguanosine-3'-phosphate
  modified_base 17: mod_base = OTHER; note = 2'-O-methyladenosine-3'-phosphate
  modified_base 18: mod_base = OTHER; note = 2'-O-methylguanosine-3'-phosphate
  modified_base 19: mod_base = OTHER; note = 2'-O-methyluridine-3'-phosphate
  modified_base 20: mod_base = OTHER; note = 2'-O-methylcytidine-3'-phosphate
  modified_base 21: mod_base = OTHER; note = 2'-O-methylguanosine-3'-phosphorothioate
  modified_base 22: mod_base = OTHER; note = 2'-O-methyladenosine-3'-phosphorothioate
  modified_base 23: mod_base = OTHER; note = 2'-O-methylguanosine
tgctggaaagggctggagtcgag

SEQ ID NO: 2810 - RNA, 23 nt, synthetic construct
  source 1..23: mol_type = other RNA
  modified_base 1: mod_base = OTHER; note = 2'-O-methyluridine-3'-phosphorothioate 5'-(E)-Vinylphosphonate
  modified_base 2: mod_base = OTHER; note = 2'-deoxy-2'-fluoroadenosine-3'-phosphorothioate
  modified_base 3: mod_base = OTHER; note = 2'-O-methylcytidine-3'-phosphate
  modified_base 4: mod_base = OTHER; note = 2'-O-methyluridine-3'-phosphate
  modified_base 5: mod_base = OTHER; note = 2'-O-methylcytidine-3'-phosphate
  modified_base 6: mod_base = OTHER; note = 2'-deoxy-2'-fluoroguanosine-3'-phosphate
  modified_base 7: mod_base = OTHER; note = 2'-O-methylguanosine-3'-phosphate
  modified_base 8: mod_base = OTHER; note = 2'-deoxy-2'-fluorouridine-3'-phosphate
  modified_base 9: mod_base = OTHER; note = 2'-deoxy-2'-fluoroguanosine-3'-phosphate
  modified_base 10: mod_base = OTHER; note = 2'-O-methylguanosine-3'-phosphate
  modified_base 11: mod_base = OTHER; note = 2'-O-methyluridine-3'-phosphate
  modified_base 12: mod_base = OTHER; note = 2'-O-methyluridine-3'-phosphate
  modified_base 13: mod_base = OTHER; note = 2'-O-methylcytidine-3'-phosphate
  modified_base 14: mod_base = OTHER; note = 2'-deoxy-2'-fluorouridine-3'-phosphate
  modified_base 15: mod_base = OTHER; note = 2'-O-methylguanosine-3'-phosphate
  modified_base 16: mod_base = OTHER; note = 2'-deoxy-2'-fluorocytidine-3'-phosphate
  modified_base 17: mod_base = OTHER; note = 2'-O-methyluridine-3'-phosphate
  modified_base 18: mod_base = OTHER; note = 2'-O-methylguanosine-3'-phosphate
  modified_base 19: mod_base = OTHER; note = 2'-O-methylcytidine-3'-phosphate
  modified_base 20: mod_base = OTHER; note = 2'-O-methyluridine-3'-phosphate
  modified_base 21: mod_base = OTHER; note = 2'-O-methyladenosine-3'-phosphorothioate
  modified_base 22: mod_base = OTHER; note = 2'-O-methylguanosine-3'-phosphorothioate
  modified_base 23: mod_base = OTHER; note = 2'-O-methylguanosine
tactcggtggttctgctgctagg

SEQ ID NO: 2811 - RNA, 23 nt, synthetic construct
  source 1..23: mol_type = other RNA
  modified_base 1: mod_base = OTHER; note = 2'-O-methyluridine-3'-phosphorothioate 5'-(E)-Vinylphosphonate
  modified_base 2: mod_base = OTHER; note = 2'-deoxy-2'-fluoroadenosine-3'-phosphorothioate
  modified_base 3: mod_base = OTHER; note = 2'-O-methylguanosine-3'-phosphate
  modified_base 4: mod_base = OTHER; note = 2'-O-methylguanosine-3'-phosphate
  modified_base 5: mod_base = OTHER; note = 2'-O-methyluridine-3'-phosphate
  modified_base 6: mod_base = OTHER; note = 2'-deoxy-2'-fluoroguanosine-3'-phosphate
  modified_base 7: mod_base = OTHER; note = 2'-O-methylcytidine-3'-phosphate
  modified_base 8: mod_base = OTHER; note = 2'-deoxy-2'-fluoroguanosine-3'-phosphate
  modified_base 9: mod_base = OTHER; note = 2'-deoxy-2'-fluoroguanosine-3'-phosphate
  modified_base 10: mod_base = OTHER; note = 2'-O-methylguanosine-3'-phosphate
  modified_base 11: mod_base = OTHER; note = 2'-O-methyluridine-3'-phosphate
  modified_base 12: mod_base = OTHER; note = 2'-O-methylcytidine-3'-phosphate
  modified_base 13: mod_base = OTHER; note = 2'-O-methyluridine-3'-phosphate
  modified_base 14: mod_base = OTHER; note = 2'-deoxy-2'-fluorouridine-3'-phosphate
  modified_base 15: mod_base = OTHER; note = 2'-O-methylguanosine-3'-phosphate
  modified_base 16: mod_base = OTHER; note = 2'-deoxy-2'-fluorocytidine-3'-phosphate
  modified_base 17: mod_base = OTHER; note = 2'-O-methyluridine-3'-phosphate
  modified_base 18: mod_base = OTHER; note = 2'-O-methylguanosine-3'-phosphate
  modified_base 19: mod_base = OTHER; note = 2'-O-methylguanosine-3'-phosphate
  modified_base 20: mod_base = OTHER; note = 2'-O-methylguanosine-3'-phosphate
  modified_base 21: mod_base = OTHER; note = 2'-O-methyluridine-3'-phosphorothioate
  modified_base 22: mod_base = OTHER; note = 2'-O-methylguanosine-3'-phosphorothioate
  modified_base 23: mod_base = OTHER; note = 2'-O-methyluridine
taggtgcgggtcttgctgggtgt

SEQ ID NO: 2812 - RNA, 23 nt, synthetic construct
  source 1..23: mol_type = other RNA
  modified_base 1: mod_base = OTHER; note = 2'-O-methyluridine-3'-phosphorothioate 5'-(E)-Vinylphosphonate
  modified_base 2: mod_base = OTHER; note = 2'-deoxy-2'-fluoroadenosine-3'-phosphorothioate
  modified_base 3: mod_base = OTHER; note = 2'-O-methylcytidine-3'-phosphate
  modified_base 4: mod_base = OTHER; note = 2'-O-methyladenosine-3'-phosphate
  modified_base 5: mod_base = OTHER; note = 2'-O-methylguanosine-3'-phosphate
  modified_base 6: mod_base = OTHER; note = 2'-deoxy-2'-fluorocytidine-3'-phosphate
  modified_base 7: mod_base = OTHER; note = 2'-O-methylcytidine-3'-phosphate
  modified_base 8: mod_base = OTHER; note = 2'-deoxy-2'-fluorocytidine-3'-phosphate
  modified_base 9: mod_base = OTHER; note = 2'-deoxy-2'-fluoroadenosine-3'-phosphate
  modified_base 10: mod_base = OTHER; note = 2'-O-methyluridine-3'-phosphate
  modified_base 11: mod_base = OTHER; note = 2'-O-methylguanosine-3'-phosphate
  modified_base 12: mod_base = OTHER; note = 2'-O-methylguanosine-3'-phosphate
  modified_base 13: mod_base = OTHER; note = 2'-O-methyluridine-3'-phosphate
  modified_base 14: mod_base = OTHER; note = 2'-deoxy-2'-fluorocytidine-3'-phosphate
  modified_base 15: mod_base = OTHER; note = 2'-O-methyladenosine-3'-phosphate
  modified_base 16: mod_base = OTHER; note = 2'-deoxy-2'-fluorocytidine-3'-phosphate
  modified_base 17: mod_base = OTHER; note = 2'-O-methylcytidine-3'-phosphate
  modified_base 18: mod_base = OTHER; note = 2'-O-methyladenosine-3'-phosphate
  modified_base 19: mod_base = OTHER; note = 2'-O-methylcytidine-3'-phosphate
  modified_base 20: mod_base = OTHER; note = 2'-O-methylcytidine-3'-phosphate
  modified_base 21: mod_base = OTHER; note = 2'-O-methylguanosine-3'-phosphorothioate
  modified_base 22: mod_base = OTHER; note = 2'-O-methyluridine-3'-phosphorothioate
  modified_base 23: mod_base = OTHER; note = 2'-O-methylguanosine
tacagcccatggtcaccaccgtg

SEQ ID NO: 2813 - RNA, 23 nt, synthetic construct
  source 1..23: mol_type = other RNA
  modified_base 1: mod_base = OTHER; note = 2'-O-methyluridine-3'-phosphorothioate 5'-(E)-Vinylphosphonate
  modified_base 2: mod_base = OTHER; note = 2'-deoxy-2'-fluoroguanosine-3'-phosphorothioate
  modified_base 3: mod_base = OTHER; note = 2'-O-methylguanosine-3'-phosphate
  modified_base 4: mod_base = OTHER; note = 2'-O-methyluridine-3'-phosphate
  modified_base 5: mod_base = OTHER; note = 2'-O-methyladenosine-3'-phosphate
  modified_base 6: mod_base = OTHER; note = 2'-deoxy-2'-fluoroguanosine-3'-phosphate
  modified_base 7: mod_base = OTHER; note = 2'-O-methylcytidine-3'-phosphate
  modified_base 8: mod_base = OTHER; note = 2'-deoxy-2'-fluorouridine-3'-phosphate
  modified_base 9: mod_base = OTHER; note = 2'-deoxy-2'-fluoroguanosine-3'-phosphate
  modified_base 10: mod_base = OTHER; note = 2'-O-methyluridine-3'-phosphate
  modified_base 11: mod_base = OTHER; note = 2'-O-methyladenosine-3'-phosphate
  modified_base 12: mod_base = OTHER; note = 2'-O-methylguanosine-3'-phosphate
  modified_base 13: mod_base = OTHER; note = 2'-O-methyluridine-3'-phosphate
  modified_base 14: mod_base = OTHER; note = 2'-deoxy-2'-fluorocytidine-3'-phosphate
  modified_base 15: mod_base = OTHER; note = 2'-O-methylcytidine-3'-phosphate
  modified_base 16: mod_base = OTHER; note = 2'-deoxy-2'-fluoroadenosine-3'-phosphate
  modified_base 17: mod_base = OTHER; note = 2'-O-methylguanosine-3'-phosphate
  modified_base 18: mod_base = OTHER; note = 2'-O-methylcytidine-3'-phosphate
  modified_base 19: mod_base = OTHER; note = 2'-O-methylcytidine-3'-phosphate
  modified_base 20: mod_base = OTHER; note = 2'-O-methyladenosine-3'-phosphate
  modified_base 21: mod_base = OTHER; note = 2'-O-methylcytidine-3'-phosphorothioate
  modified_base 22: mod_base = OTHER; note = 2'-O-methyluridine-3'-phosphorothioate
  modified_base 23: mod_base = OTHER; note = 2'-O-methylcytidine
tggtagctgtagtccagccactc

SEQ ID NO: 2814 - RNA, 23 nt, synthetic construct
  source 1..23: mol_type = other RNA
  modified_base 1: mod_base = OTHER; note = 2'-O-methyluridine-3'-phosphorothioate 5'-(E)-Vinylphosphonate
  modified_base 2: mod_base = OTHER; note = 2'-deoxy-2'-fluoroguanosine-3'-phosphorothioate
  modified_base 3: mod_base = OTHER; note = 2'-O-methyladenosine-3'-phosphate
  modified_base 4: mod_base = OTHER; note = 2'-O-methyluridine-3'-phosphate
  modified_base 5: mod_base = OTHER; note = 2'-O-methylguanosine-3'-phosphate
  modified_base 6: mod_base = OTHER; note = 2'-deoxy-2'-fluorouridine-3'-phosphate
  modified_base 7: mod_base = OTHER; note = 2'-O-methyluridine-3'-phosphate
  modified_base 8: mod_base = OTHER; note = 2'-deoxy-2'-fluoroguanosine-3'-phosphate
  modified_base 9: mod_base = OTHER; note = 2'-deoxy-2'-fluoroguanosine-3'-phosphate
  modified_base 10: mod_base = OTHER; note = 2'-O-methyladenosine-3'-phosphate
  modified_base 11: mod_base = OTHER; note = 2'-O-methylguanosine-3'-phosphate
  modified_base 12: mod_base = OTHER; note = 2'-O-methyluridine-3'-phosphate
  modified_base 13: mod_base = OTHER; note = 2'-O-methyladenosine-3'-phosphate
  modified_base 14: mod_base = OTHER; note = 2'-deoxy-2'-fluoroguanosine-3'-phosphate
  modified_base 15: mod_base = OTHER; note = 2'-O-methylguanosine-3'-phosphate
  modified_base 16: mod_base = OTHER; note = 2'-deoxy-2'-fluorouridine-3'-phosphate
  modified_base 17: mod_base = OTHER; note = 2'-O-methylguanosine-3'-phosphate
  modified_base 18: mod_base = OTHER; note = 2'-O-methyluridine-3'-phosphate
  modified_base 19: mod_base = OTHER; note = 2'-O-methylcytidine-3'-phosphate
  modified_base 20: mod_base = OTHER; note = 2'-O-methyladenosine-3'-phosphate
  modified_base 21: mod_base = OTHER; note = 2'-O-methyladenosine-3'-phosphorothioate
  modified_base 22: mod_base = OTHER; note = 2'-O-methyladenosine-3'-phosphorothioate
  modified_base 23: mod_base = OTHER; note = 2'-O-methylguanosine
tgatgttggagtaggtgtcaaag

SEQ ID NO: 2815 - RNA, 23 nt, synthetic construct
  source 1..23: mol_type = other RNA
  modified_base 1: mod_base = OTHER; note = 2'-O-methyluridine-3'-phosphorothioate 5'-(E)-Vinylphosphonate
  modified_base 2: mod_base = OTHER; note = 2'-deoxy-2'-fluorocytidine-3'-phosphorothioate
  modified_base 3: mod_base = OTHER; note = 2'-O-methyladenosine-3'-phosphate
  modified_base 4: mod_base = OTHER; note = 2'-O-methyluridine-3'-phosphate
  modified_base 5: mod_base = OTHER; note = 2'-O-methyluridine-3'-phosphate
  modified_base 6: mod_base = OTHER; note = 2'-deoxy-2'-fluorocytidine-3'-phosphate
  modified_base 7: mod_base = OTHER; note = 2'-O-methylcytidine-3'-phosphate
  modified_base 8: mod_base = OTHER; note = 2'-deoxy-2'-fluoroadenosine-3'-phosphate
  modified_base 9: mod_base = OTHER; note = 2'-deoxy-2'-fluorocytidine-3'-phosphate
  modified_base 10: mod_base = OTHER; note = 2'-O-methylguanosine-3'-phosphate
  modified_base 11: mod_base = OTHER; note = 2'-O-methyladenosine-3'-phosphate
  modified_base 12: mod_base = OTHER; note = 2'-O-methylcytidine-3'-phosphate
  modified_base 13: mod_base = OTHER; note = 2'-O-methylcytidine-3'-phosphate
  modified_base 14: mod_base = OTHER; note = 2'-deoxy-2'-fluorouridine-3'-phosphate
  modified_base 15: mod_base = OTHER; note = 2'-O-methylguanosine-3'-phosphate
  modified_base 16: mod_base = OTHER; note = 2'-deoxy-2'-fluoroguanosine-3'-phosphate
  modified_base 17: mod_base = OTHER; note = 2'-O-methylcytidine-3'-phosphate
  modified_base 18: mod_base = OTHER; note = 2'-O-methylcytidine-3'-phosphate
  modified_base 19: mod_base = OTHER; note = 2'-O-methylcytidine-3'-phosphate
  modified_base 20: mod_base = OTHER; note = 2'-O-methyladenosine-3'-phosphate
  modified_base 21: mod_base = OTHER; note = 2'-O-methyladenosine-3'-phosphorothioate
  modified_base 22: mod_base = OTHER; note = 2'-O-methylcytidine-3'-phosphorothioate
  modified_base 23: mod_base = OTHER; note = 2'-O-methyluridine
tcattccacgacctggcccaact

SEQ ID NO: 2816 - RNA, 23 nt, synthetic construct
  source 1..23: mol_type = other RNA
  modified_base 1: mod_base = OTHER; note = 2'-O-methyluridine-3'-phosphorothioate 5'-(E)-Vinylphosphonate
  modified_base 2: mod_base = OTHER; note = 2'-deoxy-2'-fluoroadenosine-3'-phosphorothioate
  modified_base 3: mod_base = OTHER; note = 2'-O-methylguanosine-3'-phosphate
  modified_base 4: mod_base = OTHER; note = 2'-O-methyladenosine-3'-phosphate
  modified_base 5: mod_base = OTHER; note = 2'-O-methylcytidine-3'-phosphate
  modified_base 6: mod_base = OTHER; note = 2'-deoxy-2'-fluorocytidine-3'-phosphate
  modified_base 7: mod_base = OTHER; note = 2'-O-methyladenosine-3'-phosphate
  modified_base 8: mod_base = OTHER; note = 2'-deoxy-2'-fluoroguanosine-3'-phosphate
  modified_base 9: mod_base = OTHER; note = 2'-deoxy-2'-fluoroguanosine-3'-phosphate
  modified_base 10: mod_base = OTHER; note = 2'-O-methylcytidine-3'-phosphate
  modified_base 11: mod_base = OTHER; note = 2'-O-methylcytidine-3'-phosphate
  modified_base 12: mod_base = OTHER; note = 2'-O-methyladenosine-3'-phosphate
  modified_base 13: mod_base = OTHER; note = 2'-O-methyladenosine-3'-phosphate
  modified_base 14: mod_base = OTHER; note = 2'-deoxy-2'-fluoroadenosine-3'-phosphate
  modified_base 15: mod_base = OTHER; note = 2'-O-methylguanosine-3'-phosphate
  modified_base 16: mod_base = OTHER; note = 2'-deoxy-2'-fluorouridine-3'-phosphate
  modified_base 17: mod_base = OTHER; note = 2'-O-methylcytidine-3'-phosphate
  modified_base 18: mod_base = OTHER; note = 2'-O-methylcytidine-3'-phosphate
  modified_base 19: mod_base = OTHER; note = 2'-O-methyladenosine-3'-phosphate
  modified_base 20: mod_base = OTHER; note = 2'-O-methylguanosine-3'-phosphate
  modified_base 21: mod_base = OTHER; note = 2'-O-methylguanosine-3'-phosphorothioate
  modified_base 22: mod_base = OTHER; note = 2'-O-methylcytidine-3'-phosphorothioate
  modified_base 23: mod_base = OTHER; note = 2'-O-methyluridine
tagaccaggccaaagtccaggct

SEQ ID NO: 2817 - RNA, 23 nt, synthetic construct
  source 1..23: mol_type = other RNA
  modified_base 1: mod_base = OTHER; note = 2'-O-methyluridine-3'-phosphorothioate 5'-(E)-Vinylphosphonate
  modified_base 2: mod_base = OTHER; note = 2'-deoxy-2'-fluoroadenosine-3'-phosphorothioate
  modified_base 3: mod_base = OTHER; note = 2'-O-methyluridine-3'-phosphate
  modified_base 4: mod_base = OTHER; note = 2'-O-methyluridine-3'-phosphate
  modified_base 5: mod_base = OTHER; note = 2'-O-methyluridine-3'-phosphate
  modified_base 6: mod_base = OTHER; note = 2'-deoxy-2'-fluorocytidine-3'-phosphate
  modified_base 7: mod_base = OTHER; note = 2'-O-methyladenosine-3'-phosphate
  modified_base 8: mod_base = OTHER; note = 2'-deoxy-2'-fluorouridine-3'-phosphate
  modified_base 9: mod_base = OTHER; note = 2'-deoxy-2'-fluoroadenosine-3'-phosphate
  modified_base 10: mod_base = OTHER; note = 2'-O-methylguanosine-3'-phosphate
  modified_base 11: mod_base = OTHER; note = 2'-O-methyluridine-3'-phosphate
  modified_base 12: mod_base = OTHER; note = 2'-O-methyluridine-3'-phosphate
  modified_base 13: mod_base = OTHER; note = 2'-O-methylguanosine-3'-phosphate
  modified_base 14: mod_base = OTHER; note = 2'-deoxy-2'-fluoroadenosine-3'-phosphate
  modified_base 15: mod_base = OTHER; note = 2'-O-methyladenosine-3'-phosphate
  modified_base 16: mod_base = OTHER; note = 2'-deoxy-2'-fluoroguanosine-3'-phosphate
  modified_base 17: mod_base = OTHER; note = 2'-O-methylcytidine-3'-phosphate
  modified_base 18: mod_base = OTHER; note = 2'-O-methyladenosine-3'-phosphate
  modified_base 19: mod_base = OTHER; note = 2'-O-methylcytidine-3'-phosphate
  modified_base 20: mod_base = OTHER; note = 2'-O-methyladenosine-3'-phosphate
  modified_base 21: mod_base = OTHER; note = 2'-O-methyluridine-3'-phosphorothioate
  modified_base 22: mod_base = OTHER; note = 2'-O-methylcytidine-3'-phosphorothioate
  modified_base 23: mod_base = OTHER; note = 2'-O-methyluridine
tatttcatagttgaagcacatct

SEQ ID NO: 2818 - RNA, 23 nt, synthetic construct
  source 1..23: mol_type = other RNA
  modified_base 1: mod_base = OTHER; note = 2'-O-methyluridine-3'-phosphorothioate 5'-(E)-Vinylphosphonate
  modified_base 2: mod_base = OTHER; note = 2'-deoxy-2'-fluorocytidine-3'-phosphorothioate
  modified_base 3: mod_base = OTHER; note = 2'-O-methylguanosine-3'-phosphate
  modified_base 4: mod_base = OTHER; note = 2'-O-methyluridine-3'-phosphate
  modified_base 5: mod_base = OTHER; note = 2'-O-methyladenosine-3'-phosphate
  modified_base 6: mod_base = OTHER; note = 2'-deoxy-2'-fluoroguanosine-3'-phosphate
  modified_base 7: mod_base = OTHER; note = 2'-O-methyluridine-3'-phosphate
  modified_base 8: mod_base = OTHER; note = 2'-deoxy-2'-fluorouridine-3'-phosphate
  modified_base 9: mod_base = OTHER; note = 2'-deoxy-2'-fluoroguanosine-3'-phosphate
  modified_base 10: mod_base = OTHER; note = 2'-O-methylcytidine-3'-phosphate
  modified_base 11: mod_base = OTHER; note = 2'-O-methyladenosine-3'-phosphate
  modified_base 12: mod_base = OTHER; note = 2'-O-methylguanosine-3'-phosphate
  modified_base 13: mod_base = OTHER; note = 2'-O-methylcytidine-3'-phosphate
  modified_base 14: mod_base = OTHER; note = 2'-deoxy-2'-fluoroadenosine-3'-phosphate
  modified_base 15: mod_base = OTHER; note = 2'-O-methylguanosine-3'-phosphate
  modified_base 16: mod_base = OTHER; note = 2'-deoxy-2'-fluoroadenosine-3'-phosphate
  modified_base 17: mod_base = OTHER; note = 2'-O-methyladenosine-3'-phosphate
  modified_base 18: mod_base = OTHER; note = 2'-O-methylcytidine-3'-phosphate
  modified_base 19: mod_base = OTHER; note = 2'-O-methyladenosine-3'-phosphate
  modified_base 20: mod_base = OTHER; note = 2'-O-methylcytidine-3'-phosphate
  modified_base 21: mod_base = OTHER; note = 2'-O-methyladenosine-3'-phosphorothioate
  modified_base 22: mod_base = OTHER; note = 2'-O-methylcytidine-3'-phosphorothioate
  modified_base 23: mod_base = OTHER; note = 2'-O-methylguanosine
tcgtagttgcagcagaacacacg

SEQ ID NO: 2819 - RNA, 23 nt, synthetic construct
  source 1..23: mol_type = other RNA
  modified_base 1: mod_base = OTHER; note = 2'-O-methyluridine-3'-phosphorothioate 5'-(E)-Vinylphosphonate
  modified_base 2: mod_base = OTHER; note = 2'-deoxy-2'-fluoroadenosine-3'-phosphorothioate
  modified_base 3: mod_base = OTHER; note = 2'-O-methylguanosine-3'-phosphate
  modified_base 4: mod_base = OTHER; note = 2'-O-methylguanosine-3'-phosphate
  modified_base 5: mod_base = OTHER; note = 2'-O-methylguanosine-3'-phosphate
  modified_base 6: mod_base = OTHER; note = 2'-deoxy-2'-fluorocytidine-3'-phosphate
  modified_base 7: mod_base = OTHER; note = 2'-O-methyladenosine-3'-phosphate
  modified_base 8: mod_base = OTHER; note = 2'-deoxy-2'-fluorouridine-3'-phosphate
  modified_base 9: mod_base = OTHER; note = 2'-deoxy-2'-fluoroguanosine-3'-phosphate
  modified_base 10: mod_base = OTHER; note = 2'-O-methylguanosine-3'-phosphate
  modified_base 11: mod_base = OTHER; note = 2'-O-methylcytidine-3'-phosphate
  modified_base 12: mod_base = OTHER; note = 2'-O-methylcytidine-3'-phosphate
  modified_base 13: mod_base = OTHER; note = 2'-O-methylguanosine-3'-phosphate
  modified_base 14: mod_base = OTHER; note = 2'-deoxy-2'-fluorouridine-3'-phosphate
  modified_base 15: mod_base = OTHER; note = 2'-O-methyladenosine-3'-phosphate
  modified_base 16: mod_base = OTHER; note = 2'-deoxy-2'-fluoroguanosine-3'-phosphate
  modified_base 17: mod_base = OTHER; note = 2'-O-methyladenosine-3'-phosphate
  modified_base 18: mod_base = OTHER; note = 2'-O-methylguanosine-3'-phosphate
  modified_base 19: mod_base = OTHER; note = 2'-O-methylcytidine-3'-phosphate
  modified_base 20: mod_base = OTHER; note = 2'-O-methyluridine-3'-phosphate
  modified_base 21: mod_base = OTHER; note = 2'-O-methylguanosine-3'-phosphorothioate
  modified_base 22: mod_base = OTHER; note = 2'-O-methylguanosine-3'-phosphorothioate
  modified_base 23: mod_base = OTHER; note = 2'-O-methyluridine
tagggcatggccgtagagctggt

SEQ ID NO: 2820 - RNA, 23 nt, synthetic construct
  source 1..23: mol_type = other RNA
  modified_base 1: mod_base = OTHER; note = 2'-O-methyluridine-3'-phosphorothioate 5'-(E)-Vinylphosphonate
  modified_base 2: mod_base = OTHER; note = 2'-deoxy-2'-fluoroguanosine-3'-phosphorothioate
  modified_base 3: mod_base = OTHER; note = 2'-O-methyluridine-3'-phosphate
  modified_base 4: mod_base = OTHER; note = 2'-O-methylguanosine-3'-phosphate
  modified_base 5: mod_base = OTHER; note = 2'-O-methylguanosine-3'-phosphate
  modified_base 6: mod_base = OTHER; note = 2'-deoxy-2'-fluorouridine-3'-phosphate
  modified_base 7: mod_base = OTHER; note = 2'-O-methylcytidine-3'-phosphate
  modified_base 8: mod_base = OTHER; note = 2'-deoxy-2'-fluoroadenosine-3'-phosphate
  modified_base 9: mod_base = OTHER; note = 2'-deoxy-2'-fluoroguanosine-3'-phosphate
  modified_base 10: mod_base = OTHER; note = 2'-O-methylcytidine-3'-phosphate
  modified_base 11: mod_base = OTHER; note = 2'-O-methyluridine-3'-phosphate
  modified_base 12: mod_base = OTHER; note = 2'-O-methylcytidine-3'-phosphate
  modified_base 13: mod_base = OTHER; note = 2'-O-methyluridine-3'-phosphate
  modified_base 14: mod_base = OTHER; note = 2'-deoxy-2'-fluoroguanosine-3'-phosphate
  modified_base 15: mod_base = OTHER; note = 2'-O-methyluridine-3'-phosphate
  modified_base 16: mod_base = OTHER; note = 2'-deoxy-2'-fluoroguanosine-3'-phosphate
  modified_base 17: mod_base = OTHER; note = 2'-O-methyladenosine-3'-phosphate
  modified_base 18: mod_base = OTHER; note = 2'-O-methylguanosine-3'-phosphate
  modified_base 19: mod_base = OTHER; note = 2'-O-methylguanosine-3'-phosphate
  modified_base 20: mod_base = OTHER; note = 2'-O-methyladenosine-3'-phosphate
  modified_base 21: mod_base = OTHER; note = 2'-O-methyluridine-3'-phosphorothioate
  modified_base 22: mod_base = OTHER; note = 2'-O-methylcytidine-3'-phosphorothioate
  modified_base 23: mod_base = OTHER; note = 2'-O-methylcytidine
tgtggtcagctctgtgaggatcc

SEQ ID NO: 2821 - RNA, 23 nt, synthetic construct
  source 1..23: mol_type = other RNA
  modified_base 1: mod_base = OTHER; note = 2'-O-methyluridine-3'-phosphorothioate 5'-(E)-Vinylphosphonate
  modified_base 2: mod_base = OTHER; note = 2'-deoxy-2'-fluoroadenosine-3'-phosphorothioate
  modified_base 3: mod_base = OTHER; note = 2'-O-methylguanosine-3'-phosphate
  modified_base 4: mod_base = OTHER; note = 2'-O-methyluridine-3'-phosphate
  modified_base 5: mod_base = OTHER; note = 2'-O-methylguanosine-3'-phosphate
  modified_base 6: mod_base = OTHER; note = 2'-deoxy-2'-fluoroguanosine-3'-phosphate
  modified_base 7: mod_base = OTHER; note = 2'-O-methyladenosine-3'-phosphate
  modified_base 8: mod_base = OTHER; note = 2'-deoxy-2'-fluorocytidine-3'-phosphate
  modified_base 9: mod_base = OTHER; note = 2'-deoxy-2'-fluorouridine-3'-phosphate
  modified_base 10: mod_base = OTHER; note = 2'-O-methylcytidine-3'-phosphate
  modified_base 11: mod_base = OTHER; note = 2'-O-methyladenosine-3'-phosphate
  modified_base 12: mod_base = OTHER; note = 2'-O-methylguanosine-3'-phosphate
  modified_base 13: mod_base = OTHER; note = 2'-O-methyluridine-3'-phosphate
  modified_base 14: mod_base = OTHER; note = 2'-deoxy-2'-fluorocytidine-3'-phosphate
  modified_base 15: mod_base = OTHER; note = 2'-O-methylguanosine-3'-phosphate
  modified_base 16: mod_base = OTHER; note = 2'-deoxy-2'-fluorouridine-3'-phosphate
  modified_base 17: mod_base = OTHER; note = 2'-O-methyladenosine-3'-phosphate
  modified_base 18: mod_base = OTHER; note = 2'-O-methylguanosine-3'-phosphate
  modified_base 19: mod_base = OTHER; note = 2'-O-methyluridine-3'-phosphate
  modified_base 20: mod_base = OTHER; note = 2'-O-methylguanosine-3'-phosphate
  modified_base 21: mod_base = OTHER; note = 2'-O-methylguanosine-3'-phosphorothioate
  modified_base 22: mod_base = OTHER; note = 2'-O-methylcytidine-3'-phosphorothioate
  modified_base 23: mod_base = OTHER; note = 2'-O-methyluridine
tagtggactcagtcgtagtggct

SEQ ID NO: 2822 - RNA, 23 nt, synthetic construct
  source 1..23: mol_type = other RNA
  modified_base 1: mod_base = OTHER; note = 2'-O-methyluridine-3'-phosphorothioate 5'-(E)-Vinylphosphonate
  modified_base 2: mod_base = OTHER; note = 2'-deoxy-2'-fluorocytidine-3'-phosphorothioate
  modified_base 3: mod_base = OTHER; note = 2'-O-methyluridine-3'-phosphate
  modified_base 4: mod_base = OTHER; note = 2'-O-methylguanosine-3'-phosphate
  modified_base 5: mod_base = OTHER; note = 2'-O-methyluridine-3'-phosphate
  modified_base 6: mod_base = OTHER; note = 2'-deoxy-2'-fluoroguanosine-3'-phosphate
  modified_base 7: mod_base = OTHER; note = 2'-O-methyladenosine-3'-phosphate
  modified_base 8: mod_base = OTHER; note = 2'-deoxy-2'-fluoroguanosine-3'-phosphate
  modified_base 9: mod_base = OTHER; note = 2'-deoxy-2'-fluoroguanosine-3'-phosphate
  modified_base 10: mod_base = OTHER; note = 2'-O-methyladenosine-3'-phosphate
  modified_base 11: mod_base = OTHER; note = 2'-O-methyluridine-3'-phosphate
  modified_base 12: mod_base = OTHER; note = 2'-O-methylcytidine-3'-phosphate
  modified_base 13: mod_base = OTHER; note = 2'-O-methylcytidine-3'-phosphate
  modified_base 14: mod_base = OTHER; note = 2'-deoxy-2'-fluoroadenosine-3'-phosphate
  modified_base 15: mod_base = OTHER; note = 2'-O-methylguanosine-3'-phosphate
  modified_base 16: mod_base = OTHER; note = 2'-deoxy-2'-fluoroguanosine-3'-phosphate
  modified_base 17: mod_base = OTHER; note = 2'-O-methyluridine-3'-phosphate
  modified_base 18: mod_base = OTHER; note = 2'-O-methylguanosine-3'-phosphate
  modified_base 19: mod_base = OTHER; note = 2'-O-methylguanosine-3'-phosphate
  modified_base 20: mod_base = OTHER; note = 2'-O-methyluridine-3'-phosphate
  modified_base 21: mod_base = OTHER; note = 2'-O-methylcytidine-3'-phosphorothioate
  modified_base 22: mod_base = OTHER; note = 2'-O-methylcytidine-3'-phosphorothioate
  modified_base 23: mod_base = OTHER; note = 2'-O-methylcytidine
tctgtgaggatccaggtggtccc

SEQ ID NO: 2823 - RNA, 23 nt, synthetic construct
  source 1..23: mol_type = other RNA
  modified_base 1: mod_base = OTHER; note = 2'-O-methyluridine-3'-phosphorothioate 5'-(E)-Vinylphosphonate
  modified_base 2: mod_base = OTHER; note = 2'-deoxy-2'-fluorouridine-3'-phosphorothioate
  modified_base 3: mod_base = OTHER; note = 2'-O-methylcytidine-3'-phosphate
  modified_base 4: mod_base = OTHER; note = 2'-O-methyladenosine-3'-phosphate
  modified_base 5: mod_base = OTHER; note = 2'-O-methylcytidine-3'-phosphate
  modified_base 6: mod_base = OTHER; note = 2'-deoxy-2'-fluoroguanosine-3'-phosphate
  modified_base 7: mod_base = OTHER; note = 2'-O-methylguanosine-3'-phosphate
  modified_base 8: mod_base = OTHER; note = 2'-deoxy-2'-fluorouridine-3'-phosphate
  modified_base 9: mod_base = OTHER; note = 2'-deoxy-2'-fluoroguanosine-3'-phosphate
  modified_base 10: mod_base = OTHER; note = 2'-O-methylguanosine-3'-phosphate
  modified_base 11: mod_base = OTHER; note = 2'-O-methylcytidine-3'-phosphate
  modified_base 12: mod_base = OTHER; note = 2'-O-methyluridine-3'-phosphate
  modified_base 13: mod_base = OTHER; note = 2'-O-methylguanosine-3'-phosphate
  modified_base 14: mod_base = OTHER; note = 2'-deoxy-2'-fluorouridine-3'-phosphate
  modified_base 15: mod_base = OTHER; note = 2'-O-methyladenosine-3'-phosphate
  modified_base 16: mod_base = OTHER; note = 2'-deoxy-2'-fluoroguanosine-3'-phosphate
  modified_base 17: mod_base = OTHER; note = 2'-O-methyluridine-3'-phosphate
  modified_base 18: mod_base = OTHER; note = 2'-O-methylguanosine-3'-phosphate
  modified_base 19: mod_base = OTHER; note = 2'-O-methylcytidine-3'-phosphate
  modified_base 20: mod_base = OTHER; note = 2'-O-methyluridine-3'-phosphate
  modified_base 21: mod_base = OTHER; note = 2'-O-methylcytidine-3'-phosphorothioate
  modified_base 22: mod_base = OTHER; note = 2'-O-methylguanosine-3'-phosphorothioate
  modified_base 23: mod_base = OTHER; note = 2'-O-methylguanosine
ttcacggtggctgtagtgctcgg

SEQ ID NO: 2824 - RNA, 23 nt, synthetic construct
  source 1..23: mol_type = other RNA
  modified_base 1: mod_base = OTHER; note = 2'-O-methyluridine-3'-phosphorothioate 5'-(E)-Vinylphosphonate
  modified_base 2: mod_base = OTHER; note = 2'-deoxy-2'-fluoroadenosine-3'-phosphorothioate
  modified_base 3: mod_base = OTHER; note = 2'-O-methylguanosine-3'-phosphate
  modified_base 4: mod_base = OTHER; note = 2'-O-methylcytidine-3'-phosphate
  modified_base 5: mod_base = OTHER; note = 2'-O-methyladenosine-3'-phosphate
  modified_base 6: mod_base = OTHER; note = 2'-deoxy-2'-fluoroguanosine-3'-phosphate
  modified_base 7: mod_base = OTHER; note = 2'-O-methyluridine-3'-phosphate
  modified_base 8: mod_base = OTHER; note = 2'-deoxy-2'-fluorouridine-3'-phosphate
  modified_base 9: mod_base = OTHER; note = 2'-deoxy-2'-fluoroguanosine-3'-phosphate
  modified_base 10: mod_base = OTHER; note = 2'-O-methylcytidine-3'-phosphate
  modified_base 11: mod_base = OTHER; note = 2'-O-methylcytidine-3'-phosphate
  modified_base 12: mod_base = OTHER; note = 2'-O-methyluridine-3'-phosphate
  modified_base 13: mod_base = OTHER; note = 2'-O-methylguanosine-3'-phosphate
  modified_base 14: mod_base = OTHER; note = 2'-deoxy-2'-fluoroguanosine-3'-phosphate
  modified_base 15: mod_base = OTHER; note = 2'-O-methylguanosine-3'-phosphate
  modified_base 16: mod_base = OTHER; note = 2'-deoxy-2'-fluorouridine-3'-phosphate
  modified_base 17: mod_base = OTHER; note = 2'-O-methylguanosine-3'-phosphate
  modified_base 18: mod_base = OTHER; note = 2'-O-methylguanosine-3'-phosphate
  modified_base 19: mod_base = OTHER; note = 2'-O-methyladenosine-3'-phosphate
  modified_base 20: mod_base = OTHER; note = 2'-O-methylguanosine-3'-phosphate
  modified_base 21: mod_base = OTHER; note = 2'-O-methylguanosine-3'-phosphorothioate
  modified_base 22: mod_base = OTHER; note = 2'-O-methyladenosine-3'-phosphorothioate
  modified_base 23: mod_base = OTHER; note = 2'-O-methylguanosine
tagcagttgcctgggtggaggag

SEQ ID NO: 2825 - RNA, 23 nt, synthetic construct
  source 1..23: mol_type = other RNA
  modified_base 1: mod_base = OTHER; note = 2'-O-methyluridine-3'-phosphorothioate 5'-(E)-Vinylphosphonate
  modified_base 2: mod_base = OTHER; note = 2'-deoxy-2'-fluorouridine-3'-phosphorothioate
  modified_base 3: mod_base = OTHER; note = 2'-O-methylguanosine-3'-phosphate
  modified_base 4: mod_base = OTHER; note = 2'-O-methyladenosine-3'-phosphate
  modified_base 5: mod_base = OTHER; note = 2'-O-methylcytidine-3'-phosphate
  modified_base 6: mod_base = OTHER; note = 2'-deoxy-2'-fluorouridine-3'-phosphate
  modified_base 7: mod_base = OTHER; note = 2'-O-methylguanosine-3'-phosphate
  modified_base 8: mod_base = OTHER; note = 2'-deoxy-2'-fluorouridine-3'-phosphate
  modified_base 9: mod_base = OTHER; note = 2'-deoxy-2'-fluoroguanosine-3'-phosphate
  modified_base 10: mod_base = OTHER; note = 2'-O-methylguanosine-3'-phosphate
  modified_base 11: mod_base = OTHER; note = 2'-O-methylguanosine-3'-phosphate
  modified_base 12: mod_base = OTHER; note = 2'-O-methyluridine-3'-phosphate
  modified_base 13: mod_base = OTHER; note = 2'-O-methylguanosine-3'-phosphate
  modified_base 14: mod_base = OTHER; note = 2'-deoxy-2'-fluorouridine-3'-phosphate
  modified_base 15: mod_base = OTHER; note = 2'-O-methylcytidine-3'-phosphate
  modified_base 16: mod_base = OTHER; note = 2'-deoxy-2'-fluoroguanosine-3'-phosphate
  modified_base 17: mod_base = OTHER; note = 2'-O-methyluridine-3'-phosphate
  modified_base 18: mod_base = OTHER; note = 2'-O-methylguanosine-3'-phosphate
  modified_base 19: mod_base = OTHER; note = 2'-O-methylguanosine-3'-phosphate
  modified_base 20: mod_base = OTHER; note = 2'-O-methylcytidine-3'-phosphate
  modified_base 21: mod_base = OTHER; note = 2'-O-methylcytidine-3'-phosphorothioate
  modified_base 22: mod_base = OTHER; note = 2'-O-methylguanosine-3'-phosphorothioate
  modified_base 23: mod_base = OTHER; note = 2'-O-methyluridine
ttgactgtgggtgtcgtggccgt

SEQ ID NO: 2826 - RNA, 23 nt, synthetic construct
  source 1..23: mol_type = other RNA
  modified_base 1: mod_base = OTHER; note = 2'-O-methyluridine-3'-phosphorothioate 5'-(E)-Vinylphosphonate
  modified_base 2: mod_base = OTHER; note = 2'-deoxy-2'-fluoroguanosine-3'-phosphorothioate
  modified_base 3: mod_base = OTHER; note = 2'-O-methyladenosine-3'-phosphate
  modified_base 4: mod_base = OTHER; note = 2'-O-methyladenosine-3'-phosphate
  modified_base 5: mod_base = OTHER; note = 2'-O-methylguanosine-3'-phosphate
  modified_base 6: mod_base = OTHER; note = 2'-deoxy-2'-fluoroguanosine-3'-phosphate
  modified_base 7: mod_base = OTHER; note = 2'-O-methylguanosine-3'-phosphate
  modified_base 8: mod_base = OTHER; note = 2'-deoxy-2'-fluoroadenosine-3'-phosphate
  modified_base 9: mod_base = OTHER; note = 2'-deoxy-2'-fluoroguanosine-3'-phosphate
  modified_base 10: mod_base = OTHER; note = 2'-O-methyluridine-3'-phosphate
  modified_base 11: mod_base = OTHER; note = 2'-O-methylguanosine-3'-phosphate
  modified_base 12: mod_base = OTHER; note = 2'-O-methylguanosine-3'-phosphate
  modified_base 13: mod_base = OTHER; note = 2'-O-methylcytidine-3'-phosphate
  modified_base 14: mod_base = OTHER; note = 2'-deoxy-2'-fluorouridine-3'-phosphate
  modified_base 15: mod_base = OTHER; note = 2'-O-methyluridine-3'-phosphate
  modified_base 16: mod_base = OTHER; note = 2'-deoxy-2'-fluorouridine-3'-phosphate
  modified_base 17: mod_base = OTHER; note = 2'-O-methylguanosine-3'-phosphate
  modified_base 18: mod_base = OTHER; note = 2'-O-methylguanosine-3'-phosphate
  modified_base 19: mod_base = OTHER; note = 2'-O-methyladenosine-3'-phosphate
  modified_base 20: mod_base = OTHER; note = 2'-O-methylguanosine-3'-phosphate
  modified_base 21: mod_base = OTHER; note = 2'-O-methylcytidine-3'-phosphorothioate
  modified_base 22: mod_base = OTHER; note = 2'-O-methyluridine-3'-phosphorothioate
  modified_base 23: mod_base = OTHER; note = 2'-O-methylguanosine
tgaagggagtggctttggagctg

SEQ ID NO: 2827 - RNA, 23 nt, synthetic construct
  source 1..23: mol_type = other RNA
  modified_base 1: mod_base = OTHER; note = 2'-O-methyluridine-3'-phosphorothioate 5'-(E)-Vinylphosphonate
  modified_base 2: mod_base = OTHER; note = 2'-deoxy-2'-fluoroguanosine-3'-phosphorothioate
  modified_base 3: mod_base = OTHER; note = 2'-O-methylcytidine-3'-phosphate
  modified_base 4: mod_base = OTHER; note = 2'-O-methyluridine-3'-phosphate
  modified_base 5: mod_base = OTHER; note = 2'-O-methylguanosine-3'-phosphate
  modified_base 6: mod_base = OTHER; note = 2'-deoxy-2'-fluorouridine-3'-phosphate
  modified_base 7: mod_base = OTHER; note = 2'-O-methyladenosine-3'-phosphate
  modified_base 8: mod_base = OTHER; note = 2'-deoxy-2'-fluoroadenosine-3'-phosphate
  modified_base 9: mod_base = OTHER; note = 2'-deoxy-2'-fluoroadenosine-3'-phosphate
  modified_base 10: mod_base = OTHER; note = 2'-O-methylguanosine-3'-phosphate
  modified_base 11: mod_base = OTHER; note = 2'-O-methylcytidine-3'-phosphate
  modified_base 12: mod_base = OTHER; note = 2'-O-methyluridine-3'-phosphate
  modified_base 13: mod_base = OTHER; note = 2'-O-methylguanosine-3'-phosphate
  modified_base 14: mod_base = OTHER; note = 2'-deoxy-2'-fluoroguanosine-3'-phosphate
  modified_base 15: mod_base = OTHER; note = 2'-O-methyluridine-3'-phosphate
  modified_base 16: mod_base = OTHER; note = 2'-deoxy-2'-fluoroadenosine-3'-phosphate
  modified_base 17: mod_base = OTHER; note = 2'-O-methylguanosine-3'-phosphate
  modified_base 18: mod_base = OTHER; note = 2'-O-methylcytidine-3'-phosphate
  modified_base 19: mod_base = OTHER; note = 2'-O-methyluridine-3'-phosphate
  modified_base 20: mod_base = OTHER; note = 2'-O-methylguanosine-3'-phosphate
  modified_base 21: mod_base = OTHER; note = 2'-O-methyluridine-3'-phosphorothioate
  modified_base 22: mod_base = OTHER; note = 2'-O-methylguanosine-3'-phosphorothioate
  modified_base 23: mod_base = OTHER; note = 2'-O-methylguanosine
tgctgtaaagctggtagctgtgg

SEQ ID NO: 2828 - RNA, 23 nt, synthetic construct
  source 1..23: mol_type = other RNA
  modified_base 1: mod_base = OTHER; note = 2'-O-methyluridine-3'-phosphorothioate 5'-(E)-Vinylphosphonate
  modified_base 2: mod_base = OTHER; note = 2'-deoxy-2'-fluoroadenosine-3'-phosphorothioate
  modified_base 3: mod_base = OTHER; note = 2'-O-methylcytidine-3'-phosphate
  modified_base 4: mod_base = OTHER; note = 2'-O-methyladenosine-3'-phosphate
  modified_base 5: mod_base = OTHER; note = 2'-O-methylguanosine-3'-phosphate
  modified_base 6: mod_base = OTHER; note = 2'-deoxy-2'-fluorouridine-3'-phosphate
  modified_base 7: mod_base = OTHER; note = 2'-O-methylcytidine-3'-phosphate
  modified_base 8: mod_base = OTHER; note = 2'-deoxy-2'-fluorouridine-3'-phosphate
  modified_base 9: mod_base = OTHER; note = 2'-deoxy-2'-fluorocytidine-3'-phosphate
  modified_base 10: mod_base = OTHER; note = 2'-O-methyluridine-3'-phosphate
  modified_base 11: mod_base = OTHER; note = 2'-O-methylguanosine-3'-phosphate
  modified_base 12: mod_base = OTHER; note = 2'-O-methylguanosine-3'-phosphate
  modified_base 13: mod_base = OTHER; note = 2'-O-methyladenosine-3'-phosphate
  modified_base 14: mod_base = OTHER; note = 2'-deoxy-2'-fluoroguanosine-3'-phosphate
  modified_base 15: mod_base = OTHER; note = 2'-O-methyluridine-3'-phosphate
  modified_base 16: mod_base = OTHER; note = 2'-deoxy-2'-fluoroguanosine-3'-phosphate
  modified_base 17: mod_base = OTHER; note = 2'-O-methylguanosine-3'-phosphate
  modified_base 18: mod_base = OTHER; note = 2'-O-methyladenosine-3'-phosphate
  modified_base 19: mod_base = OTHER; note = 2'-O-methylguanosine-3'-phosphate
  modified_base 20: mod_base = OTHER; note = 2'-O-methylguanosine-3'-phosphate
  modified_base 21: mod_base = OTHER; note = 2'-O-methyladenosine-3'-phosphorothioate
  modified_base 22: mod_base = OTHER; note = 2'-O-methylguanosine-3'-phosphorothioate
  modified_base 23: mod_base = OTHER; note = 2'-O-methylguanosine
tacagtctctggagtggaggagg

SEQ ID NO: 2829 - RNA, 23 nt, synthetic construct
  source 1..23: mol_type = other RNA
  modified_base 1: mod_base = OTHER; note = 2'-O-methyluridine-3'-phosphorothioate 5'-(E)-Vinylphosphonate
  modified_base 2: mod_base = OTHER; note = 2'-deoxy-2'-fluorocytidine-3'-phosphorothioate
  modified_base 3: mod_base = OTHER; note = 2'-O-methylguanosine-3'-phosphate
  modified_base 4: mod_base = OTHER; note = 2'-O-methyluridine-3'-phosphate
  modified_base 5: mod_base = OTHER; note = 2'-O-methylguanosine-3'-phosphate
  modified_base 6: mod_base = OTHER; note = 2'-deoxy-2'-fluoroguanosine-3'-phosphate
  modified_base 7: mod_base = OTHER; note = 2'-O-methyluridine-3'-phosphate
  modified_base 8: mod_base = OTHER; note = 2'-deoxy-2'-fluoroguanosine-3'-phosphate
  modified_base 9: mod_base = OTHER; note = 2'-deoxy-2'-fluoroguanosine-3'-phosphate
  modified_base 10: mod_base = OTHER; note = 2'-O-methyluridine-3'-phosphate
  modified_base 11: mod_base = OTHER; note = 2'-O-methyladenosine-3'-phosphate
  modified_base 12: mod_base = OTHER; note = 2'-O-methyladenosine-3'-phosphate
  modified_base 13: mod_base = OTHER; note = 2'-O-methylguanosine-3'-phosphate
  modified_base 14: mod_base = OTHER; note = 2'-deoxy-2'-fluorocytidine-3'-phosphate
  modified_base 15: mod_base = OTHER; note = 2'-O-methyladenosine-3'-phosphate
  modified_base 16: mod_base = OTHER; note = 2'-deoxy-2'-fluorocytidine-3'-phosphate
  modified_base 17: mod_base = OTHER; note = 2'-O-methyluridine-3'-phosphate
  modified_base 18: mod_base = OTHER; note = 2'-O-methylguanosine-3'-phosphate
  modified_base 19: mod_base = OTHER; note = 2'-O-methyluridine-3'-phosphate
  modified_base 20: mod_base = OTHER; note = 2'-O-methylguanosine-3'-phosphate
  modified_base 21: mod_base = OTHER; note = 2'-O-methylguanosine-3'-phosphorothioate
  modified_base 22: mod_base = OTHER; note = 2'-O-methyladenosine-3'-phosphorothioate
  modified_base 23: mod_base = OTHER; note = 2'-O-methylguanosine
tcgtggtggtaagcactgtggag

SEQ ID NO: 2830 - RNA, 23 nt, synthetic construct
  source 1..23: mol_type = other RNA
  modified_base 1: mod_base = OTHER; note = 2'-O-methyluridine-3'-phosphorothioate 5'-(E)-Vinylphosphonate
  modified_base 2: mod_base = OTHER; note = 2'-deoxy-2'-fluoroadenosine-3'-phosphorothioate
  modified_base 3: mod_base = OTHER; note = 2'-O-methylguanosine-3'-phosphate
  modified_base 4: mod_base = OTHER; note = 2'-O-methylcytidine-3'-phosphate
  modified_base 5: mod_base = OTHER; note = 2'-O-methyladenosine-3'-phosphate
  modified_base 6: mod_base = OTHER; note = 2'-deoxy-2'-fluorocytidine-3'-phosphate
  modified_base 7: mod_base = OTHER; note = 2'-O-methyluridine-3'-phosphate
  modified_base 8: mod_base = OTHER; note = 2'-deoxy-2'-fluorouridine-3'-phosphate
  modified_base 9: mod_base = OTHER; note = 2'-deoxy-2'-fluorouridine-3'-phosphate
  modified_base 10: mod_base = OTHER; note = 2'-O-methylguanosine-3'-phosphate
  modified_base 11: mod_base = OTHER; note = 2'-O-methylguanosine-3'-phosphate
  modified_base 12: mod_base = OTHER; note = 2'-O-methyluridine-3'-phosphate
  modified_base 13: mod_base = OTHER; note = 2'-O-methyladenosine-3'-phosphate
  modified_base 14: mod_base = OTHER; note = 2'-deoxy-2'-fluoroguanosine-3'-phosphate
  modified_base 15: mod_base = OTHER; note = 2'-O-methyluridine-3'-phosphate
  modified_base 16: mod_base = OTHER; note = 2'-deoxy-2'-fluoroguanosine-3'-phosphate
  modified_base 17: mod_base = OTHER; note = 2'-O-methyluridine-3'-phosphate
  modified_base 18: mod_base = OTHER; note = 2'-O-methylguanosine-3'-phosphate
  modified_base 19: mod_base = OTHER; note = 2'-O-methyladenosine-3'-phosphate
  modified_base 20: mod_base = OTHER; note = 2'-O-methylguanosine-3'-phosphate
  modified_base 21: mod_base = OTHER; note = 2'-O-methylcytidine-3'-phosphorothioate
  modified_base 22: mod_base = OTHER; note = 2'-O-methyluridine-3'-phosphorothioate
  modified_base 23: mod_base = OTHER; note = 2'-O-methylguanosine
tagcactttggtagtgtgagctg

SEQ ID NO: 2831 - RNA, 23 nt, synthetic construct
  source 1..23: mol_type = other RNA
  modified_base 1: mod_base = OTHER; note = 2'-O-methyluridine-3'-phosphorothioate 5'-(E)-Vinylphosphonate
  modified_base 2: mod_base = OTHER; note = 2'-deoxy-2'-fluorouridine-3'-phosphorothioate
  modified_base 3: mod_base = OTHER; note = 2'-O-methylguanosine-3'-phosphate
  modified_base 4: mod_base = OTHER; note = 2'-O-methyladenosine-3'-phosphate
  modified_base 5: mod_base = OTHER; note = 2'-O-methyladenosine-3'-phosphate
  modified_base 6: mod_base = OTHER; note = 2'-deoxy-2'-fluoroguanosine-3'-phosphate
  modified_base 7: mod_base = OTHER; note = 2'-O-methylcytidine-3'-phosphate
  modified_base 8: mod_base = OTHER; note = 2'-deoxy-2'-fluorocytidine-3'-phosphate
  modified_base 9: mod_base = OTHER; note = 2'-deoxy-2'-fluorocytidine-3'-phosphate
  modified_base 10: mod_base = OTHER; note = 2'-O-methylguanosine-3'-phosphate
  modified_base 11: mod_base = OTHER; note = 2'-O-methyluridine-3'-phosphate
  modified_base 12: mod_base = OTHER; note = 2'-O-methylguanosine-3'-phosphate
  modified_base 13: mod_base = OTHER; note = 2'-O-methylguanosine-3'-phosphate
  modified_base 14: mod_base = OTHER; note = 2'-deoxy-2'-fluorouridine-3'-phosphate
  modified_base 15: mod_base = OTHER; note = 2'-O-methyluridine-3'-phosphate
  modified_base 16: mod_base = OTHER; note = 2'-deoxy-2'-fluoroguanosine-3'-phosphate
  modified_base 17: mod_base = OTHER; note = 2'-O-methyluridine-3'-phosphate
  modified_base 18: mod_base = OTHER; note = 2'-O-methylguanosine-3'-phosphate
  modified_base 19: mod_base = OTHER; note = 2'-O-methylguanosine-3'-phosphate
  modified_base 20: mod_base = OTHER; note = 2'-O-methyluridine-3'-phosphate
  modified_base 21: mod_base = OTHER; note = 2'-O-methyladenosine-3'-phosphorothioate
  modified_base 22: mod_base = OTHER; note = 2'-O-methylguanosine-3'-phosphorothioate
  modified_base 23: mod_base = OTHER; note = 2'-O-methyluridine
ttgaagcccgtggttgtggtagt

SEQ ID NO: 2832 - RNA, 23 nt, synthetic construct
  source 1..23: mol_type = other RNA
  modified_base 1: mod_base = OTHER; note = 2'-O-methyluridine-3'-phosphorothioate 5'-(E)-Vinylphosphonate
  modified_base 2: mod_base = OTHER; note = 2'-deoxy-2'-fluorouridine-3'-phosphorothioate
  modified_base 3: mod_base = OTHER; note = 2'-O-methylguanosine-3'-phosphate
  modified_base 4: mod_base = OTHER; note = 2'-O-methyladenosine-3'-phosphate
  modified_base 5: mod_base = OTHER; note = 2'-O-methyluridine-3'-phosphate
  modified_base 6: mod_base = OTHER; note = 2'-deoxy-2'-fluorocytidine-3'-phosphate
  modified_base 7: mod_base = OTHER; note = 2'-O-methylcytidine-3'-phosphate
  modified_base 8: mod_base = OTHER; note = 2'-deoxy-2'-fluoroadenosine-3'-phosphate
  modified_base 9: mod_base = OTHER; note = 2'-deoxy-2'-fluorocytidine-3'-phosphate
  modified_base 10: mod_base = OTHER; note = 2'-O-methyladenosine-3'-phosphate
  modified_base 11: mod_base = OTHER; note = 2'-O-methylcytidine-3'-phosphate
  modified_base 12: mod_base = OTHER; note = 2'-O-methyluridine-3'-phosphate
  modified_base 13: mod_base = OTHER; note = 2'-O-methylguanosine-3'-phosphate
  modified_base 14: mod_base = OTHER; note = 2'-deoxy-2'-fluoroguanosine-3'-phosphate
  modified_base 15: mod_base = OTHER; note = 2'-O-methyladenosine-3'-phosphate
  modified_base 16: mod_base = OTHER; note = 2'-deoxy-2'-fluoroadenosine-3'-phosphate
  modified_base 17: mod_base = OTHER; note = 2'-O-methylguanosine-3'-phosphate
  modified_base 18: mod_base = OTHER; note = 2'-O-methylcytidine-3'-phosphate
  modified_base 19: mod_base = OTHER; note = 2'-O-methylguanosine-3'-phosphate
  modified_base 20: mod_base = OTHER; note = 2'-O-methyluridine-3'-phosphate
  modified_base 21: mod_base = OTHER; note = 2'-O-methylguanosine-3'-phosphorothioate
  modified_base 22: mod_base = OTHER; note = 2'-O-methylcytidine-3'-phosphorothioate
  modified_base 23: mod_base = OTHER; note = 2'-O-methylguanosine
ttgatccacactggaagcgtgcg

SEQ ID NO: 2833 - RNA, 23 nt, synthetic construct
  source 1..23: mol_type = other RNA
  modified_base 1: mod_base = OTHER; note = 2'-O-methyluridine-3'-phosphorothioate 5'-(E)-Vinylphosphonate
  modified_base 2: mod_base = OTHER; note = 2'-deoxy-2'-fluorouridine-3'-phosphorothioate
  modified_base 3: mod_base = OTHER; note = 2'-O-methylguanosine-3'-phosphate
  modified_base 4: mod_base = OTHER; note = 2'-O-methylguanosine-3'-phosphate
  modified_base 5: mod_base = OTHER; note = 2'-O-methyladenosine-3'-phosphate
  modified_base 6: mod_base = OTHER; note = 2'-deoxy-2'-fluoroadenosine-3'-phosphate
  modified_base 7: mod_base = OTHER; note = 2'-O-methylcytidine-3'-phosphate
  modified_base 8: mod_base = OTHER; note = 2'-deoxy-2'-fluorocytidine-3'-phosphate
  modified_base 9: mod_base = OTHER; note = 2'-deoxy-2'-fluorouridine-3'-phosphate
  modified_base 10: mod_base = OTHER; note = 2'-O-methylcytidine-3'-phosphate
  modified_base 11: mod_base = OTHER; note = 2'-O-methyluridine-3'-phosphate
  modified_base 12: mod_base = OTHER; note = 2'-O-methylguanosine-3'-phosphate
  modified_base 13: mod_base = OTHER; note = 2'-O-methylguanosine-3'-phosphate
  modified_base 14: mod_base = OTHER; note = 2'-deoxy-2'-fluorouridine-3'-phosphate
  modified_base 15: mod_base = OTHER; note = 2'-O-methyluridine-3'-phosphate
  modified_base 16: mod_base = OTHER; note = 2'-deoxy-2'-fluoroguanosine-3'-phosphate
  modified_base 17: mod_base = OTHER; note = 2'-O-methyluridine-3'-phosphate
  modified_base 18: mod_base = OTHER; note = 2'-O-methylguanosine-3'-phosphate
  modified_base 19: mod_base = OTHER; note = 2'-O-methylguanosine-3'-phosphate
  modified_base 20: mod_base = OTHER; note = 2'-O-methylguanosine-3'-phosphate
  modified_base 21: mod_base = OTHER; note = 2'-O-methyluridine-3'-phosphorothioate
  modified_base 22: mod_base = OTHER; note = 2'-O-methylguanosine-3'-phosphorothioate
  modified_base 23: mod_base = OTHER; note = 2'-O-methyluridine
ttggaacctctggttgtgggtgt

SEQ ID NO: 2834 - RNA, 23 nt, synthetic construct
  source 1..23: mol_type = other RNA
  modified_base 1: mod_base = OTHER; note = 2'-O-methyluridine-3'-phosphorothioate 5'-(E)-Vinylphosphonate
  modified_base 2: mod_base = OTHER; note = 2'-deoxy-2'-fluoroadenosine-3'-phosphorothioate
  modified_base 3: mod_base = OTHER; note = 2'-O-methylguanosine-3'-phosphate
  modified_base 4: mod_base = OTHER; note = 2'-O-methyluridine-3'-phosphate
  modified_base 5: mod_base = OTHER; note = 2'-O-methyluridine-3'-phosphate
  modified_base 6: mod_base = OTHER; note = 2'-deoxy-2'-fluoroguanosine-3'-phosphate
  modified_base 7: mod_base = OTHER; note = 2'-O-methyluridine-3'-phosphate
  modified_base 8: mod_base = OTHER; note = 2'-deoxy-2'-fluoroguanosine-3'-phosphate
  modified_base 9: mod_base = OTHER; note = 2'-deoxy-2'-fluoroguanosine-3'-phosphate
  modified_base 10: mod_base = OTHER; note = 2'-O-methyluridine-3'-phosphate
  modified_base 11: mod_base = OTHER; note = 2'-O-methylguanosine-3'-phosphate
  modified_base 12: mod_base = OTHER; note = 2'-O-methylguanosine-3'-phosphate
  modified_base 13: mod_base = OTHER; note = 2'-O-methyluridine-3'-phosphate
  modified_base 14: mod_base = OTHER; note = 2'-deoxy-2'-fluoroguanosine-3'-phosphate
  modified_base 15: mod_base = OTHER; note = 2'-O-methylguanosine-3'-phosphate
  modified_base 16: mod_base = OTHER; note = 2'-deoxy-2'-fluorouridine-3'-phosphate
  modified_base 17: mod_base = OTHER; note = 2'-O-methylguanosine-3'-phosphate
  modified_base 18: mod_base = OTHER; note = 2'-O-methylguanosine-3'-phosphate
  modified_base 19: mod_base = OTHER; note = 2'-O-methyluridine-3'-phosphate
  modified_base 20: mod_base = OTHER; note = 2'-O-methylcytidine-3'-phosphate
  modified_base 21: mod_base = OTHER; note = 2'-O-methyladenosine-3'-phosphorothioate
  modified_base 22: mod_base = OTHER; note = 2'-O-methylguanosine-3'-phosphorothioate
  modified_base 23: mod_base = OTHER; note = 2'-O-methylcytidine
tagttgtggtggtggtggtcagc

SEQ ID NO: 2835 - RNA, 23 nt, synthetic construct
  source 1..23: mol_type = other RNA
  modified_base 1: mod_base = OTHER; note = 2'-O-methyluridine-3'-phosphorothioate 5'-(E)-Vinylphosphonate
  modified_base 2: mod_base = OTHER; note = 2'-deoxy-2'-fluorouridine-3'-phosphorothioate
  modified_base 3: mod_base = OTHER; note = 2'-O-methyluridine-3'-phosphate
  modified_base 4: mod_base = OTHER; note = 2'-O-methylguanosine-3'-phosphate
  modified_base 5: mod_base = OTHER; note = 2'-O-methyluridine-3'-phosphate
  modified_base 6: mod_base = OTHER; note = 2'-deoxy-2'-fluorocytidine-3'-phosphate
  modified_base 7: mod_base = OTHER; note = 2'-O-methylcytidine-3'-phosphate
  modified_base 8: mod_base = OTHER; note = 2'-deoxy-2'-fluorocytidine-3'-phosphate
  modified_base 9: mod_base = OTHER; note = 2'-deoxy-2'-fluorouridine-3'-phosphate
  modified_base 10: mod_base = OTHER; note = 2'-O-methylguanosine-3'-phosphate
  modified_base 11: mod_base = OTHER; note = 2'-O-methylguanosine-3'-phosphate
  modified_base 12: mod_base = OTHER; note = 2'-O-methyladenosine-3'-phosphate
  modified_base 13: mod_base = OTHER; note = 2'-O-methylguanosine-3'-phosphate
  modified_base 14: mod_base = OTHER; note = 2'-deoxy-2'-fluorouridine-3'-phosphate
  modified_base 15: mod_base = OTHER; note = 2'-O-methyluridine-3'-phosphate
  modified_base 16: mod_base = OTHER; note = 2'-deoxy-2'-fluoroguanosine-3'-phosphate
  modified_base 17: mod_base = OTHER; note = 2'-O-methyladenosine-3'-phosphate
  modified_base 18: mod_base = OTHER; note = 2'-O-methylguanosine-3'-phosphate
  modified_base 19: mod_base = OTHER; note = 2'-O-methylguanosine-3'-phosphate
  modified_base 20: mod_base = OTHER; note = 2'-O-methyladenosine-3'-phosphate
  modified_base 21: mod_base = OTHER; note = 2'-O-methylguanosine-3'-phosphorothioate
  modified_base 22: mod_base = OTHER; note = 2'-O-methylguanosine-3'-phosphorothioate
  modified_base 23: mod_base = OTHER; note = 2'-O-methylguanosine
tttgtccctggagttgaggaggg

SEQ ID NO: 2836 - RNA, 23 nt, synthetic construct
  source 1..23: mol_type = other RNA
  modified_base 1: mod_base = OTHER; note = 2'-O-methyluridine-3'-phosphorothioate 5'-(E)-Vinylphosphonate
  modified_base 2: mod_base = OTHER; note = 2'-deoxy-2'-fluoroadenosine-3'-phosphorothioate
  modified_base 3: mod_base = OTHER; note = 2'-O-methylguanosine-3'-phosphate
  modified_base 4: mod_base = OTHER; note = 2'-O-methylguanosine-3'-phosphate
  modified_base 5: mod_base = OTHER; note = 2'-O-methylguanosine-3'-phosphate
  modified_base 6: mod_base = OTHER; note = 2'-deoxy-2'-fluoroadenosine-3'-phosphate
  modified_base 7: mod_base = OTHER; note = 2'-O-methylguanosine-3'-phosphate
  modified_base 8: mod_base = OTHER; note = 2'-deoxy-2'-fluorouridine-3'-phosphate
  modified_base 9: mod_base = OTHER; note = 2'-deoxy-2'-fluorocytidine-3'-phosphate
  modified_base 10: mod_base = OTHER; note = 2'-O-methyladenosine-3'-phosphate
  modified_base 11: mod_base = OTHER; note = 2'-O-methylcytidine-3'-phosphate
  modified_base 12: mod_base = OTHER; note = 2'-O-methyluridine-3'-phosphate
  modified_base 13: mod_base = OTHER; note = 2'-O-methylguanosine-3'-phosphate
  modified_base 14: mod_base = OTHER; note = 2'-deoxy-2'-fluorouridine-3'-phosphate
  modified_base 15: mod_base = OTHER; note = 2'-O-methylguanosine-3'-phosphate
  modified_base 16: mod_base = OTHER; note = 2'-deoxy-2'-fluorocytidine-3'-phosphate
  modified_base 17: mod_base = OTHER; note = 2'-O-methyluridine-3'-phosphate
  modified_base 18: mod_base = OTHER; note = 2'-O-methylguanosine-3'-phosphate
  modified_base 19: mod_base = OTHER; note = 2'-O-methylcytidine-3'-phosphate
  modified_base 20: mod_base = OTHER; note = 2'-O-methyluridine-3'-phosphate
  modified_base 21: mod_base = OTHER; note = 2'-O-methylguanosine-3'-phosphorothioate
  modified_base 22: mod_base = OTHER; note = 2'-O-methylguanosine-3'-phosphorothioate
  modified_base 23: mod_base = OTHER; note = 2'-O-methyluridine
tagggagtcactgtgctgctggt

SEQ ID NO: 2837 - RNA, 23 nt, synthetic construct
  source 1..23: mol_type = other RNA
  modified_base 1: mod_base = OTHER; note = 2'-O-methyluridine-3'-phosphorothioate 5'-(E)-Vinylphosphonate
  modified_base 2: mod_base = OTHER; note = 2'-deoxy-2'-fluoroadenosine-3'-phosphorothioate
  modified_base 3: mod_base = OTHER; note = 2'-O-methylcytidine-3'-phosphate
  modified_base 4: mod_base = OTHER; note = 2'-O-methyladenosine-3'-phosphate
  modified_base 5: mod_base = OTHER; note = 2'-O-methylguanosine-3'-phosphate
  modified_base 6: mod_base = OTHER; note = 2'-deoxy-2'-fluoroguanosine-3'-phosphate
  modified_base 7: mod_base = OTHER; note = 2'-O-methylguanosine-3'-phosphate
  modified_base 8: mod_base = OTHER; note = 2'-deoxy-2'-fluoroadenosine-3'-phosphate
  modified_base 9: mod_base = OTHER; note = 2'-deoxy-2'-fluorouridine-3'-phosphate
  modified_base 10: mod_base = OTHER; note = 2'-O-methylcytidine-3'-phosphate
  modified_base 11: mod_base = OTHER; note = 2'-O-methylguanosine-3'-phosphate
  modified_base 12: mod_base = OTHER; note = 2'-O-methylcytidine-3'-phosphate
  modified_base 13: mod_base = OTHER; note = 2'-O-methylcytidine-3'-phosphate
  modified_base 14: mod_base = OTHER; note = 2'-deoxy-2'-fluorocytidine-3'-phosphate
  modified_base 15: mod_base = OTHER; note = 2'-O-methylguanosine-3'-phosphate
  modified_base 16: mod_base = OTHER; note = 2'-deoxy-2'-fluorouridine-3'-phosphate
  modified_base 17: mod_base = OTHER; note = 2'-O-methylguanosine-3'-phosphate
  modified_base 18: mod_base = OTHER; note = 2'-O-methyluridine-3'-phosphate
  modified_base 19: mod_base = OTHER; note = 2'-O-methylguanosine-3'-phosphate
  modified_base 20: mod_base = OTHER; note = 2'-O-methyluridine-3'-phosphate
  modified_base 21: mod_base = OTHER; note = 2'-O-methylguanosine-3'-phosphorothioate
  modified_base 22: mod_base = OTHER; note = 2'-O-methylguanosine-3'-phosphorothioate
  modified_base 23: mod_base = OTHER; note = 2'-O-methyluridine
tacagggatcgcccgtgtgtggt

SEQ ID NO: 2838 - RNA, 23 nt, synthetic construct
  source 1..23: mol_type = other RNA
  modified_base 1: mod_base = OTHER; note = 2'-O-methyluridine-3'-phosphorothioate 5'-(E)-Vinylphosphonate
  modified_base 2: mod_base = OTHER; note = 2'-deoxy-2'-fluorouridine-3'-phosphorothioate
  modified_base 3: mod_base = OTHER; note = 2'-O-methylguanosine-3'-phosphate
  modified_base 4: mod_base = OTHER; note = 2'-O-methylguanosine-3'-phosphate
  modified_base 5: mod_base = OTHER; note = 2'-O-methyladenosine-3'-phosphate
  modified_base 6: mod_base = OTHER; note = 2'-deoxy-2'-fluoroguanosine-3'-phosphate
  modified_base 7: mod_base = OTHER; note = 2'-O-methyluridine-3'-phosphate
  modified_base 8: mod_base = OTHER; note = 2'-deoxy-2'-fluorocytidine-3'-phosphate
  modified_base 9: mod_base = OTHER; note = 2'-deoxy-2'-fluoroguanosine-3'-phosphate
  modified_base 10: mod_base = OTHER; note = 2'-O-methyladenosine-3'-phosphate
  modified_base 11: mod_base = OTHER; note = 2'-O-methylguanosine-3'-phosphate
  modified_base 12: mod_base = OTHER; note = 2'-O-methyluridine-3'-phosphate
  modified_base 13: mod_base = OTHER; note = 2'-O-methylguanosine-3'-phosphate
  modified_base 14: mod_base = OTHER; note = 2'-deoxy-2'-fluorocytidine-3'-phosphate
  modified_base 15: mod_base = OTHER; note = 2'-O-methyluridine-3'-phosphate
  modified_base 16: mod_base = OTHER; note = 2'-deoxy-2'-fluoroguanosine-3'-phosphate
  modified_base 17: mod_base = OTHER; note = 2'-O-methylguanosine-3'-phosphate
  modified_base 18: mod_base = OTHER; note = 2'-O-methylguanosine-3'-phosphate
  modified_base 19: mod_base = OTHER; note = 2'-O-methyluridine-3'-phosphate
  modified_base 20: mod_base = OTHER; note = 2'-O-methylguanosine-3'-phosphate
  modified_base 21: mod_base = OTHER; note = 2'-O-methylguanosine-3'-phosphorothioate
  modified_base 22: mod_base = OTHER; note = 2'-O-methyluridine-3'-phosphorothioate
  modified_base 23: mod_base = OTHER; note = 2'-O-methyladenosine
ttggagtcgagtgctgggtggta

SEQ ID NO: 2839 - RNA, 23 nt, synthetic construct
  source 1..23: mol_type = other RNA
  modified_base 1: mod_base = OTHER; note = 2'-O-methyluridine-3'-phosphorothioate 5'-(E)-Vinylphosphonate
  modified_base 2: mod_base = OTHER; note = 2'-deoxy-2'-fluorouridine-3'-phosphorothioate
  modified_base 3: mod_base = OTHER; note = 2'-O-methylguanosine-3'-phosphate
  modified_base 4: mod_base = OTHER; note = 2'-O-methylcytidine-3'-phosphate
  modified_base 5: mod_base = OTHER; note = 2'-O-methyluridine-3'-phosphate
  modified_base 6: mod_base = OTHER; note = 2'-deoxy-2'-fluoroguanosine-3'-phosphate
  modified_base 7: mod_base = OTHER; note = 2'-O-methylcytidine-3'-phosphate
  modified_base 8: mod_base = OTHER; note = 2'-deoxy-2'-fluorouridine-3'-phosphate
  modified_base 9: mod_base = OTHER; note = 2'-deoxy-2'-fluoroadenosine-3'-phosphate
  modified_base 10: mod_base = OTHER; note = 2'-O-methylguanosine-3'-phosphate
  modified_base 11: mod_base = OTHER; note = 2'-O-methylguanosine-3'-phosphate
  modified_base 12: mod_base = OTHER; note = 2'-O-methylguanosine-3'-phosphate
  modified_base 13: mod_base = OTHER; note = 2'-O-methyluridine-3'-phosphate
  modified_base 14: mod_base = OTHER; note = 2'-deoxy-2'-fluoroguanosine-3'-phosphate
  modified_base 15: mod_base = OTHER; note = 2'-O-methyladenosine-3'-phosphate
  modified_base 16: mod_base = OTHER; note = 2'-deoxy-2'-fluoroguanosine-3'-phosphate
  modified_base 17: mod_base = OTHER; note = 2'-O-methylguanosine-3'-phosphate
  modified_base 18: mod_base = OTHER; note = 2'-O-methylguanosine-3'-phosphate
  modified_base 19: mod_base = OTHER; note = 2'-O-methylcytidine-3'-phosphate
  modified_base 20: mod_base = OTHER; note = 2'-O-methyluridine-3'-phosphate
  modified_base 21: mod_base = OTHER; note = 2'-O-methylguanosine-3'-phosphorothioate
  modified_base 22: mod_base = OTHER; note = 2'-O-methylguanosine-3'-phosphorothioate
  modified_base 23: mod_base = OTHER; note = 2'-O-methyladenosine
ttgctgctagggtgagggctgga

SEQ ID NO: 2840 - RNA, 23 nt, synthetic construct
  source 1..23: mol_type = other RNA
  modified_base 1: mod_base = OTHER; note = 2'-O-methyluridine-3'-phosphorothioate 5'-(E)-Vinylphosphonate
  modified_base 2: mod_base = OTHER; note = 2'-deoxy-2'-fluorouridine-3'-phosphorothioate
  modified_base 3: mod_base = OTHER; note = 2'-O-methylcytidine-3'-phosphate
  modified_base 4: mod_base = OTHER; note = 2'-O-methyluridine-3'-phosphate
  modified_base 5: mod_base = OTHER; note = 2'-O-methylguanosine-3'-phosphate
  modified_base 6: mod_base = OTHER; note = 2'-deoxy-2'-fluorocytidine-3'-phosphate
  modified_base 7: mod_base = OTHER; note = 2'-O-methyluridine-3'-phosphate
  modified_base 8: mod_base = OTHER; note = 2'-deoxy-2'-fluorocytidine-3'-phosphate
  modified_base 9: mod_base = OTHER; note = 2'-deoxy-2'-fluorouridine-3'-phosphate
  modified_base 10: mod_base = OTHER; note = 2'-O-methylguanosine-3'-phosphate
  modified_base 11: mod_base = OTHER; note = 2'-O-methyluridine-3'-phosphate
  modified_base 12: mod_base = OTHER; note = 2'-O-methylguanosine-3'-phosphate
  modified_base 13: mod_base = OTHER; note = 2'-O-methyladenosine-3'-phosphate
  modified_base 14: mod_base = OTHER; note = 2'-deoxy-2'-fluoroguanosine-3'-phosphate
  modified_base 15: mod_base = OTHER; note = 2'-O-methylguanosine-3'-phosphate
  modified_base 16: mod_base = OTHER; note = 2'-deoxy-2'-fluoroadenosine-3'-phosphate
  modified_base 17: mod_base = OTHER; note = 2'-O-methyluridine-3'-phosphate
  modified_base 18: mod_base = OTHER; note = 2'-O-methylcytidine-3'-phosphate
  modified_base 19: mod_base = OTHER; note = 2'-O-methylcytidine-3'-phosphate
  modified_base 20: mod_base = OTHER; note = 2'-O-methyladenosine-3'-phosphate
  modified_base 21: mod_base = OTHER; note = 2'-O-methylguanosine-3'-phosphorothioate
  modified_base 22: mod_base = OTHER; note = 2'-O-methylguanosine-3'-phosphorothioate
  modified_base 23: mod_base = OTHER; note = 2'-O-methyluridine
ttctgctctgtgaggatccaggt

SEQ ID NO: 2841 - RNA, 23 nt, synthetic construct
  source 1..23: mol_type = other RNA
  modified_base 1: mod_base = OTHER; note = 2'-O-methyluridine-3'-phosphorothioate 5'-(E)-Vinylphosphonate
  modified_base 2: mod_base = OTHER; note = 2'-deoxy-2'-fluoroguanosine-3'-phosphorothioate
  modified_base 3: mod_base = OTHER; note = 2'-O-methylguanosine-3'-phosphate
  modified_base 4: mod_base = OTHER; note = 2'-O-methyluridine-3'-phosphate
  modified_base 5: mod_base = OTHER; note = 2'-O-methyluridine-3'-phosphate
  modified_base 6: mod_base = OTHER; note = 2'-deoxy-2'-fluoroguanosine-3'-phosphate
  modified_base 7: mod_base = OTHER; note = 2'-O-methylcytidine-3'-phosphate
  modified_base 8: mod_base = OTHER; note = 2'-deoxy-2'-fluoroguanosine-3'-phosphate
  modified_base 9: mod_base = OTHER; note = 2'-deoxy-2'-fluoroguanosine-3'-phosphate
  modified_base 10: mod_base = OTHER; note = 2'-O-methyluridine-3'-phosphate
  modified_base 11: mod_base = OTHER; note = 2'-O-methylcytidine-3'-phosphate
  modified_base 12: mod_base = OTHER; note = 2'-O-methylguanosine-3'-phosphate
  modified_base 13: mod_base = OTHER; note = 2'-O-methyluridine-3'-phosphate
  modified_base 14: mod_base = OTHER; note = 2'-deoxy-2'-fluoroadenosine-3'-phosphate
  modified_base 15: mod_base = OTHER; note = 2'-O-methylguanosine-3'-phosphate
  modified_base 16: mod_base = OTHER; note = 2'-deoxy-2'-fluorouridine-3'-phosphate
  modified_base 17: mod_base = OTHER; note = 2'-O-methylguanosine-3'-phosphate
  modified_base 18: mod_base = OTHER; note = 2'-O-methylguanosine-3'-phosphate
  modified_base 19: mod_base = OTHER; note = 2'-O-methylcytidine-3'-phosphate
  modified_base 20: mod_base = OTHER; note = 2'-O-methyluridine-3'-phosphate
  modified_base 21: mod_base = OTHER; note = 2'-O-methylguanosine-3'-phosphorothioate
  modified_base 22: mod_base = OTHER; note = 2'-O-methylcytidine-3'-phosphorothioate
  modified_base 23: mod_base = OTHER; note = 2'-O-methyluridine
tggttgcggtcgtagtggctgct

SEQ ID NO: 2842 - RNA, 23 nt, synthetic construct
  source 1..23: mol_type = other RNA
  modified_base 1: mod_base = OTHER; note = 2'-O-methyluridine-3'-phosphorothioate 5'-(E)-Vinylphosphonate
  modified_base 2: mod_base = OTHER; note = 2'-deoxy-2'-fluorouridine-3'-phosphorothioate
  modified_base 3: mod_base = OTHER; note = 2'-O-methylguanosine-3'-phosphate
  modified_base 4: mod_base = OTHER; note = 2'-O-methylcytidine-3'-phosphate
  modified_base 5: mod_base = OTHER; note = 2'-O-methyluridine-3'-phosphate
  modified_base 6: mod_base = OTHER; note = 2'-deoxy-2'-fluoroguanosine-3'-phosphate
  modified_base 7: mod_base = OTHER; note = 2'-O-methylguanosine-3'-phosphate
  modified_base 8: mod_base = OTHER; note = 2'-deoxy-2'-fluorouridine-3'-phosphate
  modified_base 9: mod_base = OTHER; note = 2'-deoxy-2'-fluorocytidine-3'-phosphate
  modified_base 10: mod_base = OTHER; note = 2'-O-methyladenosine-3'-phosphate
  modified_base 11: mod_base = OTHER; note = 2'-O-methylguanosine-3'-phosphate
  modified_base 12: mod_base = OTHER; note = 2'-O-methylcytidine-3'-phosphate
  modified_base 13: mod_base = OTHER; note = 2'-O-methyladenosine-3'-phosphate
  modified_base 14: mod_base = OTHER; note = 2'-deoxy-2'-fluorocytidine-3'-phosphate
  modified_base 15: mod_base = OTHER; note = 2'-O-methyluridine-3'-phosphate
  modified_base 16: mod_base = OTHER; note = 2'-deoxy-2'-fluorouridine-3'-phosphate
  modified_base 17: mod_base = OTHER; note = 2'-O-methyluridine-3'-phosphate
  modified_base 18: mod_base = OTHER; note = 2'-O-methylguanosine-3'-phosphate
  modified_base 19: mod_base = OTHER; note = 2'-O-methylguanosine-3'-phosphate
  modified_base 20: mod_base = OTHER; note = 2'-O-methylguanosine-3'-phosphate
  modified_base 21: mod_base = OTHER; note = 2'-O-methyladenosine-3'-phosphorothioate
  modified_base 22: mod_base = OTHER; note = 2'-O-methylguanosine-3'-phosphorothioate
  modified_base 23: mod_base = OTHER; note = 2'-O-methylguanosine
ttgctggtcagcactttgggagg

SEQ ID NO: 2843 - RNA, 23 nt, synthetic construct
  source 1..23: mol_type = other RNA
  modified_base 1: mod_base = OTHER; note = 2'-O-methyluridine-3'-phosphorothioate 5'-(E)-Vinylphosphonate
  modified_base 2: mod_base = OTHER; note = 2'-deoxy-2'-fluoroadenosine-3'-phosphorothioate
  modified_base 3: mod_base = OTHER; note = 2'-O-methylguanosine-3'-phosphate
  modified_base 4: mod_base = OTHER; note = 2'-O-methylguanosine-3'-phosphate
  modified_base 5: mod_base = OTHER; note = 2'-O-methyladenosine-3'-phosphate
  modified_base 6: mod_base = OTHER; note = 2'-deoxy-2'-fluoroadenosine-3'-phosphate
  modified_base 7: mod_base = OTHER; note = 2'-O-methylguanosine-3'-phosphate
  modified_base 8: mod_base = OTHER; note = 2'-deoxy-2'-fluorouridine-3'-phosphate
  modified_base 9: mod_base = OTHER; note = 2'-deoxy-2'-fluoroguanosine-3'-phosphate
  modified_base 10: mod_base = OTHER; note = 2'-O-methylguanosine-3'-phosphate
  modified_base 11: mod_base = OTHER; note = 2'-O-methylcytidine-3'-phosphate
  modified_base 12: mod_base = OTHER; note = 2'-O-methyluridine-3'-phosphate
  modified_base 13: mod_base = OTHER; note = 2'-O-methyluridine-3'-phosphate
  modified_base 14: mod_base = OTHER; note = 2'-deoxy-2'-fluorouridine-3'-phosphate
  modified_base 15: mod_base = OTHER; note = 2'-O-methylguanosine-3'-phosphate
  modified_base 16: mod_base = OTHER; note = 2'-deoxy-2'-fluoroguanosine-3'-phosphate
  modified_base 17: mod_base = OTHER; note = 2'-O-methyladenosine-3'-phosphate
  modified_base 18: mod_base = OTHER; note = 2'-O-methyladenosine-3'-phosphate
  modified_base 19: mod_base = OTHER; note = 2'-O-methylcytidine-3'-phosphate
  modified_base 20: mod_base = OTHER; note = 2'-O-methyluridine-3'-phosphate
  modified_base 21: mod_base = OTHER; note = 2'-O-methylguanosine-3'-phosphorothioate
  modified_base 22: mod_base = OTHER; note = 2'-O-methylguanosine-3'-phosphorothioate
  modified_base 23: mod_base = OTHER; note = 2'-O-methyluridine
taggaagtggctttggaactggt

SEQ ID NO: 2844 - RNA, 23 nt, synthetic construct
  source 1..23: mol_type = other RNA
  modified_base 1: mod_base = OTHER; note = 2'-O-methyluridine-3'-phosphorothioate 5'-(E)-Vinylphosphonate
  modified_base 2: mod_base = OTHER; note = 2'-deoxy-2'-fluoroadenosine-3'-phosphorothioate
  modified_base 3: mod_base = OTHER; note = 2'-O-methyladenosine-3'-phosphate
  modified_base 4: mod_base = OTHER; note = 2'-O-methylguanosine-3'-phosphate
  modified_base 5: mod_base = OTHER; note = 2'-O-methylguanosine-3'-phosphate
  modified_base 6: mod_base = OTHER; note = 2'-deoxy-2'-fluoroguanosine-3'-phosphate
  modified_base 7: mod_base = OTHER; note = 2'-O-methyluridine-3'-phosphate
  modified_base 8: mod_base = OTHER; note = 2'-deoxy-2'-fluoroguanosine-3'-phosphate
  modified_base 9: mod_base = OTHER; note = 2'-deoxy-2'-fluoroguanosine-3'-phosphate
  modified_base 10: mod_base = OTHER; note = 2'-O-methyluridine-3'-phosphate
  modified_base 11: mod_base = OTHER; note = 2'-O-methyluridine-3'-phosphate
  modified_base 12: mod_base = OTHER; note = 2'-O-methylguanosine-3'-phosphate
  modified_base 13: mod_base = OTHER; note = 2'-O-methylcytidine-3'-phosphate
  modified_base 14: mod_base = OTHER; note = 2'-deoxy-2'-fluoroadenosine-3'-phosphate
  modified_base 15: mod_base = OTHER; note = 2'-O-methylguanosine-3'-phosphate
  modified_base 16: mod_base = OTHER; note = 2'-deoxy-2'-fluorouridine-3'-phosphate
  modified_base 17: mod_base = OTHER; note = 2'-O-methylcytidine-3'-phosphate
  modified_base 18: mod_base = OTHER; note = 2'-O-methylcytidine-3'-phosphate
  modified_base 19: mod_base = OTHER; note = 2'-O-methyluridine-3'-phosphate
  modified_base 20: mod_base = OTHER; note = 2'-O-methyluridine-3'-phosphate
  modified_base 21: mod_base = OTHER; note = 2'-O-methylguanosine-3'-phosphorothioate
  modified_base 22: mod_base = OTHER; note = 2'-O-methylguanosine-3'-phosphorothioate
  modified_base 23: mod_base = OTHER; note = 2'-O-methyladenosine
taagggtggttgcagtccttgga

SEQ ID NO: 2845 - RNA, 23 nt, synthetic construct
  source 1..23: mol_type = other RNA
  modified_base 1: mod_base = OTHER; note = 2'-O-methyluridine-3'-phosphorothioate 5'-(E)-Vinylphosphonate
  modified_base 2: mod_base = OTHER; note = 2'-deoxy-2'-fluoroguanosine-3'-phosphorothioate
  modified_base 3: mod_base = OTHER; note = 2'-O-methyluridine-3'-phosphate
  modified_base 4: mod_base = OTHER; note = 2'-O-methylguanosine-3'-phosphate
  modified_base 5: mod_base = OTHER; note = 2'-O-methylguanosine-3'-phosphate
  modified_base 6: mod_base = OTHER; note = 2'-deoxy-2'-fluorocytidine-3'-phosphate
  modified_base 7: mod_base = OTHER; note = 2'-O-methyluridine-3'-phosphate
  modified_base 8: mod_base = OTHER; note = 2'-deoxy-2'-fluoroguanosine-3'-phosphate
  modified_base 9: mod_base = OTHER; note = 2'-deoxy-2'-fluorouridine-3'-phosphate
  modified_base 10: mod_base = OTHER; note = 2'-O-methylguanosine-3'-phosphate
  modified_base 11: mod_base = OTHER; note = 2'-O-methylcytidine-3'-phosphate
  modified_base 12: mod_base = OTHER; note = 2'-O-methyluridine-3'-phosphate
  modified_base 13: mod_base = OTHER; note = 2'-O-methyluridine-3'-phosphate
  modified_base 14: mod_base = OTHER; note = 2'-deoxy-2'-fluoroguanosine-3'-phosphate
  modified_base 15: mod_base = OTHER; note = 2'-O-methyluridine-3'-phosphate
  modified_base 16: mod_base = OTHER; note = 2'-deoxy-2'-fluorocytidine-3'-phosphate
  modified_base 17: mod_base = OTHER; note = 2'-O-methyladenosine-3'-phosphate
  modified_base 18: mod_base = OTHER; note = 2'-O-methylguanosine-3'-phosphate
  modified_base 19: mod_base = OTHER; note = 2'-O-methylcytidine-3'-phosphate
  modified_base 20: mod_base = OTHER; note = 2'-O-methyladenosine-3'-phosphate
  modified_base 21: mod_base = OTHER; note = 2'-O-methylcytidine-3'-phosphorothioate
  modified_base 22: mod_base = OTHER; note = 2'-O-methyluridine-3'-phosphorothioate
  modified_base 23: mod_base = OTHER; note = 2'-O-methylguanosine
tgtggctgtgcttgtcagcactg

SEQ ID NO: 2846 - RNA, 23 nt, synthetic construct
  source 1..23: mol_type = other RNA
  modified_base 1: mod_base = OTHER; note = 2'-O-methyluridine-3'-phosphorothioate 5'-(E)-Vinylphosphonate
  modified_base 2: mod_base = OTHER; note = 2'-deoxy-2'-fluoroguanosine-3'-phosphorothioate
  modified_base 3: mod_base = OTHER; note = 2'-O-methyluridine-3'-phosphate
  modified_base 4: mod_base = OTHER; note = 2'-O-methylguanosine-3'-phosphate
  modified_base 5: mod_base = OTHER; note = 2'-O-methyluridine-3'-phosphate
  modified_base 6: mod_base = OTHER; note = 2'-deoxy-2'-fluoroadenosine-3'-phosphate
  modified_base 7: mod_base = OTHER; note = 2'-O-methyladenosine-3'-phosphate
  modified_base 8: mod_base = OTHER; note = 2'-deoxy-2'-fluoroadenosine-3'-phosphate
  modified_base 9: mod_base = OTHER; note = 2'-deoxy-2'-fluoroguanosine-3'-phosphate
  modified_base 10: mod_base = OTHER; note = 2'-O-methylcytidine-3'-phosphate
  modified_base 11: mod_base = OTHER; note = 2'-O-methyluridine-3'-phosphate
  modified_base 12: mod_base = OTHER; note = 2'-O-methylguanosine-3'-phosphate
  modified_base 13: mod_base = OTHER; note = 2'-O-methylguanosine-3'-phosphate
  modified_base 14: mod_base = OTHER; note = 2'-deoxy-2'-fluorouridine-3'-phosphate
  modified_base 15: mod_base = OTHER; note = 2'-O-methyladenosine-3'-phosphate
  modified_base 16: mod_base = OTHER; note = 2'-deoxy-2'-fluoroguanosine-3'-phosphate
  modified_base 17: mod_base = OTHER; note = 2'-O-methylcytidine-3'-phosphate
  modified_base 18: mod_base = OTHER; note = 2'-O-methyluridine-3'-phosphate
  modified_base 19: mod_base = OTHER; note = 2'-O-methylguanosine-3'-phosphate
  modified_base 20: mod_base = OTHER; note = 2'-O-methyluridine-3'-phosphate
  modified_base 21: mod_base = OTHER; note = 2'-O-methylguanosine-3'-phosphorothioate
  modified_base 22: mod_base = OTHER; note = 2'-O-methylguanosine-3'-phosphorothioate
  modified_base 23: mod_base = OTHER; note = 2'-O-methyladenosine
tgtgtaaagctggtagctgtgga

SEQ ID NO: 2847 - RNA, 23 nt, synthetic construct
  source 1..23: mol_type = other RNA
  modified_base 1: mod_base = OTHER; note = 2'-O-methyluridine-3'-phosphorothioate 5'-(E)-Vinylphosphonate
  modified_base 2: mod_base = OTHER; note = 2'-deoxy-2'-fluorouridine-3'-phosphorothioate
  modified_base 3: mod_base = OTHER; note = 2'-O-methylguanosine-3'-phosphate
  modified_base 4: mod_base = OTHER; note = 2'-O-methylguanosine-3'-phosphate
  modified_base 5: mod_base = OTHER; note = 2'-O-methyluridine-3'-phosphate
  modified_base 6: mod_base = OTHER; note = 2'-deoxy-2'-fluorocytidine-3'-phosphate
  modified_base 7: mod_base = OTHER; note = 2'-O-methylcytidine-3'-phosphate
  modified_base 8: mod_base = OTHER; note = 2'-deoxy-2'-fluorocytidine-3'-phosphate
  modified_base 9: mod_base = OTHER; note = 2'-deoxy-2'-fluoroadenosine-3'-phosphate
  modified_base 10: mod_base = OTHER; note = 2'-O-methyladenosine-3'-phosphate
  modified_base 11: mod_base = OTHER; note = 2'-O-methylguanosine-3'-phosphate
  modified_base 12: mod_base = OTHER; note = 2'-O-methylguanosine-3'-phosphate
  modified_base 13: mod_base = OTHER; note = 2'-O-methylguanosine-3'-phosphate
  modified_base 14: mod_base = OTHER; note = 2'-deoxy-2'-fluorouridine-3'-phosphate
  modified_base 15: mod_base = OTHER; note = 2'-O-methylguanosine-3'-phosphate
  modified_base 16: mod_base = OTHER; note = 2'-deoxy-2'-fluoroadenosine-3'-phosphate
  modified_base 17: mod_base = OTHER; note = 2'-O-methyladenosine-3'-phosphate
  modified_base 18: mod_base = OTHER; note = 2'-O-methylguanosine-3'-phosphate
  modified_base 19: mod_base = OTHER; note = 2'-O-methylguanosine-3'-phosphate
  modified_base 20: mod_base = OTHER; note = 2'-O-methyladenosine-3'-phosphate
  modified_base 21: mod_base = OTHER; note = 2'-O-methylguanosine-3'-phosphorothioate
  modified_base 22: mod_base = OTHER; note = 2'-O-methylguanosine-3'-phosphorothioate
  modified_base 23: mod_base = OTHER; note = 2'-O-methylguanosine
ttggtcccaagggtgaaggaggg

SEQ ID NO: 2848 - RNA, 23 nt, synthetic construct
  source 1..23: mol_type = other RNA
  modified_base 1: mod_base = OTHER; note = 2'-O-methyluridine-3'-phosphorothioate 5'-(E)-Vinylphosphonate
  modified_base 2: mod_base = OTHER; note = 2'-deoxy-2'-fluoroguanosine-3'-phosphorothioate
  modified_base 3: mod_base = OTHER; note = 2'-O-methyluridine-3'-phosphate
  modified_base 4: mod_base = OTHER; note = 2'-O-methylguanosine-3'-phosphate
  modified_base 5: mod_base = OTHER; note = 2'-O-methyluridine-3'-phosphate
  modified_base 6: mod_base = OTHER; note = 2'-deoxy-2'-fluoroguanosine-3'-phosphate
  modified_base 7: mod_base = OTHER; note = 2'-O-methylguanosine-3'-phosphate
  modified_base 8: mod_base = OTHER; note = 2'-deoxy-2'-fluorouridine-3'-phosphate
  modified_base 9: mod_base = OTHER; note = 2'-deoxy-2'-fluoroguanosine-3'-phosphate
  modified_base 10: mod_base = OTHER; note = 2'-O-methylguanosine-3'-phosphate
  modified_base 11: mod_base = OTHER; note = 2'-O-methyluridine-3'-phosphate
  modified_base 12: mod_base = OTHER; note = 2'-O-methylcytidine-3'-phosphate
  modified_base 13: mod_base = OTHER; note = 2'-O-methyluridine-3'-phosphate
  modified_base 14: mod_base = OTHER; note = 2'-deoxy-2'-fluoroguanosine-3'-phosphate
  modified_base 15: mod_base = OTHER; note = 2'-O-methyluridine-3'-phosphate
  modified_base 16: mod_base = OTHER; note = 2'-deoxy-2'-fluorouridine-3'-phosphate
  modified_base 17: mod_base = OTHER; note = 2'-O-methylcytidine-3'-phosphate
  modified_base 18: mod_base = OTHER; note = 2'-O-methyluridine-3'-phosphate
  modified_base 19: mod_base = OTHER; note = 2'-O-methylguanosine-3'-phosphate
  modified_base 20: mod_base = OTHER; note = 2'-O-methylguanosine-3'-phosphate
  modified_base 21: mod_base = OTHER; note = 2'-O-methylguanosine-3'-phosphorothioate
  modified_base 22: mod_base = OTHER; note = 2'-O-methyladenosine-3'-phosphorothioate
  modified_base 23: mod_base = OTHER; note = 2'-O-methylguanosine
tgtgtggtggtctgttctgggag

SEQ ID NO: 2849 - RNA, 23 nt, synthetic construct
  source 1..23: mol_type = other RNA
  modified_base 1: mod_base = OTHER; note = 2'-O-methyluridine-3'-phosphorothioate 5'-(E)-Vinylphosphonate
  modified_base 2: mod_base = OTHER; note = 2'-deoxy-2'-fluoroguanosine-3'-phosphorothioate
  modified_base 3: mod_base = OTHER; note = 2'-O-methylguanosine-3'-phosphate
  modified_base 4: mod_base = OTHER; note = 2'-O-methyluridine-3'-phosphate
  modified_base 5: mod_base = OTHER; note = 2'-O-methylguanosine-3'-phosphate
  modified_base 6: mod_base = OTHER; note = 2'-deoxy-2'-fluoroguanosine-3'-phosphate
  modified_base 7: mod_base = OTHER; note = 2'-O-methyladenosine-3'-phosphate
  modified_base 8: mod_base = OTHER; note = 2'-deoxy-2'-fluorouridine-3'-phosphate
  modified_base 9: mod_base = OTHER; note = 2'-deoxy-2'-fluorouridine-3'-phosphate
  modified_base 10: mod_base = OTHER; note = 2'-O-methylguanosine-3'-phosphate
  modified_base 11: mod_base = OTHER; note = 2'-O-methyluridine-3'-phosphate
  modified_base 12: mod_base = OTHER; note = 2'-O-methylguanosine-3'-phosphate
  modified_base 13: mod_base = OTHER; note = 2'-O-methylguanosine-3'-phosphate
  modified_base 14: mod_base = OTHER; note = 2'-deoxy-2'-fluoroadenosine-3'-phosphate
  modified_base 15: mod_base = OTHER; note = 2'-O-methylcytidine-3'-phosphate
  modified_base 16: mod_base = OTHER; note = 2'-deoxy-2'-fluoroadenosine-3'-phosphate
  modified_base 17: mod_base = OTHER; note = 2'-O-methyluridine-3'-phosphate
  modified_base 18: mod_base = OTHER; note = 2'-O-methylguanosine-3'-phosphate
  modified_base 19: mod_base = OTHER; note = 2'-O-methylguanosine-3'-phosphate
  modified_base 20: mod_base = OTHER; note = 2'-O-methyluridine-3'-phosphate
  modified_base 21: mod_base = OTHER; note = 2'-O-methylguanosine-3'-phosphorothioate
  modified_base 22: mod_base = OTHER; note = 2'-O-methylguanosine-3'-phosphorothioate
  modified_base 23: mod_base = OTHER; note = 2'-O-methylcytidine
tggtggattgtggacatggtggc

SEQ ID NO: 2850 - RNA, 23 nt, synthetic construct
  source 1..23: mol_type = other RNA
  modified_base 1: mod_base = OTHER; note = 2'-O-methyluridine-3'-phosphorothioate 5'-(E)-Vinylphosphonate
  modified_base 2: mod_base = OTHER; note = 2'-deoxy-2'-fluorouridine-3'-phosphorothioate
  modified_base 3: mod_base = OTHER; note = 2'-O-methylcytidine-3'-phosphate
  modified_base 4: mod_base = OTHER; note = 2'-O-methylguanosine-3'-phosphate
  modified_base 5: mod_base = OTHER; note = 2'-O-methyluridine-3'-phosphate
  modified_base 6: mod_base = OTHER; note = 2'-deoxy-2'-fluoroguanosine-3'-phosphate
  modified_base 7: mod_base = OTHER; note = 2'-O-methylguanosine-3'-phosphate
  modified_base 8: mod_base = OTHER; note = 2'-deoxy-2'-fluorouridine-3'-phosphate
  modified_base 9: mod_base = OTHER; note = 2'-deoxy-2'-fluorocytidine-3'-phosphate
  modified_base 10: mod_base = OTHER; note = 2'-O-methyladenosine-3'-phosphate
  modified_base 11: mod_base = OTHER; note = 2'-O-methylguanosine-3'-phosphate
  modified_base 12: mod_base = OTHER; note = 2'-O-methylcytidine-3'-phosphate
  modified_base 13: mod_base = OTHER; note = 2'-O-methyladenosine-3'-phosphate
  modified_base 14: mod_base = OTHER; note = 2'-deoxy-2'-fluorocytidine-3'-phosphate
  modified_base 15: mod_base = OTHER; note = 2'-O-methyluridine-3'-phosphate
  modified_base 16: mod_base = OTHER; note = 2'-deoxy-2'-fluoroguanosine-3'-phosphate
  modified_base 17: mod_base = OTHER; note = 2'-O-methyluridine-3'-phosphate
  modified_base 18: mod_base = OTHER; note = 2'-O-methylguanosine-3'-phosphate
  modified_base 19: mod_base = OTHER; note = 2'-O-methylguanosine-3'-phosphate
  modified_base 20: mod_base = OTHER; note = 2'-O-methyladenosine-3'-phosphate
  modified_base 21: mod_base = OTHER; note = 2'-O-methylguanosine-3'-phosphorothioate
  modified_base 22: mod_base = OTHER; note = 2'-O-methylguanosine-3'-phosphorothioate
  modified_base 23: mod_base = OTHER; note = 2'-O-methyluridine
ttcgtggtcagcactgtggaggt

SEQ ID NO: 2851 - RNA, 23 nt, synthetic construct
  source 1..23: mol_type = other RNA
  modified_base 1: mod_base = OTHER; note = 2'-O-methyluridine-3'-phosphorothioate 5'-(E)-Vinylphosphonate
  modified_base 2: mod_base = OTHER; note = 2'-deoxy-2'-fluorouridine-3'-phosphorothioate
  modified_base 3: mod_base = OTHER; note = 2'-O-methylguanosine-3'-phosphate
  modified_base 4: mod_base = OTHER; note = 2'-O-methylguanosine-3'-phosphate
  modified_base 5: mod_base = OTHER; note = 2'-O-methyladenosine-3'-phosphate
  modified_base 6: mod_base = OTHER; note = 2'-deoxy-2'-fluorocytidine-3'-phosphate
  modified_base 7: mod_base = OTHER; note = 2'-O-methyladenosine-3'-phosphate
  modified_base 8: mod_base = OTHER; note = 2'-deoxy-2'-fluorouridine-3'-phosphate
  modified_base 9: mod_base = OTHER; note = 2'-deoxy-2'-fluoroguanosine-3'-phosphate
  modified_base 10: mod_base = OTHER; note = 2'-O-methylguanosine-3'-phosphate
  modified_base 11: mod_base = OTHER; note = 2'-O-methyladenosine-3'-phosphate
  modified_base 12: mod_base = OTHER; note = 2'-O-methyladenosine-3'-phosphate
  modified_base 13: mod_base = OTHER; note = 2'-O-methylcytidine-3'-phosphate
  modified_base 14: mod_base = OTHER; note = 2'-deoxy-2'-fluorouridine-3'-phosphate
  modified_base 15: mod_base = OTHER; note = 2'-O-methylguanosine-3'-phosphate
  modified_base 16: mod_base = OTHER; note = 2'-deoxy-2'-fluoroguanosine-3'-phosphate
  modified_base 17: mod_base = OTHER; note = 2'-O-methyluridine-3'-phosphate
  modified_base 18: mod_base = OTHER; note = 2'-O-methylguanosine-3'-phosphate
  modified_base 19: mod_base = OTHER; note = 2'-O-methylguanosine-3'-phosphate
  modified_base 20: mod_base = OTHER; note = 2'-O-methylcytidine-3'-phosphate
  modified_base 21: mod_base = OTHER; note = 2'-O-methylcytidine-3'-phosphorothioate
  modified_base 22: mod_base = OTHER; note = 2'-O-methylcytidine-3'-phosphorothioate
  modified_base 23: mod_base = OTHER; note = 2'-O-methyluridine
ttggacatggaactggtggccct

SEQ ID NO: 2852 - RNA, 23 nt, synthetic construct
  source 1..23: mol_type = other RNA
  modified_base 1: mod_base = OTHER; note = 2'-O-methyluridine-3'-phosphorothioate 5'-(E)-Vinylphosphonate
  modified_base 2: mod_base = OTHER; note = 2'-deoxy-2'-fluoroadenosine-3'-phosphorothioate
  modified_base 3: mod_base = OTHER; note = 2'-O-methylguanosine-3'-phosphate
  modified_base 4: mod_base = OTHER; note = 2'-O-methyluridine-3'-phosphate
  modified_base 5: mod_base = OTHER; note = 2'-O-methylguanosine-3'-phosphate
  modified_base 6: mod_base = OTHER; note = 2'-deoxy-2'-fluoroguanosine-3'-phosphate
  modified_base 7: mod_base = OTHER; note = 2'-O-methylcytidine-3'-phosphate
  modified_base 8: mod_base = OTHER; note = 2'-deoxy-2'-fluorouridine-3'-phosphate
  modified_base 9: mod_base = OTHER; note = 2'-deoxy-2'-fluoroguanosine-3'-phosphate
  modified_base 10: mod_base = OTHER; note = 2'-O-methylcytidine-3'-phosphate
  modified_base 11: mod_base = OTHER; note = 2'-O-methyladenosine-3'-phosphate
  modified_base 12: mod_base = OTHER; note = 2'-O-methylguanosine-3'-phosphate
  modified_base 13: mod_base = OTHER; note = 2'-O-methyluridine-3'-phosphate
  modified_base 14: mod_base = OTHER; note = 2'-deoxy-2'-fluorouridine-3'-phosphate
  modified_base 15: mod_base = OTHER; note = 2'-O-methylguanosine-3'-phosphate
  modified_base 16: mod_base = OTHER; note = 2'-deoxy-2'-fluorouridine-3'-phosphate
  modified_base 17: mod_base = OTHER; note = 2'-O-methyladenosine-3'-phosphate
  modified_base 18: mod_base = OTHER; note = 2'-O-methylguanosine-3'-phosphate
  modified_base 19: mod_base = OTHER; note = 2'-O-methyluridine-3'-phosphate
  modified_base 20: mod_base = OTHER; note = 2'-O-methylguanosine-3'-phosphate
  modified_base 21: mod_base = OTHER; note = 2'-O-methylguanosine-3'-phosphorothioate
  modified_base 22: mod_base = OTHER; note = 2'-O-methylcytidine-3'-phosphorothioate
  modified_base 23: mod_base = OTHER; note = 2'-O-methyluridine
tagtggctgcagttgtagtggct

SEQ ID NO: 2853 - RNA, 23 nt, synthetic construct
  source 1..23: mol_type = other RNA
  modified_base 1: mod_base = OTHER; note = 2'-O-methyluridine-3'-phosphorothioate 5'-(E)-Vinylphosphonate
  modified_base 2: mod_base = OTHER; note = 2'-deoxy-2'-fluorouridine-3'-phosphorothioate
  modified_base 3: mod_base = OTHER; note = 2'-O-methylcytidine-3'-phosphate
  modified_base 4: mod_base = OTHER; note = 2'-O-methyladenosine-3'-phosphate
  modified_base 5: mod_base = OTHER; note = 2'-O-methylcytidine-3'-phosphate
  modified_base 6: mod_base = OTHER; note = 2'-deoxy-2'-fluoroguanosine-3'-phosphate
  modified_base 7: mod_base = OTHER; note = 2'-O-methylguanosine-3'-phosphate
  modified_base 8: mod_base = OTHER; note = 2'-deoxy-2'-fluorouridine-3'-phosphate
  modified_base 9: mod_base = OTHER; note = 2'-deoxy-2'-fluoroguanosine-3'-phosphate
  modified_base 10: mod_base = OTHER; note = 2'-O-methylguanosine-3'-phosphate
  modified_base 11: mod_base = OTHER; note = 2'-O-methylcytidine-3'-phosphate
  modified_base 12: mod_base = OTHER; note = 2'-O-methyluridine-3'-phosphate
  modified_base 13: mod_base = OTHER; note = 2'-O-methylguanosine-3'-phosphate
  modified_base 14: mod_base = OTHER; note = 2'-deoxy-2'-fluorouridine-3'-phosphate
  modified_base 15: mod_base = OTHER; note = 2'-O-methyladenosine-3'-phosphate
  modified_base 16: mod_base = OTHER; note = 2'-deoxy-2'-fluoroguanosine-3'-phosphate
  modified_base 17: mod_base = OTHER; note = 2'-O-methyluridine-3'-phosphate
  modified_base 18: mod_base = OTHER; note = 2'-O-methylguanosine-3'-phosphate
  modified_base 19: mod_base = OTHER; note = 2'-O-methylcytidine-3'-phosphate
  modified_base 20: mod_base = OTHER; note = 2'-O-methyluridine-3'-phosphate
  modified_base 21: mod_base = OTHER; note = 2'-O-methylguanosine-3'-phosphorothioate
  modified_base 22: mod_base = OTHER; note = 2'-O-methylguanosine-3'-phosphorothioate
  modified_base 23: mod_base = OTHER; note = 2'-O-methylguanosine
ttcacggtggctgtagtgctggg

SEQ ID NO: 2854 - RNA, 23 nt, synthetic construct
  source 1..23: mol_type = other RNA
  modified_base 1: mod_base = OTHER; note = 2'-O-methyluridine-3'-phosphorothioate 5'-(E)-Vinylphosphonate
  modified_base 2: mod_base = OTHER; note = 2'-deoxy-2'-fluorocytidine-3'-phosphorothioate
  modified_base 3: mod_base = OTHER; note = 2'-O-methyluridine-3'-phosphate
  modified_base 4: mod_base = OTHER; note = 2'-O-methylguanosine-3'-phosphate
  modified_base 5: mod_base = OTHER; note = 2'-O-methylguanosine-3'-phosphate
  modified_base 6: mod_base = OTHER; note = 2'-deoxy-2'-fluorouridine-3'-phosphate
  modified_base 7: mod_base = OTHER; note = 2'-O-methylcytidine-3'-phosphate
  modified_base 8: mod_base = OTHER; note = 2'-deoxy-2'-fluoroadenosine-3'-phosphate
  modified_base 9: mod_base = OTHER; note = 2'-deoxy-2'-fluoroguanosine-3'-phosphate
  modified_base 10: mod_base = OTHER; note = 2'-O-methylcytidine-3'-phosphate
  modified_base 11: mod_base = OTHER; note = 2'-O-methyladenosine-3'-phosphate
  modified_base 12: mod_base = OTHER; note = 2'-O-methylcytidine-3'-phosphate
  modified_base 13: mod_base = OTHER; note = 2'-O-methyluridine-3'-phosphate
  modified_base 14: mod_base = OTHER; note = 2'-deoxy-2'-fluorouridine-3'-phosphate
  modified_base 15: mod_base = OTHER; note = 2'-O-methyluridine-3'-phosphate
  modified_base 16: mod_base = OTHER; note = 2'-deoxy-2'-fluoroguanosine-3'-phosphate
  modified_base 17: mod_base = OTHER; note = 2'-O-methyladenosine-3'-phosphate
  modified_base 18: mod_base = OTHER; note = 2'-O-methylguanosine-3'-phosphate
  modified_base 19: mod_base = OTHER; note = 2'-O-methylguanosine-3'-phosphate
  modified_base 20: mod_base = OTHER; note = 2'-O-methylguanosine-3'-phosphate
  modified_base 21: mod_base = OTHER; note = 2'-O-methyluridine-3'-phosphorothioate
  modified_base 22: mod_base = OTHER; note = 2'-O-methylguanosine-3'-phosphorothioate
  modified_base 23: mod_base = OTHER; note = 2'-O-methylcytidine
tctggtcagcactttgagggtgc

SEQ ID NO: 2855 - RNA, 23 nt, synthetic construct
  source 1..23: mol_type = other RNA
  modified_base 1: mod_base = OTHER; note = 2'-O-methyluridine-3'-phosphorothioate 5'-(E)-Vinylphosphonate
  modified_base 2: mod_base = OTHER; note = 2'-deoxy-2'-fluorouridine-3'-phosphorothioate
  modified_base 3: mod_base = OTHER; note = 2'-O-methylguanosine-3'-phosphate
  modified_base 4: mod_base = OTHER; note = 2'-O-methylguanosine-3'-phosphate
  modified_base 5: mod_base = OTHER; note = 2'-O-methyladenosine-3'-phosphate
  modified_base 6: mod_base = OTHER; note = 2'-deoxy-2'-fluoroguanosine-3'-phosphate
  modified_base 7: mod_base = OTHER; note = 2'-O-methylcytidine-3'-phosphate
  modified_base 8: mod_base = OTHER; note = 2'-deoxy-2'-fluorouridine-3'-phosphate
  modified_base 9: mod_base = OTHER; note = 2'-deoxy-2'-fluoroguanosine-3'-phosphate
  modified_base 10: mod_base = OTHER; note = 2'-O-methyladenosine-3'-phosphate
  modified_base 11: mod_base = OTHER; note = 2'-O-methyluridine-3'-phosphate
  modified_base 12: mod_base = OTHER; note = 2'-O-methylguanosine-3'-phosphate
  modified_base 13: mod_base = OTHER; note = 2'-O-methyladenosine-3'-phosphate
  modified_base 14: mod_base = OTHER; note = 2'-deoxy-2'-fluorocytidine-3'-phosphate
  modified_base 15: mod_base = OTHER; note = 2'-O-methyluridine-3'-phosphate
  modified_base 16: mod_base = OTHER; note = 2'-deoxy-2'-fluoroguanosine-3'-phosphate
  modified_base 17: mod_base = OTHER; note = 2'-O-methyluridine-3'-phosphate
  modified_base 18: mod_base = OTHER; note = 2'-O-methylguanosine-3'-phosphate
  modified_base 19: mod_base = OTHER; note = 2'-O-methylguanosine-3'-phosphate
  modified_base 20: mod_base = OTHER; note = 2'-O-methylguanosine-3'-phosphate
  modified_base 21: mod_base = OTHER; note = 2'-O-methyluridine-3'-phosphorothioate
  modified_base 22: mod_base = OTHER; note = 2'-O-methylguanosine-3'-phosphorothioate
  modified_base 23: mod_base = OTHER; note = 2'-O-methyluridine
ttggagctgatgactgtgggtgt

SEQ ID NO: 2856 - RNA, 23 nt, synthetic construct
  source 1..23: mol_type = other RNA
  modified_base 1: mod_base = OTHER; note = 2'-O-methyluridine-3'-phosphorothioate 5'-(E)-Vinylphosphonate
  modified_base 2: mod_base = OTHER; note = 2'-deoxy-2'-fluorouridine-3'-phosphorothioate
  modified_base 3: mod_base = OTHER; note = 2'-O-methylguanosine-3'-phosphate
  modified_base 4: mod_base = OTHER; note = 2'-O-methylguanosine-3'-phosphate
  modified_base 5: mod_base = OTHER; note = 2'-O-methyladenosine-3'-phosphate
  modified_base 6: mod_base = OTHER; note = 2'-deoxy-2'-fluorocytidine-3'-phosphate
  modified_base 7: mod_base = OTHER; note = 2'-O-methyluridine-3'-phosphate
  modified_base 8: mod_base = OTHER; note = 2'-deoxy-2'-fluoroguanosine-3'-phosphate
  modified_base 9: mod_base = OTHER; note = 2'-deoxy-2'-fluoroguanosine-3'-phosphate
  modified_base 10: mod_base = OTHER; note = 2'-O-methyladenosine-3'-phosphate
  modified_base 11: mod_base = OTHER; note = 2'-O-methylguanosine-3'-phosphate
  modified_base 12: mod_base = OTHER; note = 2'-O-methylguanosine-3'-phosphate
  modified_base 13: mod_base = OTHER; note = 2'-O-methyladenosine-3'-phosphate
  modified_base 14: mod_base = OTHER; note = 2'-deoxy-2'-fluoroguanosine-3'-phosphate
  modified_base 15: mod_base = OTHER; note = 2'-O-methylguanosine-3'-phosphate
  modified_base 16: mod_base = OTHER; note = 2'-deoxy-2'-fluoroguanosine-3'-phosphate
  modified_base 17: mod_base = OTHER; note = 2'-O-methyladenosine-3'-phosphate
  modified_base 18: mod_base = OTHER; note = 2'-O-methylguanosine-3'-phosphate
  modified_base 19: mod_base = OTHER; note = 2'-O-methyluridine-3'-phosphate
  modified_base 20: mod_base = OTHER; note = 2'-O-methylguanosine-3'-phosphate
  modified_base 21: mod_base = OTHER; note = 2'-O-methylguanosine-3'-phosphorothioate
  modified_base 22: mod_base = OTHER; note = 2'-O-methylcytidine-3'-phosphorothioate
  modified_base 23: mod_base = OTHER; note = 2'-O-methyluridine
ttggactggaggagggagtggct

SEQ ID NO: 2857 - RNA, 23 nt, synthetic construct
  source 1..23: mol_type = other RNA
  modified_base 1: mod_base = OTHER; note = 2'-O-methyluridine-3'-phosphorothioate 5'-(E)-Vinylphosphonate
  modified_base 2: mod_base = OTHER; note = 2'-deoxy-2'-fluoroguanosine-3'-phosphorothioate
  modified_base 3: mod_base = OTHER; note = 2'-O-methyladenosine-3'-phosphate
  modified_base 4: mod_base = OTHER; note = 2'-O-methyluridine-3'-phosphate
  modified_base 5: mod_base = OTHER; note = 2'-O-methylguanosine-3'-phosphate
  modified_base 6: mod_base = OTHER; note = 2'-deoxy-2'-fluoroguanosine-3'-phosphate
  modified_base 7: mod_base = OTHER; note = 2'-O-methylcytidine-3'-phosphate
  modified_base 8: mod_base = OTHER; note = 2'-deoxy-2'-fluorouridine-3'-phosphate
  modified_base 9: mod_base = OTHER; note = 2'-deoxy-2'-fluoroguanosine-3'-phosphate
  modified_base 10: mod_base = OTHER; note = 2'-O-methyluridine-3'-phosphate
  modified_base 11: mod_base = OTHER; note = 2'-O-methyladenosine-3'-phosphate
  modified_base 12: mod_base = OTHER; note = 2'-O-methyladenosine-3'-phosphate
  modified_base 13: mod_base = OTHER; note = 2'-O-methylcytidine-3'-phosphate
  modified_base 14: mod_base = OTHER; note = 2'-deoxy-2'-fluoroguanosine-3'-phosphate
  modified_base 15: mod_base = OTHER; note = 2'-O-methylcytidine-3'-phosphate
  modified_base 16: mod_base = OTHER; note = 2'-deoxy-2'-fluorouridine-3'-phosphate
  modified_base 17: mod_base = OTHER; note = 2'-O-methylguanosine-3'-phosphate
  modified_base 18: mod_base = OTHER; note = 2'-O-methylguanosine-3'-phosphate
  modified_base 19: mod_base = OTHER; note = 2'-O-methyluridine-3'-phosphate
  modified_base 20: mod_base = OTHER; note = 2'-O-methyladenosine-3'-phosphate
  modified_base 21: mod_base = OTHER; note = 2'-O-methylguanosine-3'-phosphorothioate
  modified_base 22: mod_base = OTHER; note = 2'-O-methylcytidine-3'-phosphorothioate
  modified_base 23: mod_base = OTHER; note = 2'-O-methyluridine
tgatggctgtaacgctggtagct

SEQ ID NO: 2858 - RNA, 23 nt, synthetic construct
  source 1..23: mol_type = other RNA
  modified_base 1: mod_base = OTHER; note = 2'-O-methyluridine-3'-phosphorothioate 5'-(E)-Vinylphosphonate
  modified_base 2: mod_base = OTHER; note = 2'-deoxy-2'-fluoroguanosine-3'-phosphorothioate
  modified_base 3: mod_base = OTHER; note = 2'-O-methyladenosine-3'-phosphate
  modified_base 4: mod_base = OTHER; note = 2'-O-methylcytidine-3'-phosphate
  modified_base 5: mod_base = OTHER; note = 2'-O-methyladenosine-3'-phosphate
  modified_base 6: mod_base = OTHER; note = 2'-deoxy-2'-fluoroguanosine-3'-phosphate
  modified_base 7: mod_base = OTHER; note = 2'-O-methyluridine-3'-phosphate
  modified_base 8: mod_base = OTHER; note = 2'-deoxy-2'-fluorocytidine-3'-phosphate
  modified_base 9: mod_base = OTHER; note = 2'-deoxy-2'-fluorouridine-3'-phosphate
  modified_base 10: mod_base = OTHER; note = 2'-O-methylcytidine-3'-phosphate
  modified_base 11: mod_base = OTHER; note = 2'-O-methyluridine-3'-phosphate
  modified_base 12: mod_base = OTHER; note = 2'-O-methylguanosine-3'-phosphate
  modified_base 13: mod_base = OTHER; note = 2'-O-methylguanosine-3'-phosphate
  modified_base 14: mod_base = OTHER; note = 2'-deoxy-2'-fluoroadenosine-3'-phosphate
  modified_base 15: mod_base = OTHER; note = 2'-O-methylguanosine-3'-phosphate
  modified_base 16: mod_base = OTHER; note = 2'-deoxy-2'-fluorouridine-3'-phosphate
  modified_base 17: mod_base = OTHER; note = 2'-O-methyladenosine-3'-phosphate
  modified_base 18: mod_base = OTHER; note = 2'-O-methylguanosine-3'-phosphate
  modified_base 19: mod_base = OTHER; note = 2'-O-methyladenosine-3'-phosphate
  modified_base 20: mod_base = OTHER; note = 2'-O-methylguanosine-3'-phosphate
  modified_base 21: mod_base = OTHER; note = 2'-O-methylguanosine-3'-phosphorothioate
  modified_base 22: mod_base = OTHER; note = 2'-O-methyladenosine-3'-phosphorothioate
  modified_base 23: mod_base = OTHER; note = 2'-O-methylguanosine
tgacagtctctggagtagaggag

SEQ ID NO: 2859 - RNA, 23 nt, synthetic construct
  source 1..23: mol_type = other RNA
  modified_base 1: mod_base = OTHER; note = 2'-O-methyluridine-3'-phosphorothioate 5'-(E)-Vinylphosphonate
  modified_base 2: mod_base = OTHER; note = 2'-deoxy-2'-fluoroguanosine-3'-phosphorothioate
  modified_base 3: mod_base = OTHER; note = 2'-O-methylcytidine-3'-phosphate
  modified_base 4: mod_base = OTHER; note = 2'-O-methyladenosine-3'-phosphate
  modified_base 5: mod_base = OTHER; note = 2'-O-methylcytidine-3'-phosphate
  modified_base 6: mod_base = OTHER; note = 2'-deoxy-2'-fluorouridine-3'-phosphate
  modified_base 7: mod_base = OTHER; note = 2'-O-methyluridine-3'-phosphate
  modified_base 8: mod_base = OTHER; note = 2'-deoxy-2'-fluorouridine-3'-phosphate
  modified_base 9: mod_base = OTHER; note = 2'-deoxy-2'-fluoroguanosine-3'-phosphate
  modified_base 10: mod_base = OTHER; note = 2'-O-methylguanosine-3'-phosphate
  modified_base 11: mod_base = OTHER; note = 2'-O-methyluridine-3'-phosphate
  modified_base 12: mod_base = OTHER; note = 2'-O-methyladenosine-3'-phosphate
  modified_base 13: mod_base = OTHER; note = 2'-O-methylguanosine-3'-phosphate
  modified_base 14: mod_base = OTHER; note = 2'-deoxy-2'-fluorouridine-3'-phosphate
  modified_base 15: mod_base = OTHER; note = 2'-O-methylguanosine-3'-phosphate
  modified_base 16: mod_base = OTHER; note = 2'-deoxy-2'-fluorouridine-3'-phosphate
  modified_base 17: mod_base = OTHER; note = 2'-O-methylguanosine-3'-phosphate
  modified_base 18: mod_base = OTHER; note = 2'-O-methyladenosine-3'-phosphate
  modified_base 19: mod_base = OTHER; note = 2'-O-methylguanosine-3'-phosphate
  modified_base 20: mod_base = OTHER; note = 2'-O-methylcytidine-3'-phosphate
  modified_base 21: mod_base = OTHER; note = 2'-O-methyluridine-3'-phosphorothioate
  modified_base 22: mod_base = OTHER; note = 2'-O-methylguanosine-3'-phosphorothioate
  modified_base 23: mod_base = OTHER; note = 2'-O-methyluridine
tgcactttggtagtgtgagctgt

SEQ ID NO: 2860 - RNA, 23 nt, synthetic construct
  source 1..23: mol_type = other RNA
  modified_base 1: mod_base = OTHER; note = 2'-O-methyluridine-3'-phosphorothioate 5'-(E)-Vinylphosphonate
  modified_base 2: mod_base = OTHER; note = 2'-deoxy-2'-fluoroguanosine-3'-phosphorothioate
  modified_base 3: mod_base = OTHER; note = 2'-O-methyladenosine-3'-phosphate
  modified_base 4: mod_base = OTHER; note = 2'-O-methyladenosine-3'-phosphate
  modified_base 5: mod_base = OTHER; note = 2'-O-methylguanosine-3'-phosphate
  modified_base 6: mod_base = OTHER; note = 2'-deoxy-2'-fluorocytidine-3'-phosphate
  modified_base 7: mod_base = OTHER; note = 2'-O-methylcytidine-3'-phosphate
  modified_base 8: mod_base = OTHER; note = 2'-deoxy-2'-fluorocytidine-3'-phosphate
  modified_base 9: mod_base = OTHER; note = 2'-deoxy-2'-fluoroguanosine-3'-phosphate
  modified_base 10: mod_base = OTHER; note = 2'-O-methyluridine-3'-phosphate
  modified_base 11: mod_base = OTHER; note = 2'-O-methylguanosine-3'-phosphate
  modified_base 12: mod_base = OTHER; note = 2'-O-methylguanosine-3'-phosphate
  modified_base 13: mod_base = OTHER; note = 2'-O-methyluridine-3'-phosphate
  modified_base 14: mod_base = OTHER; note = 2'-deoxy-2'-fluorouridine-3'-phosphate
  modified_base 15: mod_base = OTHER; note = 2'-O-methylguanosine-3'-phosphate
  modified_base 16: mod_base = OTHER; note = 2'-deoxy-2'-fluorouridine-3'-phosphate
  modified_base 17: mod_base = OTHER; note = 2'-O-methylguanosine-3'-phosphate
  modified_base 18: mod_base = OTHER; note = 2'-O-methylguanosine-3'-phosphate
  modified_base 19: mod_base = OTHER; note = 2'-O-methyluridine-3'-phosphate
  modified_base 20: mod_base = OTHER; note = 2'-O-methyladenosine-3'-phosphate
  modified_base 21: mod_base = OTHER; note = 2'-O-methylguanosine-3'-phosphorothioate
  modified_base 22: mod_base = OTHER; note = 2'-O-methyluridine-3'-phosphorothioate
  modified_base 23: mod_base = OTHER; note = 2'-O-methylcytidine
tgaagcccgtggttgtggtagtc

SEQ ID NO: 2861 - RNA, 23 nt, synthetic construct
  source 1..23: mol_type = other RNA
  modified_base 1: mod_base = OTHER; note = 2'-O-methyluridine-3'-phosphorothioate 5'-(E)-Vinylphosphonate
  modified_base 2: mod_base = OTHER; note = 2'-deoxy-2'-fluorouridine-3'-phosphorothioate
  modified_base 3: mod_base = OTHER; note = 2'-O-methylguanosine-3'-phosphate
  modified_base 4: mod_base = OTHER; note = 2'-O-methylguanosine-3'-phosphate
  modified_base 5: mod_base = OTHER; note = 2'-O-methylcytidine-3'-phosphate
  modified_base 6: mod_base = OTHER; note = 2'-deoxy-2'-fluorouridine-3'-phosphate
  modified_base 7: mod_base = OTHER; note = 2'-O-methylguanosine-3'-phosphate
  modified_base 8: mod_base = OTHER; note = 2'-deoxy-2'-fluorouridine-3'-phosphate
  modified_base 9: mod_base = OTHER; note = 2'-deoxy-2'-fluoroguanosine-3'-phosphate
  modified_base 10: mod_base = OTHER; note = 2'-O-methyladenosine-3'-phosphate
  modified_base 11: mod_base = OTHER; note = 2'-O-methyluridine-3'-phosphate
  modified_base 12: mod_base = OTHER; note = 2'-O-methylcytidine-3'-phosphate
  modified_base 13: mod_base = OTHER; note = 2'-O-methylguanosine-3'-phosphate
  modified_base 14: mod_base = OTHER; note = 2'-deoxy-2'-fluorouridine-3'-phosphate
  modified_base 15: mod_base = OTHER; note = 2'-O-methyladenosine-3'-phosphate
  modified_base 16: mod_base = OTHER; note = 2'-deoxy-2'-fluoroguanosine-3'-phosphate
  modified_base 17: mod_base = OTHER; note = 2'-O-methyluridine-3'-phosphate
  modified_base 18: mod_base = OTHER; note = 2'-O-methylguanosine-3'-phosphate
  modified_base 19: mod_base = OTHER; note = 2'-O-methylguanosine-3'-phosphate
  modified_base 20: mod_base = OTHER; note = 2'-O-methylcytidine-3'-phosphate
  modified_base 21: mod_base = OTHER; note = 2'-O-methylcytidine-3'-phosphorothioate
  modified_base 22: mod_base = OTHER; note = 2'-O-methylguanosine-3'-phosphorothioate
  modified_base 23: mod_base = OTHER; note = 2'-O-methyluridine
ttggctgtgatcgtagtggccgt

SEQ ID NO: 2862 - RNA, 23 nt, synthetic construct
  source 1..23: mol_type = other RNA
  modified_base 1: mod_base = OTHER; note = 2'-O-methyluridine-3'-phosphorothioate 5'-(E)-Vinylphosphonate
  modified_base 2: mod_base = OTHER; note = 2'-deoxy-2'-fluorocytidine-3'-phosphorothioate
  modified_base 3: mod_base = OTHER; note = 2'-O-methylguanosine-3'-phosphate
  modified_base 4: mod_base = OTHER; note = 2'-O-methyluridine-3'-phosphate
  modified_base 5: mod_base = OTHER; note = 2'-O-methylguanosine-3'-phosphate
  modified_base 6: mod_base = OTHER; note = 2'-deoxy-2'-fluorouridine-3'-phosphate
  modified_base 7: mod_base = OTHER; note = 2'-O-methylguanosine-3'-phosphate
  modified_base 8: mod_base = OTHER; note = 2'-deoxy-2'-fluorouridine-3'-phosphate
  modified_base 9: mod_base = OTHER; note = 2'-deoxy-2'-fluoroguanosine-3'-phosphate
  modified_base 10: mod_base = OTHER; note = 2'-O-methylguanosine-3'-phosphate
  modified_base 11: mod_base = OTHER; note = 2'-O-methyluridine-3'-phosphate
  modified_base 12: mod_base = OTHER; note = 2'-O-methylguanosine-3'-phosphate
  modified_base 13: mod_base = OTHER; note = 2'-O-methylguanosine-3'-phosphate
  modified_base 14: mod_base = OTHER; note = 2'-deoxy-2'-fluorocytidine-3'-phosphate
  modified_base 15: mod_base = OTHER; note = 2'-O-methylcytidine-3'-phosphate
  modified_base 16: mod_base = OTHER; note = 2'-deoxy-2'-fluoroguanosine-3'-phosphate
  modified_base 17: mod_base = OTHER; note = 2'-O-methyluridine-3'-phosphate
  modified_base 18: mod_base = OTHER; note = 2'-O-methylguanosine-3'-phosphate
  modified_base 19: mod_base = OTHER; note = 2'-O-methylguanosine-3'-phosphate
  modified_base 20: mod_base = OTHER; note = 2'-O-methyluridine-3'-phosphate
  modified_base 21: mod_base = OTHER; note = 2'-O-methylguanosine-3'-phosphorothioate
  modified_base 22: mod_base = OTHER; note = 2'-O-methyluridine-3'-phosphorothioate
  modified_base 23: mod_base = OTHER; note = 2'-O-methyluridine
tcgtgtgtggtggccgtggtgtt

SEQ ID NO: 2863 - RNA, 23 nt, synthetic construct
  source 1..23: mol_type = other RNA
  modified_base 1: mod_base = OTHER; note = 2'-O-methyluridine-3'-phosphorothioate 5'-(E)-Vinylphosphonate
  modified_base 2: mod_base = OTHER; note = 2'-deoxy-2'-fluoroguanosine-3'-phosphorothioate
  modified_base 3: mod_base = OTHER; note = 2'-O-methylguanosine-3'-phosphate
  modified_base 4: mod_base = OTHER; note = 2'-O-methyluridine-3'-phosphate
  modified_base 5: mod_base = OTHER; note = 2'-O-methyladenosine-3'-phosphate
  modified_base 6: mod_base = OTHER; note = 2'-deoxy-2'-fluorocytidine-3'-phosphate
  modified_base 7: mod_base = OTHER; note = 2'-O-methyluridine-3'-phosphate
  modified_base 8: mod_base = OTHER; note = 2'-deoxy-2'-fluoroguanosine-3'-phosphate
  modified_base 9: mod_base = OTHER; note = 2'-deoxy-2'-fluoroguanosine-3'-phosphate
  modified_base 10: mod_base = OTHER; note = 2'-O-methyluridine-3'-phosphate
  modified_base 11: mod_base = OTHER; note = 2'-O-methylguanosine-3'-phosphate
  modified_base 12: mod_base = OTHER; note = 2'-O-methylguanosine-3'-phosphate
  modified_base 13: mod_base = OTHER; note = 2'-O-methyluridine-3'-phosphate
  modified_base 14: mod_base = OTHER; note = 2'-deoxy-2'-fluorouridine-3'-phosphate
  modified_base 15: mod_base = OTHER; note = 2'-O-methylguanosine-3'-phosphate
  modified_base 16: mod_base = OTHER; note = 2'-deoxy-2'-fluorocytidine-3'-phosphate
  modified_base 17: mod_base = OTHER; note = 2'-O-methyluridine-3'-phosphate
  modified_base 18: mod_base = OTHER; note = 2'-O-methylguanosine-3'-phosphate
  modified_base 19: mod_base = OTHER; note = 2'-O-methylcytidine-3'-phosphate
  modified_base 20: mod_base = OTHER; note = 2'-O-methyluridine-3'-phosphate
  modified_base 21: mod_base = OTHER; note = 2'-O-methylguanosine-3'-phosphorothioate
  modified_base 22: mod_base = OTHER; note = 2'-O-methylguanosine-3'-phosphorothioate
  modified_base 23: mod_base = OTHER; note = 2'-O-methylguanosine
tggtactggtggttgctgctggg

SEQ ID NO: 2864 - RNA, 23 nt, synthetic construct
  source 1..23: mol_type = other RNA
  modified_base 1: mod_base = OTHER; note = 2'-O-methyluridine-3'-phosphorothioate 5'-(E)-Vinylphosphonate
  modified_base 2: mod_base = OTHER; note = 2'-deoxy-2'-fluorouridine-3'-phosphorothioate
  modified_base 3: mod_base = OTHER; note = 2'-O-methylguanosine-3'-phosphate
  modified_base 4: mod_base = OTHER; note = 2'-O-methyluridine-3'-phosphate
  modified_base 5: mod_base = OTHER; note = 2'-O-methylguanosine-3'-phosphate
  modified_base 6: mod_base = OTHER; note = 2'-deoxy-2'-fluoroguanosine-3'-phosphate
  modified_base 7: mod_base = OTHER; note = 2'-O-methylcytidine-3'-phosphate
  modified_base 8: mod_base = OTHER; note = 2'-deoxy-2'-fluorouridine-3'-phosphate
  modified_base 9: mod_base = OTHER; note = 2'-deoxy-2'-fluoroguanosine-3'-phosphate
  modified_base 10: mod_base = OTHER; note = 2'-O-methyluridine-3'-phosphate
  modified_base 11: mod_base = OTHER; note = 2'-O-methylguanosine-3'-phosphate
  modified_base 12: mod_base = OTHER; note = 2'-O-methylguanosine-3'-phosphate
  modified_base 13: mod_base = OTHER; note = 2'-O-methyluridine-3'-phosphate
  modified_base 14: mod_base = OTHER; note = 2'-deoxy-2'-fluorocytidine-3'-phosphate
  modified_base 15: mod_base = OTHER; note = 2'-O-methylcytidine-3'-phosphate
  modified_base 16: mod_base = OTHER; note = 2'-deoxy-2'-fluorouridine-3'-phosphate
  modified_base 17: mod_base = OTHER; note = 2'-O-methylguanosine-3'-phosphate
  modified_base 18: mod_base = OTHER; note = 2'-O-methylguanosine-3'-phosphate
  modified_base 19: mod_base = OTHER; note = 2'-O-methyladenosine-3'-phosphate
  modified_base 20: mod_base = OTHER; note = 2'-O-methylguanosine-3'-phosphate
  modified_base 21: mod_base = OTHER; note = 2'-O-methylguanosine-3'-phosphorothioate
  modified_base 22: mod_base = OTHER; note = 2'-O-methyluridine-3'-phosphorothioate
  modified_base 23: mod_base = OTHER; note = 2'-O-methylguanosine
ttgtggctgtggtcctggaggtg

SEQ ID NO: 2865 - RNA, 23 nt, synthetic construct
  source 1..23: mol_type = other RNA
  modified_base 1: mod_base = OTHER; note = 2'-O-methyluridine-3'-phosphorothioate 5'-(E)-Vinylphosphonate
  modified_base 2: mod_base = OTHER; note = 2'-deoxy-2'-fluorocytidine-3'-phosphorothioate
  modified_base 3: mod_base = OTHER; note = 2'-O-methylcytidine-3'-phosphate
  modified_base 4: mod_base = OTHER; note = 2'-O-methylcytidine-3'-phosphate
  modified_base 5: mod_base = OTHER; note = 2'-O-methylguanosine-3'-phosphate
  modified_base 6: mod_base = OTHER; note = 2'-deoxy-2'-fluorouridine-3'-phosphate
  modified_base 7: mod_base = OTHER; note = 2'-O-methylguanosine-3'-phosphate
  modified_base 8: mod_base = OTHER; note = 2'-deoxy-2'-fluoroguanosine-3'-phosphate
  modified_base 9: mod_base = OTHER; note = 2'-deoxy-2'-fluorouridine-3'-phosphate
  modified_base 10: mod_base = OTHER; note = 2'-O-methylcytidine-3'-phosphate
  modified_base 11: mod_base = OTHER; note = 2'-O-methyladenosine-3'-phosphate
  modified_base 12: mod_base = OTHER; note = 2'-O-methylcytidine-3'-phosphate
  modified_base 13: mod_base = OTHER; note = 2'-O-methylcytidine-3'-phosphate
  modified_base 14: mod_base = OTHER; note = 2'-deoxy-2'-fluoroadenosine-3'-phosphate
  modified_base 15: mod_base = OTHER; note = 2'-O-methylcytidine-3'-phosphate
  modified_base 16: mod_base = OTHER; note = 2'-deoxy-2'-fluorocytidine-3'-phosphate
  modified_base 17: mod_base = OTHER; note = 2'-O-methylguanosine-3'-phosphate
  modified_base 18: mod_base = OTHER; note = 2'-O-methyluridine-3'-phosphate
  modified_base 19: mod_base = OTHER; note = 2'-O-methylguanosine-3'-phosphate
  modified_base 20: mod_base = OTHER; note = 2'-O-methylguanosine-3'-phosphate
  modified_base 21: mod_base = OTHER; note = 2'-O-methyluridine-3'-phosphorothioate
  modified_base 22: mod_base = OTHER; note = 2'-O-methyluridine-3'-phosphorothioate
  modified_base 23: mod_base = OTHER; note = 2'-O-methyladenosine
tcccgtggtcaccaccgtggtta

SEQ ID NO: 2866 - RNA, 23 nt, synthetic construct
  source 1..23: mol_type = other RNA
  modified_base 1: mod_base = OTHER; note = 2'-O-methyluridine-3'-phosphorothioate 5'-(E)-Vinylphosphonate
  modified_base 2: mod_base = OTHER; note = 2'-deoxy-2'-fluoroadenosine-3'-phosphorothioate
  modified_base 3: mod_base = OTHER; note = 2'-O-methylguanosine-3'-phosphate
  modified_base 4: mod_base = OTHER; note = 2'-O-methyluridine-3'-phosphate
  modified_base 5: mod_base = OTHER; note = 2'-O-methyluridine-3'-phosphate
  modified_base 6: mod_base = OTHER; note = 2'-deoxy-2'-fluoroguanosine-3'-phosphate
  modified_base 7: mod_base = OTHER; note = 2'-O-methyladenosine-3'-phosphate
  modified_base 8: mod_base = OTHER; note = 2'-deoxy-2'-fluoroguanosine-3'-phosphate
  modified_base 9: mod_base = OTHER; note = 2'-deoxy-2'-fluoroguanosine-3'-phosphate
  modified_base 10: mod_base = OTHER; note = 2'-O-methyladenosine-3'-phosphate
  modified_base 11: mod_base = OTHER; note = 2'-O-methylguanosine-3'-phosphate
  modified_base 12: mod_base = OTHER; note = 2'-O-methylguanosine-3'-phosphate
  modified_base 13: mod_base = OTHER; note = 2'-O-methylguanosine-3'-phosphate
  modified_base 14: mod_base = OTHER; note = 2'-deoxy-2'-fluorocytidine-3'-phosphate
  modified_base 15: mod_base = OTHER; note = 2'-O-methylguanosine-3'-phosphate
  modified_base 16: mod_base = OTHER; note = 2'-deoxy-2'-fluorouridine-3'-phosphate
  modified_base 17: mod_base = OTHER; note = 2'-O-methylguanosine-3'-phosphate
  modified_base 18: mod_base = OTHER; note = 2'-O-methylguanosine-3'-phosphate
  modified_base 19: mod_base = OTHER; note = 2'-O-methylcytidine-3'-phosphate
  modified_base 20: mod_base = OTHER; note = 2'-O-methylcytidine-3'-phosphate
  modified_base 21: mod_base = OTHER; note = 2'-O-methylguanosine-3'-phosphorothioate
  modified_base 22: mod_base = OTHER; note = 2'-O-methyluridine-3'-phosphorothioate
  modified_base 23: mod_base = OTHER; note = 2'-O-methyladenosine
tagttgaggagggcgtggccgta

SEQ ID NO: 2867 - RNA, 23 nt, synthetic construct
  source 1..23: mol_type = other RNA
  modified_base 1: mod_base = OTHER; note = 2'-O-methyluridine-3'-phosphorothioate 5'-(E)-Vinylphosphonate
  modified_base 2: mod_base = OTHER; note = 2'-deoxy-2'-fluorouridine-3'-phosphorothioate
  modified_base 3: mod_base = OTHER; note = 2'-O-methylcytidine-3'-phosphate
  modified_base 4: mod_base = OTHER; note = 2'-O-methyladenosine-3'-phosphate
  modified_base 5: mod_base = OTHER; note = 2'-O-methylguanosine-3'-phosphate
  modified_base 6: mod_base = OTHER; note = 2'-deoxy-2'-fluorocytidine-3'-phosphate
  modified_base 7: mod_base = OTHER; note = 2'-O-methyluridine-3'-phosphate
  modified_base 8: mod_base = OTHER; note = 2'-deoxy-2'-fluorouridine-3'-phosphate
  modified_base 9: mod_base = OTHER; note = 2'-deoxy-2'-fluorouridine-3'-phosphate
  modified_base 10: mod_base = OTHER; note = 2'-O-methylguanosine-3'-phosphate
  modified_base 11: mod_base = OTHER; note = 2'-O-methyluridine-3'-phosphate
  modified_base 12: mod_base = OTHER; note = 2'-O-methylguanosine-3'-phosphate
  modified_base 13: mod_base = OTHER; note = 2'-O-methyladenosine-3'-phosphate
  modified_base 14: mod_base = OTHER; note = 2'-deoxy-2'-fluoroguanosine-3'-phosphate
  modified_base 15: mod_base = OTHER; note = 2'-O-methylguanosine-3'-phosphate
  modified_base 16: mod_base = OTHER; note = 2'-deoxy-2'-fluoroadenosine-3'-phosphate
  modified_base 17: mod_base = OTHER; note = 2'-O-methyluridine-3'-phosphate
  modified_base 18: mod_base = OTHER; note = 2'-O-methylcytidine-3'-phosphate
  modified_base 19: mod_base = OTHER; note = 2'-O-methylcytidine-3'-phosphate
  modified_base 20: mod_base = OTHER; note = 2'-O-methyladenosine-3'-phosphate
  modified_base 21: mod_base = OTHER; note = 2'-O-methylguanosine-3'-phosphorothioate
  modified_base 22: mod_base = OTHER; note = 2'-O-methylguanosine-3'-phosphorothioate
  modified_base 23: mod_base = OTHER; note = 2'-O-methyluridine
ttcagctttgtgaggatccaggt

SEQ ID NO: 2868 - RNA, 23 nt, synthetic construct
  source 1..23: mol_type = other RNA
  modified_base 1: mod_base = OTHER; note = 2'-O-methyluridine-3'-phosphorothioate 5'-(E)-Vinylphosphonate
  modified_base 2: mod_base = OTHER; note = 2'-deoxy-2'-fluorouridine-3'-phosphorothioate
  modified_base 3: mod_base = OTHER; note = 2'-O-methylguanosine-3'-phosphate
  modified_base 4: mod_base = OTHER; note = 2'-O-methylguanosine-3'-phosphate
  modified_base 5: mod_base = OTHER; note = 2'-O-methyladenosine-3'-phosphate
  modified_base 6: mod_base = OTHER; note = 2'-deoxy-2'-fluoroguanosine-3'-phosphate
  modified_base 7: mod_base = OTHER; note = 2'-O-methylcytidine-3'-phosphate
  modified_base 8: mod_base = OTHER; note = 2'-deoxy-2'-fluorocytidine-3'-phosphate
  modified_base 9: mod_base = OTHER; note = 2'-deoxy-2'-fluoroadenosine-3'-phosphate
  modified_base 10: mod_base = OTHER; note = 2'-O-methylcytidine-3'-phosphate
  modified_base 11: mod_base = OTHER; note = 2'-O-methyluridine-3'-phosphate
  modified_base 12: mod_base = OTHER; note = 2'-O-methylguanosine-3'-phosphate
  modified_base 13: mod_base = OTHER; note = 2'-O-methylguanosine-3'-phosphate
  modified_base 14: mod_base = OTHER; note = 2'-deoxy-2'-fluorouridine-3'-phosphate
  modified_base 15: mod_base = OTHER; note = 2'-O-methyluridine-3'-phosphate
  modified_base 16: mod_base = OTHER; note = 2'-deoxy-2'-fluoroguanosine-3'-phosphate
  modified_base 17: mod_base = OTHER; note = 2'-O-methyluridine-3'-phosphate
  modified_base 18: mod_base = OTHER; note = 2'-O-methylguanosine-3'-phosphate
  modified_base 19: mod_base = OTHER; note = 2'-O-methylguanosine-3'-phosphate
  modified_base 20: mod_base = OTHER; note = 2'-O-methylguanosine-3'-phosphate
  modified_base 21: mod_base = OTHER; note = 2'-O-methyluridine-3'-phosphorothioate
  modified_base 22: mod_base = OTHER; note = 2'-O-methylguanosine-3'-phosphorothioate
  modified_base 23: mod_base = OTHER; note = 2'-O-methyluridine
ttggagccactggttgtgggtgt

SEQ ID NO: 2869 - RNA, 23 nt, synthetic construct
  source 1..23: mol_type = other RNA
  modified_base 1: mod_base = OTHER; note = 2'-O-methyluridine-3'-phosphorothioate 5'-(E)-Vinylphosphonate
  modified_base 2: mod_base = OTHER; note = 2'-deoxy-2'-fluorocytidine-3'-phosphorothioate
  modified_base 3: mod_base = OTHER; note = 2'-O-methyluridine-3'-phosphate
  modified_base 4: mod_base = OTHER; note = 2'-O-methylguanosine-3'-phosphate
  modified_base 5: mod_base = OTHER; note = 2'-O-methyluridine-3'-phosphate
  modified_base 6: mod_base = OTHER; note = 2'-deoxy-2'-fluoroguanosine-3'-phosphate
  modified_base 7: mod_base = OTHER; note = 2'-O-methyladenosine-3'-phosphate
  modified_base 8: mod_base = OTHER; note = 2'-deoxy-2'-fluoroguanosine-3'-phosphate
  modified_base 9: mod_base = OTHER; note = 2'-deoxy-2'-fluoroguanosine-3'-phosphate
  modified_base 10: mod_base = OTHER; note = 2'-O-methyladenosine-3'-phosphate
  modified_base 11: mod_base = OTHER; note = 2'-O-methyluridine-3'-phosphate
  modified_base 12: mod_base = OTHER; note = 2'-O-methylcytidine-3'-phosphate
  modified_base 13: mod_base = OTHER; note = 2'-O-methylcytidine-3'-phosphate
  modified_base 14: mod_base = OTHER; note = 2'-deoxy-2'-fluoroadenosine-3'-phosphate
  modified_base 15: mod_base = OTHER; note = 2'-O-methylguanosine-3'-phosphate
  modified_base 16: mod_base = OTHER; note = 2'-deoxy-2'-fluoroguanosine-3'-phosphate
  modified_base 17: mod_base = OTHER; note = 2'-O-methyluridine-3'-phosphate
  modified_base 18: mod_base = OTHER; note = 2'-O-methylcytidine-3'-phosphate
  modified_base 19: mod_base = OTHER; note = 2'-O-methylguanosine-3'-phosphate
  modified_base 20: mod_base = OTHER; note = 2'-O-methyluridine-3'-phosphate
  modified_base 21: mod_base = OTHER; note = 2'-O-methylcytidine-3'-phosphorothioate
  modified_base 22: mod_base = OTHER; note = 2'-O-methylcytidine-3'-phosphorothioate
  modified_base 23: mod_base = OTHER; note = 2'-O-methylcytidine
tctgtgaggatccaggtcgtccc

SEQ ID NO: 2870 - RNA, 23 nt, synthetic construct
  source 1..23: mol_type = other RNA
  modified_base 1: mod_base = OTHER; note = 2'-O-methyluridine-3'-phosphorothioate 5'-(E)-Vinylphosphonate
  modified_base 2: mod_base = OTHER; note = 2'-deoxy-2'-fluorocytidine-3'-phosphorothioate
  modified_base 3: mod_base = OTHER; note = 2'-O-methylguanosine-3'-phosphate
  modified_base 4: mod_base = OTHER; note = 2'-O-methyluridine-3'-phosphate
  modified_base 5: mod_base = OTHER; note = 2'-O-methyladenosine-3'-phosphate
  modified_base 6: mod_base = OTHER; note = 2'-deoxy-2'-fluoroguanosine-3'-phosphate
  modified_base 7: mod_base = OTHER; note = 2'-O-methyluridine-3'-phosphate
  modified_base 8: mod_base = OTHER; note = 2'-deoxy-2'-fluoroguanosine-3'-phosphate
  modified_base 9: mod_base = OTHER; note = 2'-deoxy-2'-fluoroguanosine-3'-phosphate
  modified_base 10: mod_base = OTHER; note = 2'-O-methylcytidine-3'-phosphate
  modified_base 11: mod_base = OTHER; note = 2'-O-methyluridine-3'-phosphate
  modified_base 12: mod_base = OTHER; note = 2'-O-methylguanosine-3'-phosphate
  modified_base 13: mod_base = OTHER; note = 2'-O-methyluridine-3'-phosphate
  modified_base 14: mod_base = OTHER; note = 2'-deoxy-2'-fluorouridine-3'-phosphate
  modified_base 15: mod_base = OTHER; note = 2'-O-methylguanosine-3'-phosphate
  modified_base 16: mod_base = OTHER; note = 2'-deoxy-2'-fluorouridine-3'-phosphate
  modified_base 17: mod_base = OTHER; note = 2'-O-methylguanosine-3'-phosphate
  modified_base 18: mod_base = OTHER; note = 2'-O-methylguanosine-3'-phosphate
  modified_base 19: mod_base = OTHER; note = 2'-O-methyluridine-3'-phosphate
  modified_base 20: mod_base = OTHER; note = 2'-O-methylcytidine-3'-phosphate
  modified_base 21: mod_base = OTHER; note = 2'-O-methyladenosine-3'-phosphorothioate
  modified_base 22: mod_base = OTHER; note = 2'-O-methylguanosine-3'-phosphorothioate
  modified_base 23: mod_base = OTHER; note = 2'-O-methylcytidine
tcgtagtggctgttgtggtcagc

SEQ ID NO: 2871 - RNA, 23 nt, synthetic construct
  source 1..23: mol_type = other RNA
  modified_base 1: mod_base = OTHER; note = 2'-O-methyluridine-3'-phosphorothioate 5'-(E)-Vinylphosphonate
  modified_base 2: mod_base = OTHER; note = 2'-deoxy-2'-fluorouridine-3'-phosphorothioate
  modified_base 3: mod_base = OTHER; note = 2'-O-methylguanosine-3'-phosphate
  modified_base 4: mod_base = OTHER; note = 2'-O-methylguanosine-3'-phosphate
  modified_base 5: mod_base = OTHER; note = 2'-O-methylcytidine-3'-phosphate
  modified_base 6: mod_base = OTHER; note = 2'-deoxy-2'-fluorocytidine-3'-phosphate
  modified_base 7: mod_base = OTHER; note = 2'-O-methylguanosine-3'-phosphate
  modified_base 8: mod_base = OTHER; note = 2'-deoxy-2'-fluorouridine-3'-phosphate
  modified_base 9: mod_base = OTHER; note = 2'-deoxy-2'-fluoroguanosine-3'-phosphate
  modified_base 10: mod_base = OTHER; note = 2'-O-methylguanosine-3'-phosphate
  modified_base 11: mod_base = OTHER; note = 2'-O-methyladenosine-3'-phosphate
  modified_base 12: mod_base = OTHER; note = 2'-O-methyluridine-3'-phosphate
  modified_base 13: mod_base = OTHER; note = 2'-O-methylcytidine-3'-phosphate
  modified_base 14: mod_base = OTHER; note = 2'-deoxy-2'-fluorocytidine-3'-phosphate
  modified_base 15: mod_base = OTHER; note = 2'-O-methyladenosine-3'-phosphate
  modified_base 16: mod_base = OTHER; note = 2'-deoxy-2'-fluoroguanosine-3'-phosphate
  modified_base 17: mod_base = OTHER; note = 2'-O-methyluridine-3'-phosphate
  modified_base 18: mod_base = OTHER; note = 2'-O-methylguanosine-3'-phosphate
  modified_base 19: mod_base = OTHER; note = 2'-O-methylguanosine-3'-phosphate
  modified_base 20: mod_base = OTHER; note = 2'-O-methyladenosine-3'-phosphate
  modified_base 21: mod_base = OTHER; note = 2'-O-methyluridine-3'-phosphorothioate
  modified_base 22: mod_base = OTHER; note = 2'-O-methylguanosine-3'-phosphorothioate
  modified_base 23: mod_base = OTHER; note = 2'-O-methylcytidine
ttggccgtggatccagtggatgc

SEQ ID NO: 2872 - RNA, 23 nt, synthetic construct
  source 1..23: mol_type = other RNA
  modified_base 1: mod_base = OTHER; note = 2'-O-methyluridine-3'-phosphorothioate 5'-(E)-Vinylphosphonate
  modified_base 2: mod_base = OTHER; note = 2'-deoxy-2'-fluoroguanosine-3'-phosphorothioate
  modified_base 3: mod_base = OTHER; note = 2'-O-methylcytidine-3'-phosphate
  modified_base 4: mod_base = OTHER; note = 2'-O-methyluridine-3'-phosphate
  modified_base 5: mod_base = OTHER; note = 2'-O-methylguanosine-3'-phosphate
  modified_base 6: mod_base = OTHER; note = 2'-deoxy-2'-fluoroguanosine-3'-phosphate
  modified_base 7: mod_base = OTHER; note = 2'-O-methyluridine-3'-phosphate
  modified_base 8: mod_base = OTHER; note = 2'-deoxy-2'-fluorocytidine-3'-phosphate
  modified_base 9: mod_base = OTHER; note = 2'-deoxy-2'-fluoroadenosine-3'-phosphate
  modified_base 10: mod_base = OTHER; note = 2'-O-methylguanosine-3'-phosphate
  modified_base 11: mod_base = OTHER; note = 2'-O-methylcytidine-3'-phosphate
  modified_base 12: mod_base = OTHER; note = 2'-O-methyladenosine-3'-phosphate
  modified_base 13: mod_base = OTHER; note = 2'-O-methylcytidine-3'-phosphate
  modified_base 14: mod_base = OTHER; note = 2'-deoxy-2'-fluorouridine-3'-phosphate
  modified_base 15: mod_base = OTHER; note = 2'-O-methyluridine-3'-phosphate
  modified_base 16: mod_base = OTHER; note = 2'-deoxy-2'-fluorouridine-3'-phosphate
  modified_base 17: mod_base = OTHER; note = 2'-O-methylguanosine-3'-phosphate
  modified_base 18: mod_base = OTHER; note = 2'-O-methylguanosine-3'-phosphate
  modified_base 19: mod_base = OTHER; note = 2'-O-methylguanosine-3'-phosphate
  modified_base 20: mod_base = OTHER; note = 2'-O-methyladenosine-3'-phosphate
  modified_base 21: mod_base = OTHER; note = 2'-O-methylguanosine-3'-phosphorothioate
  modified_base 22: mod_base = OTHER; note = 2'-O-methylguanosine-3'-phosphorothioate
  modified_base 23: mod_base = OTHER; note = 2'-O-methylguanosine
tgctggtcagcactttgggaggg

SEQ ID NO: 2873 - RNA, 23 nt, synthetic construct
  source 1..23: mol_type = other RNA
  modified_base 1: mod_base = OTHER; note = 2'-O-methyluridine-3'-phosphorothioate 5'-(E)-Vinylphosphonate
  modified_base 2: mod_base = OTHER; note = 2'-deoxy-2'-fluoroguanosine-3'-phosphorothioate
  modified_base 3: mod_base = OTHER; note = 2'-O-methylguanosine-3'-phosphate
  modified_base 4: mod_base = OTHER; note = 2'-O-methyluridine-3'-phosphate
  modified_base 5: mod_base = OTHER; note = 2'-O-methyladenosine-3'-phosphate
  modified_base 6: mod_base = OTHER; note = 2'-deoxy-2'-fluoroguanosine-3'-phosphate
  modified_base 7: mod_base = OTHER; note = 2'-O-methylcytidine-3'-phosphate
  modified_base 8: mod_base = OTHER; note = 2'-deoxy-2'-fluorouridine-3'-phosphate
  modified_base 9: mod_base = OTHER; note = 2'-deoxy-2'-fluoroguanosine-3'-phosphate
  modified_base 10: mod_base = OTHER; note = 2'-O-methyluridine-3'-phosphate
  modified_base 11: mod_base = OTHER; note = 2'-O-methylguanosine-3'-phosphate
  modified_base 12: mod_base = OTHER; note = 2'-O-methylguanosine-3'-phosphate
  modified_base 13: mod_base = OTHER; note = 2'-O-methyladenosine-3'-phosphate
  modified_base 14: mod_base = OTHER; note = 2'-deoxy-2'-fluorouridine-3'-phosphate
  modified_base 15: mod_base = OTHER; note = 2'-O-methyluridine-3'-phosphate
  modified_base 16: mod_base = OTHER; note = 2'-deoxy-2'-fluorouridine-3'-phosphate
  modified_base 17: mod_base = OTHER; note = 2'-O-methylguanosine-3'-phosphate
  modified_base 18: mod_base = OTHER; note = 2'-O-methylguanosine-3'-phosphate
  modified_base 19: mod_base = OTHER; note = 2'-O-methyluridine-3'-phosphate
  modified_base 20: mod_base = OTHER; note = 2'-O-methylguanosine-3'-phosphate
  modified_base 21: mod_base = OTHER; note = 2'-O-methylguanosine-3'-phosphorothioate
  modified_base 22: mod_base = OTHER; note = 2'-O-methylcytidine-3'-phosphorothioate
  modified_base 23: mod_base = OTHER; note = 2'-O-methyluridine
tggtagctgtggatttggtggct

SEQ ID NO: 2874 - RNA, 23 nt, synthetic construct
  source 1..23: mol_type = other RNA
  modified_base 1: mod_base = OTHER; note = 2'-O-methyluridine-3'-phosphorothioate 5'-(E)-Vinylphosphonate
  modified_base 2: mod_base = OTHER; note = 2'-deoxy-2'-fluorouridine-3'-phosphorothioate
  modified_base 3: mod_base = OTHER; note = 2'-O-methylguanosine-3'-phosphate
  modified_base 4: mod_base = OTHER; note = 2'-O-methylguanosine-3'-phosphate
  modified_base 5: mod_base = OTHER; note = 2'-O-methyladenosine-3'-phosphate
  modified_base 6: mod_base = OTHER; note = 2'-deoxy-2'-fluorocytidine-3'-phosphate
  modified_base 7: mod_base = OTHER; note = 2'-O-methylguanosine-3'-phosphate
  modified_base 8: mod_base = OTHER; note = 2'-deoxy-2'-fluorouridine-3'-phosphate
  modified_base 9: mod_base = OTHER; note = 2'-deoxy-2'-fluoroguanosine-3'-phosphate
  modified_base 10: mod_base = OTHER; note = 2'-O-methylguanosine-3'-phosphate
  modified_base 11: mod_base = OTHER; note = 2'-O-methyladenosine-3'-phosphate
  modified_base 12: mod_base = OTHER; note = 2'-O-methyladenosine-3'-phosphate
  modified_base 13: mod_base = OTHER; note = 2'-O-methylcytidine-3'-phosphate
  modified_base 14: mod_base = OTHER; note = 2'-deoxy-2'-fluorouridine-3'-phosphate
  modified_base 15: mod_base = OTHER; note = 2'-O-methylguanosine-3'-phosphate
  modified_base 16: mod_base = OTHER; note = 2'-deoxy-2'-fluoroguanosine-3'-phosphate
  modified_base 17: mod_base = OTHER; note = 2'-O-methyluridine-3'-phosphate
  modified_base 18: mod_base = OTHER; note = 2'-O-methylguanosine-3'-phosphate
  modified_base 19: mod_base = OTHER; note = 2'-O-methylguanosine-3'-phosphate
  modified_base 20: mod_base = OTHER; note = 2'-O-methylcytidine-3'-phosphate
  modified_base 21: mod_base = OTHER; note = 2'-O-methylcytidine-3'-phosphorothioate
  modified_base 22: mod_base = OTHER; note = 2'-O-methylcytidine-3'-phosphorothioate
  modified_base 23: mod_base = OTHER; note = 2'-O-methyluridine
ttggacgtggaactggtggccct

SEQ ID NO: 2875 - RNA, 23 nt, synthetic construct
  source 1..23: mol_type = other RNA
  modified_base 1: mod_base = OTHER; note = 2'-O-methyluridine-3'-phosphorothioate 5'-(E)-Vinylphosphonate
  modified_base 2: mod_base = OTHER; note = 2'-deoxy-2'-fluorouridine-3'-phosphorothioate
  modified_base 3: mod_base = OTHER; note = 2'-O-methylguanosine-3'-phosphate
  modified_base 4: mod_base = OTHER; note = 2'-O-methyluridine-3'-phosphate
  modified_base 5: mod_base = OTHER; note = 2'-O-methylcytidine-3'-phosphate
  modified_base 6: mod_base = OTHER; note = 2'-deoxy-2'-fluoroguanosine-3'-phosphate
  modified_base 7: mod_base = OTHER; note = 2'-O-methyluridine-3'-phosphate
  modified_base 8: mod_base = OTHER; note = 2'-deoxy-2'-fluoroguanosine-3'-phosphate
  modified_base 9: mod_base = OTHER; note = 2'-deoxy-2'-fluoroguanosine-3'-phosphate
  modified_base 10: mod_base = OTHER; note = 2'-O-methylcytidine-3'-phosphate
  modified_base 11: mod_base = OTHER; note = 2'-O-methylcytidine-3'-phosphate
  modified_base 12: mod_base = OTHER; note = 2'-O-methylguanosine-3'-phosphate
  modified_base 13: mod_base = OTHER; note = 2'-O-methyluridine-3'-phosphate
  modified_base 14: mod_base = OTHER; note = 2'-deoxy-2'-fluoroguanosine-3'-phosphate
  modified_base 15: mod_base = OTHER; note = 2'-O-methylguanosine-3'-phosphate
  modified_base 16: mod_base = OTHER; note = 2'-deoxy-2'-fluorouridine-3'-phosphate
  modified_base 17: mod_base = OTHER; note = 2'-O-methylguanosine-3'-phosphate
  modified_base 18: mod_base = OTHER; note = 2'-O-methylcytidine-3'-phosphate
  modified_base 19: mod_base = OTHER; note = 2'-O-methyluridine-3'-phosphate
  modified_base 20: mod_base = OTHER; note = 2'-O-methylcytidine-3'-phosphate
  modified_base 21: mod_base = OTHER; note = 2'-O-methyladenosine-3'-phosphorothioate
  modified_base 22: mod_base = OTHER; note = 2'-O-methylcytidine-3'-phosphorothioate
  modified_base 23: mod_base = OTHER; note = 2'-O-methyladenosine
ttgtcgtggccgtggtgctcaca

SEQ ID NO: 2876 - RNA, 23 nt, synthetic construct
  source 1..23: mol_type = other RNA
  modified_base 1: mod_base = OTHER; note = 2'-O-methyluridine-3'-phosphorothioate 5'-(E)-Vinylphosphonate
  modified_base 2: mod_base = OTHER; note = 2'-deoxy-2'-fluoroadenosine-3'-phosphorothioate
  modified_base 3: mod_base = OTHER; note = 2'-O-methylguanosine-3'-phosphate
  modified_base 4: mod_base = OTHER; note = 2'-O-methylguanosine-3'-phosphate
  modified_base 5: mod_base = OTHER; note = 2'-O-methylguanosine-3'-phosphate
  modified_base 6: mod_base = OTHER; note = 2'-deoxy-2'-fluorocytidine-3'-phosphate
  modified_base 7: mod_base = OTHER; note = 2'-O-methyladenosine-3'-phosphate
  modified_base 8: mod_base = OTHER; note = 2'-deoxy-2'-fluoroguanosine-3'-phosphate
  modified_base 9: mod_base = OTHER; note = 2'-deoxy-2'-fluorouridine-3'-phosphate
  modified_base 10: mod_base = OTHER; note = 2'-O-methyluridine-3'-phosphate
  modified_base 11: mod_base = OTHER; note = 2'-O-methylguanosine-3'-phosphate
  modified_base 12: mod_base = OTHER; note = 2'-O-methylcytidine-3'-phosphate
  modified_base 13: mod_base = OTHER; note = 2'-O-methyladenosine-3'-phosphate
  modified_base 14: mod_base = OTHER; note = 2'-deoxy-2'-fluoroguanosine-3'-phosphate
  modified_base 15: mod_base = OTHER; note = 2'-O-methyluridine-3'-phosphate
  modified_base 16: mod_base = OTHER; note = 2'-deoxy-2'-fluorocytidine-3'-phosphate
  modified_base 17: mod_base = OTHER; note = 2'-O-methylcytidine-3'-phosphate
  modified_base 18: mod_base = OTHER; note = 2'-O-methylcytidine-3'-phosphate
  modified_base 19: mod_base = OTHER; note = 2'-O-methyluridine-3'-phosphate
  modified_base 20: mod_base = OTHER; note = 2'-O-methylguanosine-3'-phosphate
  modified_base 21: mod_base = OTHER; note = 2'-O-methylguanosine-3'-phosphorothioate
  modified_base 22: mod_base = OTHER; note = 2'-O-methyladenosine-3'-phosphorothioate
  modified_base 23: mod_base = OTHER; note = 2'-O-methylcytidine
tagggcagttgcagtccctggac

SEQ ID NO: 2877 - RNA, 23 nt, synthetic construct
  source 1..23: mol_type = other RNA
  modified_base 1: mod_base = OTHER; note = 2'-O-methyluridine-3'-phosphorothioate 5'-(E)-Vinylphosphonate
  modified_base 2: mod_base = OTHER; note = 2'-deoxy-2'-fluorouridine-3'-phosphorothioate
  modified_base 3: mod_base = OTHER; note = 2'-O-methylguanosine-3'-phosphate
  modified_base 4: mod_base = OTHER; note = 2'-O-methylguanosine-3'-phosphate
  modified_base 5: mod_base = OTHER; note = 2'-O-methyluridine-3'-phosphate
  modified_base 6: mod_base = OTHER; note = 2'-deoxy-2'-fluoroguanosine-3'-phosphate
  modified_base 7: mod_base = OTHER; note = 2'-O-methylguanosine-3'-phosphate
  modified_base 8: mod_base = OTHER; note = 2'-deoxy-2'-fluorouridine-3'-phosphate
  modified_base 9: mod_base = OTHER; note = 2'-deoxy-2'-fluorocytidine-3'-phosphate
  modified_base 10: mod_base = OTHER; note = 2'-O-methyladenosine-3'-phosphate
  modified_base 11: mod_base = OTHER; note = 2'-O-methylguanosine-3'-phosphate
  modified_base 12: mod_base = OTHER; note = 2'-O-methylcytidine-3'-phosphate
  modified_base 13: mod_base = OTHER; note = 2'-O-methyladenosine-3'-phosphate
  modified_base 14: mod_base = OTHER; note = 2'-deoxy-2'-fluorocytidine-3'-phosphate
  modified_base 15: mod_base = OTHER; note = 2'-O-methyluridine-3'-phosphate
  modified_base 16: mod_base = OTHER; note = 2'-deoxy-2'-fluorocytidine-3'-phosphate
  modified_base 17: mod_base = OTHER; note = 2'-O-methyluridine-3'-phosphate
  modified_base 18: mod_base = OTHER; note = 2'-O-methylguanosine-3'-phosphate
  modified_base 19: mod_base = OTHER; note = 2'-O-methylguanosine-3'-phosphate
  modified_base 20: mod_base = OTHER; note = 2'-O-methylcytidine-3'-phosphate
  modified_base 21: mod_base = OTHER; note = 2'-O-methylguanosine-3'-phosphorothioate
  modified_base 22: mod_base = OTHER; note = 2'-O-methylguanosine-3'-phosphorothioate
  modified_base 23: mod_base = OTHER; note = 2'-O-methyluridine
ttggtggtcagcactctggcggt

SEQ ID NO: 2878 - RNA, 23 nt, synthetic construct
  source 1..23: mol_type = other RNA
  modified_base 1: mod_base = OTHER; note = 2'-O-methyluridine-3'-phosphorothioate 5'-(E)-Vinylphosphonate
  modified_base 2: mod_base = OTHER; note = 2'-deoxy-2'-fluoroguanosine-3'-phosphorothioate
  modified_base 3: mod_base = OTHER; note = 2'-O-methylguanosine-3'-phosphate
  modified_base 4: mod_base = OTHER; note = 2'-O-methyluridine-3'-phosphate
  modified_base 5: mod_base = OTHER; note = 2'-O-methylguanosine-3'-phosphate
  modified_base 6: mod_base = OTHER; note = 2'-deoxy-2'-fluoroadenosine-3'-phosphate
  modified_base 7: mod_base = OTHER; note = 2'-O-methyluridine-3'-phosphate
  modified_base 8: mod_base = OTHER; note = 2'-deoxy-2'-fluoroguanosine-3'-phosphate
  modified_base 9: mod_base = OTHER; note = 2'-deoxy-2'-fluoroguanosine-3'-phosphate
  modified_base 10: mod_base = OTHER; note = 2'-O-methylguanosine-3'-phosphate
  modified_base 11: mod_base = OTHER; note = 2'-O-methyluridine-3'-phosphate
  modified_base 12: mod_base = OTHER; note = 2'-O-methylguanosine-3'-phosphate
  modified_base 13: mod_base = OTHER; note = 2'-O-methyluridine-3'-phosphate
  modified_base 14: mod_base = OTHER; note = 2'-deoxy-2'-fluorouridine-3'-phosphate
  modified_base 15: mod_base = OTHER; note = 2'-O-methylguanosine-3'-phosphate
  modified_base 16: mod_base = OTHER; note = 2'-deoxy-2'-fluorouridine-3'-phosphate
  modified_base 17: mod_base = OTHER; note = 2'-O-methylcytidine-3'-phosphate
  modified_base 18: mod_base = OTHER; note = 2'-O-methylcytidine-3'-phosphate
  modified_base 19: mod_base = OTHER; note = 2'-O-methylcytidine-3'-phosphate
  modified_base 20: mod_base = OTHER; note = 2'-O-methyluridine-3'-phosphate
  modified_base 21: mod_base = OTHER; note = 2'-O-methylguanosine-3'-phosphorothioate
  modified_base 22: mod_base = OTHER; note = 2'-O-methylguanosine-3'-phosphorothioate
  modified_base 23: mod_base = OTHER; note = 2'-O-methyladenosine
tggtgatgggtgttgtccctgga

SEQ ID NO: 2879 - RNA, 23 nt, synthetic construct
  source 1..23: mol_type = other RNA
  modified_base 1: mod_base = OTHER; note = 2'-O-methyluridine-3'-phosphorothioate 5'-(E)-Vinylphosphonate
  modified_base 2: mod_base = OTHER; note = 2'-deoxy-2'-fluoroadenosine-3'-phosphorothioate
  modified_base 3: mod_base = OTHER; note = 2'-O-methylguanosine-3'-phosphate
  modified_base 4: mod_base = OTHER; note = 2'-O-methylguanosine-3'-phosphate
  modified_base 5: mod_base = OTHER; note = 2'-O-methyladenosine-3'-phosphate
  modified_base 6: mod_base = OTHER; note = 2'-deoxy-2'-fluoroguanosine-3'-phosphate
  modified_base 7: mod_base = OTHER; note = 2'-O-methylguanosine-3'-phosphate
  modified_base 8: mod_base = OTHER; note = 2'-deoxy-2'-fluoroadenosine-3'-phosphate
  modified_base 9: mod_base = OTHER; note = 2'-deoxy-2'-fluoroadenosine-3'-phosphate
  modified_base 10: mod_base = OTHER; note = 2'-O-methylguanosine-3'-phosphate
  modified_base 11: mod_base = OTHER; note = 2'-O-methyluridine-3'-phosphate
  modified_base 12: mod_base = OTHER; note = 2'-O-methylguanosine-3'-phosphate
  modified_base 13: mod_base = OTHER; note = 2'-O-methylguanosine-3'-phosphate
  modified_base 14: mod_base = OTHER; note = 2'-deoxy-2'-fluorocytidine-3'-phosphate
  modified_base 15: mod_base = OTHER; note = 2'-O-methyluridine-3'-phosphate
  modified_base 16: mod_base = OTHER; note = 2'-deoxy-2'-fluorouridine-3'-phosphate
  modified_base 17: mod_base = OTHER; note = 2'-O-methyluridine-3'-phosphate
  modified_base 18: mod_base = OTHER; note = 2'-O-methylguanosine-3'-phosphate
  modified_base 19: mod_base = OTHER; note = 2'-O-methylguanosine-3'-phosphate
  modified_base 20: mod_base = OTHER; note = 2'-O-methyladenosine-3'-phosphate
  modified_base 21: mod_base = OTHER; note = 2'-O-methylguanosine-3'-phosphorothioate
  modified_base 22: mod_base = OTHER; note = 2'-O-methylcytidine-3'-phosphorothioate
  modified_base 23: mod_base = OTHER; note = 2'-O-methyluridine
taggaggaagtggctttggagct

SEQ ID NO: 2880 - RNA, 23 nt, synthetic construct
  source 1..23: mol_type = other RNA
  modified_base 1: mod_base = OTHER; note = 2'-O-methyluridine-3'-phosphorothioate 5'-(E)-Vinylphosphonate
  modified_base 2: mod_base = OTHER; note = 2'-deoxy-2'-fluorouridine-3'-phosphorothioate
  modified_base 3: mod_base = OTHER; note = 2'-O-methylguanosine-3'-phosphate
  modified_base 4: mod_base = OTHER; note = 2'-O-methyluridine-3'-phosphate
  modified_base 5: mod_base = OTHER; note = 2'-O-methylguanosine-3'-phosphate
  modified_base 6: mod_base = OTHER; note = 2'-deoxy-2'-fluoroguanosine-3'-phosphate
  modified_base 7: mod_base = OTHER; note = 2'-O-methylcytidine-3'-phosphate
  modified_base 8: mod_base = OTHER; note = 2'-deoxy-2'-fluorouridine-3'-phosphate
  modified_base 9: mod_base = OTHER; note = 2'-deoxy-2'-fluoroguanosine-3'-phosphate
  modified_base 10: mod_base = OTHER; note = 2'-O-methyluridine-3'-phosphate
  modified_base 11: mod_base = OTHER; note = 2'-O-methylguanosine-3'-phosphate
  modified_base 12: mod_base = OTHER; note = 2'-O-methylcytidine-3'-phosphate
  modified_base 13: mod_base = OTHER; note = 2'-O-methyluridine-3'-phosphate
  modified_base 14: mod_base = OTHER; note = 2'-deoxy-2'-fluorouridine-3'-phosphate
  modified_base 15: mod_base = OTHER; note = 2'-O-methylguanosine-3'-phosphate
  modified_base 16: mod_base = OTHER; note = 2'-deoxy-2'-fluorouridine-3'-phosphate
  modified_base 17: mod_base = OTHER; note = 2'-O-methylcytidine-3'-phosphate
  modified_base 18: mod_base = OTHER; note = 2'-O-methyladenosine-3'-phosphate
  modified_base 19: mod_base = OTHER; note = 2'-O-methylguanosine-3'-phosphate
  modified_base 20: mod_base = OTHER; note = 2'-O-methylcytidine-3'-phosphate
  modified_base 21: mod_base = OTHER; note = 2'-O-methyladenosine-3'-phosphorothioate
  modified_base 22: mod_base = OTHER; note = 2'-O-methylcytidine-3'-phosphorothioate
  modified_base 23: mod_base = OTHER; note = 2'-O-methyluridine
ttgtggctgtgcttgtcagcact

SEQ ID NO: 2881 - RNA, 23 nt, synthetic construct
  source 1..23: mol_type = other RNA
  modified_base 1: mod_base = OTHER; note = 2'-O-methyluridine-3'-phosphorothioate 5'-(E)-Vinylphosphonate
  modified_base 2: mod_base = OTHER; note = 2'-deoxy-2'-fluoroadenosine-3'-phosphorothioate
  modified_base 3: mod_base = OTHER; note = 2'-O-methylcytidine-3'-phosphate
  modified_base 4: mod_base = OTHER; note = 2'-O-methylguanosine-3'-phosphate
  modified_base 5: mod_base = OTHER; note = 2'-O-methyluridine-3'-phosphate
  modified_base 6: mod_base = OTHER; note = 2'-deoxy-2'-fluoroguanosine-3'-phosphate
  modified_base 7: mod_base = OTHER; note = 2'-O-methylguanosine-3'-phosphate
  modified_base 8: mod_base = OTHER; note = 2'-deoxy-2'-fluorouridine-3'-phosphate
  modified_base 9: mod_base = OTHER; note = 2'-deoxy-2'-fluorocytidine-3'-phosphate
  modified_base 10: mod_base = OTHER; note = 2'-O-methylcytidine-3'-phosphate
  modified_base 11: mod_base = OTHER; note = 2'-O-methyladenosine-3'-phosphate
  modified_base 12: mod_base = OTHER; note = 2'-O-methylcytidine-3'-phosphate
  modified_base 13: mod_base = OTHER; note = 2'-O-methyladenosine-3'-phosphate
  modified_base 14: mod_base = OTHER; note = 2'-deoxy-2'-fluoroguanosine-3'-phosphate
  modified_base 15: mod_base = OTHER; note = 2'-O-methylguanosine-3'-phosphate
  modified_base 16: mod_base = OTHER; note = 2'-deoxy-2'-fluoroguanosine-3'-phosphate
  modified_base 17: mod_base = OTHER; note = 2'-O-methyluridine-3'-phosphate
  modified_base 18: mod_base = OTHER; note = 2'-O-methylguanosine-3'-phosphate
  modified_base 19: mod_base = OTHER; note = 2'-O-methylguanosine-3'-phosphate
  modified_base 20: mod_base = OTHER; note = 2'-O-methyladenosine-3'-phosphate
  modified_base 21: mod_base = OTHER; note = 2'-O-methylguanosine-3'-phosphorothioate
  modified_base 22: mod_base = OTHER; note = 2'-O-methylguanosine-3'-phosphorothioate
  modified_base 23: mod_base = OTHER; note = 2'-O-methyladenosine
tacgtggtccacagggtggagga

SEQ ID NO: 2882 - RNA, 23 nt, synthetic construct
  source 1..23: mol_type = other RNA
  modified_base 1: mod_base = OTHER; note = 2'-O-methyluridine-3'-phosphorothioate 5'-(E)-Vinylphosphonate
  modified_base 2: mod_base = OTHER; note = 2'-deoxy-2'-fluoroguanosine-3'-phosphorothioate
  modified_base 3: mod_base = OTHER; note = 2'-O-methyluridine-3'-phosphate
  modified_base 4: mod_base = OTHER; note = 2'-O-methylguanosine-3'-phosphate
  modified_base 5: mod_base = OTHER; note = 2'-O-methyluridine-3'-phosphate
  modified_base 6: mod_base = OTHER; note = 2'-deoxy-2'-fluoroguanosine-3'-phosphate
  modified_base 7: mod_base = OTHER; note = 2'-O-methylguanosine-3'-phosphate
  modified_base 8: mod_base = OTHER; note = 2'-deoxy-2'-fluorouridine-3'-phosphate
  modified_base 9: mod_base = OTHER; note = 2'-deoxy-2'-fluoroguanosine-3'-phosphate
  modified_base 10: mod_base = OTHER; note = 2'-O-methylguanosine-3'-phosphate
  modified_base 11: mod_base = OTHER; note = 2'-O-methyluridine-3'-phosphate
  modified_base 12: mod_base = OTHER; note = 2'-O-methylcytidine-3'-phosphate
  modified_base 13: mod_base = OTHER; note = 2'-O-methyluridine-3'-phosphate
  modified_base 14: mod_base = OTHER; note = 2'-deoxy-2'-fluoroguanosine-3'-phosphate
  modified_base 15: mod_base = OTHER; note = 2'-O-methyluridine-3'-phosphate
  modified_base 16: mod_base = OTHER; note = 2'-deoxy-2'-fluoroguanosine-3'-phosphate
  modified_base 17: mod_base = OTHER; note = 2'-O-methylcytidine-3'-phosphate
  modified_base 18: mod_base = OTHER; note = 2'-O-methyluridine-3'-phosphate
  modified_base 19: mod_base = OTHER; note = 2'-O-methylguanosine-3'-phosphate
  modified_base 20: mod_base = OTHER; note = 2'-O-methylguanosine-3'-phosphate
  modified_base 21: mod_base = OTHER; note = 2'-O-methylguanosine-3'-phosphorothioate
  modified_base 22: mod_base = OTHER; note = 2'-O-methyladenosine-3'-phosphorothioate
  modified_base 23: mod_base = OTHER; note = 2'-O-methylcytidine
tgtgtggtggtctgtgctgggac

SEQ ID NO: 2883 - RNA, 23 nt, synthetic construct
  source 1..23: mol_type = other RNA
  modified_base 1: mod_base = OTHER; note = 2'-O-methyluridine-3'-phosphorothioate 5'-(E)-Vinylphosphonate
  modified_base 2: mod_base = OTHER; note = 2'-deoxy-2'-fluoroguanosine-3'-phosphorothioate
  modified_base 3: mod_base = OTHER; note = 2'-O-methylguanosine-3'-phosphate
  modified_base 4: mod_base = OTHER; note = 2'-O-methyladenosine-3'-phosphate
  modified_base 5: mod_base = OTHER; note = 2'-O-methyluridine-3'-phosphate
  modified_base 6: mod_base = OTHER; note = 2'-deoxy-2'-fluorouridine-3'-phosphate
  modified_base 7: mod_base = OTHER; note = 2'-O-methylguanosine-3'-phosphate
  modified_base 8: mod_base = OTHER; note = 2'-deoxy-2'-fluorouridine-3'-phosphate
  modified_base 9: mod_base = OTHER; note = 2'-deoxy-2'-fluoroguanosine-3'-phosphate
  modified_base 10: mod_base = OTHER; note = 2'-O-methylguanosine-3'-phosphate
  modified_base 11: mod_base = OTHER; note = 2'-O-methyladenosine-3'-phosphate
  modified_base 12: mod_base = OTHER; note = 2'-O-methylcytidine-3'-phosphate
  modified_base 13: mod_base = OTHER; note = 2'-O-methyladenosine-3'-phosphate
  modified_base 14: mod_base = OTHER; note = 2'-deoxy-2'-fluorouridine-3'-phosphate
  modified_base 15: mod_base = OTHER; note = 2'-O-methylguanosine-3'-phosphate
  modified_base 16: mod_base = OTHER; note = 2'-deoxy-2'-fluoroguanosine-3'-phosphate
  modified_base 17: mod_base = OTHER; note = 2'-O-methyluridine-3'-phosphate
  modified_base 18: mod_base = OTHER; note = 2'-O-methylguanosine-3'-phosphate
  modified_base 19: mod_base = OTHER; note = 2'-O-methylguanosine-3'-phosphate
  modified_base 20: mod_base = OTHER; note = 2'-O-methyladenosine-3'-phosphate
  modified_base 21: mod_base = OTHER; note = 2'-O-methylcytidine-3'-phosphorothioate
  modified_base 22: mod_base = OTHER; note = 2'-O-methyladenosine-3'-phosphorothioate
  modified_base 23: mod_base = OTHER; note = 2'-O-methyluridine
tggattgtggacatggtggacat

SEQ ID NO: 2884 - RNA, 23 nt, synthetic construct
  source 1..23: mol_type = other RNA
  modified_base 1: mod_base = OTHER; note = 2'-O-methyluridine-3'-phosphorothioate 5'-(E)-Vinylphosphonate
  modified_base 2: mod_base = OTHER; note = 2'-deoxy-2'-fluorouridine-3'-phosphorothioate
  modified_base 3: mod_base = OTHER; note = 2'-O-methylguanosine-3'-phosphate
  modified_base 4: mod_base = OTHER; note = 2'-O-methylguanosine-3'-phosphate
  modified_base 5: mod_base = OTHER; note = 2'-O-methyluridine-3'-phosphate
  modified_base 6: mod_base = OTHER; note = 2'-deoxy-2'-fluorocytidine-3'-phosphate
  modified_base 7: mod_base = OTHER; note = 2'-O-methyluridine-3'-phosphate
  modified_base 8: mod_base = OTHER; note = 2'-deoxy-2'-fluorocytidine-3'-phosphate
  modified_base 9: mod_base = OTHER; note = 2'-deoxy-2'-fluorouridine-3'-phosphate
  modified_base 10: mod_base = OTHER; note = 2'-O-methylguanosine-3'-phosphate
  modified_base 11: mod_base = OTHER; note = 2'-O-methylguanosine-3'-phosphate
  modified_base 12: mod_base = OTHER; note = 2'-O-methyladenosine-3'-phosphate
  modified_base 13: mod_base = OTHER; note = 2'-O-methylguanosine-3'-phosphate
  modified_base 14: mod_base = OTHER; note = 2'-deoxy-2'-fluorouridine-3'-phosphate
  modified_base 15: mod_base = OTHER; note = 2'-O-methyladenosine-3'-phosphate
  modified_base 16: mod_base = OTHER; note = 2'-deoxy-2'-fluoroguanosine-3'-phosphate
  modified_base 17: mod_base = OTHER; note = 2'-O-methyladenosine-3'-phosphate
  modified_base 18: mod_base = OTHER; note = 2'-O-methylguanosine-3'-phosphate
  modified_base 19: mod_base = OTHER; note = 2'-O-methylguanosine-3'-phosphate
  modified_base 20: mod_base = OTHER; note = 2'-O-methyladenosine-3'-phosphate
  modified_base 21: mod_base = OTHER; note = 2'-O-methylguanosine-3'-phosphorothioate
  modified_base 22: mod_base = OTHER; note = 2'-O-methylguanosine-3'-phosphorothioate
  modified_base 23: mod_base = OTHER; note = 2'-O-methyluridine
ttggtctctggagtagaggaggt

SEQ ID NO: 2885 - RNA, 23 nt, synthetic construct
  source 1..23: mol_type = other RNA
  modified_base 1: mod_base = OTHER; note = 2'-O-methyluridine-3'-phosphorothioate 5'-(E)-Vinylphosphonate
  modified_base 2: mod_base = OTHER; note = 2'-deoxy-2'-fluorouridine-3'-phosphorothioate
  modified_base 3: mod_base = OTHER; note = 2'-O-methylguanosine-3'-phosphate
  modified_base 4: mod_base = OTHER; note = 2'-O-methylguanosine-3'-phosphate
  modified_base 5: mod_base = OTHER; note = 2'-O-methyluridine-3'-phosphate
  modified_base 6: mod_base = OTHER; note = 2'-deoxy-2'-fluoroguanosine-3'-phosphate
  modified_base 7: mod_base = OTHER; note = 2'-O-methylguanosine-3'-phosphate
  modified_base 8: mod_base = OTHER; note = 2'-deoxy-2'-fluorouridine-3'-phosphate
  modified_base 9: mod_base = OTHER; note = 2'-deoxy-2'-fluorocytidine-3'-phosphate
  modified_base 10: mod_base = OTHER; note = 2'-O-methyladenosine-3'-phosphate
  modified_base 11: mod_base = OTHER; note = 2'-O-methylguanosine-3'-phosphate
  modified_base 12: mod_base = OTHER; note = 2'-O-methylcytidine-3'-phosphate
  modified_base 13: mod_base = OTHER; note = 2'-O-methyladenosine-3'-phosphate
  modified_base 14: mod_base = OTHER; note = 2'-deoxy-2'-fluorocytidine-3'-phosphate
  modified_base 15: mod_base = OTHER; note = 2'-O-methyluridine-3'-phosphate
  modified_base 16: mod_base = OTHER; note = 2'-deoxy-2'-fluoroguanosine-3'-phosphate
  modified_base 17: mod_base = OTHER; note = 2'-O-methyluridine-3'-phosphate
  modified_base 18: mod_base = OTHER; note = 2'-O-methylguanosine-3'-phosphate
  modified_base 19: mod_base = OTHER; note = 2'-O-methylguanosine-3'-phosphate
  modified_base 20: mod_base = OTHER; note = 2'-O-methyladenosine-3'-phosphate
  modified_base 21: mod_base = OTHER; note = 2'-O-methylguanosine-3'-phosphorothioate
  modified_base 22: mod_base = OTHER; note = 2'-O-methylguanosine-3'-phosphorothioate
  modified_base 23: mod_base = OTHER; note = 2'-O-methyluridine
ttggtggtcagcactgtggaggt

SEQ ID NO: 2886 - RNA, 23 nt, synthetic construct
  source 1..23: mol_type = other RNA
  modified_base 1: mod_base = OTHER; note = 2'-O-methyluridine-3'-phosphorothioate 5'-(E)-Vinylphosphonate
  modified_base 2: mod_base = OTHER; note = 2'-deoxy-2'-fluorouridine-3'-phosphorothioate
  modified_base 3: mod_base = OTHER; note = 2'-O-methylguanosine-3'-phosphate
  modified_base 4: mod_base = OTHER; note = 2'-O-methylguanosine-3'-phosphate
  modified_base 5: mod_base = OTHER; note = 2'-O-methylcytidine-3'-phosphate
  modified_base 6: mod_base = OTHER; note = 2'-deoxy-2'-fluorocytidine-3'-phosphate
  modified_base 7: mod_base = OTHER; note = 2'-O-methylguanosine-3'-phosphate
  modified_base 8: mod_base = OTHER; note = 2'-deoxy-2'-fluorouridine-3'-phosphate
  modified_base 9: mod_base = OTHER; note = 2'-deoxy-2'-fluoroguanosine-3'-phosphate
  modified_base 10: mod_base = OTHER; note = 2'-O-methylguanosine-3'-phosphate
  modified_base 11: mod_base = OTHER; note = 2'-O-methyladenosine-3'-phosphate
  modified_base 12: mod_base = OTHER; note = 2'-O-methyladenosine-3'-phosphate
  modified_base 13: mod_base = OTHER; note = 2'-O-methyluridine-3'-phosphate
  modified_base 14: mod_base = OTHER; note = 2'-deoxy-2'-fluorouridine-3'-phosphate
  modified_base 15: mod_base = OTHER; note = 2'-O-methylguanosine-3'-phosphate
  modified_base 16: mod_base = OTHER; note = 2'-deoxy-2'-fluoroguanosine-3'-phosphate
  modified_base 17: mod_base = OTHER; note = 2'-O-methyluridine-3'-phosphate
  modified_base 18: mod_base = OTHER; note = 2'-O-methylguanosine-3'-phosphate
  modified_base 19: mod_base = OTHER; note = 2'-O-methylguanosine-3'-phosphate
  modified_base 20: mod_base = OTHER; note = 2'-O-methylcytidine-3'-phosphate
  modified_base 21: mod_base = OTHER; note = 2'-O-methylcytidine-3'-phosphorothioate
  modified_base 22: mod_base = OTHER; note = 2'-O-methylcytidine-3'-phosphorothioate
  modified_base 23: mod_base = OTHER; note = 2'-O-methyluridine
ttggccgtggaattggtggccct

SEQ ID NO: 2887 - RNA, 23 nt, synthetic construct
  source 1..23: mol_type = other RNA
  modified_base 1: mod_base = OTHER; note = 2'-O-methyluridine-3'-phosphorothioate 5'-(E)-Vinylphosphonate
  modified_base 2: mod_base = OTHER; note = 2'-deoxy-2'-fluorouridine-3'-phosphorothioate
  modified_base 3: mod_base = OTHER; note = 2'-O-methylguanosine-3'-phosphate
  modified_base 4: mod_base = OTHER; note = 2'-O-methyluridine-3'-phosphate
  modified_base 5: mod_base = OTHER; note = 2'-O-methyladenosine-3'-phosphate
  modified_base 6: mod_base = OTHER; note = 2'-deoxy-2'-fluoroguanosine-3'-phosphate
  modified_base 7: mod_base = OTHER; note = 2'-O-methyluridine-3'-phosphate
  modified_base 8: mod_base = OTHER; note = 2'-deoxy-2'-fluoroguanosine-3'-phosphate
  modified_base 9: mod_base = OTHER; note = 2'-deoxy-2'-fluoroguanosine-3'-phosphate
  modified_base 10: mod_base = OTHER; note = 2'-O-methylcytidine-3'-phosphate
  modified_base 11: mod_base = OTHER; note = 2'-O-methyluridine-3'-phosphate
  modified_base 12: mod_base = OTHER; note = 2'-O-methylguanosine-3'-phosphate
  modified_base 13: mod_base = OTHER; note = 2'-O-methyluridine-3'-phosphate
  modified_base 14: mod_base = OTHER; note = 2'-deoxy-2'-fluorouridine-3'-phosphate
  modified_base 15: mod_base = OTHER; note = 2'-O-methylguanosine-3'-phosphate
  modified_base 16: mod_base = OTHER; note = 2'-deoxy-2'-fluorouridine-3'-phosphate
  modified_base 17: mod_base = OTHER; note = 2'-O-methylguanosine-3'-phosphate
  modified_base 18: mod_base = OTHER; note = 2'-O-methylguanosine-3'-phosphate
  modified_base 19: mod_base = OTHER; note = 2'-O-methyluridine-3'-phosphate
  modified_base 20: mod_base = OTHER; note = 2'-O-methylcytidine-3'-phosphate
  modified_base 21: mod_base = OTHER; note = 2'-O-methyladenosine-3'-phosphorothioate
  modified_base 22: mod_base = OTHER; note = 2'-O-methylguanosine-3'-phosphorothioate
  modified_base 23: mod_base = OTHER; note = 2'-O-methylcytidine
ttgtagtggctgttgtggtcagc

SEQ ID NO: 2888 - RNA, 23 nt, synthetic construct
  source 1..23: mol_type = other RNA
  modified_base 1: mod_base = OTHER; note = 2'-O-methyluridine-3'-phosphorothioate 5'-(E)-Vinylphosphonate
  modified_base 2: mod_base = OTHER; note = 2'-deoxy-2'-fluoroadenosine-3'-phosphorothioate
  modified_base 3: mod_base = OTHER; note = 2'-O-methylcytidine-3'-phosphate
  modified_base 4: mod_base = OTHER; note = 2'-O-methyladenosine-3'-phosphate
  modified_base 5: mod_base = OTHER; note = 2'-O-methylguanosine-3'-phosphate
  modified_base 6: mod_base = OTHER; note = 2'-deoxy-2'-fluoroguanosine-3'-phosphate
  modified_base 7: mod_base = OTHER; note = 2'-O-methylguanosine-3'-phosphate
  modified_base 8: mod_base = OTHER; note = 2'-deoxy-2'-fluorouridine-3'-phosphate
  modified_base 9: mod_base = OTHER; note = 2'-deoxy-2'-fluoroguanosine-3'-phosphate
  modified_base 10: mod_base = OTHER; note = 2'-O-methylguanosine-3'-phosphate
  modified_base 11: mod_base = OTHER; note = 2'-O-methylcytidine-3'-phosphate
  modified_base 12: mod_base = OTHER; note = 2'-O-methylcytidine-3'-phosphate
  modified_base 13: mod_base = OTHER; note = 2'-O-methylguanosine-3'-phosphate
  modified_base 14: mod_base = OTHER; note = 2'-deoxy-2'-fluorouridine-3'-phosphate
  modified_base 15: mod_base = OTHER; note = 2'-O-methylguanosine-3'-phosphate
  modified_base 16: mod_base = OTHER; note = 2'-deoxy-2'-fluoroguanosine-3'-phosphate
  modified_base 17: mod_base = OTHER; note = 2'-O-methyladenosine-3'-phosphate
  modified_base 18: mod_base = OTHER; note = 2'-O-methyluridine-3'-phosphate
  modified_base 19: mod_base = OTHER; note = 2'-O-methylcytidine-3'-phosphate
  modified_base 20: mod_base = OTHER; note = 2'-O-methylcytidine-3'-phosphate
  modified_base 21: mod_base = OTHER; note = 2'-O-methyladenosine-3'-phosphorothioate
  modified_base 22: mod_base = OTHER; note = 2'-O-methylguanosine-3'-phosphorothioate
  modified_base 23: mod_base = OTHER; note = 2'-O-methyluridine
tacagggtggccgtggatccagt

SEQ ID NO: 2889 - RNA, 23 nt, synthetic construct
  source 1..23: mol_type = other RNA
  modified_base 1: mod_base = OTHER; note = 2'-O-methyluridine-3'-phosphorothioate 5'-(E)-Vinylphosphonate
  modified_base 2: mod_base = OTHER; note = 2'-deoxy-2'-fluorouridine-3'-phosphorothioate
  modified_base 3: mod_base = OTHER; note = 2'-O-methylcytidine-3'-phosphate
  modified_base 4: mod_base = OTHER; note = 2'-O-methyladenosine-3'-phosphate
  modified_base 5: mod_base = OTHER; note = 2'-O-methylcytidine-3'-phosphate
  modified_base 6: mod_base = OTHER; note = 2'-deoxy-2'-fluoroguanosine-3'-phosphate
  modified_base 7: mod_base = OTHER; note = 2'-O-methylguanosine-3'-phosphate
  modified_base 8: mod_base = OTHER; note = 2'-deoxy-2'-fluorouridine-3'-phosphate
  modified_base 9: mod_base = OTHER; note = 2'-deoxy-2'-fluoroguanosine-3'-phosphate
  modified_base 10: mod_base = OTHER; note = 2'-O-methylguanosine-3'-phosphate
  modified_base 11: mod_base = OTHER; note = 2'-O-methylcytidine-3'-phosphate
  modified_base 12: mod_base = OTHER; note = 2'-O-methyluridine-3'-phosphate
  modified_base 13: mod_base = OTHER; note = 2'-O-methyladenosine-3'-phosphate
  modified_base 14: mod_base = OTHER; note = 2'-deoxy-2'-fluorouridine-3'-phosphate
  modified_base 15: mod_base = OTHER; note = 2'-O-methyladenosine-3'-phosphate
  modified_base 16: mod_base = OTHER; note = 2'-deoxy-2'-fluoroguanosine-3'-phosphate
  modified_base 17: mod_base = OTHER; note = 2'-O-methyluridine-3'-phosphate
  modified_base 18: mod_base = OTHER; note = 2'-O-methylguanosine-3'-phosphate
  modified_base 19: mod_base = OTHER; note = 2'-O-methylcytidine-3'-phosphate
  modified_base 20: mod_base = OTHER; note = 2'-O-methyluridine-3'-phosphate
  modified_base 21: mod_base = OTHER; note = 2'-O-methylcytidine-3'-phosphorothioate
  modified_base 22: mod_base = OTHER; note = 2'-O-methylguanosine-3'-phosphorothioate
  modified_base 23: mod_base = OTHER; note = 2'-O-methylguanosine
ttcacggtggctatagtgctcgg

SEQ ID NO: 2890 - RNA, 23 nt, synthetic construct
  source 1..23: mol_type = other RNA
  modified_base 1: mod_base = OTHER; note = 2'-O-methyluridine-3'-phosphorothioate 5'-(E)-Vinylphosphonate
  modified_base 2: mod_base = OTHER; note = 2'-deoxy-2'-fluoroguanosine-3'-phosphorothioate
  modified_base 3: mod_base = OTHER; note = 2'-O-methyluridine-3'-phosphate
  modified_base 4: mod_base = OTHER; note = 2'-O-methylguanosine-3'-phosphate
  modified_base 5: mod_base = OTHER; note = 2'-O-methyladenosine-3'-phosphate
  modified_base 6: mod_base = OTHER; note = 2'-deoxy-2'-fluoroguanosine-3'-phosphate
  modified_base 7: mod_base = OTHER; note = 2'-O-methylcytidine-3'-phosphate
  modified_base 8: mod_base = OTHER; note = 2'-deoxy-2'-fluorouridine-3'-phosphate
  modified_base 9: mod_base = OTHER; note = 2'-deoxy-2'-fluoroguanosine-3'-phosphate
  modified_base 10: mod_base = OTHER; note = 2'-O-methyluridine-3'-phosphate
  modified_base 11: mod_base = OTHER; note = 2'-O-methyluridine-3'-phosphate
  modified_base 12: mod_base = OTHER; note = 2'-O-methylcytidine-3'-phosphate
  modified_base 13: mod_base = OTHER; note = 2'-O-methylcytidine-3'-phosphate
  modified_base 14: mod_base = OTHER; note = 2'-deoxy-2'-fluorocytidine-3'-phosphate
  modified_base 15: mod_base = OTHER; note = 2'-O-methyladenosine-3'-phosphate
  modified_base 16: mod_base = OTHER; note = 2'-deoxy-2'-fluoroguanosine-3'-phosphate
  modified_base 17: mod_base = OTHER; note = 2'-O-methyladenosine-3'-phosphate
  modified_base 18: mod_base = OTHER; note = 2'-O-methylguanosine-3'-phosphate
  modified_base 19: mod_base = OTHER; note = 2'-O-methyluridine-3'-phosphate
  modified_base 20: mod_base = OTHER; note = 2'-O-methylguanosine-3'-phosphate
  modified_base 21: mod_base = OTHER; note = 2'-O-methylguanosine-3'-phosphorothioate
  modified_base 22: mod_base = OTHER; note = 2'-O-methyladenosine-3'-phosphorothioate
  modified_base 23: mod_base = OTHER; note = 2'-O-methylguanosine
tgtgagctgttcccagagtggag

SEQ ID NO: 2891 - RNA, 23 nt, synthetic construct
  source 1..23: mol_type = other RNA
  modified_base 1: mod_base = OTHER; note = 2'-O-methyluridine-3'-phosphorothioate 5'-(E)-Vinylphosphonate
  modified_base 2: mod_base = OTHER; note = 2'-deoxy-2'-fluorocytidine-3'-phosphorothioate
  modified_base 3: mod_base = OTHER; note = 2'-O-methyluridine-3'-phosphate
  modified_base 4: mod_base = OTHER; note = 2'-O-methylguanosine-3'-phosphate
  modified_base 5: mod_base = OTHER; note = 2'-O-methyluridine-3'-phosphate
  modified_base 6: mod_base = OTHER; note = 2'-deoxy-2'-fluoroguanosine-3'-phosphate
  modified_base 7: mod_base = OTHER; note = 2'-O-methylguanosine-3'-phosphate
  modified_base 8: mod_base = OTHER; note = 2'-deoxy-2'-fluoroguanosine-3'-phosphate
  modified_base 9: mod_base = OTHER; note = 2'-deoxy-2'-fluorocytidine-3'-phosphate
  modified_base 10: mod_base = OTHER; note = 2'-O-methyladenosine-3'-phosphate
  modified_base 11: mod_base = OTHER; note = 2'-O-methyluridine-3'-phosphate
  modified_base 12: mod_base = OTHER; note = 2'-O-methyladenosine-3'-phosphate
  modified_base 13: mod_base = OTHER; note = 2'-O-methylguanosine-3'-phosphate
  modified_base 14: mod_base = OTHER; note = 2'-deoxy-2'-fluorouridine-3'-phosphate
  modified_base 15: mod_base = OTHER; note = 2'-O-methylguanosine-3'-phosphate
  modified_base 16: mod_base = OTHER; note = 2'-deoxy-2'-fluoroguanosine-3'-phosphate
  modified_base 17: mod_base = OTHER; note = 2'-O-methylcytidine-3'-phosphate
  modified_base 18: mod_base = OTHER; note = 2'-O-methylcytidine-3'-phosphate
  modified_base 19: mod_base = OTHER; note = 2'-O-methyladenosine-3'-phosphate
  modified_base 20: mod_base = OTHER; note = 2'-O-methyluridine-3'-phosphate
  modified_base 21: mod_base = OTHER; note = 2'-O-methylguanosine-3'-phosphorothioate
  modified_base 22: mod_base = OTHER; note = 2'-O-methylguanosine-3'-phosphorothioate
  modified_base 23: mod_base = OTHER; note = 2'-O-methyluridine
tctgtgggcatagtggccatggt

SEQ ID NO: 2892 - RNA, 23 nt, synthetic construct
  source 1..23: mol_type = other RNA
  modified_base 1: mod_base = OTHER; note = 2'-O-methyluridine-3'-phosphorothioate 5'-(E)-Vinylphosphonate
  modified_base 2: mod_base = OTHER; note = 2'-deoxy-2'-fluoroadenosine-3'-phosphorothioate
  modified_base 3: mod_base = OTHER; note = 2'-O-methylguanosine-3'-phosphate
  modified_base 4: mod_base = OTHER; note = 2'-O-methylcytidine-3'-phosphate
  modified_base 5: mod_base = OTHER; note = 2'-O-methyluridine-3'-phosphate
  modified_base 6: mod_base = OTHER; note = 2'-deoxy-2'-fluoroguanosine-3'-phosphate
  modified_base 7: mod_base = OTHER; note = 2'-O-methylguanosine-3'-phosphate
  modified_base 8: mod_base = OTHER; note = 2'-deoxy-2'-fluoroguanosine-3'-phosphate
  modified_base 9: mod_base = OTHER; note = 2'-deoxy-2'-fluoroadenosine-3'-phosphate
  modified_base 10: mod_base = OTHER; note = 2'-O-methyladenosine-3'-phosphate
  modified_base 11: mod_base = OTHER; note = 2'-O-methylcytidine-3'-phosphate
  modified_base 12: mod_base = OTHER; note = 2'-O-methylcytidine-3'-phosphate
  modified_base 13: mod_base = OTHER; note = 2'-O-methylguanosine-3'-phosphate
  modified_base 14: mod_base = OTHER; note = 2'-deoxy-2'-fluorouridine-3'-phosphate
  modified_base 15: mod_base = OTHER; note = 2'-O-methylguanosine-3'-phosphate
  modified_base 16: mod_base = OTHER; note = 2'-deoxy-2'-fluoroguanosine-3'-phosphate
  modified_base 17: mod_base = OTHER; note = 2'-O-methyladenosine-3'-phosphate
  modified_base 18: mod_base = OTHER; note = 2'-O-methylguanosine-3'-phosphate
  modified_base 19: mod_base = OTHER; note = 2'-O-methylguanosine-3'-phosphate
  modified_base 20: mod_base = OTHER; note = 2'-O-methylcytidine-3'-phosphate
  modified_base 21: mod_base = OTHER; note = 2'-O-methyladenosine-3'-phosphorothioate
  modified_base 22: mod_base = OTHER; note = 2'-O-methylguanosine-3'-phosphorothioate
  modified_base 23: mod_base = OTHER; note = 2'-O-methyluridine
tagctgggaaccgtggaggcagt

SEQ ID NO: 2893 - RNA, 23 nt, synthetic construct
  source 1..23: mol_type = other RNA
  modified_base 1: mod_base = OTHER; note = 2'-O-methyluridine-3'-phosphorothioate 5'-(E)-Vinylphosphonate
  modified_base 2: mod_base = OTHER; note = 2'-deoxy-2'-fluorouridine-3'-phosphorothioate
  modified_base 3: mod_base = OTHER; note = 2'-O-methylguanosine-3'-phosphate
  modified_base 4: mod_base = OTHER; note = 2'-O-methylguanosine-3'-phosphate
  modified_base 5: mod_base = OTHER; note = 2'-O-methyladenosine-3'-phosphate
  modified_base 6: mod_base = OTHER; note = 2'-deoxy-2'-fluorocytidine-3'-phosphate
  modified_base 7: mod_base = OTHER; note = 2'-O-methyladenosine-3'-phosphate
  modified_base 8: mod_base = OTHER; note = 2'-deoxy-2'-fluorocytidine-3'-phosphate
  modified_base 9: mod_base = OTHER; note = 2'-deoxy-2'-fluoroguanosine-3'-phosphate
  modified_base 10: mod_base = OTHER; note = 2'-O-methylcytidine-3'-phosphate
  modified_base 11: mod_base = OTHER; note = 2'-O-methyluridine-3'-phosphate
  modified_base 12: mod_base = OTHER; note = 2'-O-methylguanosine-3'-phosphate
  modified_base 13: mod_base = OTHER; note = 2'-O-methyladenosine-3'-phosphate
  modified_base 14: mod_base = OTHER; note = 2'-deoxy-2'-fluoroadenosine-3'-phosphate
  modified_base 15: mod_base = OTHER; note = 2'-O-methylguanosine-3'-phosphate
  modified_base 16: mod_base = OTHER; note = 2'-deoxy-2'-fluoroguanosine-3'-phosphate
  modified_base 17: mod_base = OTHER; note = 2'-O-methyluridine-3'-phosphate
  modified_base 18: mod_base = OTHER; note = 2'-O-methyluridine-3'-phosphate
  modified_base 19: mod_base = OTHER; note = 2'-O-methylguanosine-3'-phosphate
  modified_base 20: mod_base = OTHER; note = 2'-O-methylguanosine-3'-phosphate
  modified_base 21: mod_base = OTHER; note = 2'-O-methylcytidine-3'-phosphorothioate
  modified_base 22: mod_base = OTHER; note = 2'-O-methyladenosine-3'-phosphorothioate
  modified_base 23: mod_base = OTHER; note = 2'-O-methylguanosine
ttggacacgctgaaggttggcag

SEQ ID NO: 2894 - RNA, 23 nt, synthetic construct
  source 1..23: mol_type = other RNA
  modified_base 1: mod_base = OTHER; note = 2'-O-methyluridine-3'-phosphorothioate 5'-(E)-Vinylphosphonate
  modified_base 2: mod_base = OTHER; note = 2'-deoxy-2'-fluoroguanosine-3'-phosphorothioate
  modified_base 3: mod_base = OTHER; note = 2'-O-methyluridine-3'-phosphate
  modified_base 4: mod_base = OTHER; note = 2'-O-methylguanosine-3'-phosphate
  modified_base 5: mod_base = OTHER; note = 2'-O-methylguanosine-3'-phosphate
  modified_base 6: mod_base = OTHER; note = 2'-deoxy-2'-fluorouridine-3'-phosphate
  modified_base 7: mod_base = OTHER; note = 2'-O-methylguanosine-3'-phosphate
  modified_base 8: mod_base = OTHER; note = 2'-deoxy-2'-fluoroadenosine-3'-phosphate
  modified_base 9: mod_base = OTHER; note = 2'-deoxy-2'-fluoroguanosine-3'-phosphate
  modified_base 10: mod_base = OTHER; note = 2'-O-methylguanosine-3'-phosphate
  modified_base 11: mod_base = OTHER; note = 2'-O-methyladenosine-3'-phosphate
  modified_base 12: mod_base = OTHER; note = 2'-O-methylcytidine-3'-phosphate
  modified_base 13: mod_base = OTHER; note = 2'-O-methyluridine-3'-phosphate
  modified_base 14: mod_base = OTHER; note = 2'-deoxy-2'-fluoroguanosine-3'-phosphate
  modified_base 15: mod_base = OTHER; note = 2'-O-methyladenosine-3'-phosphate
  modified_base 16: mod_base = OTHER; note = 2'-deoxy-2'-fluoroguanosine-3'-phosphate
  modified_base 17: mod_base = OTHER; note = 2'-O-methylguanosine-3'-phosphate
  modified_base 18: mod_base = OTHER; note = 2'-O-methyladenosine-3'-phosphate
  modified_base 19: mod_base = OTHER; note = 2'-O-methylguanosine-3'-phosphate
  modified_base 20: mod_base = OTHER; note = 2'-O-methylguanosine-3'-phosphate
  modified_base 21: mod_base = OTHER; note = 2'-O-methyladenosine-3'-phosphorothioate
  modified_base 22: mod_base = OTHER; note = 2'-O-methylcytidine-3'-phosphorothioate
  modified_base 23: mod_base = OTHER; note = 2'-O-methyladenosine
tgtggtgaggactgaggaggaca

SEQ ID NO: 2895 - RNA, 23 nt, synthetic construct
  source 1..23: mol_type = other RNA
  modified_base 1: mod_base = OTHER; note = 2'-O-methyluridine-3'-phosphorothioate 5'-(E)-Vinylphosphonate
  modified_base 2: mod_base = OTHER; note = 2'-deoxy-2'-fluorocytidine-3'-phosphorothioate
  modified_base 3: mod_base = OTHER; note = 2'-O-methyladenosine-3'-phosphate
  modified_base 4: mod_base = OTHER; note = 2'-O-methylguanosine-3'-phosphate
  modified_base 5: mod_base = OTHER; note = 2'-O-methylguanosine-3'-phosphate
  modified_base 6: mod_base = OTHER; note = 2'-deoxy-2'-fluoroguanosine-3'-phosphate
  modified_base 7: mod_base = OTHER; note = 2'-O-methyladenosine-3'-phosphate
  modified_base 8: mod_base = OTHER; note = 2'-deoxy-2'-fluoroguanosine-3'-phosphate
  modified_base 9: mod_base = OTHER; note = 2'-deoxy-2'-fluorouridine-3'-phosphate
  modified_base 10: mod_base = OTHER; note = 2'-O-methyladenosine-3'-phosphate
  modified_base 11: mod_base = OTHER; note = 2'-O-methylguanosine-3'-phosphate
  modified_base 12: mod_base = OTHER; note = 2'-O-methyladenosine-3'-phosphate
  modified_base 13: mod_base = OTHER; note = 2'-O-methylguanosine-3'-phosphate
  modified_base 14: mod_base = OTHER; note = 2'-deoxy-2'-fluoroadenosine-3'-phosphate
  modified_base 15: mod_base = OTHER; note = 2'-O-methyladenosine-3'-phosphate
  modified_base 16: mod_base = OTHER; note = 2'-deoxy-2'-fluoroguanosine-3'-phosphate
  modified_base 17: mod_base = OTHER; note = 2'-O-methyluridine-3'-phosphate
  modified_base 18: mod_base = OTHER; note = 2'-O-methylguanosine-3'-phosphate
  modified_base 19: mod_base = OTHER; note = 2'-O-methylguanosine-3'-phosphate
  modified_base 20: mod_base = OTHER; note = 2'-O-methylguanosine-3'-phosphate
  modified_base 21: mod_base = OTHER; note = 2'-O-methyladenosine-3'-phosphorothioate
  modified_base 22: mod_base = OTHER; note = 2'-O-methylguanosine-3'-phosphorothioate
  modified_base 23: mod_base = OTHER; note = 2'-O-methylcytidine
tcagggagtagagaagtgggagc

SEQ ID NO: 2896 - RNA, 23 nt, synthetic construct
  source 1..23: mol_type = other RNA
  modified_base 1: mod_base = OTHER; note = 2'-O-methyluridine-3'-phosphorothioate 5'-(E)-Vinylphosphonate
  modified_base 2: mod_base = OTHER; note = 2'-deoxy-2'-fluoroguanosine-3'-phosphorothioate
  modified_base 3: mod_base = OTHER; note = 2'-O-methyladenosine-3'-phosphate
  modified_base 4: mod_base = OTHER; note = 2'-O-methylguanosine-3'-phosphate
  modified_base 5: mod_base = OTHER; note = 2'-O-methyladenosine-3'-phosphate
  modified_base 6: mod_base = OTHER; note = 2'-deoxy-2'-fluoroadenosine-3'-phosphate
  modified_base 7: mod_base = OTHER; note = 2'-O-methyladenosine-3'-phosphate
  modified_base 8: mod_base = OTHER; note = 2'-deoxy-2'-fluoroadenosine-3'-phosphate
  modified_base 9: mod_base = OTHER; note = 2'-deoxy-2'-fluoroadenosine-3'-phosphate
  modified_base 10: mod_base = OTHER; note = 2'-O-methylcytidine-3'-phosphate
  modified_base 11: mod_base = OTHER; note = 2'-O-methyluridine-3'-phosphate
  modified_base 12: mod_base = OTHER; note = 2'-O-methylguanosine-3'-phosphate
  modified_base 13: mod_base = OTHER; note = 2'-O-methyluridine-3'-phosphate
  modified_base 14: mod_base = OTHER; note = 2'-deoxy-2'-fluorocytidine-3'-phosphate
  modified_base 15: mod_base = OTHER; note = 2'-O-methylcytidine-3'-phosphate
  modified_base 16: mod_base = OTHER; note = 2'-deoxy-2'-fluoroadenosine-3'-phosphate
  modified_base 17: mod_base = OTHER; note = 2'-O-methyladenosine-3'-phosphate
  modified_base 18: mod_base = OTHER; note = 2'-O-methyladenosine-3'-phosphate
  modified_base 19: mod_base = OTHER; note = 2'-O-methyluridine-3'-phosphate
  modified_base 20: mod_base = OTHER; note = 2'-O-methylguanosine-3'-phosphate
  modified_base 21: mod_base = OTHER; note = 2'-O-methylcytidine-3'-phosphorothioate
  modified_base 22: mod_base = OTHER; note = 2'-O-methylcytidine-3'-phosphorothioate
  modified_base 23: mod_base = OTHER; note = 2'-O-methylcytidine
tgagaaaaactgtccaaatgccc

(The sequence listing continues in the following parts.)

1. A double stranded ribonucleic acid (dsRNA) agent for inhibiting expression of Mucin 5B (MUC5B) in a cell,
(a) wherein the dsRNA agent comprises a sense strand and an antisense strand forming a double stranded region,
wherein the sense strand comprises a nucleotide sequence comprising at least 15 contiguous nucleotides, with 0, 1, 2, or 3 mismatches, of a portion of the nucleotide sequence of SEQ ID NO:1, or a nucleotide sequence having at least 90% nucleotide sequence identity to a portion of the nucleotide sequence of SEQ ID NO:1, and the antisense strand comprises a nucleotide sequence comprising at least 15 contiguous nucleotides, with 0, 1, 2, or 3 mismatches, of the corresponding portion of the nucleotide sequence of SEQ ID NO:6, or a nucleotide sequence having at least 90% nucleotide sequence identity to a portion of the nucleotide sequence of SEQ ID NO:6; and
wherein the sense strand or the antisense strand is conjugated to one or more lipophilic moieties; or
(b) wherein the antisense strand comprises a region complementary to part of an mRNA encoding a MUC5B gene (SEQ ID NO:1), wherein each strand independently is 14 to 30 nucleotides in length; and wherein the sense strand or the antisense strand is conjugated to one or more lipophilic moieties; or
(c) wherein the antisense strand comprises at least 15 contiguous nucleotides differing by no more than 3 nucleotides from any one of the antisense nucleotide sequences in any one of Tables 2-7, 9, and 10, wherein each strand independently is 14 to 30 nucleotides in length; and wherein the sense strand or the antisense strand is conjugated to one or more lipophilic moieties.

2. (canceled)

3. (canceled)

4. The dsRNA agent of claim 1, wherein the sense strand or the antisense strand is a sense strand or an antisense strand selected from the group consisting of any of the sense strands and antisense strands in any one of Tables 2-7, 9, and 10.

5.-10. (canceled)

11. The dsRNA agent of claim 1, wherein the dsRNA agent comprises at least one modified nucleotide.

12. (canceled)

13. (canceled)

14. The dsRNA agent of claim 11, wherein at least one of the modified nucleotides is selected from the group a deoxy-nucleotide, a 3′-terminal deoxy-thymine (dT) nucleotide, a 2′-O-methyl modified nucleotide, a 2′-fluoro modified nucleotide, a 2′-deoxy-modified nucleotide, a locked nucleotide, an unlocked nucleotide, a conformationally restricted nucleotide, a constrained ethyl nucleotide, an abasic nucleotide, a 2′-amino-modified nucleotide, a 2′-O-allyl-modified nucleotide, 2′-C-alkyl-modified nucleotide, a 2′-methoxyethyl modified nucleotide, a 2′-O-alkyl-modified nucleotide, a morpholino nucleotide, a phosphoramidate, a non-natural base comprising nucleotide, a tetrahydropyran modified nucleotide, a 1,5-anhydrohexitol modified nucleotide, a cyclohexenyl modified nucleotide, a nucleotide comprising a 5′-phosphorothioate group, a nucleotide comprising a 5′-methylphosphonate group, a nucleotide comprising a 5′ phosphate or 5′ phosphate mimic, a nucleotide comprising vinyl phosphonate, a nucleotide comprising adenosine-glycol nucleic acid (GNA), a nucleotide comprising thymidine-glycol nucleic acid (GNA)S-Isomer, a nucleotide comprising 2-hydroxymethyl-tetrahydrofurane-5-phosphate, a nucleotide comprising 2′-deoxythymidine-3′phosphate, a nucleotide comprising 2′-deoxyguanosine-3′-phosphate, a 2′-O hexadecyl nucleotide, a nucleotide comprising a 2′-phosphate, a cytidine-2′-phosphate nucleotide, a guanosine-2′-phosphate nucleotide, a 2′-O-hexadecyl-cytidine-3′-phosphate nucleotide, a 2′-O-hexadecyl-adenosine-3′-phosphate nucleotide, a 2′-O-hexadecyl-guanosine-3′-phosphate nucleotide, a 2′-O-hexadecyl-uridine-3′-phosphate nucleotide, a a 5′-vinyl phosphonate (VP), a 2′-deoxyadenosine-3′-phosphate nucleotide, a 2′-deoxycytidine-3′-phosphate nucleotide, a 2′-deoxyguanosine-3′-phosphate nucleotide, a 2′-deoxythymidine-3′-phosphate nucleotide, a 2′-deoxyuridine nucleotide, and a terminal nucleotide linked to a cholesteryl derivative and a dodecanoic acid bisdecylamide group; and combinations thereof.

15.-17. (canceled)

18. The dsRNA agent of claim 14, further comprising at least one phosphorothioate internucleotide linkage.

19. (canceled)

20. The dsRNA agent of claim 1, wherein each strand is no more than 30 nucleotides in length.

21.-31. (canceled)

32. The dsRNA agent of claim 1, wherein one or more lipophilic moieties are conjugated to one or more internal positions on at least one strand.

33.-41. (canceled)

42. The dsRNA agent of claim 1, wherein the one or more lipophilic moieties are conjugated to one or more of the internal positions selected from the group consisting of positions 4-8 and 13-18 on the sense strand, and positions 6-10 and on the antisense strand, counting from the 5′-end of each strand.

43.-51. (canceled)

52. The dsRNA agent of claim 1, wherein the lipophilic moiety contains a saturated or unsaturated C4-C30 hydrocarbon chain, and an optional functional group selected from the group consisting of hydroxyl, amine, carboxylic acid, sulfonate, phosphate, thiol, azide, and alkyne.

53.-68. (canceled)

69. The dsRNA agent of claim 1, further comprising a phosphate or phosphate mimic at the 5′-end of the antisense strand.

70.-72. (canceled)

73. An isolated cell containing the dsRNA agent of claim 1.

74. A pharmaceutical composition for inhibiting expression of a MUC5B gene, comprising the dsRNA agent of claim 1.

75. (canceled)

76. A device for oral inhalative administration comprising the dsRNA agent of claim 1.

77. (canceled)

78. An in vitro method of inhibiting expression of a MUC5B gene in a cell, the method comprising:
(a) contacting the cell with the dsRNA agent of claim 1; and
(b) maintaining the cell produced in step (a) for a time sufficient to obtain degradation of the MUC5B gene, thereby inhibiting expression of the MUC5B gene in the cell.

79. (canceled)

80. (canceled)

81. The method of claim 76, wherein the expression of the MUC5B gene is inhibited by at least 50%.

82. A method of treating a subject having a Mucin 5B- (MUC5B-) associated disease or a subject at risk of developing a MUC5B-associated disease, comprising administering to the subject a therapeutically effective amount of the dsRNA agent of claim 1, thereby treating said subject.

83. The method of claim 82, wherein the subject is a human.

84. The method of claim 82, wherein the MUC5B-associated disease is pulmonary fibrosis, cystic fibrosis, or chronic obstructive pulmonary disease (COPD).

85. (canceled)

86. (canceled)

87. The method of claim 82, wherein the dsRNA agent is administered to the subject at a dose of about 0.01 mg/kg to about 50 mg/kg.

88.-90. (canceled)

91. The method of claim 82, further comprising administering to the subject an additional agent or a therapy suitable for treatment or prevention of a MUC5B-associated disorder.

92.-95. (canceled)
